United States Patent Application Publication US 2024/0327476 A1 - sequence listing, part 66

SEQ ID NO: 125190 - DNA, 1776 bp, synthetic construct
  misc_feature 1..1776: note = Description of Artificial Sequence: Synthetic coding sequence
  source 1..1776: mol_type = other DNA
atgagtctggagaacgaagataagagggctcgcaccaggtccaaagcgctgcggggccctccagaaaccaccgccgccgatctctcctgccccacacctggttgtaccggttcaggccacgttagagggaaatactctagacatcgatcacttcagtcatgtcccctggcgaaaaaacgtaagctggagggcgcagaggcagagcacctggtgtctaagagaaaatcacaccccctgaagcttgcactggatgaggggtatggtgtggatagcgacggctctgaggacactgaggtcaaggatgcttccgtgtctgacgagtcagagggaactctggagggagccgaggctgaaaccagcgggcaggatgagatccacaggcccgaaaccgccgaggacccttccagggctgaaaagcgagagatcaaatgccctacccctgggtgtgatggcacgggacacgtcacaggattgtatccccatcacaggagtttgagtggttgcccccataaggacaggatcccacccgagatacttgccatgcacgaaaatgtgttgaagtgccccactcctggatgtaccggccagggtcatgttaatagtaaccggaatactcatcgctccctgtcaggatgcccaatcgccgccgccgaaaagctagcaaagtcacacgaaaaacagcagccacaaacaggggacccctcaaaaagctcatccaattcagacaggattctgaggcccatgtgcttcgtcaaacagctggaagttcccccctatggctcgtacaggccgaatgtggcccccgccacaccacgagccaacctcgctaaggagctggaaaagtttagcaaagttacctttgactacgcctcctttgacgcccaggtctttggaaagcgtatgctcgctcctaaaatccagaccagtgaaaccagtccaaaggcattccagtgctttgattattcccaggacgccgaagcggctcacatggccgccaccgcaatccttaatctcagcacaaggtgctgggagatgcccgaaaaccttagcacaaagccccaagacctgccgagcaagtcagtggacatcgaggtggatgaaaatggaacactggacctgagtatgcacaaacacaggaagcgtgaaaacgcttttccgtcttcatcatcttgcagttctagtcctggtgtcaagagccctgacgccagtcagcggcactcatccaccagcgcccccagcagctccatgacctcaccccagagttcccaagcttccagacaggatgagtgggatcggccgctggactataccaagccatcgagattgagggaagaggagcccgaagaatctgagcccgcggctcactccttcgcgtctagcgaagctgacgaccaagaagtgtcagaggagaatttcgaggagcgcaagtatcccggggaagtgactttaactaattttaagttgaagttcctgtccaaggacatcaagaaagaactgctcacgtgtccgacacctgggtgtgacggtagtggtcatataacagggaattacgcctcccatcgacggtgccccacccctggctgcgatgggagcggccatataacaggcaactacgcatcacatcgttcactgtctgggtgtccgcgggcgaaaaaatctggagtgaaggtcgcacctacgaaagacgacaaagaggaccctgagctaatgaagtatgttgggccttgttggttgttccattgcatcgccgaactcagattctcctgcgtgctgtag

SEQ ID NO: 125191 - DNA, 3447 bp, synthetic construct
  misc_feature 1..3447: note = Description of Artificial Sequence: Synthetic coding sequence
  source 1..3447: mol_type = other DNA
atgtccctggaaaatgaggacaagcgggctcgcacaagatccaaagctttgagagggccacctgagactacagcagcagacctgtcatgtcccactcctgggtgtactggaagcggccacgtgcggggcaagtactcacgtcatcgctccctgcaatcgtgtccgctggccaaaaaacgcaagctggagggagctgaagccgaacatctggtgagtaagcgaaaatcccaccctctgaaactagccctggatgagggctacggtgttgattcagatggctctgaggacaccgaggtgaaagacgcaagcgtttcagacgagagcgagggcacactcgagggcgccgaagccgagacatccggccaggacgagattcatagaccagaaactgctgaaggtaggtctccagtgaaatcacactttggcagcaatccaatcggcagcgccacggcatcttctaaggggtcttattcctcataccaaggtataatagccacttctctcctgaacttagggcagatcgccgaggaaaccctcgtggaagaggacctcggccaggccgcaaagccaggacctggtattgtccatctgttgcaggaggccgcggaaggagcggcgagcgaggagggagagaaggggctattcattcagccagaagatgccgaggaggtggtcgaggtaaccacagaaaggagccaggacctctgcccccagtcgctggaggatgctgcaagtgaggaatctagcaaacagaagggtatcctgagccacgaagaagaagatgaagaggaagaggaggaagaagaggaggaggaggaggacgaggaggaagaagaagaggaggaagaggaggaggaggaagaggaagaagaagaggaagaggaagaagaggaggaagaggaggaggaggaggaagaggcggccccagatgtgattttccaggaagatacatctcacacctcggcccagaaggcccctgagctgaggggacctgaatcaccttctcccaaaccggaatacagcgtgattgtggaggtacggtctgatgatgacaaggatgaagacacacattctagaaagtccacagttacagatgaaagcgagatgcaggatatgatgaccaggggcaacctgggtctgctggagcaagctatagccttaaaggccgaacaggtgcgcaccgtgtgcgaaccaggctgtcctcctgctgagcaaagtcagctaggtctgggtgagcctggaaaggccgctaagccactcgatacagtcagaaagagttattactcgaaggatccctccagggccgaaaaacgggagattaagtgtccaactcccggttgtgatgggaccggccacgtgaccggactgtatccccatcatcggtctttatctggctgtccccataaggatcgaattcctccagagattttggccatgcatgaaaacgttctgaaatgtccaacccccggatgtacaggtcagggacacgtaaactctaaccggaatactcacaggtccctctctgggtgcccaattgccgcggctgaaaaactcgccaagagtcatgaaaaacagcagccgcagacaggtgatcccagcaaatcctcctcaaattctgataggatcctgaggcccatgtgtttcgtaaaacaattggaggtgcccccctacggcagttatcgccccaatgtcgctcccgcgacaccccgcgccaatctggcaaaggaattggagaaattctccaaggtgacctttgattacgcaagctttgacgcccaagttttcggcaagaggatgctcgcgcccaagatacagacatcagaaactagccccaaagctttccagagcaaacctttcccaaaggcctcatccccgcggcacagcccaagcagctcttacgtgaggtccactagttctagctcggctgggtttgattactcacaagatgcggaagctgcacatatggcagccactgctatcctaaacctttctacccggtgttgggagatgccggaaaacctgtctaccaagcctcaggatctgccgagtaaatctgtggatattgaagtggatgaaaacggcactctggatctatccatgcacaagcacagaaagcgggagaatgcctttccttccagctctagctgttcttcctctccgggcgtgaagtctcccgacgcctcacagcgacacagctctacttccgcgccttctagcagcatgaccagtcctcagtcttcccaagcttcccggcaggatgaatgggatcgcccgcttgattatacgaagccaagtcggctgcgagaggaggaacccgaggagagcgagcccgctgcgcatagctttgcttcctctgaggctgacgaccaggaggtgtcagaggaaaacttcgaggaacgcaagtaccctggcgaagtaaccttgaccaattttaaactgaaattcttatcaaaggacatcaaaaaggagctcctgacctgtcctacacccgggtgtgacgggagcgggcacatcacgggcaattatgccagtcaccggtctttgtcagggtgccccctggccgacaaatctctgaggaaccttatggctgcacactccgcggacctcaaatgccctaccccagggtgtgatggaagcggccatattacaggtaactacgcctcccatcgcagtctgagcgggtgcccaagagcgaagaaatcaggcgttaaggtcgctcccactaaggacgataaagaagatccagaactgatgaagtgcccagtgcctggatgtgtcggcctgggtcacatcagtgggaaatatgctagtcatcggtccgcgtcgggctgtcctttggcggcgcgccgacaaaaggagggctccctgaacggctcatccttcagttggaagtctcttaaaaatgaagggccaacatgccccaccccaggctgtgatgggtccggtcacgctaatggaagcttcctcacccacagatctctgtctggatgcccacgggctacgttcgccgggaaaaagggcaaactctctggcgatgaagtgctgtctccaaaatttaagacctcggatgtgcttgagaatgatgaagaaataaagcagttgaaccaggagattagggatctgaacgagtccaactcggagatggaagctgccatggtgcagctgcagtcgcagatctcaagcatggagaagaatcttaaaaatatcgaggaagaaaataagttgatcgaagagcagaacgaagcactgtttcttgagctgagcggactgtcccaggctttgattcagtctctcgccaacattcggctaccacatatggagcccatttgcgaacagaactttgatgcatatgtctctactctgacggacatgtactcaaatcaggatccagagaacaaagatctcctcgagtccataaaacaggcagttcgggggatccaagtgtag

SEQ ID NO: 125192 - DNA, 3399 bp, synthetic construct
  misc_feature 1..3399: note = Description of Artificial Sequence: Synthetic coding sequence
  source 1..3399: mol_type = other DNA
atggaggtggataccgaagagaagaggcacagaaccagaagcaagggggttcgggttcccgtggagcccgcaatccaggaactgttttcttgtcccaccccaggctgtgacggctcaggccacgtgagcggcaagtacgcacggcatcgttccgtgtacggctgtcccctggcaaaaaaacgaaagactcaagataaacaacctcaggaacctgcaccgaagcggaagcccttcgctgtgaaggccgatagctccagcgtcgacgagtgtgatgactcggatggcacagaggatatggacgaaaaagaggaggacgaggaagaggaagaagaggaagaagaggaaaatgaggaccaccaaatgaattgtcataatactcgaatcatgcaggacactgagaaagatgataataacaacgatgagtacgataattacgacgagctggttgcgaagtcactcctgaatttgggaaagattgccgaggatgccgcctaccgtgcccgcactgaatcagagatgaactcaaatacctctaactccctcgaggacgattctgataagaacgagaacctgggacgaaaatccgaactatcacttgacctggatagcgacgtcgtgcgtgagacagtggattcacttaaacttcttgctcagggccatggtgtggtgttatctgaaaatatgaacgatcgtaattacgccgactcaatgtcccaacaggatagtaggaatatgaattatgtgatgctgggtaagcccatgaataatggtctgatggaaaaaatggtcgaggagagtgatgaggaggtctgcctcagctcactcgaatgcctgcgcaatcagtgttttgatctcgctaggaagttgtccgaaaccaatccccaggaacggaaccctcagcagaacatgaatattcgccagcatgtgcgacccgaagaggatttcccagggcggaccccagataggaactactccgacatgttgaacctgatgcgactcgaggagcagctgagccctcggagccgggtattcgccagctgtgcgaaagaagacggctgtcatgagagagacgatgatactacctcagtgaactcagatagatccgaggaagtctttgacatgaccaagggaaacctaacattgttagaaaaggccatagctctggagacagagagagctaaggctatgcgtgaaaagatggctatggaagcaggcagacgcgataatatgcgctcctacgaggaccaatctccccggcagctgcctggcgaggaccggaagcccaagtcgtccgactctcatgtgaaaaaaccctactacgacccatcaaggactgagaaaaaggagtccaaatgtccgacccctgggtgcgatgggactgggcatgtcactgggctgtatccccatcacaggtctctgtcaggctgtccacataaggatagggtgccccctgaaatcctggcaatgcatgaaagcgtgttaaaatgcccaactcccggttgtaccggacgcggtcatgtgaatagcaaccgaaattctcaccgatcactctccggttgccccattgcggccgctgagaagcttgcaaaagcccaggagaagcaccaatcctgtgacgtaagcaaatcctctcaggcctctgatcgcgtcctgcggcccatgtgcttcgtgaagcagcttgagattccccaatacggctatcgaaacaacgttccgacgactacgcccagatcaaacctcgccaaggaactggagaaatactcgaaaacgagctttgagtacaactcttatgacaatcacacatacggcaaaagggccatagcccctaaagttcagacacgagatatcagcccaaagggctacgacgacgcaaagcgctattgcaaagatccctcaccatcttcctcttcaacttctagttacgcacctagtagttcctccaatctgtcttgtggggggggatccagcgcaagctccacctgcagcaagtcctctttcgactatacgcacgatatggaggccgctcatatggccgcaacagccatcctcaacttatctacacgttgccgagagatgcctcaaaacctgagcaccaagccacaggacctctgtgctacccggaaccctgatatggaagtggacgagaatgggacgctggacttgtcaatgaacaaacagagacctagggactcttgctgccctatactgactccactagagccaatgtctccccagcagcaggccgttatgaataaccggtgtttccagctgggagaaggcgactgttgggatctcccagtcgactacaccaagatgaaacccagaagaatcgacgaggatgagtctaaagacatcacacccgaagatctcgacccatttcaggaagccttggaagaacgccggtatcccggggaggtgactatcccatccccaaagcccaaatatccccagtgcaaggagtcgaagaaagacctgataactctgtcaggatgccctttggcagacaagtcgattcggtcgatgctggcaaccagttcccaagagctgaaatgccccacgcccggctgtgatggaagtggccatatcacaggaaactatgcatctcaccgatccttgagtgggtgccctagggccaaaaaatcggggattcgcatagcgcaatcgaaggaggacaaggaggaccaggaacccataaggtgccccgtgcctggttgcgacgggcagggccacataaccgggaaatatgcaagtcatcgctctgcttcaggttgccctctggccgctaaacgtcagaaggacggctacctgaacgggtctcagtttagctggaagtcagtgaagacggaggggatgtcgtgcccgaccccagggtgtgacgggtcaggccacgtatcaggaagctttctgacccatcgaagcctcagcggctgccctagggctacgtcagccatgaaaaaagcaaaattgtccggcgagcagatgctcacaatcaaacagcgggcttccaatggcatagaaaacgatgaggagattaaacagctggatgaagaaataaaagagctgaatgagtctaactcccagatggaagcagacatgatcaaactgaggacccagatcaccaccatggagtctaacctcaagacaatcgaggaagagaacaaagtgattgaacaacagaatgagtcccttttgcacgagctcgcaaatctgtcccagagcctcatccactccctcgccaacattcagcttccccacatggaccctataaatgagcaaaatttcgatgcatatgtaactactctgaccgagatgtacactaatcaggaccggtatcaatcgccagagaataaggccctactggaaaacattaagcaggctgtaaggggcatacaggtctag

SEQ ID NO: 125193 - DNA, 3561 bp, synthetic construct
  misc_feature 1..3561: note = Description of Artificial Sequence: Synthetic coding sequence
  source 1..3561: mol_type = other DNA
atggaggtggacacggaagagaaacggcatcgcacccggtcaaaaggggttagggtgccggtagaacctgccatacaggaactgttttcatgtcctacacctggatgtgatggctctggccacgtctctggcaagtacgcccggcacaggtccgtgtatggatgtccactggccaaaaagaggaaaactcaggacaagcagccgcaagagccggccccaaaaaggaagccttttgccgtgaaggctgactcgagctccgttgacgaatgcgatgactccgatggtaccgaggacatggatgagaaggaagaagatgagggcgaggagtactccgaggacaatgacgaaccaggggatgaggatgaggaagacgaggaaggagatcgagaggaagaggaggaaatagaagaggaagatgaggacgatgatgaggacggcgaagacgtggaggatgaggaggaagaggaagaagaggaagaagaggaggaagaggaggaggagaatgaagaccaccagatgaactgccacaatactagaataatgcaggacacggagaaggatgataacaataatgatgaatatgacaattacgacgagctcgtcgcgaaatccctgctcaatctgggcaagattgccgaggacgccgcctacagggcgcggactgagtctgaaatgaactctaacacaagcaattccctcgaggacgattccgacaaaaatgagaacttgggaaggaagagcgagctgtctctcgacctggacagcgacgtggtgcgggagaccgtggattctctgaaactgctggcacagggacatggggttgttctcagcgagaacatgaatgacaggaactacgccgactccatgagccaacaagattcccgaaatatgaattatgtaatgctgggaaaacccatgaataatgggttgatggaaaagatggtagaggaaagcgatgaagaggtgtgcctcagtagtctcgagtgcctgcgcaatcagtgtttcgaccttgcccgcaaactgtcggaaacaaatccccaagaaaggaacccgcaacagaacatgaatatccgtcagcatgtgcggcccgaagaagacttccccggacgcacaccggataggaactactctgatatgcttaaccttatgagactggaggagcagctgtcgcctcgctctcgagtctttgccagctgtgcaaaggaagatggctgtcatgaaagggacgacgataccaccagcgtgaattccgacaggtccgaggaggtattcgatatgaccaaaggaaatcttaccttgcttgagaaagctatcgctctggaaactgaacgggctaaggccatgcgcgagaagatggccatggaggccggacgccgggataatatgcgttcttacgaggaccagtcacctagacagctcccaggagaagatagaaaacctaagtccagcgattcccacgttaaaaagccgtattatggtaaagacccttccagaacagaaaaaaaagaatctaagtgtcctacgcccgggtgtgacggcaccggccacgtgactggcctgtacccgcaccatcgctccctctctggctgtccgcacaaggatcgtgtcccacctgaaattctcgctatgcatgagtccgtgctgaagtgtcctaccccaggatgtactgggaggggccacgtgaattccaaccgcaatagtcatcgtagtctcagtggttgtccaatcgccgcagccgagaaactggccaaggctcaagagaagcatcagtcgtgtgatgtttcaaaaagctctcaggcttcagatcgcgtactgaggcccatgtgctttgtcaaacaactggaaattccgcaatatggatatagaaacaatgtgcctaccacaactcccagaagcaacttagcaaaggagctcgagaagtactctaagacatcattcgagtacaattcgtacgataatcacacatatggcaaaagggccatcgcaccaaaggttcaaacccgagacatcagccctaagggctatgatgatgcgaaaaggtactgcaaagatcctagcccttcatcctccagtacatccagctatgccccctcttccagctcaaacctgagctgtgggggcggaagctctgcttcctctacgtgttcgaaatccagttttgattatactcacgatatggaggccgctcacatggccgctacagcgatattgaacttgagcaccagatgcagagaaatgcctcaaaatctgtctacaaagccgcaagacctttgcgctacccgaaatcccgacatggaggtggacgaaaacggcaccctggacctgagtatgaacaagcagagaccccgggattcatgctgccccattctcaccccacttgagccaatgagcccccaacagcaggcagtcatgaacaaccgatgttttcagctgggggagggcgattgctgggatctgcctgtcgactacactaagatgaaacccaggaggatcgacgaggacgagagtaaagacattactcctgaggatttggaccccttccaggaagctctcgaagagcggcggtaccccggcgaagtcaccatcccgagccccaaacctaagtatccacaatgtaaggagtcgaagaaggatttaatcacactcagtggatgtcctcttgcagataaatcaattcggtcaatgctcgctacctcgtcccaggaattgaagtgtcctacaccgggatgtgatggatctggccatatcactggcaactacgcctcacacaggtccctcagcggttgtccccgcgccaaaaagagcggaattagaatcgcacagtccaaggaggataaggaggatcaggaacccatccggtgccctgtccccggctgtgatggtcaggggcacatcaccggcaagtacgcatcacacaggtcagcctcgggatgcccattggcagccaaacgtcagaaagacgggtaccttaacggttcccagttcagctggaagtccgtgaagaccgaagggatgtcatgtcccacccccggctgtgatggttctggccatgtgtctggtagctttctgacgcacaggtccctatcaggctgcccaagagcaacgagcgcaatgaagaaagctaagctaagcggcgagcagatgttgactattaagcagcgggcctccaacgggatcgaaaacgatgaagagattaagcagcttgacgaggaaattaaggagctgaacgagtcgaattcacagatggaggctgacatgatcaagctgagaacccagattaccacgatggaatccaatctgaagaccatagaggaagaaaataaagtgatagaacagcaaaacgaatccctgctccacgaactggccaatctttcccaatccctgatacactctctggccaacattcagcttcctcatatggatcccatcaacgagcagaacttcgatgcctatgtgactactctgacagagatgtacaccaaccaggaccggtaccaaagccccgagaacaaggcgttactggaaaatataaaacaggcagtgcgcggaattcaggtttag

SEQ ID NO: 125194 - DNA, 555 bp, synthetic construct
  misc_feature 1..555: note = Description of Artificial Sequence: Synthetic coding sequence
  source 1..555: mol_type = other DNA
atgtcatgtccaacccccgggtgcgatggctccggtcacgtaagcggctctttccttacccaccgttccctaagcggatgtcccagagccacctcagccatgaaaaaggctaagttaagcggggagcagatgcttactataaagcagagggcttcgaacggtatcgaaaatgatgaagaaatcaaacagctggacgaggaaattaaggaactgaacgagtctaactctcagatggaagctgatatgataaagctgagaacacaagtcacaataaccacgatggagagcaatcttaagacaatcgaggaagagaataaggtgatcgaacaacagaatgagagcctgttgcacgagttggcgaatctgagtcaatcacttatacacagcctggcaaatattcagttgccacatatggaccctattaatgagcagaactttgacgcctatgttactacactgacggaaatgtacacaaaccaggatcgatatcagagcccagagaacaaggccctcctcgagaacattaaacaagctgtgaggggcatccaagtgtag

SEQ ID NO: 125195 - DNA, 3555 bp, synthetic construct
  misc_feature 1..3555: note = Description of Artificial Sequence: Synthetic coding sequence
  source 1..3555: mol_type = other DNA
atggaggttgatacagaagagaagcgtcacaggacaagatctaaaggtgtcagggttccagtggagcctgcgattcaggaactgttctcctgccccactccggggtgtgatgggtctggtcatgtttcggggaagtacgctcgacaccggtctgtatacgggtgcccactggcgaagaaacgtaaaacacaggataagcaacctcaggagccggccccaaagcgaaaacccttcgcggttaaggccgactcgtcctctgtggatgagtgtgacgacagcgatggcaccgaggatatggacgagaaggaagaggatgaaggtgaggaatattccgaagataacgatgagcccggcgacgaagatgaggaggacgaggagggagatagggaagaggaagaggagatagaagaagaagatgaagacgacgatgaggacggcgaggacgtagaagatgaagaggaagaagaggaggaggaggaggaagaagaggaggaagaagaaaacgaagaccatcagatgaactgccacaacacccggatcatgcaagacacagagaaagatgataataataacgacgaatacgacaactacgatgagctggttgccaagagcctacttaacctcggcaaaatcgcggaggatgcagcataccgcgctcgtactgagtccgagatgaacagcaacaccagtaatagcttggaagacgattccgacaagaacgaaaatctggggagaaaaagcgagttatcactggatctggactccgacgttgtacgagaaacagttgattcactgaaacttcttgctcaaggccacggcgtggtgctctctgaaaacatgaacgatcgcaactacgctgattccatgagtcaacaggattctcgaaatatgaactacgtgatgctgggaaaaccgatgaacaacggcctgatggagaagatggtcgaggaatccgacgaggaagtgtgtcttagcagccttgagtgtttacggaaccagtgctttgatctggccaggaagctgtctgaaacgaacccccaggaacgcaacccacagcaaaatatgaacattcggcagcatgtcaggccagaggaggactttcctgggcggactcccgatcggaactactccgatatgctgaaccttatgagacttgaggagcagctatctcctaggtctcgagtatttgccagctgcgcaaaagaggacggctgtcatgagcgcgacgatgacacaacaagcgtgaattccgacaggagcgaggaggtttttgatatgaccaagggcaacctgaccctgctggaaaaagccatcgccttggaaacagagagggccaaggccatgcgagaaaaaatggccatggaggccggtcgccgggataatatgagaagttacgaagaccaatcaccgcgacagcttccaggggaggataggaaacctaagtcctccgatagccacgtgaagaaaccttactatgacccttctaggaccgagaagaaggaatccaaatgtccaacgcctgggtgtgacggtaccgggcatgtgaccggcctgtacccacatcaccggtctctcagcggctgtccacataaggatcgcgtgcctcctgagatcttggcaatgcatgaaagtgtgctaaagtgccccaccccaggctgtacgggtcgagggcacgttaacagtaatagaaactcccacaggtccctttcaggttgtcccatcgccgctgcagaaaagttggccaaggctcaggagaagcaccagagttgcgatgtgagcaaatctagccaggccagcgacagggtgttgagaccaatgtgcttcgtgaagcaactggagattccccagtacggatatagaaataacgtgcccactacaactccgcgatctaatctagccaaagagctggagaagtattccaagacgagcttcgagtacaacagctacgataaccatacatacggcaagagagccattgcgcctaaggtccaaacaagggacatctcccccaagggatacgacgacgccaaaagatattgcaaagacccctccccctcttccagtagcacatccagctatgcgcctagttcctcaagcaatttgtcttgtgggggaggctcgagtgcctcgtctacttgtagcaagtcgtccttcgattatacccatgacatggaagcagcccatatggccgccactgctattttgaatttgtccacacgctgtcgcgaaatgccccagaatctgtcgactaaaccacaggacttgtgtgctacccgtaatcccgacatggaggtggatgaaaatggaacccttgacctgtcaatgaataaacagcggccacgggactcttgctgtcctatcttgactcccctggagcccatgtctccgcagcagcaagccgttatgaacaacagatgctttcaactcggagaaggcgattgttgggatctgcccgtagattatactaagatgaagcctcgcaggattgacgaagacgaaagcaaggatattacaccagaagacctggaccctttccaagaagctttagaagagcgccgatatcctggagaggtaaccatcccgtctccaaagcccaaataccctcagtgcaaggaatcaaagaaagatctgattaccctttcggggtgcccactcgcggataaaagcattaggtccatgcttgccaccagcagtcaggagctcaagtgtcccacaccaggatgcgacgggagtgggcatattacaggtaactacgctagtcaccgatccctgtctggctgtcctcgcgcgaaaaagagcggaatcaggatcgcacaatcaaaggaggataaggaagatcaagaacctatacgttgccccgtgcccggctgcgacggacaagggcacatcacaggcaagtacgctagccacagaagcgctagtggttgtcctctggcagccaaacggcagaaggatggctatctgaatggatctcagttctcctggaaatctgtcaagactgagggcatgtcttgtcccactcccggctgcgatggcagcgggcacgtatcgggatcctttctaacccatagaagtctgagcgggtgcccccgcgccacgtcagcaatgaagaaagctaaactctctggcgaacagatgctcaccatcaagcagcgggcctctaacggcatcgagaatgatgaggaaattaagcaactggacgaagaaatcaaggagctcaacgaatctaatagccagatggaggccgacatgattaaacttcgtactcagattacaaccatggagagtaatcttaagactatcgaagaagagaataaagtaattgagcagcagaatgagtcccttctgcacgagctcgctaatctctcacagagcctcatccactcactggctaacatccagttgccccatatggatccaatcaacgaacagaactttgacgcatatgtgaccaccctgaccgaaatgtatacaaatcaggacagataccagtcaccagaaaataaagcacttctggagaatattaagcaagcagtgcgcggtatccaagtgtag

SEQ ID NO: 125196 - DNA, 552 bp, synthetic construct
  misc_feature 1..552: note = Description of Artificial Sequence: Synthetic coding sequence
  source 1..552: mol_type = other DNA
atgtcccagaagccggccaaggaggggcccaggctcagcaagaaccagaagtactcagagcatttttcaattcactgttgccctcccttcacgtttttaaactctaagaaagaaattgtcgacaggaaatattctatctgtaaaagcgggtgcttttaccagaaaaaggaagaagattggatctgttgcgcatgtcaaaagacacggactagccgacgggctaaatccccacagcgacctaagcaacagcccgccgcgccgcccgccgtggtcagggctcccgccaagcctcgatcaccaccccggagcgaacggcaaccccgatctcctccacggagcgagcgtcagcctaggagtccaccaaggtccgagcggcagcctcgtagccctcctagaagcgagcgtcaacctcgccctcggcctgaagttcgtccaccgccggccaagcaaaggccaccacagaagtccaagcagcaaccaaggagctccccacttcgaggccctggcgcttctcgcgggggtagtccagtcaaggctagtcggttctggtag

SEQ ID NO: 125197 - DNA, 246 bp, synthetic construct
  misc_feature 1..246: note = Description of Artificial Sequence: Synthetic coding sequence
  source 1..246: mol_type = other DNA
atgtctcagaaacctgccaaagaaggtccgcggctgagtaaaaatcagaaatattcagagcattttagtattcactgttgtcctccgtttacttttctgaactctaagaaagaaatcgtggaccggaaatatagcatctgcaaaagtggctgcttttatcaaaagaaagaggaggattggatttgttgcgcctgtcagaaaactcggctgaaacgcaagatccgccccacacccaagaaaaagtag

SEQ ID NO: 125198 - DNA, 246 bp, synthetic construct
  misc_feature 1..246: note = Description of Artificial Sequence: Synthetic coding sequence
  source 1..246: mol_type = other DNA
atgagccagaagccagcaaaagagggcccccggctgtcaaagaatcagaagtattctgagcactttagcattcactgctgcccccctttcactttcctaaactctaagaaagagattgtcgatcggaaatacagcatctgtaagtctggttgtttttaccaaaaaaaagaggaagactggatctgttgtgcctgccagaagacacggctgaaaaggaagataagaccaacgccgaagaaaaaatag

SEQ ID NO: 125199 - DNA, 246 bp, synthetic construct
  misc_feature 1..246: note = Description of Artificial Sequence: Synthetic coding sequence
  source 1..246: mol_type = other DNA
atgagccagaagcccgccaaagagggccctcgcctgtcaaagaatcagaagtactctgagcacttttcaatccactgctgtcccccttttacatttctgaactcaaaaaaggagattgtggaccgtaagtactcaatctgcaaatcggggtgtttttatcaaaaaaaagaagaagattggatctgttgcgcttgccagaagacaaggctcaaacggaagatacgccctacccccaagaagaaatag

SEQ ID NO: 125200 - DNA, 552 bp, synthetic construct
  misc_feature 1..552: note = Description of Artificial Sequence: Synthetic coding sequence
  source 1..552: mol_type = other DNA
atgtcacagaagccggctaaagagggccccagactctcaaagaatcaaaagtattcagaacacttcagcattcactgctgtccaccatttacgttcctgaactctaagaaagagattgtagatcgtaaatactcaatctgtaaatcaggttgcttctaccagaaaaaagaagaagactggatctgttgcgcttgccagaagacacgcacttccaggcgggccaaatccccacagcggcccaagcagcagccagccgcccctcccgccgtcgtcagagctcctgcaaagcctagatctccaccgaggtcagagcgacagccccgctctcctccccggtcggaacgacagccaagaagccccccccggtcagaaaggcaaccccgcagccctcccaggtccgagcggcagcctcgccctcgccccgaagtgcgacctcctccagctaagcagaggccaccgcagaaatcaaaacagcagcctaggtcatccccgttacggggccctggggccagtcgcggcgggagtccagtaaaggcgagcaggttttggtag

SEQ ID NO: 125201 - DNA, 552 bp, synthetic construct
  misc_feature 1..552: note = Description of Artificial Sequence: Synthetic coding sequence
  source 1..552: mol_type = other DNA
atgagccaaaaacccgcaaaggaggggcctagattatctaagaatcagaagtactccgaacacttttcgatccactgttgcccaccgttcacttttttgaactccaagaaagaaattgtggaccgcaaatattccatctgtaagagcgggtgtttctaccagaaaaaggaggaagattggatttgttgcgcttgccaaaaaacccgcacctccaggcgagccaagtcccctcagcgacctaaacagcagcccgccgccccccccgctgtagtcagagcccctgctaaacctcggtcccctcctagatcagagaggcagccccgatccccaccccgctctgaacggcagcctcgatccccaccgagaagtgagagacagcctcgttcgccgccccgcagtgagcggcagcccagacccaggcctgaagtacgccctccccctgctaaacagcgccccccccagaagagtaagcagcagccacgaagctccccactgagaggcccaggcgctagccgagggggctcacctgttaaagcctcaagattctggtag

SEQ ID NO: 125202 - DNA, 246 bp, synthetic construct
  misc_feature 1..246: note = Description of Artificial Sequence: Synthetic coding sequence
  source 1..246: mol_type = other DNA
atgagccagaagccagccaaagaaggccccaggctgtctaaaaatcagaagtattcggagcatttctccatacattgttgtcctccgtttacgtttctgaacagtaagaaggagatcgtggatagaaaatatagtatttgtaagtcaggatgcttttaccagaagaaggaggaagactggatctgctgcgcgtgccaaaagacacgcttgaagcgtaagattcggcctacacctaagaagaaatag

SEQ ID NO: 125203 - DNA, 552 bp, synthetic construct
  misc_feature 1..552: note = Description of Artificial Sequence: Synthetic coding sequence
  source 1..552: mol_type = other DNA
atgagtcagaagcccgcgaaggaagggccacggctctctaaaaaccagaagtattcagaacatttttcaattcattgttgccccccattcacctttctaaactcaaagaaggaaatcgtagatagaaagtacagcatctgcaaatctggctgcttctaccagaagaaggaagaagactggatttgctgtgcttgtcagaaaactagaacctcacggcgggcaaaatctcctcaacgcccaaagcagcagcctgctgcgccacctgctgtggtgagggcacccgcgaaaccgagaagccccccacgcagcgagcggcagccacgctctccccctcgatccgaaaggcagcccaggtcccctcctagaagcgagagacagcctaggagcccccctcggtccgagagacaaccacggccccgtcctgaggttcgtcctcctccagcgaagcagcgcccgccccagaaatcaaagcagcagccccgctcatcccctttacgcggtccaggagcctccagaggtggctcaccagttaaggctagtcggttttggtag

SEQ ID NO: 125204 - DNA, 246 bp, synthetic construct
  misc_feature 1..246: note = Description of Artificial Sequence: Synthetic coding sequence
  source 1..246: mol_type = other DNA
atgagccaaaaacccgccaaagaggggcccagactcagcaagaatcaaaagtactccgagcacttcagtatacactgctgtcccccgtttacctttcttaacagtaagaaggagattgtcgaccgcaagtactccatttgcaagagcggatgcttttaccagaaaaaagaagaggactggatctgctgcgcatgccaaaaaactcgcctcaaacggaagattcgcccaaccccgaagaaaaaatag

SEQ ID NO: 125205 - DNA, 177 bp, synthetic construct
  misc_feature 1..177: note = Description of Artificial Sequence: Synthetic coding sequence
  source 1..177: mol_type = other DNA
atgtcacaaaagcctgccaaggaaggacctaggctatcaaagaatcagaaatattctgagcacttcagcattcattgttgccctcctttcaccttcttgaattccaaaaaggagattgtcgacagaaaatattcaatctgtaaaagcgggtgcttctaccagaaaaaggaggagtag

SEQ ID NO: 125206 - DNA, 423 bp, synthetic construct
  misc_feature 1..423: note = Description of Artificial Sequence: Synthetic coding sequence
  source 1..423: mol_type = other DNA
atgcttcaggcagccgacttcattgagcgaaccgagacagcgggagaattaagccgaggcctgatcggggtgctctcttcgcagatctcctggtgtctgttgaacgtcaatctgtccaagctccctacaagactgcaaaggctttcatgtagcgtcttaaactccagcccagccatgcgcgggggcgcccgggggaggcctcagctgaccctcgagagacccctcagacccggctgtcgacttcacagctgtagcgaggcggagaaagggggatttgtccggagaaaagaaattatcttatttccaccctgcgaggacccggcacgggggtggctcagcgctaatcccggccgcgagccatcccctggcatttgttggcacctgaacctcgggctgccatctctgcacaattgtgaagaatag

SEQ ID NO: 125207 - DNA, 816 bp, synthetic construct
  misc_feature 1..816: note = Description of Artificial Sequence: Synthetic coding sequence
  source 1..816: mol_type = other DNA
atgttcggcctgaaaagaaacgccgtgattggactcaacctgtattgtggcggtgctgggttaggtgctggttcaggtggtgccacccggcctggcggaaggttgttagccacagagaaggaggcttccgctaggcgcgaaattggcggcggggaggcgggagcagtgatcggtgggtcggctggagcatcaccaccatccaccctgactcccgactctaggcgtgttgccaggccgccgcccatcggcgcggaggtgccggatgtaactgcaactcctgctcggttgctgttcttcgcccccactagaagagcagcccctctcgaagaaatggaggccccagcggctgacgccatcatgagcccggaggaggaactggatggttacgagccggagccccttgggaagcgaccagccgtgctccccttgctagagctcgttggagagagcggcaacaatactagtacggatggttcattacctagcacacctccaccagccgaagaggaagaggatgagctctaccgacagtccctggaaatcatctcgaggtacctgcgagagcaagcaacaggggccaaagacactaagcctatgggccgttcaggggccacctccaggaaagctctcgagaccttgcgtagggtgggggacggagtacagcgaaatcacgagactgccttccaagggtgggtgtgcggcgtcctgccttgccgcggacccagaaggtggcatcaagagtgtgccgctggcttttgtcggtgctgctggagccggagctggttcggaatttctaacaagattgccctgctgtag

SEQ ID NO: 125208 - DNA, 1053 bp, synthetic construct
  misc_feature 1..1053: note = Description of Artificial Sequence: Synthetic coding sequence
  source 1..1053: mol_type = other DNA
atgtttggcctgaaacggaatgccgtcataggccttaacctatactgtgggggggccggcctcggcgcaggaagcggcggggccacaagacccggagggcgcctgctggctaccgagaaggaagcaagtgcccgtcgagagattggaggcggcgaagccggtgcagttattgggggcagcgccggcgcctcaccccctagtactctaacgcccgactcccggagagtggctagaccaccaccgattggtgccgaagttccggatgtaactgccacccctgccaggctgctgttctttgcccctactcgtcgggctgcgcctctcgaagagatggaagcccccgctgctgacgctattatgagtccggaagaagaactggacgggtacgagccagagccacttggcaaacgtccggcagtgctgccattactggaattggtaggcgaaagtggaaacaacaccagcacagatggcagcctgccctcaacgccgcctcctgcagaggaggaggaggatgagctctatcgccagtcgctggagatcatctcacggtatctgcgcgaacaagcgacgggggccaaggacacaaaacccatgggccgctccggagcaaccagcaggaaggctctcgagactctccgcagagttggcgacggcgtgcaaagaaaccatgaaacagcctttcaggggatgctgcgcaagttagacataaaaaacgaggacgacgttaaatctctgtctcgtgtgatgatccatgtgttctctgatggggtaacaaactggggtcgtatcgttactcttatttccttcggcgcatttgttgctaagcacctgaaaaccattaatcaagagagttgtatcgagccactggccgaaagcatcactgatgtgctagtgcgaaccaagcgagattggcttgttaagcagcgcggctgggacggtttcgtcgagtttttccacgtggaggatcttgagggcgggattagaaacgtcctgctagcatttgcaggtgtggccggggtgggcgctggattagcctatctgatacgttag

SEQ ID NO: 125209 - DNA, 840 bp, synthetic construct
  misc_feature 1..840: note = Description of Artificial Sequence: Synthetic coding sequence
  source 1..840: mol_type = other DNA
atgtttgggcttaaacgcaatgccgtcatcgggctgaacttatattgtggaggtgccggcctaggagcaggcagcggcggggccacgcgtccaggtggccgcctattagcaacggagatggaggcacccgcagcggatgctataatgtcgcctgaggaggagctggatggctacgaaccagaaccattaggcaagcgacccgcagtgctcccccttctcgagcttgtgggggaaagcggaaacaacacctcaaccgatggaagcttgcccagcacacctcctccagcagaggaggaggaagatgagctttacagacagtccttagagataatttcccgctacttgcgagagcaggcgaccggggcaaaggatacaaagcctatgggaagatctggagctacctccaggaaggccctcgaaaccttaagacgcgtgggagatggcgtgcagaggaaccacgagactgcgtttcaggggatgctgcgaaagctcgatataaagaatgaggatgatgttaagagtctgagtcgcgtcatgatccatgtctttagcgacggtgtaacaaactggggacggatcgttactttaatcagctttggagccttcgtcgccaaacacctcaaaactatcaatcaagaaagctgcattgaacccttagccgagagtataactgatgtgctggtacgcacaaaacgggactggctggtgaaacagagaggctgggatggttttgtagagttctttcacgtggaggacctcgaagggggaatccgaaacgtcttgctggcatttgcaggggtggccggtgtaggggctggtctggcctacttaattaggtag

SEQ ID NO: 125210 - DNA, 1224 bp, synthetic construct
  misc_feature 1..1224: note = Description of Artificial Sequence: Synthetic coding sequence
  source 1..1224: mol_type = other DNA
atggtaaatgagtataagaagatactgcttctgaaggggtttgagcttatggatgattatcactttacatctatcaagtccctgctggcttacgacctcggcctgaccacaaagatgcaagaggagtacaatagaatcaagattaccgatcttatggagaaaaagtttcagggggttgcttgtctcgataaattgattgagctggccaaggacatgcctagcctgaaaaacttggtgaataatctgcgaaaagagaaatcgaaagtggcaaaaaaaataaagactcaagagaaggcccctgtgaaaaagattaatcaggaggaggtggggctcgcggcccccgctcccacggcccggaacaagctcacatcggaggcgcgtggccgtattcctgtggcgcagaaacggaagacacctaacaaggagaaaaccgaggcaaaaaggaataaggtgtctcaggagcagtcaaagcccccggggccctccggcgctagcacaagtgccgccgttgatcaccctcccctgccacaaacttcatccagcacacctagcaacacctcctttacacctaatcaggaaactcaggcacagaggcaagtggatgctagaaggaatgttcctcaaaacgatcccgtgaccgtagttgtcctaaaagccacggcacccttcaagtatgagagccccgagaatgggaagtccaccatgttccacgctaccgtggcttctaagacacaatacttccacgtcaaggtttttgatatcaatttgaaagaaaaattcgtacgcaagaaggtaatcaccatttccgactattctgagtgcaagggcgtcatggaaattaaagaggcttcttccgtgtccgactttaaccagaacttcgaggttcctaaccggatcatcgagattgctaataagaccccgaaaattagtcaactgtacaagcaggcttctgggaccatggtatacgggctctttatgctccagaaaaaatctgtgcacaaaaagaacacaatttacgagattcaagacaataccgggtcaatggacgtggtcggatccggaaaatggcacaatatcaagtgtgagaagggagacaagctgcggcttttctgcctccagctacgcaccgttgatcgaaagctcaaactggtgtgcggcagccactccttcatcaaggtaattaaagccaaaaaaaataaggagggaccgatgaacgtgaattag

SEQ ID NO: 125211 - DNA, 315 bp, synthetic construct
  misc_feature 1..315: note = Description of Artificial Sequence: Synthetic coding sequence
  source 1..315: mol_type = other DNA
tgaccaaataggatcattgaaatcgccaacaaaacacccaagatttcccaactgtacaaacaagcttctgggaccatggtgtacggactgttcatgctacagaagaagagtgtgcacaaaaagaacaccatttacgagatacaggataacaccggatcaatggatgtagtggggtcgggcaaatggcacaatattaagtgtgagaagggagacaagctgcggctattctgcctgcagcttagaacagtggaccgcaagttgaagctggtcatcaaagcaaaaaagaacaaggaaggacccatgaacgttaactag

SEQ ID NO: 125212 - DNA, 795 bp, synthetic construct
  misc_feature 1..795: note = Description of Artificial Sequence: Synthetic coding sequence
  source 1..795: mol_type = other DNA
atgagacctgatagagcagaagctcctggccctcctgctatggctgctggtggacctggtgcgggttctgcagcccctgtgtccagcaccagcagccttccattggctgccttgaacatgcgggtaagacgtcgcctctctctatttctgaatgtgcgcacacaagtcgcagccgattggactgccctcgctgaggagatggattttgagtacctcgagatccgccaactcgagactcaggccgacccaactggaagactcctagatgcatggcagggccggccgggagccagtgtgggccgcctactcgaactcctaactaagcttggacgcgatgatgtccttttggagctcggcccatcaattggccacatgcccgaacgctttgatgcgttcatttgctactgtccctccgacatccagtttgtccaggaaatgattcgccaactggagcagacaaattatcgtctcaaactgtgcgttagcgaccgggacgttttacctgggacctgtgtgtggagcatcgcttccgagctgattgaaaaaagatgcagaaggatggtagtcgttgtgagcgatgactatctgcagtcaaaagagtgtgactttcagactaagtttgccctctcactttctccaggtgctcatcagaagaggctgatcccaattaaatataaggccatgaagaaggagttcccctctattctgcggtttatcacagtctgtgattacaccaacccttgcactaagagttggttctggacacggctggccaaagccctaagcctcccatag

SEQ ID NO: 125213 - DNA, 615 bp, synthetic construct
  misc_feature 1..615: note = Description of Artificial Sequence: Synthetic coding sequence
  source 1..615: mol_type = other DNA
atgcgccccgatagagctgaggcgccgggcccccctgccatggcagcaggcggccccggtgccggttcggccgcgcccgtcagttccacctcctccttgccactggccgcactcaacatgcgcgttagaaggagactaagcctcttcctgaacgtaagaacacaggtcgccgcagattggactgctctggcagaagagatggacttcgagtatctggagattcgacagctggagacacaagccgacccgacgggacgacttttggatgcctggcagggccgacctggcgcctccgtaggcaggctgctggaactgctcaccaaacttggccgggatgacgtcctactcgagttaggaccgtctatcgaagaggactgccagaagtatatacttaaacagcaacaagaggaggccgagaagccgctgcaggttgccgctgtggatagctctgtgccccgcactgccgagctggcgggaatcactacactggatgaccctctaggcgctgcagggtggtggtggctctctttgatgattacctgtcgcgcacgaaatgtgaccagtagacccaacttgcactctgctagtctacaagtgccaatccggagcgactag

SEQ ID NO: 125214 - DNA, 480 bp, synthetic construct
  misc_feature 1..480: note = Description of Artificial Sequence: Synthetic coding sequence
  source 1..480: mol_type = other DNA
atgagaccagatcgcgctgaagccccaggtccgccagcaatggcagctgggggccccggagcgggctcagctgcgcctgtctccagtacctcatcgcttccattagctgcacttaacatgcgggtcagaaggcggctgtccctgtttctgaatgtgagaacccaagttgctgccgattggactgcactggctgaggagatggacttcgaatacctcgagatacggcagttggaaacacaggccgatcccacaggacgcctcctggatgcctggcaagggcggcccggcgctagcgttggaaggctgttagagctgctaacaaaactgggccgggacgacgtcctgctggagttaggtcctagcattggggctgccggctggtggtggctgtcactgatgattacatgccgggccagaaacgtgacctcccggcctaacctccattccgctagcttacaagtacccatcagatccgactag

SEQ ID NO: 125215 - DNA, 807 bp, synthetic construct
  misc_feature 1..807: note = Description of Artificial Sequence: Synthetic coding sequence
  source 1..807: mol_type = other DNA
atgttccggatgctcaattccagctttgaagacgatccctttttttctgaaagtatacttgcacatagagagaatatgcgtcagatgataagaagtttcagtgagcccttcggacgcgacctgctgtccatcagtgatgggaggggccgcgcacacaatcggagaggccataacgacggggaggacagtctgacccataccgatgtttcctcatttcaaacaatggaccagatggtctccaacatgaggaattatatgcaaaagctcgaaaggaacttcggccagttaagtgtcgaccccaatggccattctttttgttcatcttccgtcatgacttactctaagatcggtgatgagccacctaaggtgtttcaggctagcacgcagaccaggagggctcccggggggattaaagagacaagaaaagcaatgcgcgatagtgatagcggtttggaaaagatggccattggacaccacatccacgatcgggcccatgttatcaagaagtccaagaacaagaagaccggggacgaggaagttaaccaggaatttattaacatgaacgagagcgacgcgcacgcgttcgatgaggagtggcaatcagaggtcctgaaatataaacccgggagacataacttgggaaacaccaggatgaggagcgtgggacatgagaacccggggtcacgggagctcaagagacgggaaaagccacagcagtcccctgctatcgaacacggcaggagatccaacgtgctgggggataaacttcacataaagggctccagcgttaaatccaataaaaaatag

SEQ ID NO: 125216 - DNA, 732 bp, synthetic construct
  misc_feature 1..732: note = Description of Artificial Sequence: Synthetic coding sequence
  source 1..732: mol_type = other DNA
atgcgtcaaatgatccgtagcttttcagagccgttcggtcgtgatctgttgagcatcagtgatggaaggggccgggcccacaatagacgagggcataacgacggtgaggactccttaacacataccgatgtgtcgagtttccaaactatggatcaaatggtttctaatatgaggaactatatgcagaagttagagcggaatttcggccaactctccgtggatcccaacggacactctttttgttcctctagtgttatgacttactccaaaattggtgacgaaccgcccaaagtgttccaagcctctactcaaacaagacgcgcacctggaggtattaaagagactagaaaggcaatgcgggattcagatagtggcctggaaaaaatggcaatcggtcaccacatacacgaccgggcccacgtcataaaaaagagcaaaaataagaaaaccggcgatgaagaagtgaaccaggagttcatcaatatgaatgaatctgacgcgcatgccttcgacgaagagtggcaatcagaagtcctcaagtataagccaggccggcataacctgggaaacactaggatgagaagcgtgggtcacgagaaccccggctcacgggagctgaagcgcagggaaaaaccccagcaaagtccagcgatcgagcatggccggcgctcaaacgtactaggcgacaaactccatatcaagggatcatccgtgaagagcaacaaaaagtag

SEQ ID NO: 125217 - DNA, 900 bp, synthetic construct
  misc_feature 1..900: note = Description of Artificial Sequence: Synthetic coding sequence
  source 1..900: mol_type = other DNA
atgttaaaggaagtgctgcagcgcgaggggaagagttacaagtcagagaccctgatgtacatcaaaaaggccagagccagcgaaaataagttgagcgagagcattttagcgcaccgcgaaaacatgcgacagatgatccggtcattcagcgagccattcggtcgggatttactcagtatcagtgatggacgcggaagggctcataacaggaggggacacaacgacggcgaggacagccttacagctaccagttgttctctagttccctttggtgacttcggcggcatgcatacagacgtgagctcgtttcagaccatggaccagatggtcagtaacatgcgcaactacatgcaaaagctcgagcggaacttcgggcagctgtctgtagatccaaatggacattctttctgcagcagctctgtgatgacctacagcaagataggtgatgaaccccccaaggtgtttcaggcctctacacagacacgaagggcaccaggcggcataaaagagactaggaaggccatgcgagactctgattcaggactggagaagatggccatcggacatcatatccacgaccgagcacatgtgataaagaagtcaaagaacaagaagacaggcgacgaggaggtcaatcaggagtttatcaatatgaatgagtccgatgcccacgcctttgacgaagagtggcagtcagaggttcttaaatacaaaccgggccgtcacaatcttggcaatacccgaatgagatctgtcggccatgagaacccgggctcgcgggagctgaaaagaagagaaaaacctcaacaaagccccgccatcgaacatgggcggagatcgaacgtgctgggtgacaagttgcatattaaaggttcctctgttaagtccaacaagaagtag

SEQ ID NO: 125218 - DNA, 777 bp, synthetic construct
  misc_feature 1..777: note = Description of Artificial Sequence: Synthetic coding sequence
  source 1..777: mol_type = other DNA
atgagacaaatgatcaggtctttctccgaacccttcgggagagatctgctgagtattagtgatgggcgtggccgagctcataacaggagagggcacaatgatggagaggactctttgactgcaacaagctgttcactggtcccattcggcgacttcggtggcatgcataccgacgtctcctctttccagactatggaccagatggtatcaaacatgcgcaactacatgcagaagctggagcgcaactttgggcagctcagcgttgatcccaatgggcattccttttgttcctcatccgtcatgacttactcaaagatcggcgatgaaccacctaaggttttccaagcgagtactcagacccggcgagcccccggcggtattaaggaaacccggaaggcaatgagagattctgatagcggtcttgaaaaaatggcgattggtcatcatattcatgacagggcccacgtgataaaaaaatccaagaataagaagacaggagatgaggaggtgaatcaggaattcataaatatgaacgagagtgatgctcacgctttcgatgaggagtggcaaagcgaggtattgaaatacaagccaggacgccataacctgggaaacactagaatgcgcagcgtgggacacgagaatccaggtagtcgcgaacttaaaagaagagaaaagccacagcagtctcccgcaatcgagcacgggcgcaggtctaatgtcttgggagataagctgcatatcaaaggcagctctgtgaaatctaataagaaatag

SEQ ID NO: 125219 - DNA, 777 bp, synthetic construct
  misc_feature 1..777: note = Description of Artificial Sequence: Synthetic coding sequence
  source 1..777: mol_type = other DNA
atgcgacagatgatccgcagtttcagtgaaccttttggcagagaccttctctcaatctctgatggccgcggcagagcccacaataggagaggacacaatgatggcgaggatagccttaccgctacttcgtgtagtttggtccccttcggcgactttggaggaatgcatacagacgtctcctcctttcagactatggaccagatggtatccaatatgcggaattatatgcagaaactggaacgcaacttcggccaattatccgtcgatcctaatggccactcattttgctcatctagcgtgatgacctatagcaagatcggggatgaaccgcccaaagtctttcaagcttcgactcagacccgcagagcacctggtggaataaaggagacccggaaggctatgagggactctgacagtggactagagaagatggctataggtcaccacatccacgatcgcgctcacgttataaaaaaatccaagaacaaaaagacgggcgacgaggaagttaaccaggagttcattaacatgaatgagtccgacgcgcatgccttcgacgaagagtggcagtccgaagttctgaaatacaaaccaggtcgccataatttaggcaacactcgcatgagatctgttggccacgagaatccgggaagccgggaactaaagcgacgagagaagcctcagcagagtcctgcaattgagcacggaagacgcagtaatgtgctcggtgataaactccatattaagggatcctcagtgaagtctaacaagaaatag

SEQ ID NO: 125220 - DNA, 732 bp, synthetic construct
  misc_feature 1..732: note = Description of Artificial Sequence: Synthetic coding sequence
  source 1..732: mol_type = other DNA
atgcgccagatgatccgttctttcagcgagccatttggtagagatctgctgtccatttcggacggaagaggtcgtgcacataaccggagaggtcacaatgatggcgaggacagtttgacccacactgatgtttccagttttcaaacaatggaccaaatggtgtccaacatgaggaattatatgcagaagctggagagaaacttcggccagctatcggtggatcccaacggacacagcttttgttcctcttctgtaatgacctatagcaagataggcgatgaacctccaaaagtctttcaggcgtccactcaaacccgcagggcacctggggggataaaagagactcgcaaggccatgcgggacagtgacagtggacttgagaagatggctattggccaccatattcatgacagggctcacgtaatcaagaagtcaaagaacaagaaaaccggtgatgaagaagttaaccaggaatttataaacatgaatgagtccgacgcgcacgcctttgacgaggagtggcaaagtgaggtgctcaaatataaacctggcagacataatcttgggaataccaggatgagaagtgtggggcatgaaaacccagggagcagggagctcaagcgtcgcgagaaacctcagcagtcacccgcgatcgagcatggcagacgaagtaatgtcttaggcgacaagctccacattaaagggtcttcagttaaatccaataagaagtag

SEQ ID NO: 125221 - DNA, 732 bp, synthetic construct
  misc_feature 1..732: note = Description of Artificial Sequence: Synthetic coding sequence
  source 1..732: mol_type = other DNA
atgcgccagatgataagatcattcagtgaacctttcggaagagacctattgtctatctccgacggccgggggcgagcccacaacagaagaggtcataacgacggagaagattccctgacgcataccgatgtgagtagtttccaaacaatggaccagatggtctccaatatgcgcaactacatgcaaaagttagagagaaattttggccagcttagcgtcgaccccaacgggcattcgttctgttctagcagcgtgatgacatatagtaaaatcggcgacgagcctcctaaggtcttccaggcctccacacaaacgagaagggccccagggggaattaaagagactcgaaaggcgatgcgcgactctgattcagggctggagaagatggcaatcggccaccacatccacgatagggcccatgtgatcaaaaagagcaagaacaagaaaaccggcgacgaggaggttaaccaggaatttatcaatatgaatgagagtgacgctcatgcattcgacgaagagtggcaaagcgaggtgctaaaatacaaaccgggccgccataatctgggaaatactagaatgcgcagtgttggccatgagaatccagggtctcgagagctgaagaggcgtgaaaaaccccagcagagccctgccatcgaacatggccggagaagtaacgtgcttggagataagctgcacattaaggggagtagcgttaagtccaataagaaatag

SEQ ID NO: 125222 - DNA, 603 bp, synthetic construct
  misc_feature 1..603: note = Description of Artificial Sequence: Synthetic coding sequence
  source 1..603: mol_type = other DNA
atgcgacagatgatacgctccttcagcgaaccgtttggcagggacctgctgtctatctcagatggcaggggccgggcccacaacaggagaggccacaatgacggggaggattctctcacacacactgatgtcagctcgtttcagactatggaccagatggtgtcaaatatgcgaaattacatgcagaagttagaaagaaactttataaaagaaaccaggaaggccatgagagattccgactcggggcttgaaaaaatggcaataggccaccacattcatgatcgtgctcacgtgattaaaaagagcaagaataaaaagaccggcgacgaggaggttaaccaagaattcataaacatgaatgaaagtgacgcacatgcatttgacgaggagtggcagtctgaggtccttaagtacaagcccggcaggcacaacctgggtaacactaggatgcgctcggtaggacatgagaatcctggcagtagagagttgaagagacgggagaaacctcagcagtcccctgcaattgagcacggcaggaggagcaatgtgttaggagacaagctccatatcaagggatcctcggtgaagagcaataagaagtag

SEQ ID NO: 125223 - DNA, 747 bp, synthetic construct
  misc_feature 1..747: note = Description of Artificial Sequence: Synthetic coding sequence
  source 1..747: mol_type = other DNA
atgttccggttcatgcgcgatgtcgagcccgaagatccaatgtttttgatggatccctttgcaattcatcggcagcatatgtcacggatgttgagcgggggatttgggtactccccattcctgagcatcacagacgggaacatgcctgggacacgccctgcgtcaaggcggatgcaacaggccggggccgtgagcccattcggcatgctaggaatgtcagggggctttatggatatgtttggaatgatgaatgatatgatcggaaacatggagcatatgaccgccggtggaaactgccagactttttcctcctctacagtcatttcttacagtaataccggggatggagctccgaaggtctatcaagagacgtcagaaatgcggtccgcaccaggcggaattcgcgaaacaaggaggacagttcgggatagcgactcgggactagagcagatgtctatcggacaccacatccgggatagggcacatattctccagaggagccgcaaccatcgaactggtgaccaggaggagagacaggactacatcaaccttgatgagtctgaggccgccgccttcgacgacgaatggcgtagggagacatcacgcttcagacagcagaggcctcttgaatttcgccggctagaaagcagcggggccggagggaggcgtgcagagggtccccccagacttgctatccagggaccagaggacagcccctctcggcagtccaggagatatgattggtag

SEQ ID NO: 125224 - DNA, 747 bp, synthetic construct
  misc_feature 1..747: note = Description of Artificial Sequence: Synthetic coding sequence
  source 1..747: mol_type = other DNA
atgttccggtttatgagagacgttgaacccgaagaccctatgttcttaatggatcctttcgccatacatagacagcacatgtccagaatgctgagcggcggattcgggtatagcccctttctttcaatcacagatggtaatatgcctggtactcgccccgcgagccgcaggatgcagcaggctggcgccgtgtcgccattcggtatgctggggatgtctggcggatttatggatatgtttggaatgatgaatgatatgatcggcaacatggagcacatgacggccggaggcaactgtcaaactttctcgtcgagtactgtgatcagttactccaacactggcgacggggcacctaaagtataccaggaaacttctgagatgagatctgcacccggggggattcgagagactcggcgcaccgtgcgggacagcgattcagggctggaacagatgtcgattggacaccacattcgagatcgagcccacattctgcagcgttctagaaatcacagaacaggggaccaggaggagcgccaggattatattaatctggacgagagtgaagccgcagccttcgatgacgaatggaggcgagaaacaagcagattcagacagcagaggccgctggagtttagaagactagaatcatctggcgcgggaggtaggcgggcagagggccccccccggctggccatacagggtcctgaggattcaccgtcaagacaatcgcgacggtatgactggtag

SEQ ID NO: 125225 - DNA, 747 bp, synthetic construct
  misc_feature 1..747: note = Description of Artificial Sequence: Synthetic coding sequence
  source 1..747: mol_type = other DNA
atgtttaggtttatgcgagatgttgagccagaagatccgatgtttctaatggatccgttcgctattcacagacagcatatgtccaggatgctgagcggaggattcgggtactctcccttcctgtcaatcacagatggcaatatgcccggtacccgacccgcgagtagacgcatgcaacaagctggggctgtgtccccattcggcatgcttggcatgtccggcggttttatggatatgtttggaatgatgaatgacatgattggtaacatggagcatatgactgcagggggtaattgccagacgttctccagctctactgtgatttcctacagcaacactggggatggagcccctaaggtgtaccaggaaacgtcagagatgcggagcgccccaggggggatccgcgaaacacgacgcacagtgcgggattccgatagcggtctggaacaaatgtcaatcggccatcatattagagacagggcccacattctacagagatcccggaaccacagaactggcgaccaagaggagcggcaggattacatcaatttagacgaaagcgaagcggccgcgttcgatgacgagtggagacgtgaaacttcccgcttcagacagcagcgcccactcgagtttcgccgcttagagagttcgggcgctggagggcgccgtgcagaaggtccaccaaggctggcaatccaggggcccgaggacagcccgagcagacaaagccgccggtatgactggtag

SEQ ID NO: 125226 - DNA, 747 bp, synthetic construct
  misc_feature 1..747: note = Description of Artificial Sequence: Synthetic coding sequence
  source 1..747: mol_type = other DNA
atgtttcggttcatgagagatgtggaacctgaagatcccatgtttctgatggatccattcgctattcaccggcaacacatgagtagaatgttgagcggcggatttgggtactctccattccttagcatcaccgacggcaatatgcccgggacccggccggcttctcgcagaatgcagcaggctggcgcggtgagcccatttggcatgcttggaatgagtggtgggtttatggacatgttcgggatgatgaatgacatgatcggaaacatggaacacatgactgccggcggcaattgccagactttcagctcatctaccgtgatcagttatagcaatactggtgatggagctccaaaagtgtaccaggaaaccagcgagatgagaagcgccccgggggggatccgggagacacgccgaactgtccgcgatagcgactctggactggaacagatgagtatagggcaccacatccgcgatagggcacatattctacaaagatcgcgcaaccatcggaccggtgaccaggaagaaagacaggactacataaacctggatgaatcagaagctgctgcctttgacgatgaatggcgtagagaaacctcgagatttcgtcaacaaagacccctcgaattccggcgcttagagtctagtggcgccggcgggagacgggcggaagggccccctcgtctggctattcaaggccctgaggattctccatccaggcagtcgcggagatacgattggtag

SEQ ID NO: 125227 - DNA, 684 bp, synthetic construct
  misc_feature 1..684: note = Description of Artificial Sequence: Synthetic coding sequence
  source 1..684: mol_type = other DNA
atgatggcagcgggggcagcacttgcactggcgttatggctgttaatgcccccagttgaagtggggggtgctggtccaccaccaatccaagatggggagtttacatttctgctccccgccggccgtaagcagtgcttttatcagagtgcacctgccaatgcttcactcgagactgagtatcaggtgattggcggtgcgggcttggacgttgatttcacactggagtccccacagggcgtactccttgttagcgaaagccgaaaagctgacggtgtccacacagttgagcctaccgaggcaggagattacaagctgtgttttgataactcttttagtacgatctcagagaaactcgtgttcttcgagctgatctttgacagtctgcaagacgatgaggaggtcgagggatgggccgaggccgtcgaacccgaagagatgctggacgttaagatggaggacatcaaagaatctatcgaaaccatgcgtacgcgccttgagcgcagcattcagatgttaacacttctaagagccttcgaagccagggaccgtaacttgcaagagggtaatctcgaaagggtaaatttctggtcggccgtgaacgtggcagtcctcctgctcgtggccgttctgcaggtctgcaccctgaagcggttttttcaggacaaacggccggttcctacttag

SEQ ID NO: 125228 - DNA, 873 bp, synthetic construct
  misc_feature 1..873: note = Description of Artificial Sequence: Synthetic coding sequence
  source 1..873: mol_type = other DNA
atgcgcccagccgttcttggctcgcctgatagggcccctccagaagatgaaggacccgtcatggtgaaactcgaggactcagaggaggaaggcgaggctgctctttgggaccccggacctgaggccgccagactgcggttcagatgtttccgatatgaggaggctacaggccctcaagaggccctggcccagcttcgagagctctgtcgacaatggctcaggcccgaagtgcgtagcaaggaacagatgctggagctgctcgttctggagcagttcttgggtgccctgcccccggaaattcaggccagagtacagggtcagcgacccgggtcccccgaggaggccgccgcactggttgacggattgcgcagggaaccaggtggtccccgtagatgggtgacagtgcaggtccagggccaggaggttctgtccgagaagatggaacctagttcctttcagccactgcctgagaccgagccacctacccctgagcccgggcctaagactccgccacgtactatgcaggaatcccctttaggactgcaggtaaaggaggaatcagaggtgaccgaggatagcgacttcctggaaagtggtcctcttgcggctacccaggaatcagtccccacactcctgccagaggaagcccagagatgcggcacagtccttgaccagatatttccgcactccaaaactgggcccgaggggcccagctggagggaacacccaagagctttatggcatgaggaggccggcggaatattcagtccaggcgctggggcgggggccgctcccgctcttggagccggttggcttggcgcagccgtcgcaatgtatgtggccagatgctccgccaatgctgctacatgttag

SEQ ID NO: 125229 - DNA, 2205 bp, synthetic construct
  misc_feature 1..2205: note = Description of Artificial Sequence: Synthetic coding sequence
  source 1..2205: mol_type = other DNA
atgaggccggccgtgctgggctcccctgacagggcaccacctgaggatgagggtcctgtgatggtgaagctggaggatagcgaggaggagggcgaggccgctttatgggacccgggtccagaggctgctcggcttcgttttagatgctttagatacgaggaagccaccgggccccaagaggcactcgcccagctccgggaattgtgccgacaatggcttcgccccgaggtccggtcgaaagagcagatgttggagctcttggtgctagagcaattccttggcgctctgcctccagagatccaggctagggtgcagggacagcgtcccggctctcccgaggaggcagccgccttggtcgatggtctgcggcgggagccagggggccctcgtaggtgggttacagtgcaggtccagggacaggaggtgttgagcgaaaagatggaaccctcaagcttccagcctttgcccgaaaccgaacctccaacgcccgagcccggcccaaagactcctccacgcactatgcaagagtctcctctcgggctgcaggtcaaagaagagagcgaggtcactgaggatagtgattttctggaatccggccctttagccgctacccaggagtcagtccctactttgctgcctgaagaagcccagcggtgcggcacagtccttgatcagatttttccccacagcaaaaccggacctgagggccctagttggagggaacatcctcgggccttgtggcacgaggaagctggaggaatcttttcacctggattcgccctgcagctggggagcatttcagcaggtcccggctctgtatcaccgcacctgcacgtgccatgggacctgggcatggccggactgagtggacagatccagtctccaagccgcgagggtggttttgcacacgcactccttttaccatctgatctccgctcagagcaagatcccactgacgaggatccctgccggggggtggggccagccttgatcaccactcgctggcgaagcccacggggtcggtccaggggcaggcccagtaccggcggcggagtggttcgtgggggacggtgtgacgtgtgcgggaaggtgttttcccaacggtcgaatctcctgcgccaccagaagatccacaccggcgagagacctttcgtgtgcagcgagtgcggacggagcttttcccggtcctcccacctgctacggcatcaattgactcacacggaggagagaccatttgtgtgcggagactgtgggcagggatttgtgagatccgcacgacttgaggaacacaggagggttcataccggcgagcaaccttttcggtgcgctgagtgtggacagtctttccggcagcgatctaatcttttacaacaccaaaggatacatggcgatcctcccgggccgggcgctaagccacccgcgcctcccggagcacctgaaccacctggacccttcccctgtagtgagtgccgagaaagttttgcacgaagagccgtacttttggaacaccaagccgtgcatacaggcgataagagctttggctgtgtcgagtgcggcgaacgatttggtaggcgctctgtgctattgcagcatcggagggtacattccggagagaggccattcgcttgcgcagaatgtggacagtcctttagacagaggagtaaccttacacagcaccggcgtatccatacaggcgaaaggccattcgcttgtgctgagtgcggcaaagcctttcgccagaggcctacattgacccaacacttgagagtgcacacaggagagaaaccttttgcttgccccgagtgtggtcaaaggttcagtcagagacttaaactgacccgccatcagcgcactcacaccggagagaaaccatatcactgcggcgagtgcggtctcggcttcacccaggtgtctagactgactgaacaccagaggattcacaccggtgaaagaccctttgcttgcccggagtgtgggcagagcttcaggcagcacgccaatttaacgcagcacagaaggatacacaccggggagcggccttatgcctgccccgaatgtggcaaagcctttcgacagcgacccactctgacacagcacttgcggacccacaggagggagaaaccgtttgcttgtcaggactgtgggaggagatttcaccagtccactaagctcatccagcaccaacgtgtgcactccgccgagtag

SEQ ID NO: 125230 - DNA, 1539 bp, synthetic construct
  misc_feature 1..1539: note = Description of Artificial Sequence: Synthetic coding sequence
  source 1..1539: mol_type = other DNA
atggctcatagttgtagatggagattccccgctcgtccaggcacgaccggcggtggcggtggcggtggacgccggggactgggcggggccccaagacagcgagtacctgccttgctcctacctccaggtccccctgtgggaggaggcggaccgggagctccaccctctccgccagccgttgccgctgcggctgcagccgccgggtccagtggagctggggtaccgggcggcgccgctgccgctagcgccgcttcttcatcaagcgcaagctcatccagttccagctccagcagtgcctcaagcggaccagcacttctacgcgtgggtccgggattcgacgcagcacttcaggtatcagctgctattgggacaaacttaaggagattccgtgcggtatttggagagtcaggcggcggcggtggttctggggaacttacaacacagatcccttgttcttggcgaactaagggccacattcatgataagaaaacagagcctttcaggctcctcgcttggtcctggtgcctaaatgacgagcagttcttgggttttgggtccgatgaagaggtgcgggtccggtcacctactcgcagtccctctgtcaaaacaagtcccagaaaaccacgaggtagaccacgcagtggatcggacagaaacagtgccattctgtcagatccatctgtcttcagcccactgaataaaagtgaaactaagtccggggacaagattaaaaagaaagatagcaagagcatcgagaaaaaacgcggacgccctcctactttccctggcgtgaagatcaaaattactcatggcaaggacatttcagagctccccaaaggcaacaaggaggacagccttaaaaagatcaaacgcaccccctcagcgacgttccagcaggccactaaaatcaaaaagctgcgcgctgggaagctctctcctctgaagagcaagtttaagacagggaaattacagatagggagaaagggcgtgcaaatcgttcgcagacgcggaaggccgccatccacagagcggataaaaacgccgtcggggctgctgattaacagtgagctggaaaagccccagaaggtcaggaaagataaagaaggcaccccccctctgacaaaagaggacaagaccgtcgtacgtcagagtccacgtcgcatcaaaccagtacggatcatcccatcctccaaacgtaccgatgctactattgccaaacagctgttgcagagagctaaaaagggtgctcagaagaagattgaaaaggaagcagcccagcttcaagggcgaaaggtgaagacacaagtgaaaaatatcaggcagttcataatgcccgtggtaagcgccatatcgagcaggattataaaaacacctagaaggtttatcgaagacgaagattacgatccaccaatcaagattgcccggctggaaagcacaccaaattctagattttcggcaccatcctgcgggtcttcggaaaagtccagcgctgcttcccagcacagctcccagatgagctccgattccagccgctcatag

SEQ ID NO: 125231 - DNA, 11796 bp, synthetic construct
  misc_feature 1..11796: note = Description of Artificial Sequence: Synthetic coding sequence
  source 1..11796: mol_type = other DNA
atggcacactcctgtcgttggcgctttcccgcccgccccggtactacaggcggtggggggggcggtgggcgcagagggctaggaggggcccccagacagcgcgttccagctttacttctccctccaggaccgcctgttggtggcgggggtcctggagcgcctcccagcccccccgccgttgcggcagccgcagccgccgccggtagctcaggcgcaggtgtccccggaggggccgcggccgccagcgccgcatcttcaagcagcgcaagctcttcgtcgtcctcctcgtcctctgcttctagcggacccgccttgctgcgggtgggccctggattcgacgccgccctccaggtgtcggccgccattggcacaaacttgcggcggttcagagccgtgttcggggaatctggcggcggcggaggatccggggaagacgagcagttcctggggttcggcagcgatgaagaggtaagggtgagaagcccaacaaggtctcctagcgtgaaaacaagcccacggaagccacgaggtagacccagatctgggtcagaccgcaattcggccatccttagtgacccgagtgtgttttctcctctgaataagagcgagactaaatctggcgacaaaatcaaaaaaaaggacagtaagagtatcgagaaaaaaaggggcagaccgcctacctttcctggggtgaagattaaaatcacccatgggaaggacatatcagaattacctaaaggcaataaggaagactcgctcaagaagatcaagcgcaccccgtcagctacctttcagcaagccaccaagattaagaagctgcgcgctgggaaactgtcgccgctaaagtcaaagttcaagacaggaaagcttcagattgggagaaagggcgtgcagatcgtcaggcggcggggccgccccccgtctacggagaggatcaagacccccagcggactcctgatcaacagcgaactggagaagccacagaaagtgcggaaagacaaggagggtacacctcccctcacaaaggaagataaaaccgtagtgcggcagtctcctcgtcggatcaaacccgtccgtataatcccatcgagtaaacgcacagatgctactatagccaaacagttgctccaaagagcaaaaaaaggtgcgcagaagaagatcgagaaggaggcggcacagctgcagggcaggaaagttaagacacaggtgaaaaacataagacagtttatcatgcctgtagtttcagcaatttcttcacggattatcaaaacgcctaggcggtttattgaagacgaggattatgacccacctattaagattgcacgcttggaatcaactccaaatagtcgattttcggctcccagctgcggctcctcggaaaaatctagtgccgcatcacagcatagttcccagatgtcttccgattcaagcagatccagttcaccctcggtggacacatcaaccgattctcaggcaagcgaagagatccaggtgttgcccgaagagcggtcggacacacctgaggtgcatccccctctgccaatatcccagtcccctgaaaatgagtctaatgacaggaggtccaggaggtatagtgtgagtgaacgcagcttcggatcacggactacaaagaagttgtccacattgcagtcggccccacagcagcagacctcgtcttcccctccccctcccttactaacccctcctcccccacttcagccagcgagtagtataagtgaccacactccctggctgatgccgccaacaatcccactcgccagcccatttcttcccgcttccaccgcccccatgcagggtaaaaggaagtccattctacgtgagccaacgttcagatggacaagtctgaaacattctcggtccgagcctcagtacttttcttccgctaagtatgcaaaagagggactcatccgaaaacccatttttgacaatttcagaccaccacctctgaccccggaggacgtggggtttgcctctggcttcagcgctagtggcacggcagctagcgcacgcctcttctctcccctccatagcggtacaaggttcgacatgcacaagaggtctccgctccttcgggccccacggtttactcctagtgaagcccatagtagaatctttgagtcagtcaccttgcccagtaatagaacatctgcaggcacgtcgtcaagtggggtatccaacagaaagagaaagcgaaaagtctttagccctattcgctccgaaccgaggagcccttcacacagtatgcgaacccgctccggacgcctttctagtagcgaactgagccctctgacaccccccagctccgtcagttcgagcctttcaatatcggtttcccccctagctacctcagcattaaaccctacattcacctttccatcccactcactcactcagagtggggagtccgccgagaaaaaccaacgccctcggaagcaaacctctgctccggctgagcccttcagtagctcctctcccacaccgctattcccctggtttacgcctgggtcccagaccgaaaggggccgaaacaaggataaagcacctgaagagctcagcaaagatcgtgacgcagataagagcgtagaaaaagataaaagccgggagcgcgatagggagcgggagaaggagaacaagagagaaagtcgtaaggagaaacgcaaaaagggaagcgagattcagtcttcaagtgccttgtatcctgtgggccgcgtgtccaaagaaaaggtcgtgggcgaggacgtcgcgaccagttcctctgctaaaaaggcaacgggtcgcaaaaagagcagcagccatgactccgggactgatatcacttcagttacattgggagatacaacagccgtcaaaacaaaaattttaattaagaagggtcggggtaacctagagaagactaatctggatctgggtccaactgctccgagtctggaaaaggagaaaacactttgcctgtctacaccatcttcatccacagttaaacatagcacctcaagcattggctcaatgctcgcacaggcggataaacttcctatgaccgataaaagagtcgcctctctgctgaaaaaagccaaagcccagctttgtaaaattgagaagtcaaaatccctgaagcagaccgaccagcccaaggcacaagggcaggaatcagacagtagtgaaacgtcagtgcggggtccccggattaaacatgtttgcaggagagctgcggtggccctggggcgcaaacgtgccgtgttcccagatgacatgccaactctatccgcattaccctgggaagagcgagagaaaattctgtcaagcatggggaatgacgataagagctcgatcgcaggtagcgaagacgccgagccccttgcgcctccgatcaagcccatcaagccagttacaagaaacaaagccccgcaggagcctcccgttaagaaggggaggcgttcccggcgctgcggccaatgtcccgggtgtcaggttccggaggactgcggtgtctgcaccaactgtttagataaacctaaatttggtggtcggaatatcaaaaaacagtgctgcaagatgcggaaatgccagaacctgcagtggatgcctagcaaagcatacctacaaaagcaggcaaaggctgtcaagaagaaagaaaagaagagcaagactagcgaaaagaaggattcaaaagagtcaagcgtcgtaaagaacgtggtggacagctcacagaagcctacacccagcgctcgcgaggatccggcgcctaagaagtcaagctctgagccaccgccaaggaagcctgtagaagaaaaaagcgaggagggcaacgtaagcgccccaggccctgaatctaagcaggctaccacgcctgcatcccgcaagtcaagcaaacaggtaagccagccggccttagtgattccaccgcagccccccactacaggtccacccaggaaggaggttcccaaaactactccatctgagccaaaaaagaagcaaccaccccccccagagtccggcccggaacagtcgaagcagaagaaggtggctcctcggccatccattccggtgaagcagaaacctaaggagaaagaaaagccgcccccagtgaacaaacaggaaaatgccgggacactaaatatcctgtcaacactgtcgaacgggaactcctccaaacaaaaaattcctgccgacggggtgcacaggattagggtggacttcaaattcgtttactgccaggtgtgctgtgagccttttcacaagttctgcctggaggaaaatgaaagacccctggaggaccagctggaaaactggtgctgcaggagatgcaagttttgtcatgtatgtggaaggcagcatcaggccaccaagcagttgctggaatgtaataagtgcagaaattcttaccatccagagtgcctcggtcccaattatccgacaaaacccacaaagaaaaaaaaggtgtggatctgcacaaaatgtgtgcgctgcaaatcctgcggttcaaccacacccggaaagggttgggacgcgcaatggtcgcacgacttctcactgtgccatgattgcgcgaagctgttcgcaaaagggaacttctgcccgttatgtgacaaatgctatgatgatgatgattatgaatccaaaatgatgcaatgcggaaagtgtgaccggtgggtgcactctaagtgcgagaatctgagtgatgaaatgtacgagatcttgtcgaacctgccagaaagcgttgcgtacacctgcgtgaactgtacagagaggcatccagccgagtggcggcttgcgctcgagaaggagctccaaatctctctcaaacaggtgctgaccgccctactgaattcacgcaccacgtctcatctcttacgctaccgccaggccgccaagccgcctgatctgaacccagagaccgaggaaagcataccatcgcgctccagcccagaagggcccgaccctccggttttgacagaggtgtccaaacaggacgaccaacagccccttgaccttgagggagtgaaacggaaaatggaccagggcaactacacgagtgtgctggagttctcagatgatattgttaaaattattcaggccgcaattaatagcgatgggggacagccagaaattaagaaagccaacagtatggtaaagtctttttttatcaggcagatggagagagtgttcccttggttttccgttaagaaatccaggttctgggagccaaataaggtgagcagcaactcaggcatgctgccaaatgctgtcctcccccctagtctggaccataactatgcacagtggcaggaacgggaggaaaactcccacaccgagcagccccctctgatgaagaaaattatccctgcacccaaacctaaggggcccggcgaacccgacagccccacccccttgcaccccccaacaccgccgatcctgagcaccgaccgatctcgcgaggatagtccggaactgaacccaccacctgggattgaggataatcgccaatgcgccctctgcctgacctacggcgacgattcagccaatgacgccgggcggttactctatattggtcagaacgaatggactcatgtaaactgtgcgctgtggagcgccgaagtgtttgaagacgatgatgggtcactgaaaaatgtgcacatggcagttattcgcggcaagcagttgcgttgtgagttctgccagaaacctggggccaccgtgggatgctgtctgaccagctgtacctctaactaccacttcatgtgtagtcgcgcaaagaattgtgtgttccttgatgataagaaggtgtattgccagagacatcgggacctgatcaagggggaggtggtgcctgagaatgggtttgaggtgttccggcgtgtcttcgttgattttgagggcattagtctgaggcggaaattcctgaatggactggaaccggagaatatccacatgatgatcggatctatgaccattgactgcctggggattctcaatgacctgagcgactgcgaagataaactgttccctattggctatcagtgcagccgggtgtactggtctactactgacgcccgcaaacgttgcgtatacacttgtaagatagtggaatgtaggccccccgttgtggagccagacattaatagcacagttgaacatgacgaaaaccgcaccattgctcatagtcccacatcctttacagaatcttcctcgaaggagtctcaaaatactgcagagatcatctccccaccttctcctgatcgccctccacattcccagacatccgggtcctgttactatcatgtgatctccaaagtgcccagaatcaggacgccttcttatagccctacccagcgtagccctggctgcagacctctgccgtctgcaggatcgccaactcccacaacgcacgagatagtgacagtcggcgaccctcttctctccagcgggctgcgctctattggatctcgaaggcattctacctcatctctctcacctcagagatccaaactgaggataatgtccccaatgaggaccggtaatacctactcccgtaacaacgtgagcagcgtgtcgaccacaggcactgccaccgacctggaatcaagcgccaaagttgtagaccacgtcctcgggcctctgaacagtagtacatccctaggtcaaaatacttccacttcttccaacttgcagcgcacagtggttacagtgggtaataagaactcccacctggacggctcctcatctagtgagatgaaacagtcaagcgccagtgatttggtaagcaaaagctcaagtcttaaaggagagaaaactaaggtcctgagctcaaaatcctccgaagggtctgcccacaacgtggcgtatcccggtatacccaagcttgccccacaagtgcacaataccacgtcccgtgaactcaacgtttcaaagattggctcttttgccgaaccctcctccgtgtccttttcgtccaaggaagctttatctttcccacacctccatctgcggggccagaggaatgacagggaccagcacactgacagtacacagtccgccaatagctcaccagatgaagatacagaggtgaagactttaaaactgagtggaatgtctaaccggtcatctatcattaacgaacacatgggctcctcatcgagggacaggcgccagaaggggaagaaatcctgtaaagaaacatttaaagagaaacacagctccaagtccttcctggaacccgggcaggttaccacaggcgaagaaggcaacctcaagcctgagtttatggatgaagtcctcacgcccgagtatatgggtcagcgaccttgtaataatgtaagcagcgataagatcggagataagggcctctccatgcctggagttcccaaggccccgccaatgcaagtcgaaggatccgccaaagagttgcaggccccaagaaagcggaccgttaaagtgaccctcactcctctcaagatggaaaatgagtcccaatcgaaaaacgcattaaaggaaagctcgcccgccagccccctgcagattgagtcgacctcacccaccgagcctatcagcgcatctgagaaccccggtgacggcccagtggcccagccctcccccaacaatactagctgccaggatagccagtcgaataattaccagaaccttcccgtgcaggaccgcaatcttatgctccccgacgggcctaagccgcaggaggatggcagttttaaacggcggtacccaaggagaagtgcccgcgccaggagtaatatgttcttcggtcttacccctttgtatggagtgcgctcttacggcgaagaggacattcccttttactctagctcgacaggtaagaagcgcggcaagaggtctgctgaagggcaggtggacggtgccgatgatttgagcaccagcgacgaggatgatctttactattataattttaccaggacggtgattagctctgggggggaggaaaggctggcctcccacaatttgttccgggaggaggaacaatgcgatctgcccaagataagccaactggacggggtggatgatggcacggagagcgacacttctgtcacagcaaccacccgtaaaagcagtcaaatccctaagcgtaacggcaaagagaacgggaccgaaaacttgaagattgatagacctgaggacgcaggagagaaggagcacgtcaccaagtcttctgtcggtcacaaaaacgagcctaagatggataattgtcactccgtgtctagggtgaagacacagggccaggactctctcgaagcgcagttgtcctcacttgagtccagccggagagtgcacacatcgaccccctcggataagaacctgcttgacacttataacacagagctgcttaaatctgattcagacaacaataatagcgacgattgtggcaacatactccccagcgacattatggactttgtgctgaagaacactcctagtatgcaggcactgggcgagagccctgaatcatccagctcggagctcctgaacctgggcgaaggtctggggttggattctaaccgcgagaaggacatgggtcttttcgaggtgttcagccaacagctgccaactacagagcccgtggattcttccgtgagcagctctatctctgcagaggagcaatttgagctacctttggaactcccaagcgatctgtccgttcttaccactcggtctcctacagtgccgagccagaatccgagcaggctggccgtaattagtgattctggggaaaagagagtcaccataaccgagaaatcagtggcttcgtctgaaagcgaccccgcccttttgagccccggtgtcgatccaactcccgagggccatatgactccagatcactttatacagggacatatggacgccgatcatatctccagccctccctgtggcagcgtcgagcagggtcacgggaacaaccaagatctgaccaggaactcatccacgccaggcctgcaagttcccgtgagcccaaccgtacccatacaaaaccaaaagtacgtacctaatagtacagatagtccagggccctctcagatctcaaacgctgccgtgcagaccactccaccacaccttaagccagccacagaaaagctgattgtggtgaatcagaacatgcagcccctgtatgtgctccagactcttccaaacggagtgactcagaaaattcagctcacctcgtcggtctcctctacaccttccgtgatggagacaaatacatccgtgcttggacccatgggaggcgggttaactttgacaaccggcctcaacccaagcctgcccacttcacagagcctgtttccaagcgcatccaaaggactccttccaatgtcccatcaccaacacttgcatagctttcctgccgcgacgcaaagctcttttccacccaacattagtaaccccccttctggtttgctgattggagtgcagcccccacctgacccccaactgctagtcagcgagtcctcccagcggaccgaccttagcactaccgtggcaactccctcaagtgggttgaagaaaaggcctatttcacgtctgcagacgagaaagaacaagaaactcgccccttcatcaacgcccagcaacatcgcccctagcgacgtcgtatccaatatgacactaataaattttaccccaagccagttgccgaaccacccctctttgctcgacctaggaagcctcaatactagctctcaccgcaccgttcccaatattattaagcgatcgaaatcttctatcatgtattttgagccagcacccttgctcccacagtcagtagggggtaccgctgccacagctgcaggaacgagcaccatctctcaagatacgtcgcatcttacgagcggaagcgtctccgggctcgcatctagctcgtccgtgttgaacgtggtctcgatgcagaccaccactacacctacgtcaagcgcctcggtccctggccatgtcaccctgacgaaccctcgcctactcggaaccccagacattgggtccatctcaaacctactgatcaaagcgagccagcagagcctgggaattcaggatcagccagtggccctgccaccatcttctggtatgtttcctcagctcggaacctctcaaactccttcgacagccgccatcaccgctgcatccagcatatgcgtgctgccctctacccagactactggaattacagccgcctccccatctggcgaggctgacgagcattatcaactgcagcacgtcaatcagttgctggcgagcaaaacaggtatccacagcagtcagagagacctcgactccgccagcggtccacaggtgtcaaacttcactcagaccgtggacgcaccgaattcaatggggctggagcaaaacaaggccttgtctagtgccgtgcaggcgtccccaacctctcccggaggctccccaagcagcccctcatccggacaacgctctgcatcaccctcagtgcctgggccaaccaagccaaaaccaaagaccaaacgttttcaactgccacttgacaaaggtaacgggaaaaagcataaggtgtcccacttgagaactagttcctccgaagcgcacattccggaccaggaaacaactagcctaacaagtggaaccgggacccccggggcagaggccgagcagcaagacactgcttcagttgagcaaagctcccagaaggagtgcggtcagcctgccgggcaggttgccgtcctacccgaagtgcaggtgacccagaatccagcgaacgagcaggagtcagccgaaccaaagactgtggaagaggaggaatctaatttctcatccccacttatgctatggctccaacaggagcagaaaagaaaggagtccatcacagaaaaaaagccaaagaaagggctagtctttgagatctcaagtgatgacgggtttcagatctgcgccgagagcatagaggatgcctggaagagtctgaccgacaaagttcaggaagctcggagcaatgcaaggctcaaacaactgagctttgctggcgttaatgggctgcgaatgctggggatcctgcacgatgcagtcgtttttctcattgaacagctgtctggcgcaaagcactgccgcaactataagttccgattccacaagccagaagaggcaaatgaacctcctttgaatcctcacgggagcgcgcgcgccgaggtgcacttacgcaaatctgcgttcgacatgtttaattttttggcttcaaagcaccggcagccacccgagtataatcccaatgatgaagaagaagaggaagtccagctgaagagtgccaggagagctacttccatggatctgcctatgcccatgcggttccgccacctgaagaagaccagcaaggaagccgttggagtttaccgatcgccaatccatgggagaggcttgttttgcaaacgtaacatagacgccggagagatggttatagagtacgcaggcaatgtcatccgctccatccaaactgacaagcgcgagaagtactatgatagcaaggggataggttgctatatgttccgaattgacgattctgaggttgtcgacgctactatgcatgggaacgctgcaagattcatcaaccattcttgcgagcccaattgctatagtagggtcatcaacatcgatgggcagaagcatatagttattttcgctatgcgcaagatatacagaggggaggagttaacctacgactacaaatttccaatagaggatgcttctaacaagctgccatgcaattgtggcgctaagaagtgtcgtaaatttttgaattag

SEQ ID NO: 125232 - DNA, 8640 bp, synthetic construct
  misc_feature 1..8640: note = Description of Artificial Sequence: Synthetic coding sequence
  source 1..8640: mol_type = other DNA
cacgcccatcccgagtgtttaacaatggaacgggagaagatactgtcctcaatggggaacgacgataagtctagcatcgctggatccgaagatgcggagcccttagcgccacccattaaacctatcaagcccgtgactcggaacaaagcccctcaagaaccacccgtcaagaaagggagaagatcacggaggtgcggccagtgccctgggtgccaggtccccgaagactgcggcgtgtgtacaaactgtctagacaaaccaaagtttggcggccgaaacattaagaaacaatgctgcaaaatgcgcaagtgtcagaacctacagtggatgccaagcaaggcttacctacaaaagcaagccaaggcggtgaaaaaaaaggaaaaaaaatctaagacttccgagaaaaaagacagcaaagagagctccgtggtcaagaacgtcgtggattcctctcagaaaccgacaccctcagcgagagaggatcccgcccccaagaagtcatcttcagaaccgccacccagaaagcctgtggaggaaaagagtgaggaaggaaatgtgagcgcgcctggaccagaatctaaacaggctactacccctgcgtcaagaaagagttccaagcaggttagtcagcccgcactggtgatacctcctcaaccacccacaacggggcccccaagaaaggaggtgcccaaaactacaccatccgaacccaaaaaaaagcagccacctcccccggagtcaggtccagagcaaagtaaacagaagaaggttgccccaagacctagcattcccgtgaagcaaaagccaaaagagaaggaaaaaccccctccagttaacaaacaagagaacgcagggaccctgaatatcctctccaccctgtctaacgggaattcatcaaagcagaaaatccccgctgacggagtacaccgcatccgagtggactttaaggaggactgcgaggcagagaacgtgtgggagatggggggactcgggattctgactagcgttcccattacacctcgtgtggtctgcttcctgtgtgcgagctccggacacgtcgaattcgtgtactgtcaagtttgttgtgaaccattccataagttttgtcttgaggagaacgagcgtcccctagaagatcagttggagaactggtgctgtagaagatgtaagttttgtcacgtttgtggccgccaacatcaggcaacaaagcagttgctcgagtgcaacaagtgccgtaatagttaccacccggagtgcctcgggccgaactaccccacaaagcccactaagaagaaaaaagtgtggatatgcacaaagtgcgtccgctgtaagagctgtggcagcacaactcccgggaagggctgggatgcccagtggagccacgacttctctctttgtcatgattgtgcaaaactgtttgcaaagggcaacttctgcccgctctgcgataagtgctatgacgatgacgattacgaaagtaagatgatgcagtgcggcaagtgcgaccggtgggtgcattctaagtgcgaaaacctatctgacgagatgtatgagatcctgtcaaacttgcctgagtccgtggcttatacatgtgtaaattgtaccgagaggcaccctgcggaatggcggctggcactggaaaaggaactccaaatctccctgaagcaagtcctgactgccctgctcaattctcggactacatcccatctgttgcgatataggcaagccgccaagccccctgatctcaatccagaaaccgaagagtccatcccgtctagaagctcccctgagggccccgatccacccgtgctgactgaagtctccaaacaggacgatcaacagcccctggatttagagggggtcaaacgcaagatggatcaggggaactacacctccgtgctcgaattcagcgatgacatcgtgaagattatacaggccgcaatcaacagcgatggaggccaacctgaaataaaaaaagccaattccatggtgaagtccttctttatacgtcagatggagcgcgttttcccttggtttagcgtgaagaagagcagattctgggagccaaataaggtaagtagcaactccggaatgcttccgaacgccgttctgcctccttccttagaccataattacgcccagtggcaggagcgggaggaaaactctcacacagagcagcccccactgatgaaaaaaattatacccgccccgaaacccaagggacctggggaacctgacagccctacccccctccacccaccaacccctcccattttgtcaactgatcggtcacgagaggattcacccgagctgaatcctccacccgggatagaagacaatcggcaatgtgctctttgcttgacatacggtgacgactctgccaacgatgctggtcggttgctttacatcggccaaaatgaatggacccatgtgaactgtgcgctgtggagcgcagaggtgttcgaggatgacgacggctctcttaagaatgtccacatggcagtgatcaggggcaagcaactgcgttgtgagttctgccagaaaccaggggccactgtcggctgttgtctgacttcatgcacatcaaattaccattttatgtgcagtcgggcaaagaattgtgtgttcttggatgataaaaaggtgtattgccagcggcaccgcgacctcatcaagggtgaggttgttccagagaacggtttcgaggtgttcaggcgagtatttgtggacttcgaagggattagcctgcgtcgcaaattcctgaacggtcttgagccagagaatatccatatgatgattggctccatgaccatcgattgtctgggaatacttaacgacctcagcgattgtgaagataaactgtttcccattggctaccaatgtagccgagtttattggtccacaacagatgctcggaagaggtgcgtgtatacttgcaagattgtcgagtgtaggccccctgtcgtcgagcccgacataaatagcacggttgagcacgatgagaatagaacaattgcccactctcctaccagctttaccgaatcctcttctaaagagagccagaataccgcagaaataattagccccccatcccccgatcggccgccacacagccaaacctcagggtcttgctactatcatgtgataagcaaagtcccgcgaattagaacaccctcctattcacccacccagagatcacctgggtgccgacccctgccttccgcagggagcccaaccccgacaactcatgaaatcgtgactgttggcgatccccttctgtcttctggtctgcgaagtatcggatcaagaagacattcaacgtctagtctgagtccacagagaagcaaactccgtatcatgtcaccaatgaggaccgggaatacctacagcaggaacaacgtgtcaagcgtttcaacaacaggcaccgccactgaccttgaatcttcggcgaaggtggttgaccatgtactcggacctctcaatagtagcactagtttgggacagaacaccagcaccagctccaatctgcagcgaactgtggtaaccgtcgggaataaaaattcccatctggacggatcttcctcaagtgaaatgaagcagtcgtccgccagcgacctcgtgagtaagtcaagctcactaaagggggaaaaaaccaaagtcctttcatctaaaagcagcgaagggtctgctcataacgttgcataccctgggatacctaagcttgctccccaagtccacaatactacatctcgcgagttaaatgtgtcgaagattggctctttcgcggaacccagttctgtttcatttagttcgaaggaggctctcagcttcccacatcttcatctcaggggtcagcggaatgatcgggatcagcacacggattccactcagagcgctaactcatctccggacgaagacacagaagtaaagacactgaaactttccggtatgagcaacaggtcatcaattattaacgagcatatgggcagttccagccgagatcgacgacagaaaggaaagaagtcctgcaaagagacttttaaggaaaaacacagctctaagtcgttcctggagcccggacaggtcaccacaggcgaagaggggaaccttaagcctgagtttatggacgaagtgctaactcctgagtacatgggccagaggccatgcaataatgtgtcctctgataagattggcgacaaaggactgagcatgcccggcgtcccaaaagctcctcctatgcaggtagaagggtcagctaaagagctgcaggctcccagaaagcgcacagtgaaggtcactctgactcccctgaaaatggaaaacgagtcacagagcaagaatgctctgaaggagtctagtcctgcctctccattgcaaattgagtcaaccagtcccacggaacctatctcggcttctgagaatccaggagatggccccgttgctcagccaagtcccaataatacctcatgccaggactcccaaagcaataactaccaaaacctgcccgtgcaggatcgaaaccttatgctgcccgatggcccaaaaccacaggaggatggttcctttaagcgcagatacccccggcgaagcgcccgggcgcgttctaatatgtttttcggcttgacccctctttacggagtccgatcatacggagaagaggatatcccgttttattcctccagtacggggaaaaagcggggcaaaagatcagctgagggtcaggtcgatggcgctgacgacttatcaacgtcagacgaagacgacctgtactattataacttcacacgcacggtgatcagctctggcggagaggaaagactggcctctcataatctgtttcgagaagaagagcagtgcgatttgcccaagatatctcagctcgatggggtcgacgacggcacagagtccgacacatccgtgactgccactacacggaagtcctcacagatccccaaacgaaacggtaaggagaacggcacagaaaatcttaagatcgacaggcccgaagatgcaggcgagaaggaacatgtcacaaagtctagtgtggggcacaagaacgaaccgaaaatggacaactgtcattctgtgagccgagttaaaactcagggacaggattctctggaggcccaactcagttcattggagagtagcaggcgggtacatactagcacccccagtgataaaaacttattggacacctataatacagagctgctcaagagtgactctgataacaacaacagcgatgattgtggaaacatcctgccttccgatatcatggattttgtgctcaagaacacccctagtatgcaagcactcggggagtcccctgaatctagcagttccgaactgctgaaccttggcgagggccttggtctggacagcaatagagaaaaagacatgggtctttttgaggtctttagtcagcagctccctaccaccgagcctgtggacagttccgtgtcaagcagcatttcagcggaggaacagtttgagctgcctctggagctgccttccgacctttcagtgctcactaccagatcacctaccgtcccatcacagaacccatcacgccttgccgtgatctcagattcaggcgagaaaagagtgactatcactgagaaatcagttgccagttctgaatctgaccccgccttgctcagtccaggcgttgaccccactccagaagggcacatgactcctgatcacttcatccagggacacatggacgccgatcatatctcatcgccaccttgcggaagcgtcgagcagggtcacggaaacaaccaagacctgactagaaacagttctaccccaggactgcaggtcccagtttctccaacagtgcctattcagaaccagaagtacgtccccaactctacagactcacccgggccaagccagatatccaatgcggcagttcagaccacccccccacacctaaaaccagccaccgagaagcttatcgtcgttaatcaaaacatgcagcccctatatgtcttgcagactctgccaaacggcgtcacacagaagatccagcttacttcatctgtgtccagcacgcccagcgtgatggagacgaatacatccgtgctcggtcccatggggggcggactgaccttgacaacggggctgaacccatccctgcctacatctcagtctctgtttccctctgcctccaagggactcttacctatgtcacaccaccaacatctgcactcattcccagcagcgactcagtcttctttccctcctaatatatctaacccaccatctgggctgcttatcggggtacagcctcctccagatccccaactgctggtgtctgagagttctcagaggacagatctttcaactacggtcgctactccttcttccggtctgaagaaacgacctatcagtcgcctccagaccaggaaaaacaagaagcttgcaccttcctcaacaccaagcaatattgccccatcggatgtcgtgtccaacatgacactgatcaactttaccccttcccagcttcctaaccacccctcactgctggatctgggctccctgaatactagttcccatcgtacagtgcccaacattattaaacgatctaaatcctctataatgtattttgaaccagctcctctgttacctcagagcgtaggaggaaccgctgccacggcagccggtacatctacaattagccaggacactagccatttgacctctggctccgttagcgggctggcatcatctagtagtgttttgaatgtggtgagcatgcaaaccacgaccacaccaacatcctctgcttccgtgcctggacatgtgacccttacgaacccccgactcctaggaacacccgacattggatccatttctaacttgctcatcaaagcatcccagcagtccctgggcattcaggaccaacctgttgctctgcccccatctagtgggatgtttccacagttagggacatctcaaactccttctactgcggctattacagcggcctcgtctatctgtgtcctgccaagcacccaaacaactggaattacagcagccagcccctccggggaagccgatgaacactaccagctccagcatgtcaatcagctgctcgcctcaaagacaggcattcacagctcacagagagacctcgacagtgctagtgggcctcaagtatccaattttactcagacagttgatgccccgaacagcatggggctcgaacagaacaaggcactaagctcggccgtgcaggcaagtcctacatcacccggggggtccccgtcgtctccctcttctggccagcggagcgccagtccgagtgtgcccgggccaaccaaacctaaaccaaaaaccaagaggtttcagttgcctctggacaagggtaatgggaaaaagcacaaggtgtcacaccttaggacctccagcagtgaagctcatattccagatcaggaaaccactagccttacctctgggacaggcactccaggggccgaagccgaacaacaggacactgctagtgtcgaacagagcagtcagaaggaatgtggacagcctgctggccaggtcgcggtactacccgaagtccaggtgacccagaatcctgccaatgaacaggagtccgccgagccaaagacagttgaggaagaggagagcaatttctcctcccctttaatgttgtggctccaacaagagcagaaacgtaaggaaagtatcaccgagaagaaacctaagaaagggctggttttcgagatcagctccgatgacggcttccagatttgtgctgagagcatcgaagatgcatggaagtccctgactgataaagttcaggaagcacgatctaacgctaggttgaagcagttgtctttcgcgggtgtgaacggattacggatgctcggcatcctacatgatgcagtagtgttcttgatcgaacagctgtccggagccaaacactgtcgcaattataagtttcggtttcacaaaccggaagaagccaatgaacctcctctgaatccacatggcagtgcaagggctgaggtccatctgcgtaagtcagccttcgatatgtttaactttctggcctctaaacatagacaaccgccagagtacaatcctaacgatgaggaagaggaggaagtgcaactgaagtctgcaaggagggccaccagtatggaccttcctatgcccatgcgcttcaggcacctgaagaaaacctctaaagaggcagtgggggtgtatagatcccccattcacggtcgtgggctgttctgtaaaagaaatattgatgcaggcgaaatggtcatagagtacgctggaaatgtcatccgcagcatacaaacggacaagcgagagaaatattatgattctaaggggatcggatgttacatgttccgcatcgacgattctgaagtcgtcgatgccaccatgcatgggaatgcggctaggttcataaatcatagctgtgagccaaactgttatagcagagtgatcaatattgatggccagaagcatatagtcattttcgcaatgcggaagatctatcgcggggaagaattaacctacgactataaattcccgatcgaggatgctagcaacaaacttccttgcaattgcggggcaaagaagtgtaggaagttcctaaattag

SEQ ID NO: 125233 - DNA, 11910 bp, synthetic construct
  misc_feature 1..11910: note = Description of Artificial Sequence: Synthetic coding sequence
  source 1..11910: mol_type = other DNA
atggctcattcatgtaggtggcggtttcccgctcgccccggcaccactggcggcggaggcggcggagggcggcgagggctgggcggtgcacctcgacagagggtgccagccttactgctacctccaggaccccccgtgggaggtggcgggcctggagcccctccatcccctcccgccgtggccgctgccgcagccgctgctggatcctccggggcaggcgtgcccgggggcgcggctgcagcctccgcagcatcttcaagttctgcaagctcctcttcttcctcgtccagctctgccagctcaggccctgctttactcagggttggtccaggctttgacgcggctcttcaggtaagcgctgccattgggaccaacctgcggagatttcgtgcagtgttcggggaatctgggggcgggggcgggtctggtgaggatgagcagttccttgggttcggatcagatgaggaagttcgcgtcaggtccccaactagatccccaagcgtaaaaactagtccccgaaaacctcgcggccggccacggtccggttccgacaggaattctgcgatcctgagcgacccctcagtcttcagccccctgaataagagcgaaacaaaaagcggtgataagataaaaaagaaagatagcaagtccatagagaaaaaacgcgggagaccgcccacattccctggagtgaagattaaaatcacgcatggaaaagacatttccgaactacctaaagggaacaaggaagactccctcaaaaagattaagaggacgccaagcgccacctttcagcaggctacaaagatcaagaagctgcgcgccggcaaactgtctcctctgaagtctaaattcaagaccggcaagctacagatcggtagaaaaggggtgcaaatcgtccgcaggcgtggccgcccaccctcaacagaacgcatcaagacccccagcgggctgctgatcaattcagagctcgagaagccacaaaaggtgagaaaggataaggaagggactccccccctgactaaagaggacaaaaccgtcgtgcgtcagagccctaggcgtatcaagcccgtacgcataatcccctcttcaaaaagaacagatgcaactatagctaagcaattgttgcaacgagctaagaagggcgctcagaagaagatcgagaaagaagccgcccagttgcagggcagaaaggttaagacccaggtaaaaaacatacggcagttcatcatgccagtggtgtctgctataagcagcagaattataaagactccacgacgcttcatcgaggacgaagactatgacccaccaatcaagatcgcccgactggagtctaccccaaattctaggttctctgcaccttcatgtggaagttctgaaaaatcatctgctgcctcgcagcactccagccagatgagcagcgacagctctcgctcttccagcccatccgtagataccagcaccgacagccaggcctctgaggagatacaggtcctccctgaggaacgatctgacactcccgaagtgcacccccccttgcctatcagccagagtcccgaaaatgagtcaaatgatcgccgaagtagaaggtattcggtgagcgagcgctcatttgggagtcgaaccaccaagaagttatctaccttgcagtcggcaccacagcagcagacgagcagctcacctccccctcctctcctcacgcctcctcccccgctccaacctgcttctagcatttcggaccatacgccttggctaatgccgcccactattcctcttgctagtcccttcttgccagcctccactgctccgatgcaaggaaaaagaaagagcatcctgcgcgagcccactttcaggtggacaagtctgaagcatagtcggtctgaaccccagtacttttctagtgccaaatacgcaaaagagggcctcattagaaagcctatctttgataatttccgacccccacccctgacgcctgaggacgtgggatttgcatccggattctcagcgtctggcaccgccgcaagcgcgcgcttgttctcccctctgcactcagggacccgttttgatatgcataaaagatcccccctgctgagagctccccgctttaccccttccgaggctcacagcagaatcttcgagtctgtgaccctgccctctaataggacctcagcaggcacatcgtctagcggggtcagtaataggaaacggaaaagaaaagtcttttcccctatcaggtctgaacccaggagtcccagccattcaatgcggactaggtctgggaggctttcttccagcgagttgagccctctgacccctccatcttctgtgtcaagcagcctctccattagtgtcagccccttggccacttccgctctgaaccccacatttacctttccatcccactctctgacccagagtggagaatctgcagagaagaaccagcgccctcgaaagcagacttctgcccccgcagagcccttctccagtagtagtccaaccccgctgttcccttggttcacacccgggtcgcaaaccgagaggggccgcaataaagataaggccccagaggagctaagtaaggatagagacgcagataaatctgtagagaaggataaatcacgtgaaagagatcgtgaacgagagaaggagaataagcgcgaaagtaggaaggagaagcgcaagaaaggttctgagatccagtcgtcatctgccctttaccccgtgggcagggtgtccaaggaaaaggtcgtgggagaagatgtcgccaccagctcttccgcaaagaaagccacaggccgcaaaaagtcctcatcccacgactctgggactgatataacatcagtgacattgggagacacaaccgccgtgaagacgaagatcctgatcaaaaagggaagaggcaacctggaaaaaactaacctggatttaggccctaccgctcccagcttagagaaggaaaaaactctttgcttgtcaacacctagttcttcaacagtgaagcattctacttcatcaattggctcaatgcttgcacaggcggataaacttcccatgacagataaacgggtcgccagtctcctcaagaaagccaaggcccagctctgtaagatagagaaatccaaatccctgaaacagaccgaccagcctaaagctcagggacaggaaagtgactctagtgaaacctccgtgagaggtcctaggatcaagcatgtatgccgaagagccgccgtagccctgggccggaaacgggccgtattcccagacgacatgcctactctttcggccctgccatgggaggagcgtgagaaaattctttcatcaatgggtaacgacgacaaaagttcaatcgcggggtcggaagatgctgagccattagcccctcctattaagcccattaaacctgttacccggaataaggcgcctcaagagcctccagtgaaaaaggggcgcaggagcaggcgttgtgggcagtgccctgggtgccaggttcctgaggattgtggggtttgcaccaactgtctcgataaaccaaagtttggcggtaggaatattaagaaacaatgttgtaaaatgcgaaaatgtcagaatttgcagtggatgccctcaaaagcttatcttcagaagcaggcaaaggctgtgaagaagaaagagaagaaatctaagacatctgagaagaaggactctaaggaaagctcagtggtcaagaatgtggttgactcatctcaaaagcccaccccttccgctcgcgaagatcctgctccaaaaaagtctagtagcgagcctcctccccgaaaacccgtagaagagaagtccgaggaagggaacgtgagtgcacccggaccagagagcaagcaagcaacaactccggccagccgcaaatcctccaagcaagtatcccaacctgccttggtgattccaccccagccacctactacgggcccacctcgcaaagaggttcccaagaccacaccctcagagcccaagaagaagcaaccaccacccccagagtctggacccgagcagtccaaacagaagaaggtagccccgagaccatccatacccgtgaaacagaagcctaaggagaaagagaaaccccctccagtgaacaagcaagaaaacgctggcactctgaacattttgtcaacactgagcaatggtaatagtagcaagcaaaagatcccggccgatggcgtccaccggatccgtgtggactttaaggaggactgcgaggctgagaatgtgtgggaaatgggaggtctcggaatcttgacttcggtcccaatcacgcctcgggttgtttgcttcctgtgtgcctcatccggacacgtggagttcgtgtactgtcaagtgtgttgtgagccgttccacaagttttgtttagaggagaatgaacggcccctcgaggaccagttggaaaactggtgctgtcggagatgcaaattctgccacgtctgtggtcggcagcatcaggccaccaagcagctcctggagtgcaacaagtgcaggaactcgtaccaccctgaatgtttaggacccaattacccaaccaagcctacaaagaaaaagaaggtgtggatctgtaccaaatgcgtccggtgcaagagttgtggatccactactccaggaaaaggttgggatgcacagtggagccacgacttcagtttgtgtcatgattgcgctaagttatttgccaagggcaacttctgccccttatgtgacaagtgctacgacgatgatgattacgaaagcaagatgatgcagtgcggcaaatgcgacagatgggtgcattccaaatgtgaaaatctgagtgatgagatgtacgagatcctgtctaacctgccagagagcgtggcttatacctgtgtcaactgtaccgaaagacacccagccgaatggcgactcgcgctggaaaaggagttgcagatatcactgaaacaggtgctgactgccttacttaattctcgaactactagccatttgctgaggtacagacaagctgctaaacctcccgacctgaaccctgagaccgaggaaagcatcccttcccgctcctcccccgaaggccccgacccccccgtgttaacggaggtaagcaagcaggatgatcagcagccgcttgatttagaaggcgtgaagcgtaagatggatcagggcaattacacctctgttctggaattctcagatgatatcgtcaagatcattcaggcagctattaacagtgacggcgggcagcccgagatcaagaaggctaacagtatggttaaaagcttcttcatccggcagatggaaagagtgtttccctggttttcagttaagaagagccggttttgggagcccaacaaggtttctagcaattcaggaatgctccccaatgcagtcctccctcctagtctcgaccataattatgctcagtggcaggagcgggaagaaaacagtcataccgaacagccgcctttgatgaaaaaaattatcccggccccgaaacccaaaggccctggcgaacctgacagccccactcccctacaccctcctacaccaccaatcctgtctaccgataggagccgggaggattcaccagaattaaatcctccgcccggtatcgaagataatagacagtgcgcgttgtgcctcacttatggggacgattctgccaatgacgcgggccgactcctttacatcggacaaaatgaatggacacacgtgaattgcgccctttggtctgctgaggtgttcgaggatgacgacggaagcctgaaaaatgttcatatggccgtcatccggggcaaacaactgcgctgcgaattttgccaaaagccaggcgccaccgtcggttgctgcctaacaagctgcactagtaattaccactttatgtgctcccgagctaagaattgcgtttttctggatgacaagaaagtttattgccagaggcatagggatctcatcaagggagaagtggtgcccgagaacggattcgaggtgttccggagggttttcgtggattttgaaggcattagcttacgcagaaagtttctgaatggccttgagcctgagaatatacatatgatgataggctctatgacgattgactgtctaggtatcttgaacgacctaagtgattgtgaagacaaattgttcccgattggatatcagtgctcgcgggtgtactggtcaacaaccgacgccaggaaacgctgcgtatatacgtgcaaaatagtcgaatgcaggcctcccgtggtggagcctgacatcaacagcaccgtggagcacgacgagaacagaacaatcgcccatagccccacgagctttacggagagtagctcaaaggagtctcagaatacagccgaaattatcagccccccttcgccagacagacctcctcactctcagacctcggggtcgtgctactaccacgtgatcagcaaggtcccaagaatccgtactccatcctactccccaacacagaggtctccagggtgccggccccttccttccgccgggtcgcccactcccacaacccatgagattgtgaccgtcggggaccctttactgtcctccggtctccgttctatagggagccgcagacacagcacgagctccctgtcccctcagcgcagtaagctgagaataatgagtcctatgcggaccggaaacacttactctcggaataacgtgagctccgtatcaacaaccggcaccgcaacagatctcgagtcctccgccaaggtcgtggaccacgttctcggcccactgaatagttcaacaagtttgggacaaaacacgtctacttcttcgaatcttcagcggactgtcgtcacagtcgggaacaagaactcgcaccttgatggaagctcaagttctgagatgaagcagtcatccgcttctgacttggtgagcaagtcctctagtctgaagggagagaaaacaaaggtgctcagctccaaaagctctgaaggatcagctcacaacgtggcctacccagggattccaaaacttgctccacaagtccacaatacaacatcgcgggaactgaatgtgagcaagatcggtagttttgccgagcccagctcagtgtcattcagcagcaaagaggcactctcattcccacacctccacctgagaggccaacgaaacgaccgcgaccagcatactgattccacccagtctgccaactcctccccagacgaagacaccgaggtcaagactcttaagctaagtggcatgagtaatagaagtagcatcattaatgagcatatgggcagctcttccagggacaggcgccaaaagggaaagaaatcgtgtaaagagaccttcaaagagaagcactcatccaaatcattcttggagccaggtcaggtcacaactggggaagagggcaatcttaagcctgagtttatggatgaggttctgacgccagagtacatgggccaaagaccttgcaataacgtcagtagtgacaagatcggtgacaaagggctctctatgccgggcgtccccaaggcaccacccatgcaggtggaaggctctgcgaaggagctgcaggctcctcgcaaaaggaccgtgaaagtcacgcttacacctcttaaaatggaaaacgagtctcaatcaaagaacgctctgaaggagagcagccccgcttctcctttacagattgaaagtacctcaccaaccgaaccgatatccgcatctgaaaatcctggtgacggccctgttgcgcaacctagccccaacaacacttcgtgtcaggactctcaatcaaataactaccaaaatttaccggtgcaggatcgaaacctgatgctccctgacggccctaagcctcaggaggacggcagcttcaagcggcgctacccccgccggtcagcccgtgcaaggtcaaacatgttcttcggtctaacgccgctttatggggtgcggtcttacggcgaagaggacatccccttctactcgtcatcaaccggcaagaagagggggaagaggagcgccgaaggccaggtggatggggcagatgatctgagcacttccgacgaagacgacctttactattacaattttacgcgcacagtaatctcttccggaggggaggagcgcctcgcatctcacaacctgttccgagaagaggagcaatgtgatctccctaagatctctcagctggatggagtggacgatggtacagagtcagataccagtgttacagccaccacaaggaaaagctctcaaatacccaaacggaacggtaaggaaaacggaacagaaaatctgaagatcgatcgacctgaggatgccggcgagaaggaacacgtgacaaaatctagtgttggacacaagaatgaacccaaaatggacaactgtcattctgtcagtagggtcaaaacgcaaggacaggattcattggaggcgcagcttagctccctggagtctagcaggagggtacacacatccacaccttctgacaaaaatttactagatacatacaacactgagctgctaaaatccgacagtgataataacaattcagacgactgcggtaacattctgccgtcagatatcatggactttgttctgaagaacactccttctatgcaggccctcggggaatcgccggaatcatcttcctccgaactgctgaacctcggagaaggcctcggacttgactccaatcgcgaaaaggacatgggtctcttcgaagttttctcccaacaactccccaccactgagccagtggattcaagtgtgagctcaagtattagcgccgaggaacagttcgagctgcctttggagctgcccagtgatctgagcgtgctgactacgcgttctcctacagtgccttcccaaaaccccagccgcctggcggtcatatcagactctggcgagaaacgagtgaccatcactgagaagtcagtggcgagttccgagagtgatcctgcgttactgtctcccggggttgacccgacccctgaaggccacatgaccccagaccacttcattcaggggcacatggatgccgatcacatctcatcccccccttgtgggtccgtcgaacagggacatggcaataaccaggacctgactagaaactccagcacacccgggctgcaggtaccagtgtcccctacagtgcctatccagaaccaaaagtacgtaccgaatagtacagattcccccggcccatcccagatctccaacgccgctgtacagaccacgccaccccacttaaagccagccacagagaagctgatcgtcgttaatcagaacatgcagcctctttacgtacttcagacgctccccaatggcgttactcagaaaattcaactgacttctagtgtatctagtacaccttcagtgatggagaccaatacaagcgtgctcggccccatgggaggcggtctaacgctgaccacaggattgaatccttctctcccaactagccagagtctgttccccagcgcatcaaaagggttactacctatgagccaccaccagcacctacattctttccctgctgccactcagtcctcatttccccccaacatttctaacccaccaagcggcctgcttatcggcgtgcagccgcctcccgatccacagctactggtgtccgagagctctcagcggacggatctgagcactacagtagcaacacctagtagcgggctcaaaaagcggccgatttcaaggctccagacccggaaaaataagaaactggccccgagctccactccgtccaacatcgccccttcagacgtcgtttcaaacatgactttgataaatttcaccccatctcagctgcctaatcatccaagccttctggatctggggagtctgaacacctcttcccatcgtacggtgccgaatatcataaagaggtccaaatcctctattatgtactttgaacccgcacccctgctgccccagagtgtaggtgggaccgcagcgaccgctgccggcacatctactatcagccaggatactagtcatttaactagcggtagtgtgtctggtcttgcttcttcatcatcggtgctcaacgttgtctccatgcaaaccactaccacgcccacttcatctgcttcggtgcccggtcacgtgacactgaccaatccgaggttgctgggaacccctgacatcggtagcattagcaatctcctcataaaagctagtcaacaaagcctcggaatccaggaccagccagtggccctacctccaagtagcggcatgtttcctcagcttggtacgtcacaaacacccagcacagcggcaatcactgccgcttcttccatttgtgtgcttccttccacgcagactaccggcataaccgcggccagtccctcaggtgaagccgatgaacattaccagttacagcacgtcaaccagctgcttgcctctaagacaggaatccactccagccagagagaccttgacagtgcctctggcccacaggtcagtaattttacacagactgtcgacgcgcctaactctatgggcctggagcagaataaagccctgtcttctgccgtacaagcaagccctacaagcccagggggctcaccctcatctcccagttccggtcagaggtctgcaagtccttctgtgcccggaccaacaaagccaaaacctaaaacaaaaagatttcagcttcccttagataagggaaacggaaaaaagcataaggtctctcacctccggacatcgtcatccgaagcccatatccctgatcaggagaccaccagtctaacctccggaaccggtacacccggcgctgaagccgagcagcaagatacggccagcgtagaacagtcatcgcagaaggagtgtggccagccagcgggccaggttgctgtactgccagaagtgcaagtgacccagaaccctgccaacgaacaggaaagtgcagagcccaaaacggtggaagaagaagagtccaacttttcttcccccttgatgctctggctgcagcaggaacagaagcgcaaggaaagtattactgagaagaagcctaaaaaaggcctggtgttcgaaatttcctccgacgacggattccagatttgcgcggagtccatcgaagacgcctggaagtctctcactgacaaagtgcaggaagctcggagtaacgctcggctgaaacaactgtccttcgccggcgtgaacggccttaggatgctgggtatcctgcatgacgcagtggttttcctcattgagcagttatcgggcgctaaacactgtcgcaattacaagttccggttccataaacccgaagaggcgaacgagccacccctgaatcctcacgggtctgcccgagctgaagttcatctgagaaagagcgcctttgatatgttcaatttccttgcttcaaaacaccgccagcccccagaatacaatcccaacgacgaggaagaggaggaggtgcagttgaagagtgctcgcagggccacgagcatggatctgcccatgcctatgcgctttaggcacctgaagaagacctcaaaagaagccgtaggagtatatagatctcccatacacgggcgcggtctgttttgcaaaagaaatatcgacgctggggaaatggttatcgagtatgccggcaacgtcatccgttccatccagaccgataagagagaaaagtattatgattccaaaggaatcggatgctatatgtttaggatcgacgattccgaagttgtggacgccacgatgcacggcaatgcggcccggttcattaaccattcctgtgagcctaattgttattcccgtgttattaacattgatggtcagaaacatattgtgattttcgccatgcgaaagatctacaggggcgaggagctgacctacgattataagttccctattgaggatgcgtctaataaactaccttgcaattgtggcgccaagaaatgtcgcaagttcctcaattag

SEQ ID NO: 125234 - DNA, 336 bp, synthetic construct
  misc_feature 1..336: note = Description of Artificial Sequence: Synthetic coding sequence
  source 1..336: mol_type = other DNA
gacttcaaggatgagcagtttttagggtttgggtctgatgaggaggttcgggtcagaagccccactagaagtccttccggcagtatgctagcacaagcagataagttacctatgaccgataagcgtgtggcgtctcttctgaaaaaggccaaggcacagctttgcaagatcgagaagtcaaaatcgttaaagcagacagaccagccaaaagcacagggtcaggaatccgacagctctgagacttccgttcgaggtccacgcatcaaacacgtgtgtaggagagccgccgtcgcattggggcggaagcgggccgtgttccccgatgacatgccctag

SEQ ID NO: 125235 - DNA, 4320 bp, synthetic construct
  misc_feature 1..4320: note = Description of Artificial Sequence: Synthetic coding sequence
  source 1..4320: mol_type = other DNA
atggctcactcatgccggtggagattccccgcaaggccaggtactacaggggggggcgggggtggcgggcgccggggccttggcggcgcccctcggcagcgtgttcccgccctgcttctgccaccaggtcctcccgtcggcggcgggggtcctggagcccctccgagtccaccagccgtcgcggccgccgctgctgccgcaggatcctctggtgcgggagtgcccgggggcgccgcagcagcatcggcagctagtagttcgagcgcttctagctcaagctcgtcctcctcttctgcttcgtctggccctgcactgctccgagtgggacccgggttcgacgcagctctgcaagtgtccgcagctatcggcactaacttgcgccgtttcagagccgtattcggcgagtcgggcggcgggggcggctcaggcgaactaactacacaaataccttgctcatggaggacaaaggggcacatacacgacaagaaaactgaaccattccggctcctcgcatggagctggtgcctaaacgacgagcagttcctgggcttcgggtctgatgaggaggtgagagtgagatctcccacccgatcgcctagcgtgaagacaagtccccggaaaccccgtggcaggcctcgctccggaagtgaccggaattctgcgattctgtccgatccctctgtgttttcacccctgaataagagcgagacaaaaagcggcgacaaaattaagaaaaaggattctaagtcaatcgaaaaaaagaggggaagaccacctaccttccccggcgtaaagatcaagatcactcacggaaaggacatttcagagctgcctaagggtaataaagaggactccctaaagaagatcaaacgcacaccgagtgcaacgttccagcaagccaccaagattaagaaactgcgagcaggaaagctgtctccacttaaaagtaaattcaagactggtaaactgcagatagggagaaagggagtccagattgtacggaggagaggacgccctccctcaaccgaaaggataaaaacaccatcgggcctgctcatcaatagcgaattagagaaaccccagaaagtgcgcaaggataaggaggggaccccgcctctcacaaaagaggacaagaccgtagttcggcagagcccacggagaattaaacctgtcagaataataccatcctctaagcgaactgatgccacgattgcgaaacaactgttgcagcgggccaaaaagggggcccaaaagaagatcgaaaaagaggcagcccagctccagggacggaaggtgaaaacccaggtcaagaacatcagacagttcattatgcctgtagtttcggcaatcagctcacgcataattaagaccccgaggcggttcatcgaggacgaggattacgatccacccataaagatagctaggctggaatcaacaccaaacagccgcttctccgcaccatcgtgtggcagtagcgaaaaatccagcgctgccagtcaacacagcagtcagatgtccagtgattcctcccgctcctcctcaccttctgttgacacatccaccgacagccaggcctctgaagagatacaggtcctcccagaggagagatccgacaccccggaagtgcacccacccctgcccatctctcagtctcctgaaaacgaatccaatgatcgcagatcccgccgttattccgtgagtgagcggagctttggttcccgcacaacaaaaaagttgtccacactacagagcgcaccccagcagcagacaagttcaagccctcccccgccactgctgactccgccgccaccacttcagcccgcttctagcatatctgatcacaccccgtggttgatgcctcctacaatcccactggccagtccctttctgccagcttctacagccccgatgcaaggcaaaaggaaaagtattcttagggaacccaccttcaggtggacatctctcaagcattctcgctccgaacctcagtatttttctagcgccaagtatgcaaaggaggggctaatcaggaagcccatttttgacaactttcgtcctccaccattgacaccggaggatgtgggcttcgcctctgggttcagcgcgtcgggcacagcagcttctgcaaggctgttcagtcctctgcatagcgggactcggtttgatatgcataagagaagccccttattgcgtgcccccaggtttaccccaagcgaggctcatagccgcatattcgaatctgtcaccctcccctctaatagaacatccgccggcacttcctcatctggagtcagtaaccggaagcgcaagcgaaaggtctttagcccgattcgctccgagcctagatctccatcacactccatgcgcacacggtctggcaggcttagctccagtgaattgtccccgcttacacccccatccagcgtgagctctagcctctccatctcagtaagcccattggctaccagcgctctgaatccaacatttaccttcccaagtcactcactgacgcagagcggagagtcagccgaaaagaaccagagacccaggaagcaaacatctgctcccgcagaaccattttcctccagcagcccaacacccttatttccttggtttaccccagggtcccagacagagcgcggccgaaacaaggacaaggctcccgaagagttgtcaaaggatcgagatgccgataaaagcgtggagaaagataagtcacgagaacgagacagggaacgcgaaaaggagaacaagcgggagagcagaaaggaaaaaagaaagaagggatccgagatccaatcttcgagtgccctgtatcctgtgggaagagtgtccaaagaaaaggtagttggcgaagacgtggccacatcatcatcggctaaaaaggctaccggccggaaaaaaagtagttctcatgattccgggacagatattaccagtgttactttaggtgatactaccgcagtcaaaacgaaaattttgattaaaaagggcagaggcaacctggaaaagactaacctggatctggggcctaccgccccatcacttgagaaggagaaaaccctgtgtctgtccacccccagctcaagcacagttaaacactctacgagctctatcggatccatgctagcacaggcagacaaactgcctatgaccgacaagcgcgtagctagcttgctgaagaaggcaaaagctcaactgtgcaagatcgaaaaaagtaagagcttaaagcagaccgaccagccaaaggcccagggtcaagagtccgattccagtgaaacctcggtgaggggccctaggataaagcatgtctgtagacgggccgcagtcgcactaggacgaaaacgagctgtgttcccggatgacatgccaaccctaagcgcgctgccttgggaggagcgggaaaaaatcttatcatcgatgggcaatgacgataagagttctatcgctggctcagaagacgcggaacccttggccccacccatcaagcccattaagcccgtgactcggaataaggctcctcaggagcctccggtgaagaaaggtaggcgaagtagaagatgcggccaatgccctggctgtcaggtccccgaagactgtggggtgtgtaccaattgtctggacaagccaaaattcggtggtcgcaatattaaaaagcagtgctgcaaaatgaggaagtgtcaaaatctccagtggatgccttccaaggcctacctccaaaaacaggctaaggcagtgaaaaagaaggaaaaaaaaagtaagacctctgagaaaaaagactctaaagaatcctctgttgtgaagaacgtggttgatagcagtcagaagcctactccatctgcccgcgaggaccccgcgccaaaaaagagctcctctgagccgccccctcgaaagcctgtcgaggagaagagtgaggaaggcaatgtaagtgcccctggcccggagagcaagcaggctactactcctgcttctagaaagtcctcgaaacaggtctcccagcccgccctggtcatcccaccgcagccccctacaacgggacctcctcggaaggaggttccgaaaacgactcctagcgagcccaaaaaaaaacagcctccaccaccagaaagcggccccgagcagtccaagcaaaagaaggtcgcgcctcggccttcaatcccagtgaaacagaagccgaaagaaaaagagaagcccccacccgtgaataagcaggagaacgcgggcaccctaaacatattgtccacattatcaaatggaaacagtagtaagcaaaaaatccccgctgacggggtccatcgcataagagtggacttcaagtag

SEQ ID NO: 125236 - DNA, 11919 bp, synthetic construct
  misc_feature 1..11919: note = Description of Artificial Sequence: Synthetic coding sequence
  source 1..11919: mol_type = other DNA
atggcacactcatgcagatggcgctttccagccaggccggggacaacaggtggaggggggggcgggggacggcggggtcttggcggtgcccctagacagagggtgcctgcactgctgttacctccgggccctccagtgggtgggggggggccgggcgccccgccgtccccacctgctgtcgctgcagctgccgcagccgctggcagttccggagcaggtgtcccaggaggcgccgcagctgcctcagccgctagcagttcaagcgcctcctcttcctcttcctccagcagttccgcatcctccggcccagcactattacgagtaggtcccggattcgatgctgcccttcaggtcagcgcagcgattgggactaatctcaggcgtttcagagcagtgttcggtgaaagcggtggaggaggaggcagcggagaggacgagcaatttcttgggttcggttccgatgaagaggtgagggttcgcagcccaacccggtctccctcagtcaagacttctcctcgaaaaccacggggacggccacgaagcggcagtgaccggaactccgctatcctttcagatccaagtgtgtttagtccactgaataaatcagaaaccaaatctggggacaaaatcaagaagaaggactctaagtcaatcgagaaaaaacgaggccggcctcctacctttccaggtgtgaaaataaaaattacccacgggaaggatatttccgaactaccgaagggaaacaaagaggatagtctgaagaaaatcaaaaggactccctctgcgacattccagcaggccaccaaaattaagaaattgcgcgccggcaaactgagcccgctgaagagcaaattcaagacaggtaaactgcaaattgggagaaagggcgtccagatcgtcaggagacgcggccgaccaccctctaccgaaagaataaaaaccccttccggccttctgattaactcagagttggagaagccccagaaggtgagaaaggacaaggaaggtacaccaccgctgaccaaagaggacaagactgtggtaaggcaatcaccacgccgcatcaagcccgtgcggatcattccatcctctaagcgcaccgacgcgactattgctaagcagctgctgcagcgcgctaagaaaggcgcccaaaagaagatcgaaaaagaggcagcccaactgcagggaagaaaggtgaaaacccaggtgaagaatatccgacagttcattatgccagtggtctctgcgataagctcaagaataatcaagacgccgaggcgctttatcgaggatgaggactacgacccccccataaagattgcaaggctcgaatctacacccaacagcagattcagtgcccccagttgcggctcctccgagaagtcaagtgccgcctcacagcattcaagtcaaatgtcaagtgactccagcagaagctcaagcccctccgtcgacacctcaacagattcacaagcatccgaagagatccaggtcctcccagaggaacggtcagacacccccgaggtccaccctccactgccaatcagccagtcacctgaaaacgagagtaatgataggaggagtcggaggtattctgtatcagagcgaagtttcggaagccgcacaacgaaaaagttgagtacactgcagtccgcaccacagcagcagaccagttcctctccgccaccccctctgcttactccgcctcctccactgcagccagcgagctcgatctctgatcatacgccctggcttatgcctcctaccatccctcttgcctctcctttccttccagctagcaccgcgcctatgcagggaaagaggaagtctatcttaagggagcctacgttccgttggacatcccttaagcacagccgatccgaacctcagtactttagctctgctaaatacgcaaaagaaggtctgattcggaagccgatttttgacaacttcagacccccacccctgacgcctgaggacgtgggctttgccagcggctttagcgcctcaggtacagctgcatcagcccgccttttttcacctctgcactccggaacgcgctttgacatgcataagcgctcccccctgctccgagctcctaggttcaccccttccgaagctcacagtaggatcttcgaatctgtgacactgccgagcaatcgcacgagtgcaggcacctccagcagtggggtatctaaccggaaacgaaagagaaaagttttctcccccatcaggtccgaacccagaagtccaagtcactcaatgcgcactaggtcaggccgattatccagtagcgagctgtctcctctcacccctccatcttccgtgagcagttctctgagcatttccgtgtctccactcgctacatctgctctcaatcctacattcacatttccttcccactctttgacacagtcaggagagtctgccgagaagaatcaaaggcctcgtaagcagacctctgcaccggctgagcccttctcctccagtagtcctaccccccttttcccgtggtttaccccgggttcacaaacagagcgcggccgcaacaaggataaggccccagaagagttatccaaggaccgcgatgctgacaagtctgtggagaaggacaagagccgggagagagatcgtgagagggagaaagagaataaaagagaaagtcggaaggagaagcggaagaaaggcagcgaaatacagtcatcctcagccctttaccctgtcgggcgtgtgagcaaagagaaagtggtgggagaagatgtggccactagtagctccgccaagaaagcgacaggaaggaagaagtctagttctcacgatagtgggactgatattacctccgttaccctaggagacactactgccgtcaaaacaaaaattctcattaagaaaggccgcggaaatctggagaagacgaatctggatcttggtccaaccgcgcccagtcttgagaaagagaagactctgtgtctcagtactcccagttctagcactgtcaagcacagtacttccagtattggtagtatgcttgctcaagccgataagctccccatgaccgataagcgagtcgcaagtttactgaaaaaggcaaaggcccagctctgcaaaatagaaaaaagtaaatcactgaaacagaccgaccagccaaaggcccaaggtcaggaatcagattccagcgaaaccagcgtgcggggccctcggatcaagcacgtgtgccggcgcgcagctgtggccctcggacgtaagagagctgtttttcccgacgatatgcccaccctctctgctctcccttgggaggaacgggaaaagattctgagttccatgggtaacgatgataagagctctatcgccgggagcgaggacgccgaacctctggcccctccaatcaagcctataaagcctgtgacacgaaacaaagcccctcaagaacctccggtaaagaaaggcagacggagtcgtagatgcggacaatgtccaggatgccaagtgcccgaggactgcggggtctgtaccaactgccttgataagcccaaatttggcgggcggaacatcaagaagcagtgttgtaagatgagaaagtgtcagaacctgcagtggatgccaagcaaagcctacctgcagaagcaggccaaagcagtgaaaaagaaggagaaaaaatcaaagacgagcgagaagaaggatagcaaagaaagctcggtggtgaaaaacgtcgtcgattcatcccaaaagcctacaccgagcgcgcgggaggaccccgcccccaagaagtcaagtagcgagcctcccccccggaagcccgtagaggaaaagagcgaagaaggtaacgtaagtgccccaggtcccgaatccaagcaggcgacaaccccagctagtagaaagtcttcaaaacaggtctcacagcctgcattagtgatccctcctcagccgcctaccactggcccaccaaggaaggaagtgcccaagacgactccttctgaaccaaagaaaaaacagccaccaccccccgaaagtgggcccgagcaatccaagcagaaaaaggttgccccccgtccaagtatccctgtgaaacaaaaacctaaggaaaaggaaaagccacctcccgtgaataagcaagaaaatgcaggaaccttaaacatactaagcacacttagtaatggcaactctagtaaacagaaaatacctgccgacggcgtccaccggattcgcgtggacttcaaggaagactgcgaggccgaaaatgtctgggagatgggtgggctgggaattctgacgagtgtgccaatcacacctagagtcgtgtgtttcctctgtgcctccagtgggcacgtagaatttgtatactgccaggtgtgctgcgagcctttccataagttttgtcttgaagagaatgaaaggcctctcgaggaccagctcgagaattggtgttgccgtcgttgcaagttctgccatgtctgcgggaggcagcatcaagctaccaagcaactgctggagtgtaataagtgtaggaatagctatcacccagagtgtctgggtcctaactacccaacaaagccgacgaagaaaaaaaaggtgtggatctgtacaaagtgcgtcagatgtaaatcttgcgggtccacaacacctggtaagggctgggacgcccaatggtcacatgatttctccttgtgtcacgactgtgccaaacttttcgccaagggcaacttctgcccactctgcgacaaatgctatgacgatgatgattatgagtccaagatgatgcagtgtggcaaatgcgatcgatgggttcattcaaagtgcgagaatctatccggcaccgaggacgagatgtatgagattctttccaatctgcctgaatcagtcgcctatacatgtgttaattgtactgagagacaccctgctgaatggcgcctcgccctggagaaggaactgcaaatcagtctcaagcaggtcctcactgcactgctgaacagtcggactacgtcacacctgctgcgctaccggcaggcggcaaagcccccggacctgaatcctgagacggaagaaagcattccaagcagatcatctcccgaaggacccgatcccccagtgttgaccgaggtctctaagcaggacgaccagcagccgcttgatcttgagggcgtgaagcgcaagatggaccaggggaattacacatctgttctagagtttagtgacgatatcgttaagataatccaagccgcgatcaattccgacggtgggcagccagaaataaaaaaagcaaactccatggtgaaaagcttttttattagacagatggagagggtcttcccttggttcagcgtgaagaagtccagattttgggaacctaacaaggtgtctagcaactcaggcatgctgcctaatgccgtcctaccaccaagccttgatcataactatgcccagtggcaggagagggaagagaactctcacaccgagcagccccccctaatgaagaaaatcattcccgcacccaagcccaaaggcccaggcgagcccgatagcccgacccccctgcacccacctactccacctatcctgagcaccgatcgttcacgcgaagacagccctgagcttaatccgccaccaggtatagaggacaaccggcaatgtgccctgtgtctaacatacggtgacgactcagccaatgacgcagggcgcctgctatacatcggtcagaacgagtggacacacgttaattgtgctttgtggagcgccgaagtattcgaggacgacgacgggagcctcaagaacgtacacatggctgtgattaggggcaagcaattgagatgcgagttttgtcaaaagcctggggctaccgttggctgctgcctcacctcatgtactagtaactatcacttcatgtgctcgcgggctaagaattgtgtttttctggatgacaagaaggtgtactgtcaacgtcatagagacctcatcaagggtgaggttgttcccgagaatggattcgaggtcttcaggcgcgtgttcgtcgattttgaaggcatatcgctaaggaggaagtttctaaatggactcgagccagaaaacattcacatgatgattggctctatgaccatcgactgccttggtatcctgaacgatctcagtgactgcgaagataaactgtttcccattggctatcaatgttctcgggtgtattggagtacaaccgatgcccgcaaaaggtgcgtctacacctgcaaaattgtggaatgccgaccccccgtggtggaaccagacatcaacagtaccgtggaacacgacgagaaccgcacaatcgctcactccccaacaagctttacagagtcctcctctaaagaaagccagaatacagctgaaatcattagccctcctagtcctgatcgcccaccgcacagtcagacatcaggaagttgctattaccatgttatttccaaggtcccaagaattagaactccgtcatactctccaacacagcgaagccctggttgccggcctcttccgtcggccggctcgccaacccctaccactcacgagatcgtcactgttggcgaccccctgcttagttcagggcttcgatccatcggatctagaagacattctacatcctccctgagtcctcagcggtctaaactgcggataatgtcacccatgcgcactggcaatacatatagcagaaataatgtgtcgagcgtgagtacaaccggaaccgccacagacctggagtcctcagccaaggtcgtggatcacgttctggggcccctcaacagtagtaccagcctcggtcagaacactagtaccagttccaatctccagcgaacagtagttaccgtggggaacaaaaattcccaccttgatgggagctcaagttcagagatgaagcagagtagtgccagcgacctcgtgtcgaagagcagctcattgaagggggaaaaaactaaggtgttgtcatccaagagcagcgagggctctgcgcacaacgtggcctatcccgggatcccaaagctggccccacaagttcacaacacaacgtcgcgcgaattgaacgtgtccaaaatcggctcatttgccgagccatcgagcgtcagcttttcctcaaaagaggctctctctttcccgcatttgcatctgagggggcaacgtaatgacagggaccagcacacagattcgacacagtcagcgaacagcagtccagacgaggacactgaggtgaaaacgctgaagctttcaggaatgtccaataggagctccattatcaacgaacacatgggcagtagctccagagatagaaggcaaaagggtaagaagtcgtgcaaagagaccttcaaggaaaaacactccagcaagtctttcctggagcctggtcaggtgacaacaggagaggaaggcaaccttaagcctgagttcatggacgaggtgctcacacctgagtatatggggcagcgaccatgtaataacgtgagcagcgacaaaatcggagacaaaggtttgagcatgcctggagtgcctaaggcaccccctatgcaggtagagggtagtgctaaagagctccaggcaccccgtaaacgtaccgtgaaggtgacacttaccccacttaaaatggaaaacgaaagtcaaagtaagaatgcgctgaaagagtcaagcccagctagccccttacagatcgaatctacatcacctacagaacctatctctgctagcgaaaatcccggcgacggccccgtggctcagccttccccaaataataccagctgtcaagacagtcagtcaaataattaccagaaccttcctgtccaggatagaaatctgatgctgcccgacgggcccaaaccccaggaggatgggtcctttaaacgacgttatccgcggcgctcggccagagccaggagcaacatgttttttggactgacacccctgtatggcgtccggagctatggagaggaagacattccattctactcttcatctaccggcaagaagcgtggcaaacgctcagctgagggccaggtcgacggcgccgatgacctgagtacatcagacgaggacgatctctattactacaattttacgagaactgttatctcctcgggaggggaggaacgattagcaagccataatctgttcagggaggaagaacagtgcgatcttcccaaaatctctcagctggacggcgttgatgacggcaccgagtccgacacttccgtgaccgccaccaccaggaaaagtagccaaattcccaagcgaaacgggaaagaaaatggaacagaaaacctgaaaatagatcggcccgaggacgcgggcgaaaaggagcacgtcactaagtcctccgttggccataaaaatgagcccaaaatggataactgccacagcgtgagtagggtgaagactcagggacaagattcgctggaagcccagctgtcaagcctggagtcgtcgcggcgggtgcacacaagtaccccttcagataagaatctgctagacacatacaatacggaactcctgaaatccgatagcgataataacaattccgatgactgcggtaacatcctaccatctgacatcatggactttgtgctcaaaaacacaccctctatgcaggccctgggagaatctccggagtctagtagctctgagctccttaacctcggagaagggctcggactggacagtaaccgtgaaaaagatatgggcttgttcgaagtgttttcccagcaactccccacaacagaaccagttgactcaagcgtgtcaagcagtatcagtgctgaggaacagtttgagcttccacttgagctcccctcagacctgagcgttctgacgacacggagccctactgttccctcccagaacccctcaagattggctgtaatttctgactccggcgagaaacgggtaactattaccgagaagagtgttgccagttccgagtctgatccagcactcctgagccccggcgtagaccccacacccgaggggcacatgaccccagatcactttattcaggggcatatggacgctgaccatatttcttccccaccctgtgggagcgttgagcagggtcacgggaacaatcaagacctaactcgcaactcaagcacccccgggctgcaggtccccgtgtctcctaccgtgccaattcaaaatcaaaagtacgtgcccaattcaactgacagccccgggccctcccaaatatctaatgcggccgtacagacaacccctccacacttaaagcctgctaccgaaaagctgattgttgtcaaccagaatatgcagcccctgtatgttttgcaaaccctccctaatggggtgactcaaaaaattcagttgacttcctccgtaagctccacgccatccgtcatggagacaaacacgtcagtgctaggcccgatggggggtggcttgaccctcaccacaggactcaatccatcgctccctaccagtcagtccttgttccctagtgcctcaaagggtctactgccaatgtcgcaccaccagcatctgcattcgttccctgccgcgacccagtcctcctttcctcccaatataagcaacccgccaagcggactactgattggcgtgcagccgccacccgacccccagctgctggtatccgagtcctctcagaggaccgatctgtccactactgtggccaccccctcaagcgggctcaagaaacgcccgatctctcgcttgcaaacccgcaagaacaagaagcttgccccgagcagcacacctagcaacattgcgccttccgatgtcgtgagcaatatgacactgattaatttcaccccatcacaattgccaaatcatccgagtctcctcgacctgggaagcctgaatacgtcatcacatcggaccgtgcccaatattatcaagagaagcaaatccagcataatgtattttgagccagctcccttgctgcctcaaagcgtcgggggaaccgctgccacagctgctggcaccagtactatctctcaggacaccagccaccttacttctgggtctgtctcgggcctggcttcctcttcatccgtgctcaacgtcgtttccatgcagacaaccacgactcccacaagcagtgctagtgtgccaggacacgtgactttgaccaacccaaggctgcttggcactcctgacattggatctatcagcaacctcctgattaaagcttcacaacagtctctggggattcaggatcagcccgtggctctgcccccatctagtggcatgtttcctcaactcggaacaagccagaccccatccaccgcagctataacggccgctagcagcatctgcgtgctcccgagcacccagaccactggtattactgctgccagtccaagcggcgaagctgatgaacactaccaactgcaacatgtgaaccagctcctggcttctaaaactggcatccactcatcacagcgggatcttgattcggcatctggcccacaagtgagtaatttcactcagactgttgacgcccccaactctatgggtctcgagcagaataaagctctgagcagtgccgttcaggcttccccgacttctcccggcggcagtccttccagcccaagttccggacagaggtctgcctctccatctgtgcctggtccaactaagccaaagccgaaaacaaaaaggtttcagctgcccctggataagggcaatggcaagaagcacaaagtgagccatcttcgcacttcgagtagtgaggctcacatcccggatcaagagactacatctctcacatctgggaccggaaccccaggcgctgaggccgaacaacaggacacagcaagtgtcgaacaaagcagccagaaggaatgcggtcagccagccggccaagttgccgtactgcccgaggtgcaggttactcagaatcctgctaacgagcaggaaagcgcggagccgaagacagtcgaggaagaagaatccaatttttcttcccccctgatgctatggctccagcaggagcagaagcgaaaagagtccattaccgagaagaaacccaaaaagggccttgtgtttgagatctcctcagacgacggattccagatttgcgccgagagcatcgaagacgcctggaagagcctcacagacaaggttcaagaggctaggagtaacgcgcgtctgaaacagctgagcttcgccggagtcaatggcctccgaatgcttggtatactacacgatgctgtcgtgttcctgatcgaacagctatcaggggctaagcattgtcggaactacaagtttagatttcacaagcctgaggaggctaacgaacccccactgaatcctcacgggtcagcgagagcagaggtccacttaagaaaaagtgcattcgatatgtttaactttctggcatcaaaacatcgccaacccccagaatataatcccaacgacgaggaggaagaagaggtacagctcaagtctgcacgacgggcaacatctatggacctccctatgcctatgcgattcaggcacctgaagaagacatccaaggaagctgttggtgtgtaccgcagccctatacacggtcgtggtctgttctgtaaacgcaacatcgacgctggggagatggtgatagaatacgctgggaacgtcatccgcagtatccagactgacaagagagaaaagtactacgattccaaggggattggttgctacatgtttaggattgacgattcagaagtggtggacgctaccatgcacggcaacgctgccagattcatcaaccactcttgcgaaccaaactgctactctcgcgtgattaatatcgacggtcagaagcatatcgttatattcgctatgcggaagatttaccgtggggaagaactgacctacgactacaagtttcctatcgaggacgcttcaaacaagctgccatgcaattgcggtgccaagaagtgcagaaagttcttgaactag

SEQ ID NO: 125237 - DNA, 1680 bp, synthetic construct
  misc_feature 1..1680: note = Description of Artificial Sequence: Synthetic coding sequence
  source 1..1680: mol_type = other DNA
atggacaaccagtgcactgttcaagtgagacttgagctgggtcaccgcgctcagctgcggaaaaaacctacgaccgagggatttactcacgactggatggtctttgtgcgtggccccgagcagtgcgacatacaacatttcgtggagaaggtcgtgttttggctgcatgattccttccccaagccgaggagggtctgtaaggaacccccatacaaggtggaagagtccgggtacgccggttttataatgcctatcgaggtgcattttaaaaataaagaagagccacggaaagtgtgttttacctatgacttgttcctcaatctcgagggcaacccccccgttaaccatctccgctgcgagaagcttactttcaataatccaactacagagttccgctataagctgctgcgcgcaggaggcgtcatggtgatgccagaaggcgccgatacagtgtctcgtccatcccccgactaccccatgttgccaaccatccccctaagcgctttcagtgatcctaagaaaactaagcccagtcacggcagcaaagatgccaataaagaaagctcaaaaacatccaaaccacacaaggtaacgaaggaacaccgcgagcgcccacgcaaagacagtgaaagcaagtcatctagtaaggagctggaacgcgagcaggcgaaatcgagcaaggacacttccagaaagttgggagagggaagactcccgaaggaggaaaaggccccccctccaaaggctgctttcaaggaaccaaagatggctctgaaggagacgaaacttgaatctacctctcctaaaggtggcccccctccccctcctccacccccccctcgggcctcatcaaagcggcctgccactgcagacagccccaaaccgagtgctaagaagcagaagaagagcagcagcaaggggtctcgctccgcaccaggaacttccccacggacgtcgagctcatcctcattcagcgataaaaagcccgccaaggataaaagcagcacccgaggcgagaaagtgaaggccgagagtgagcctagggaagcaaaaaaggccctcgaagtggaggagagtaactccgaggacgaggcatctttcaagagcgagtccgcgcagagttctccatcaaactcctcatcttcttcagatagcagttctgatagtgatttcgagcccagccaaaaccacagccagggccctctgagatcaatggtggaggacctgcagagtgaagagtcagatgaggacgactcctccagcggggaggaagcagcaggcaaaaccaatcccggacgggacagccgattaagtttctctgatagcgagagcgataattctgccgatagcagcctcccgagcagagagcctcctcccccccagaagccgcctccgcccaactccaaagtttccgggcgtaggtcccctgagagctgcagtaagccagaaaaaatcctgaagaagggcacctatgataaggcctacactgacgaacttgtggagctgcacaggagattgatggctctgagggagcgcaatgtgctgcagcagatcgtgaacttgatcgaagagactgggcactttaacgtgactaacacaacttttgattttgacttattttcactggatgaaactaccgtacgaaaactccagtcttgtttggaggctgtcgccacttag

SEQ ID NO: 125238 - DNA, 273 bp, synthetic construct
  misc_feature 1..273: note = Description of Artificial Sequence: Synthetic coding sequence
  source 1..273: mol_type = other DNA
atgcgcgatccagtgagctcccagtattccagcttcctcttctggcggatgccaatccccgaattagacctatcggagttggaggggctgggcctaagcgataccgcaacatacaaggtgaaagattcttccgtgggtaaaatgattggtcaggcaacggccgctgatcaggagaagaatccagagggggacggcctgttggaatactccacttttaatttctggagagcccctatcgccagcattcattcctttgagttagatttactgtag

SEQ ID NO: 125239 - DNA, 417 bp, synthetic construct
  misc_feature 1..417: note = Description of Artificial Sequence: Synthetic coding sequence
  source 1..417: mol_type = other DNA
atgaaggatctgcattccgatgacaatgaggaagagagcgacgaggtcgaggacaatgacaacgacagcgagatggagaggccagttaacagaggcgggagtagatctagacgcgtctccctctctgacggcagcgactcggagtcctccagtgcttcgtcgccactgcaccacgagccgcctccgcccctcctcaagacgaacaacaaccaaatcctggaagtgaagagtcctatcaagcagtctaagagtgacaaacagatcaaaaatggagagtgtgacaagattgtcaacctaattgaagagacggggcacttccacatcacaaacaccacttttgacttcgatttgtgctcgttagataaaaccacggttaggaagctgcagtcatatctggaaacatcaggcacatcctag

SEQ ID NO: 125240 - DNA, 489 bp, synthetic construct
  misc_feature 1..489: note = Description of Artificial Sequence: Synthetic coding sequence
  source 1..489: mol_type = other DNA
atgaaagacctgcactcggacgataatgaggaggagagcgacgaagtggaagacaacgataacgactccgaaatggagcgccccgtaaaccgggggggatcgagatctcgcagggtctcccttagtgatggatccgattctgaatcatcaagcgcttcaagccctctgcaccatgagccaccaccacccctacttaaaactaacaataatcaaatcttagaggtgaagtcccctatcaagcagagcaaatctgataagcagattaagaacggggaatgtgacaaagcatacctcgacgagctggtggaactgcatcgccggttaatgaccctgcgcgagaggcacatccttcagcagatcgtcaatctcatcgaagaaaccgggcattttcacataaccaatacaactttcgactttgacctgtgctcgctcgacaaaacgaccgtcaggaagctccagtcttacctggagacaagcgggacttcttag

SEQ ID NO: 125241 - DNA, 417 bp, synthetic construct
  misc_feature 1..417: note = Description of Artificial Sequence: Synthetic coding sequence
  source 1..417: mol_type = other DNA
atgaaagatcttcacagcgatgacaatgaagaagagtccgatgaggtagaggacaatgataatgactccgagatggagcggcctgtgaataggggtggaagcaggagtcgaagagtgagtctgagcgatgggtcggactcagagtccagttccgctagtagcccactgcaccatgaaccaccacctcccctgcttaaaaccaacaataatcaaatcctggaggtgaaatctccaattaaacagagcaagtcagataagcagatcaagaacggggaatgcgacaaaatcgtgaacctaatcgaagagactggtcatttccacattaccaacactacctttgacttcgacttgtgcagtctggataagaccaccgttcgaaagctgcagtcttacttggaaacttcaggtacctcctag

SEQ ID NO: 125242 - DNA, 1707 bp, synthetic construct
  misc_feature 1..1707: note = Description of Artificial Sequence: Synthetic coding sequence
  source 1..1707: mol_type = other DNA
atggccagtagctgtgccgttcaagtgaagctggaactcggccatcgtgcccaagtccggaaaaagcctactgtcgaagggtttacccatgactggatggtatttgtgcggggcccagagcactccaacattcagcacttcgtggagaaagtggtgttccaccttcacgagtcttttccacggccaaagagagtatgtaaggacccaccatacaaggttgaagagtcagggtacgcaggcttcatccttccaatagaagtgtactttaagaacaaagaggaaccgagaaaggtccgatttgactacgatctgttcttgcatttggagggtcatcctccagtgaaccatctgaggtgcgagaaactgacatttaataaccccacagaggatttcagacgcaagcttctgaaggcaggaggggaccccaaccgaagcatccatacatctagttcctcgtcctcaagctcatctagtagtagctcgtcgagtagctccagctcctcgagctcaagtagttccagcagtagctccagctcaagctcaagctcatcatcctcatcctcatcttctacttctttctcaaaaccacataagctcatgaaagaacacaaagagaaaccctctaaagactcccgtgaacacaaatcagcgttcaaagaaccttccagagaccataataagagtagcaaggaatcttctaagaagcctaaagagaacaagccacttaaagaggaaaagatcgtccccaaaatggctttcaaggaacctaagccaatgtccaaggagcccaagccagatagtaaccttttgaccattaccagtggtcaagataagaaggcaccatcaaagcgccccccaatcagcgattctgaggagctctcagccaagaaacggaaaaagagctcttctgaagctctctttaaatcctttagcagcgccccccctctgatcctgacctgctccgccgataagaagcagattaaggataagtcccacgtaaaaatggggaaggtcaaaatcgaaagcgagaccagtgagaagaaaaagtcgacgctccccccatttgatgatattgtggatcccaatgactctgatgtagaggaaaacatcagctccaagtcagatagtgagcagcccagtcccgcaagtagctctagcagtagtagttcttccttcaccccatcacagacacgtcaacagggcccgctgcgcagtattatgaaggacctccactcggatgataacgaggaggaatccgacgaggttgaggacaatgataatgatagcgaaatggagaggccagtcaatcggggtgggtcacgaagtcgccgagtgtccctaagcgacggcagcgattcagagtcatcctccgccagctcaccactgcaccacgaaccacctcctccgttacttaaaaccaacaacaaccaaattctcgaagtgaagtcacccatcaaacagtcaaagtctgataaacagataaagaatggtgaatgtgataaagcgtacctagacgaactcgtagagttacacagacgtctgatgacgctacgggagcggcacatcttgcagcagatagtgaaccttattgaagagacaggccacttccacattacaaataccacatttgacttcgacctgtgcagtctggacaaaacgactgtgagaaaactgcagtcgtatctggaaacttccggcaccagttag

SEQ ID NO: 125243 - DNA, 1698 bp, synthetic construct
  misc_feature 1..1698: note = Description of Artificial Sequence: Synthetic coding sequence
  source 1..1698: mol_type = other DNA
atgtgcgctgtgcaggtgaaactggagctcgggcatagggctcaggtcaggaagaaacccaccgtggaggggttcacacacgattggatggttttcgttcggggaccagaacactccaatatccagcactttgtggaaaaggtggttttccatctgcacgagtcctttccgcgacccaagagagtgtgcaaggaccctccatataaggtggaggagagcggctacgccggcttcatcctcccaattgaggtgtattttaagaataaggaagagccccgaaaagttagattcgattacgatctctttctgcacttagagggtcatcctccagttaatcatctgagatgcgaaaagctcacgtttaataaccccaccgaagacttccggcgcaaactccttaaggccggtggtgatccaaatagatcaatccacacgagttccagttcttcatcctcgtcttcaagctccagctcatcatcaagcagttcctccagcagcagttcgtcttccagctctagcagcagtagttcatcaagttcttcgtcctccagctctagcagcactagcttcagcaagcctcacaagctcatgaaagagcataaggaaaaaccaagcaaggacagcagagagcacaagtctgcctttaaggagccatcacgggatcacaacaaaagttcaaaagagagctctaagaaaccgaaggagaacaagcctctgaaagaagagaagatcgtcccaaagatggcattcaaggaacctaagcccatgagcaaggagcccaagcccgactccaatcttctcaccataacttccggacaggacaagaaagccccatccaaacgtccaccaatcagcgacagtgaggagctgtcagccaagaagaggaagaagtcttcatctgaggctctctttaaatccttcagcagcgccccacctcttattctgacatgttcagctgacaagaagcagatcaaagataaatcacacgtgaagatgggcaaggtgaagattgagagtgagaccagcgaaaaaaagaaaagcacacttcctccctttgacgacattgtggaccctaacgactcggacgtagaggaaaatatttcgtccaaaagtgactccgagcagccgtcaccagcttcttcaagtagttctagctcttctagctttacgccctcccagacaaggcaacagggccctctacggtctatcatgaaggacctgcattctgatgataacgaggaggagtccgacgaggtggaagacaacgataatgacagcgaaatggagcgtcccgtgaacagaggcggcagcagatccaggagagtttccctatccgacgggtccgatagcgagagctcatccgcaagtagtccactccaccacgagccccccccgcctctgcttaaaactaacaacaaccagatccttgaagtgaagtcccctataaaacagtccaaaagcgataagcaaatcaagaatggcgagtgtgacaaggcatatctggatgagctcgtcgaactccaccgaagactgatgaccctgcgtgaaaggcatatcctgcagcaaatagtcaatctgattgaggaaactggacactttcacatcaccaatacaactttcgattttgacctttgttccctagacaagacaacagtcagaaaactccagtcctacctggagacctccggaacctcttag

SEQ ID NO: 125244 - DNA, 1824 bp, synthetic construct
  misc_feature 1..1824: note = Description of Artificial Sequence: Synthetic coding sequence
  source 1..1824: mol_type = other DNA
atgcagcgagcccccccctttccatttatgtgtgtgtcccgtaggaggaaaaagtgccaagcccaaaggtccctgcctaagccccggctccctgtgatccacgggtgcctttctagcccctgcccacagtgcgccgtacaggttaaactggaactcggccatagagctcaggttaggaaaaagcccacagtcgaaggcttcacacacgattggatggtgtttgtgagaggccctgaacactccaacatccaacattttgtggagaaagtggttttccacctccatgagtcattcccccggcccaaaagggtgtgtaaggaccccccatataaagttgaggagagcggctacgctggttttatcttgcctattgaggtgtattttaagaataaagaggagccacgcaaggtacgtttcgattacgatcttttcctccacctggagggccatccccccgttaatcacttgcggtgcgaaaaattgactttcaacaaccccaccgaagacttccggcggaagctgctgaaggccggtggagatcccaaccgctctatccatacctccagttctagttccagtagtagctcctcaagttcgtctagttcatcctcttcttcctcgagctcatcttctagctcatctagctcaagctctagcagttcaagctcctcctcaagtagctcttccacctctttttccaagccccataaactgatgaaagaacacaaggagaagccatccaaggattcgagggagcataagagtgcattcaaagagccgagtagagatcacaataagtcatcaaaagagtccagcaaaaagcccaaggagaataagccactgaaagaagagaaaatagtccccaaaatggccttcaaagagcccaaaccaatgtctaaggagcctaaacctgatagcaacctacttacgattacttcgggccaggataaaaaggctcccagcaaacggccaccaatcagcgattctgaggaactcagcgcgaagaagcgcaaaaagtcctcttccgaggccctgtttaagtctttctctagtgctccccctctcatcctaacttgctctgccgacaagaagcagattaaagataagagccacgtcaaaatgggcaaggtgaaaatagagtccgagaccagcgagaagaaaaagtccaccctcccacctttcgatgacatcgtcgaccctaacgactccgacgttgaggaaaacatcagttcgaaatctgactctgaacagcccagtcctgcatcttcaagttctagctctagctcgtctttcaccccctctcagactcgccagcaaggcccattgaggagcattatgaaagacctccacagcgatgacaacgaagaggagtctgacgaggtggaagataacgacaacgactcagaaatggaacggcccgtcaacaggggtggttctcggtcgaggcgagtcagcttgagcgacggcagcgatagcgagagttctagtgccagttctcccctgcaccatgagccacccccacctcttctcaagactaacaacaatcagattctcgaggtaaagtcacccattaagcagtcaaagagtgacaaacagattaagaatggggaatgtgacaaagcatatctcgacgaactcgtggaactgcataggaggcttatgaccctaagagagcgacacatactccagcagatcgtcaaccttatcgaggaaaccggccactttcatatcactaacaccacatttgattttgatctctgcagcctggataagacaaccgtgcgcaaactccaatcttatcttgagactagcggcacttcctag

SEQ ID NO: 125245 - DNA, 4986 bp, synthetic construct
  misc_feature 1..4986: note = Description of Artificial Sequence: Synthetic coding sequence
  source 1..4986: mol_type = other DNA
atgtctgccgggggtagagatgaagaaaggagaaagctagccgatattattcaccattggaatgccaatcgcctggacctatttgagataagccagcccaccgaggatcttgagtttcacggcgtgatgcggttctatttccaggataaggccgctgggaatttcgccacaaaatgcatccgtgtcagcagcacagccacaacacaagatgtgatcgagactctggccgagaagtttcgtccggatatgagaatgctgtcctcacccaagtacagcttgtacgaggtccatgtctccggggagcgaaggctggatatagacgagaaacccctggtggtccaactgaattggaataaggacgaccgagagggtcggtttgtgctgaagaatgaaaacgacgccattcctccgaagaaggcacagagcaacgggcctgagaaacaagagaaagaaggcgtaatccaaaacttcaagagaaccttatccaagaaagaaaaaaaggagaagaaaaaacgtgagaaagaggccctgcggcaggccagcgacaaggatgaccgcccctttcagggcgaggacgtggaaaattcaagattggccgccgaggtgtacaaggatatgccagagacgtctttcaccagaactatctcaaatccagaagtcgtaatgaagaggcgccggcaacagaagttggagaaacggatgcaagaattccggtcctctgatggccgacccgactccggtggcacactgaggatttacgccgattctcttaagccaaacataccttacaagaccattctgctgagcacaactgatcccgccgatttcgctgtcgcagaggctttagagaaatacggactggagaaagagaatccgaaagattattgtatcgccagagtgatgctgccccccggggcacagcacagcgatgagaagggtgcaaaagaaatcatcctcgacgacgacgaatgccctctgcagatcttccgcgagtggccctctgataaaggcattcttgtgtttcagttgaagcggaggccccccgaccatatccctaagaagaccaaaaaacatctcgaggggaagacccccaaggggaaggagcgcgcagacggatcaggatacggtagtacattgccacctgagaaactgccttatctcgtcgaactatctccgggtcgccgcaatcacttcgcatactacaattatcacacctatgaagatgggtctgatagcagagataaaccaaagctctacaggctccaactgagcgttactgaggtggggacggaaaaactggatgataactcaatccaactcttcgggccaggtatccaaccacaccactgcgacctgaccaacatggacggtgttgtgacggtgacaccaagatccatggatgctgagacctatgtggagggacagcggattagcgaaaccaccatgctgcagagcggtatgaaagtccagttcggcgcaagccacgtctttaaatttgtagacccttctcaggatcacgctctcgctaagaggtcagttgatggaggtcttatggttaagggcccccgacacaagccaggaatcgtgcaggaaacgacctttgacctgggaggcgacatccatagcggaactgcccttcctacctctaaatccacaacccgtctcgattccgaccgagtctcatcagcgagtagtacagcagaaaggggtatggttaagcctatgattcgagtcgagcagcagccagactatcggcgtcaggaatcccgaactcaagacgcctcaggcccggagctgattcttcctgcatctattgaatttcgcgagagctccgaggactctttcctgtccgcaattataaactataccaattcatcaacagtgcatttcaagctgtcccctacctatgttctatatatggcctgccgatatgtgctgtccaatcaatataggcctgatatcagccccacagagagaactcacaaagtgatcgcagtggtaaacaaaatggtgtctatgatggaaggagtaatacaaaagcagaagaatattgcaggggctttggcattttggatggcgaacgcaagtgaactgctgaatttcatcaagcaggaccgtgatctttcccggattaccttggacgcccaggatgtcctcgcccacctggtccagatggcctttaagtacctggtgcactgtttgcagtcagaactgaacaattatatgccagccttcctggacgaccccgaggagaattcactgcagcggccgaagattgacgacgtgctccacacactgacaggcgcgatgagtttactgcgtcggtgcagggtgaatgccgcactaactatccaactgttctcacaactattccactttatcaacatgtggctatttaaccggcttgtgaccgacccagacagcggtttgtgctctcactattggggcgcaatcatcagacagcagctaggacatattgaagcttgggccgaaaaacaggggttggaactggcagctgactgccatctctctcggattgtgcaggcaaccactcttctcacaatggacaaatatgccccagatgatattcccaacattaattccacttgtttcaaactcaattctcttcagctgcaggcactcctgcagaactatcattgcgctcccgatgagccatttatccctacagacctcatcgagaatgtggtgaccgtggccgagaacaccgctgacgaattggcacggagtgacgggagagaggtacagctagaggaggatccggaccttcagttgccgttcttactgcctgaagacggctattcctgtgatgtggttagaaatatcccaaatggtttgcaggaattccttgaccccctgtgccagaggggcttctgccgcctcattccacacacacgctcgccgggcacatggaccatatacttcgagggcgcagactatgaaagccatctcctcagagagaacactgaactggccatcccacttcggaaggaaccggaaattattaccgtgacactcaagaaacagaatgggatgggactgtctattgtcgccgcaaagggagctggacaagacaagttgggaatctacgtgaagagtgtcgtcaagggcggggccgcggacgtcgacggtagactcgcggctggcgaccagctgctgtccgtggatgggaggtctctggtcggcttatcccaggagcgggccgcagagctgatgacacgaacctcaagcgtcgttacactggaggtcgctaaacagggtgctatatatcacggactggcaactcttctcaatcagccctcccctatgatgcagaggatttccgaccgccgcggcagcggaaaacccagacctaagtctgaagggtttgagctctacaacaactctacccagaacgggagcccagagagcccacaactcccatgggccgagtattccgaacccaaaaaattacctggggacgatcgcttgatgaagaaccgcgccgaccatagatctagccccaacgtcgctaatcagccacctagtccggggggaaagtcggcctacgcatccggtacgacagccaaaatcaccagcgtctcaaccggcaacctctgcactgaggagcagacacctcctcctcggcccgaagcatatcccatccccacgcagacttacacgagggaatactttacctttcccgccagtaaatcacaggatcgcatggcccccccacaaaaccagtggcccaactatgaggaaaagcctcacatgcatacggatagtaaccacagtagcatcgccatccaacgcgtgaccaggagccaagaagagctgcgggaggacaaagcataccagcttgagcgacaccgcattgaagccgccatggaccggaagtctgacagtgacatgtggatcaaccagtccagttcactggattcatcaacctcctcacaggagcacctgaaccactcgagtaaatctgtgactccagcatccacacttaccaagtcaggacccggccggtggaaaaccccagcggcaatccccgccaccccagtggcagtgagtcaacctatccgtactgaccttcccccacctcctcccccgccaccggtccattacgcgggtgacttcgatggcatgtctatggacctccccctgcctccgcctccatcagccaaccagattggacttccgagcgcgcaagtcgcggcggcagagaggcggaaaagagaggagcaccagagatggtacgaaaaagaaaaggcccggctggaggaggagcgagaaagaaagcgcagggagcaagaacgcaagctcgggcaaatgaggacccagagcttgaaccctgctccattcagccctttgaccgctcagcagatgaagccagaaaagccttcaacgctgcaaagaccccaggaaacggtgatacgagagctgcagcctcagcagcaacctcgcactattgagaggcgggatctgcagtatatcacagtgagtaaggaggagctatcctcaggcgattcattgtccccagatccctggaaaagggatgctaaggagaagttggaaaagcagcagcaaatgcatattgttgatatgctctccaaggaaattcaggaactgcagagcaagcctgatcggtcagcagaagaaagcgataggctgagaaagctgatgctggagtggcagttccagaagcgcctacaggaaagcaagcagaaggacgaagatgatgaggaagaggaggatgatgacgtagacaccatgttgatcatgcagagactcgaggcagaaaggagggccaggcagacagcaatgccagcgatctccgtgctggaccttctgcaagatgaagagcggagaaggcagcagcaactggaagagatgcgaaagagagaggcagaagaccgcgctcggcaggaggaggagcggagaagacaggaggaggaacgcactaagagggacgcagaagaaaaatag

SEQ ID NO: 125246 - DNA, 4998 bp, synthetic construct
  misc_feature 1..4998: note = Description of Artificial Sequence: Synthetic coding sequence
  source 1..4998: mol_type = other DNA
atgtctgccggcggaagagatgaggaaagaaggaagctggcagatatcattcaccactggaatgccaacaggcttgacctttttgagatcagtcagccaaccgaggatttagagtttcacggcgtgatgcggttttatttccaagacaaggccgcaggtaatttcgctaccaagtgtatacgcgtgtcttccaccgcaaccacgcaagacgtcattgagaccctggcggagaaattccgacctgacatgaggatgctatccagtcccaagtactccctctacgaggtgcatgtctctggcgagcgcaggctagatatagacgagaaaccacttgtagtccagcttaattggaacaaggacgaccgggagggaagatttgtgctgaaaaacgagaatgatgccattcccccaaaaaaggctcaaagcaatggcccggagaagcaggaaaaggagggggttattcagaattttaaaagaacactgtcaaagaaggagaagaaggaaaaaaaaaaacgtgaaaaggaggcactccggcaggctagtgacaaagacgataggcctttccagggggaggatgtggaaaattcccggttggctgcggaggtctacaaagatatgccagaaacttccttcactaggaccatctccaatcccgaagtggtaatgaagaggaggcgacaacaaaaacttgagaagcgtatgcaggaattcaggagtagcgatggccgcccggactctggcggaactctgcgtatttatgctgactccttgaaaccaaacataccatataaaacaatactactctctaccacagaccctgcagattttgccgtggcagaggctcttgagaaatacggcctcgaaaaggagaatcctaaagattattgtattgcacgagtcatgctgccacccggggctcaacatagcgatgaaaaaggcgccaaggaaattatcctagatgatgacgagtgtccgctccaaatcttcagagagtggccaagtgataaggggatactcgtcttccagctcaagcgccgtcctcctgatcacattcctaagaagaccaagaaacacctggagggcaaaacccccaagggtaaggaaagggccgacggatctggctacggcagtactctgcctccggaaaagctgccctaccttgtagagctctctcccggtaggagaaatcactttgcatactacaattatcacacgtatgaggacgggagtgacagccgggacaagcctaaactgtataggcttcagttgtccgtcactgaggtaggtaccgaaaaactggacgataattccatacaactgtttggcccaggtattcaaccacatcactgcgatctgacaaatatggatggagttgtcaccgtgacccccaggtccatggatgcagaaacctatgtggagggtcagagaatttctgaaacaaccatgttacagtccgggatgaaggtacagtttggcgcttctcatgttttcaaatttgtcgacccctcccaggatcatgcactggccaagcgctctgtggacggagggctgatggtaaagggaccgaggcacaaaccaggcatcgttcaagagaccacctttgatctcggcggtgatattcatagcggcactgccttgccgaccagtaaatccaccaccaggctcgactcagaccgagttagcagcgcttctagtacagctgaacgcggcatggttaagcctatgatacgagttgagcaacaaccagattacaggcggcaagaaagccgaacccaggacgctagcggccctgagttaatcctgccagcctcaatcgagtttcgtgaatctagtgaggactctttcctgagtgcgatcatcaactataccaatagcagcactgtgcatttcaagcttagtcctacctacgtgttgtacatggcttgtcggtatgtgctctccaaccagtatagacccgacatcagcccaactgaacgaacccacaaagttattgcagtggtcaacaagatggtaagtatgatggaaggtgtcatacagaaacaaaaaaacatcgctggagcccttgcgttttggatggccaacgcaagtgagctgttgaacttcatcaagcaggatcgagatctgagcaggattacattggacgcccaggatgtgctcgcacacctggtccagatggcttttaaatacctcgttcattgcttacaatccgagctgaacaattatatgcctgcatttcttgatgatcccgaagagaactcactgcaaagacctaaaatagacgatgttttacatacattgaccggcgctatgagcctcctgcgacgctgccgagttaatgctgctctgacgatacagctcttctctcagctgttccacttcatcaatatgtggctgttcaataggcttgtgaccgatcccgactctgggctttgctcccactactggggtgctatcatccgccaacagcttggccatattgaggcctgggccgaaaagcaggggttggaactcgctgctgattgccacctcagtaggatcgttcaagccactactttgctgaccatggataagtatgccccagacgacatccctaacatcaatagtacttgtttcaagctgaactctctccagctgcaggctttactgcaaaactaccactgtgcaccggacgagccctttatcccgacagacttgatagagaatgtcgtgactgtggctgaaaatactgccgatgaactggcacggagcgatggccgggaggtccagctcgaagaggacccggacctgcagctacccttccttttacccgaggatggctactcgtgcgatgtagtccggaacatccctaacggtctccaggaatttctggatcccctctgccagcgtggcttttgtcgtctgattccccatactcgatccccaggcacttggactatttacttcgagggagcagattatgagtctcacctgctcagagagaataccgagctcgcccagccactgcgaaaggaacccgagattataactgtgaccctgaagaaacagaatggtatgggcctgtccatcgtggccgctaagggcgccggccaagacaaactgggtatctatgttaagtccgtggtcaaagggggcgccgccgatgttgacggccggctcgcagccggggatcaactgttgagtgtcgatgggcgttccctcgtaggtctctcccaggagcgggctgctgagctgatgaccaggacgtcctcagtggtcacgctggaggtggctaaacagggcgcgatctaccatggactggcaactttacttaaccagccaagtcccatgatgcagagaatctccgaccgccggggatccggaaagcctcggccaaaatccgaaggcttcgagctgtataataactcaacacagaacgggagtcctgagtcaccgcagttaccttgggctgagtattcagagccaaagaagctgcctggcgatgaccggctcatgaagaatcgggcagaccatagatcttctcctaacgtggcaaatcaacccccatcacctggaggcaagagcgcttatgcaagcggcacaaccgcgaaaattacctccgtctcaaccggaaatctctgcaccgaagagcagaccccccctccgcgccccgaagcctatcccataccaacccagacctatacccgcgagtactttacgttccccgcctccaagtctcaagaccgcatggctcccccgcagaaccagtggccaaactacgaagagaagccgcacatgcatacagatagcaatcacagttctatcgcaatccagagagtaacaaggtcacaggaggaactacgggaggataaggcctaccagctagagcgccacaggattgaggcggccatggaccgtaagagcgactccgacatgtggatcaaccaaagtagctctctggatagctccacgtcaagccaggaacatctgaaccattctagcaagtctgtgacacccgcctccaccctcaccaaaagtggtccaggcaggtggaagacaccagctgcaatcccggccacacccgtagccgtatctcagcctatccgtaccgacctgccacctccaccaccaccaccacctgttcactacgccggcgactttgacggaatgtcaatggacttgccacttccaccacctccatctgccaatcagatcggtctcccttccgcacaggtagctgcagctgagcgtcggaagcgcgaggaacatcaacggtggtacgagaaagaaaaagcccgtctagaagaagaacgggagcgaaaacgacgagaacaggagagaaaactggggcagatgcgaacacagtcccttaatcctgcccccttcagtcccttgactgcccagcaaatgaagccagaaaagccctccacactgcagagacctcaggagaccgtgatacgggagcttcagccccagcagcaaccaaggactattgagagacgggacctccagtacataacagtcagcaaggaggaactgtcatctggcgatagtctgagtccagatccttggaagcgtgacgctaaggagaagctggaaaagcagcagcagatgcacatcgtggatatgctttccaaagaaatccaggagcttcagagcaaaccagatagatcagccgaagagtcagaccgcctgcgaaagctaatgctggagtggcagttccagaagcggctgcaggagagcaagcagaaagacgaagatgatgaagaagaggaagacgacgatgtggacaccatgctgattatgcagcgtctggaggcggaaaggcgggccaggcaaactgctatgccggccatcagtgttctggatctcctacaggacgaggaacgccgccggcagcagcagctcgaggaaatgcggaaacgcgaagccgaagaccgggctaggcaggaggaggaaaggcgccgccaggaagaggagcgcaccaagagggatgccgaggagaaggtaatggtactgtag

SEQ ID NO: 125247 - DNA, 5475 bp, synthetic construct
  misc_feature 1..5475: note = Description of Artificial Sequence: Synthetic coding sequence
  source 1..5475: mol_type = other DNA
atgagcgcgggtgggcgggatgaagagagacggaaactggctgacatcatccaccattggaatgcaaatagactagatctgtttgagattagtcagccaactgaggacctggagtttcacggggtgatgagattctatttccaggataaggcagctggaaactttgcaaccaaatgcattagggtgtcgtcaaccgcaaccacacaggatgtgatcgagacactggccgaaaaattcagacctgatatgagaatgctttcatcacctaagtattccctatacgaagtgcacgtgagcggagagcggcggctggatatagatgaaaagcctttggtagtgcagctgaactggaacaaagacgaccgcgagggacgcttcgtgctgaaaaacgaaaacgatgccatccccccgaaaaaggctcagtccaatggaccagagaagcaagagaaagaaggagtgatccagaattttaagaggaccctgtccaagaaagagaagaaggaaaaaaagaagcgcgagaaggaggccctccgacaagcatcggacaaagatgatcgaccattccagggcgaagatgttgagaacagtcgcctagccgctgaggtatataaggacatgccggagacctcttttacacgaacgatcagcaacccagaggtcgtgatgaagagacgtcggcagcagaagctggaaaagcggatgcaagagtttagatcatcggatggcaggcctgactcagggggaaccctgcgtatttatgcagattcactgaagccaaacatcccatacaagacaatcttattgagcactacagaccccgccgactttgcggtggccgaagctctcgaaaaatatggcctggagaaggaaaacccgaaggattactgcattgctcgagttatgctgccacccggcgcacagcacagcgacgaaaagggggcgaaggaaattattctagatgatgacgaatgtccgctgcaaatcttcagggagtggcctagcgataaagggatacttgtttttcagctgaaaagacggcctcctgatcacattccaaagaagacaaaaaaacatctggagggaaagacccccaaagggaaggaacgggccgatggttctggctacgggtctactctcccccctgagaagctcccgtacctggtcgaactgtctccaggccgtcgaaatcactttgcatactacaactatcacacttatgaagatgggtccgacagtcgcgataagcccaagttatacaggcttcagctctccgtgacggaagtcggaacggagaagctggacgacaattcgattcaacttttcggcccaggcatccagcctcatcactgcgatctgactaatatggatggagtggttacagttacgccaagatctatggatgctgagacctacgttgagggccaacggatttccgagactacaatgctgcagagcggcatgaaagtccaattcggggctagccacgtattcaagttcgtggatcccagccaggaccatgcacttgccaagcggagtgtagacggaggacttatggtgaaggggccaagacacaagcccggaatcgtccaggagaccacttttgatcttggaggcgacatacacagcggcacggccttgcctacaagcaaatcaaccacccggctggatagcgacagagtgtcatctgctagctctacagcggagagaggaatggtgaagccaatgatccgcgtggagcagcagcccgactaccgacgtcaagagagcaggactcaggatgcttcgggacctgagctaatactccctgcctcaatcgaatttagggagtccagcgaagactcattcctatccgcgatcatcaactataccaactcgtctacagtgcactttaagctgtctcctacatacgtgctctacatggcctgtcgctatgtgcttagtaatcagtaccgacccgacatctctcctaccgaacgtacccacaaggtgatagcagtggtgaacaagatggtttcgatgatggaaggagtaatccagaagcagaagaatattgctggcgccctagccttttggatggccaacgcttctgagttactcaacttcatcaaacaggaccgagatctgagccggatcactctggatgcccaggacgtgcttgctcatctcgtacagatggctttcaagtacttggtgcattgtctgcagtcagagctcaacaattatatgccagcctttcttgatgatccagaagagaattcccttcaacggcccaagatagatgacgtccttcacacactgaccggggcaatgtctctgttgcggcggtgcagggtgaacgcagccctgactatccagcttttttcccaactgtttcattttattaacatgtggctgtttaatagactcgtgaccgacccagattccgggctttgctcccattactggggcgccattatccgccagcagctcgggcatattgaggcctgggccgagaaacagggacttgagttagccgccgactgccaccttagccggatagtgcaggctacaacactgctaacgatggacaagtatgcacctgacgatattcccaacatcaatagcacctgttttaagctcaatagccttcaactgcaggcgcttctccagaattaccactgtgcccctgacgaaccctttattcccaccgacctgattgaaaacgtggtgactgtggccgaaaacacggctgacgaactggcacgctcagacggtagggaagtacaacttgaggaggatccagatctgcagctcccgtttctcctgcctgaagatggttattcatgtgatgtggtgcgaaatatccctaatgggctccaggagtttctagatcctctgtgccagagaggtttttgtaggttgattccgcacaccagatcccctggcacgtggacaatctattttgagggggcagactacgagtctcacttattaagggagaacactgagctggcaattcccctgcgtaaagagccggagataataacggtgaccctgaaaaaacagaatggcatggggttgtctattgtggccgctaagggggccgggcaggacaagctaggaatctacgtcaaaagcgtcgtgaaaggtggagctgctgacgtggacggcagattagcggccggggatcagttactctctgtggacgggaggtccctcgtcgggttaagtcaggagagggccgcggaactcatgacacggactagcagcgtggtaacgctggaagtggcaaaacaaggtgctatctaccatggtctggcaacgttgctcaaccagccaagtcccatgatgcagcggatctccgatagacgtggctctggcaagccccgtcccaagtcagaggggttcgagctatataataattccacacagaatggctctcccgaatctcctcagttgccatgggccgagtactcggaaccgaagaagttgccaggtgacgatcgtctgatgaaaaatcgggcagatcatcgctcaagccctaacgtcgctaatcagcctccgagccctggagggaaaagcgcctatgcatccggcacgacagcaaaaattacctcagtgtccaccgggaatctttgcaccgaagagcagacccccccgccccgcccagaggcgtatcctatcccgacccagacgtatacccgtgaatattttacatttcctgcgagcaagtcacaagatcgcatggcccctccacagaaccagtggcccaattatgaggagaagccgcatatgcatacagattcaaaccactctagtatagccattcagcgcgtcacccgctcccaggaggagctgcgcgaagataaagcatatcagctggaacggcataggatcgaggctgcgatggaccggaagtctgacagtgatatgtggattaatcagtcaagttctttagactctagtacgagctctcaggagcatctaaatcatagcagtaagtctgtgacccctgcttcgacccttactaaatcgggtcccggccggtggaaaactcctgctgccattcctgcaacccccgtagccgtctctcaaccgatccgaacagatctgcctcctccgcctcccccccctccagtgcactatgccggcgacttcgacggtatgtccatggacctgccgttaccaccaccgccatccgctaaccaaattggacttccctccgctcaagtcgcagccgccgaacgccgcaaaagagaggagcaccagagatggtacgagaaggagaaagcgaggctggaggaggagagggagagaaagagacgagaacaggaacggaagttgggccaaatgcgtactcagagccttaatccagcccctttctctcccctcaccgcacagcaaatgaaacctgaaaagcccagcacgctgcagagacctcaggagacagtgatacgtgagcttcagcctcagcagcagccccgtacaattgagcgccgggacctgcaatacattaccgtgtctaaggaggagttgagtagcggagattccctgagcccggacccctggaaacgggacgccaaagagaagctggagaaacagcagcagatgcacattgtggacatgctgagcaaagagatccaggaactacagagcaagcctgaccggagtgcagaggaatcagatcgccttcgtaaactcatgctggagtggcaattccaaaagcgattgcaagaatctaagcaaaaagacgaagatgatgaggaagaagaggatgacgatgtcgacactatgctcatcatgcagaggctggaggccgagcgcagggctcgcttgcaggatgaagaacggaggcgccagcagcagttagaggaaatgagaaagcgggaggctgaagatcgtgcccggcaggaagaggagcgtagaaggcaagaagaggagcgcaccaaaagggatgctgaggaaaagcgacggcaggaagaaggctactacagccgtcttgaggcagagcggaggcggcagcacgacgaggcggccaggaggctcctcgaacccgaggcaccaggcttgtgtagacccccattgccaagagactatgaacctccttctccctcgcctgcccccggcgcacctcctcctcctcctcagcggaacgcttcttatctgaaaacgcaggttctcagtcctgattctctatttacagccaagttcgtggcctataatgaggaggaagaggaggaggactgtagcctagccggcccaaattcgtaccccgggtcaaccggcgcggcagtgggtgctcacgacgcatgcagagatgcaaaagagaaacgtagcaaatcacaagacgcagacagtcccggctcaagtggggctcctgagaatctaactttcaaggagcggcagcgcctgttctctcaggggcaggatgtctccaataaagttaaggcatcccgtaaactgacggagttggagaacgagctgaatactaagtag

SEQ ID NO: 125248 - DNA, 4956 bp, synthetic construct
  misc_feature 1..4956: note = Description of Artificial Sequence: Synthetic coding sequence
  source 1..4956: mol_type = other DNA
atgagtgcagggggacgggatgaagagcgccgaaagctggctgatatcatccatcattggaacgcaaatcggcttgacctcttcgagatctcacaaccaacagaggacctcgaatttcatggcgtgatgaggttctactttcaagacaaagctgcaggaaatttcgcaacaaagtgcatcagagtcagttctaccgccacaactcaggatgtgatagaaaccttggcagaaaaatttaggcccgacatgagaatgctgagttcacccaagtactcactgtacgaggtccacgtgtccggcgagcgtaggctcgacatagacgaaaagcccttagtggtgcagctgaactggaacaaggacgaccgcgagggccggttcgtgctgaagaatgaaaacgatgctatccctccaaagaaagcccagagcaacggccccgagaaacaggaaaaagaaggagtcatacagaactttaaacggacactgtccaagaaggagaaaaaagaaaagaaaaagagggaaaaggaggcgctcaggcaggctagcgacaaggatgacaggccatttcagggggaagatgtggagaactcccggctggcggcagaggtgtataaagacatgccagagacttcattcaccagaacaatttcaaatccggaggtcgtgatgaaacggcgtaggcagcagaagttagagaaacggatgcaggaattcagatcaagtgatggccggcctgatagtggcgggaccctacggatctacgcggatagcttgaaaccaaatatcccctacaaaaccatcctcctctctacaaccgaccctgctgactttgccgttgccgaagccctggagaagtatgggctggaaaaggagaacccgaaggactattgcatagccagggtgatgttgccccctggcgcccaacattccgatgagaaaggggctaaggagatcattctcgatgacgacgagtgccctttgcagatctttagggagtggccctcagataaaggaatcctggtgtttcaactaaagaggcgaccccccgatcatattcccaagaaaaccaagaagcatctagagggcaagaccccgaaagggaaggagagggctgacggatctggctatggttccacattgcctccagaaaaactgccctacctggtcgagctttctcctgggcgtaggaatcacttcgcctactataattaccacacttacgaagacggaagcgactcaagagataagcctaaattgtaccggctgcagctaagcgttaccgaggtgggcacagagaaactggatgacaactctattcagttgtttgggcccggtatccagccccaccattgtgatctgactaatatggatggcgtagtcaccgtgacaccgcggtcgatggacgcagaaacctatgtcgaggggcagcgtattagtgaaaccaccatgctgcagagcggcatgaaggtccagttcggagctagtcatgtgttcaagttcgtggaccccagtcaggaccacgctctggctaagcgcagcgtggatggaggcctgatggtgaagggaccaagacataaacccgggatcgttcaggagacaacgttcgatttgggcggcgacatccactccggcactgccttacccacatctaagtctaccacacgtctagactcagaccgggtatctagcgcttcatccaccgccgaacgtggcatggtgaagccaatgatccgtgtggaacagcagcctgactaccgtaggcaggagtcccggacacaggatgccagcggaccagagctcatattgcctgcttcgatcgaattccgtgagtccagtgaggacagctttctgagcgctatcattaattacacaaattcaagcaccgtgcatttcaagctgtcgccaacttatgtgctatacatggcatgcaggtacgtcctcagcaatcaatacagaccagacatctccccaacagaaagaacacacaaggtaatcgccgtggttaataaaatggtgtcaatgatggagggcgttatacaaaagcagaagaacattgcaggtgcgttggccttctggatggctaatgccagtgagctcctgaatttcatcaagcaagacagagacctctctagaattacattagacgcccaggacgtgctggctcatctggtgcagatggccttcaagtacctcgtgcactgtcttcagtctgagctgaataactatatgcccgccttcttggatgaccctgaggaaaacagcctgcagcggccgaaaattgacgacgtgttgcacacacttacgggcgctatgagcttgctcagaaggtgtcgcgtcaatgctgccctcaccattcagctgttttcacaacttttccatttcataaatatgtggctgtttaacagattggtgacggaccctgactccgggctgtgttcccattattggggggccattatcagacagcagctaggccatattgaggcctgggccgagaagcaaggtctggaactagccgcggactgccatttaagtagaatagttcaggccactactctgttgacgatggacaagtatgcccccgatgatattcctaacattaattcgacctgcttcaaattaaatagtctccagctccaggccttgttacaaaactaccattgcgccccagatgaaccctttatcccaacagacctaatcgagaatgtagttaccgtagctgagaataccgcggacgagctggcccggtcggatggtagggaggtgcagctggaggaagacccggacctgcagctgccgtttctgctgcccgaggacggatattcctgcgatgtggtgcgaaacatacctaatggcctgcaggagttcctggacccactgtgccagcggggcttctgtcggctaataccacatacaaggtcccctgggacctggacgatctatttcgagggggccgattacgagtcccatcttctgcgtgagaataccgagctggctcagcccctcaggaaggagccggagattattacggttaccttgaagaaacaaaatgggatggggctctccattgtggccgccaaaggcgcggggcaggacaaacttggcatttacgttaaaagtgtggtcaagggcggagcggctgacgtggatggaagattggctgctggtgatcagctgttaagcgtggatgggcggagtctggtggggttatcccaggagcgggccgccgaactgatgacaaggacatcctcggtggtcacacttgaagtggcaaaacagggggctatctatcatgggcttgccacactcctaaatcagccttctcccatgatgcagcgaatctccgatagaagggggtcgggcaagccgcgccccaaatcagaggggttcgagctttataacaactcaactcaaaatggttctcctgagagcccgcagctgccttgggccgaatatagtgaacctaagaaacttcccggggacgatcgtctgatgaagaacagggcggaccaccggtcgagtcctaacgtagcgaatcagcccccgagccccggaggtaaaagtgcatacgcttccggcaccaccgccaagattacgtccgtctctacggggaacctgtgcacagaagagcagacacctcccccccggccagaagcatatcctattccaacacagacttataccagagagtattttacattccctgcctcaaagtcgcaggaccggatggcaccgcctcagaaccagtggcccaattatgaagagaagccccatatgcacacagattctaaccactcctccatcgcgatccagagagtgactcggagccaggaggaactcagagaggataaggcctaccagctggagcggcacagaatagaggcggccatggataggaagtcagacagcgacatgtggattaatcaatcatcctcactggactcctcgacatcaagccaagaacacctgaatcactcaagcaagagcgtgacacccgcgtcaacactcaccaagagcgggcctggaagatggaaaactcccgcagccattcccgctacccccgtggcggtcagtcagccaatacggacagacctgccaccacctcctccgcctccaccagtgcactacgccggcgacttcgacggcatgtccatggacttacccttgccccctccaccatccgccaatcagattggcctgccatccgcccaggtggctgcagccgagcggagaaagagggaggaacaccagcggtggtacgaaaaagagaaagcacgcctggaagaagagcgcgagaggaaaaggcgcgagcaggagaggaaactgggtcagatgaggacccaatctctcaaccctgcacccttcagcccactgacagcccagcaaatgaaaccagaaaagccttcaactctgcaacgaccacaggagactgtgatccgcgaactccagcctcagcaacaaccacggacaatcgagcgtcgtgatctgcagtatataacagtaagtaaagaagaactctcttcaggagactcgctgtcacctgatccgtggaagagagatgccaaggagaaactggaaaagcagcagcagatgcacatagtcgatatgttgtcgaaggagatccaagagctgcagagcaaacccgatcgaagtgctgaagaaagcgaccggcttcgcaagctcatgctggagtggcaatttcagaaaaggctacaagagagcaaacaaaaagatgaggatgacgaagaggaggaagatgacgacgttgacactatgcttattatgcagcggctagaagccgaacggcgcgctcgcgacgaggagagacgacgacagcagcaactggaagaaatgcgaaaacgggaggccgaagatcgcgctcgacaggaagaagaaagaaggagacaggaagaagagcgtacgaaaagggacgccgaggaaaaggtgatggtcctgtag

SEQ ID NO: 125249 - DNA, 5232 bp, synthetic construct
  misc_feature 1..5232: note = Description of Artificial Sequence: Synthetic coding sequence
  source 1..5232: mol_type = other DNA
atgagcgccgggggccgggatgaggagcggaggaaattggccgatataattcaccattggaatgctaaccgcctggacctctttgagatctcccagccaactgaagatcttgagttccatggcgtaatgcggttctatttccaggataaggccgctggtaattttgctacaaagtgcatccgagtgagcagtactgctactactcaagacgttatcgagactttagccgaaaagttccgtcccgatatgcgcatgttgtcttccccaaagtactctctatacgaggtgcacgttagcggggagcgccggctggatatcgatgagaagcccctggtggtacagttgaattggaataaagacgacagggagggccgatttgtactgaagaacgaaaatgacgccatccctcctaaagcacagtctaacggccccgagaaacaggagaaagagggggtgatccagaattttaaaagaacattaagcaaaaaggagaagaaggaaaaaaagaaaagagagaaggaggcactacggcaagcctcagataaggatgatcgtccttttcagggtgaggatgtagagaacagtcgcctggccgctgaagtctacaaggatatgcccgaaacctcctttacacggacaattagcaaccccgaggtggtgatgaaacggcgcaggcagcagaagcttgagaaaaggatgcaggaattccgtagctcagacgggcgacccgacagcggaggtaccctccgaatttacgccgactctcttaagcccaacatcccttacaagaccatacttctatcaactaccgatcctgccgatttcgccgtcgccgaagcactggagaagtatggtttggaaaaagaaaatcccaaagattactgtatcgcacgtgttatgctaccccctggtgctcagcattcggacgagaagggtgccaaagaaattattctggacgatgacgaatgcccgctccagatcttcagggaatggccctccgacaagggtattttagtgttccagttaaagcgtaggccccccgatcacatcccgaagaagactaagaagcacctggagggcaagactccaaaggggaaggagcgggcagacggaagcggctacggttcaaccttacctcctgagaaactcccttatctcgtcgaattgagcccagacggaagcgactctcgggacaagccaaagctatacaggcttcagctgagtgtgacagaagttgggacagagaaactcgacgataattccatccaactgttcggtccaggaattcagccccatcactgcgatcttaccaatatggatggcgttgttacagtaactccaaggtcaatggacgccgagacctacgtagaagggcagaggatttccgaaacaaccatgttgcagtctggcatgaaggtgcagtttggggcctcccatgtgttcaagtttgttgatccctctcaggatcatgcactggccaagcgctctgtggatggtggtttgatggtgaaaggcccccggcacaagccaggcatagtgcaggaaactacctttgacctggggggcgacattcattcgggcaccgcgctacccacctccaaatctactacgagactcgactctgatcgcgtaagctctgcttcttcgacagcggaacggggcatggtcaaaccgatgattagggttgaacagcagcccgactaccgccgacaggagagtagaacccaggatgctagcggacccgaactcatcctccctgctagtattgaatttcgcgagagttccgaagacagcttcttatctgccattataaattacaccaactcatctactgttcactttaagctgagtcctacatacgtgctctacatggcttgccgatatgttctgtccaatcagtatcgtccagacatttcccctacagagagaacacataaggtgattgccgtagtcaacaaaatggtgagtatgatggagggtgttatacagaaacagaagaatattgcaggtgctctggccttctggatggccaacgcatcagagctcctaaacttcattaagcaggacagggacttaagtaggatcacactggacgcacaggatgtactggcacacctagtgcaaatggctttcaaatacctcgtgcactgtctccagagcgagctgaacaattacatgccggcctttttagacgatcccgaggaaaacagtctgcaaaggccaaagatcgatgatgtactgcacaccctgacgggcgcgatgtccctgctgaggagatgcagggtcaatgccgcgctgactattcagcttttctcacagttattccacttcattaacatgtggcttttcaaccggctggtcaccgaccctgattctggcttatgcagtcactattggggtgctatcataaggcagcaactgggccacattgaagcatgggccgagaagcagggattagaattggctgctgactgtcatctctccagaatcgttcaggctacgacactgctgaccatggataagtatgctcctgacgacattcccaacatcaactctacttgctttaaactcaattccttacaactacaggctctgctacagaattatcattgcgctcctgacgaacctttcattcctactgatttaatagagaacgttgtgacagtggccgaaaatactgcggatgaactcgcgcggagcgacggaagggaggtgcagttagaagaggaccccgatttgcagctacccttcctgctgcctgaggacggatattcatgtgatgtcgttagaaacattccaaatgggctccaggagtttcttgacccactgtgtcagagggggttctgcaggctgataccccataccaggagccccggaacatggacgatctatttcgagggcgccgattatgaaagtcatctgttacgtgaaaatactgaactggcaattcctctcaggaaagaaccagagattattaccgtaacactgaagaaacagaacggaatggggttgtctattgtggccgcgaagggagctggacaggataagctgggtatatatgtgaaatcagtggtgaaggggggggcggcagatgatgggcggcttgcagctggcgaccagctgcttagcgtcgacggcagatctttagtggggctttctcaggaacgcgctgcagaactgatgacccggacgtcctcagtagttaccctggaagtagcgaagcaaggggcaatttaccacggtctcgcaaccctgctaaaccaaccctcacccatgatgcagagaatcagtgatagacgtggcagtggaaaaccccgccccaagtctgaaggctttgagctgtataacaacagcacccagaatggctctccagagagtccacagctgccctgggcggaatacagtgaaccgaagaaattgcccggagacgaccgacttatgaagaacagggcagaccacaggtccagccctaatgttgcaaaccaaccgccttctcctggcgggaagagtgcatatgcatccggtactacggccaaaataacaagcgtttcaacgggcaacctgtgcacagaggaacaaacccccccacctcgaccagaggcctatcctatcccaacccagacttatacaagggaatacttcacttttcccgccagtaagagtcaagatcggatggcaccgccccagaatcagtggcctaactatgaggagaagccccatatgcatacggatagcaatcactctagcatcgccatccagagagtcaccaggtcccaggaggaattaagggaggacaaagcttaccagctggagagacacaggatcgaggccgctatggacagaaagtcggatagcgacatgtggatcaatcagagtagtagcctagactcatccacctcctcacaagaacacttgaaccattcttctaaatccgtgaccccggcctctaccctgactaaatctggccccggacggtggaagactcccgccgccatcccggctacacccgtcgctgtatctcagcccattcgcacggacttacctcctccaccccccccccctcctgtgcattacgccggagactttgatgggatgagcatggacctccccctaccccctccaccatcagccaatcagattgggttgccatctgctcaagttgcagcggctgagcggaggaagcgagaagaacatcaaaggtggtatgaaaaagagaaagctaggctggaggaggagagggagcggaagcggagagagcaagaacgcaaactgggccagatgcggacccagagccttaatcctgcgccttttagccctctgaccgcacagcagatgaaaccagagaaaccatccactttgcagcggccacaggagaccgtcatccgcgagctgcaaccccaacaacaaccacgaacaatcgagagacgcgacctccaatatataactgtctctaaggaagaactgtcctctggcgacagcctgtcccctgatccgtggaagagagacgccaaggagaaacttgagaagcagcagcagatgcatatcgttgatatgttatcaaaagaaattcaggagctgcagagtaagcctgatcgatctgccgaggagtccgaccgactgcgcaaactcatgcttgaatggcagttccagaagagactccaagaaagtaagcagaaggatgaagatgacgaagaggaagaagacgacgatgtggatacaatgctgattatgcaacgactggaagccgaacgcagggcacgactgcaggatgaagaaaggcggcggcagcaacaactggaagaaatgcgcaagcgcgaggctgaggacagggctcgccaagaggaggagaggcgtagacaggaagaagagagaaccaaaagggacgcggaggagaaacggcgtcaggaggaggggtactatagtcgtctggaggccgaacggaggagacagcatgacgaggccgcacgccgcttgttagagccagaagccccaggccctaactcctaccctggaagcaccggagccgccgttggtgctcacgatgcatgccgggacgcaaaagagaagcggtccaagtcccaggatgctgattctccgggctcctcaggagcccctgagaacctcaccttcaaagaaagacagaggttgttctctcagggacaggatgtcagtaataaggtgaaggctagtaggaagttaaccgagttagaaaacgagctgaatactaaatag

SEQ ID NO: 125250 - DNA, 5475 bp, synthetic construct
  misc_feature 1..5475: note = Description of Artificial Sequence: Synthetic coding sequence
  source 1..5475: mol_type = other DNA
atgtccgcaggcggcagagacgaggaacggagaaagctggctgacatcatacaccattggaatgcgaataggctggatttattcgagatcagtcagcccacagaagatcttgaattccatggcgtcatgagattttactttcaagacaaggccgctgggaacttcgctaccaagtgcatccgtgtttctagcaccgctaccacacaagatgtcatcgagacactggctgagaagttcagaccagatatgagaatgctgtcctcccccaaatacagtctgtacgaagtgcacgtcagcggagagagaagactcgatattgacgaaaagccattggttgtgcagttgaactggaataaagatgaccgggaggggcgcttcgtgctcaagaacgaaaacgacgcaatacctcctaaaaaggctcagtccaacggccccgaaaagcaagaaaaggaaggcgtgatccagaattttaagcggacattgtccaaaaaggaaaaaaaagagaagaaaaagagggaaaaggaggctctgaggcaggctagtgacaaagacgataggccctttcaaggcgaggacgtcgaaaacagtcgcttggcagctgaggtgtataaagatatgcccgagacctcattcactcgcaccatcagtaacccagaggtcgtgatgaaacgccgtcgtcagcaaaagctagagaagcgcatgcaggaatttcgttcctcggatggcaggcctgactccggaggaacactgaggatttacgccgactccctaaagcccaacattccctataaaactatcctgctgagcaccactgatccggccgattttgcggtcgctgaagctctggaaaaatatggtctcgagaaggaaaaccccaaggactactgcatcgctcgagtgatgctgccacctggggcccagcactctgatgaaaagggcgccaaggaaataattttagatgatgacgagtgtcccttacaaatatttagggagtggccatccgacaaaggcattctagttttccaactcaaaaggcgacctccggaccacatcccaaagaaaacaaaaaagcacctggaagggaagacacctaaaggaaaggaaagagccgatggctctggctatggcagcacactgccccccgaaaagttgccatacctcgtggagctgtcaccgggtaggagaaaccatttcgcatactataactaccacacatacgaggacgggagcgattcgagagataaacctaaactgtataggctccagctaagtgttacagaagtcggtaccgagaagcttgacgataattctatacagctttttggacccggcatccaacctcaccactgcgatttaacgaatatggacggcgtagtcaccgttacccctcgctctatggatgccgagacatacgtcgagggccagaggatctcagagacaacaatgctccagagcgggatgaaggtccagttcggagcaagtcatgtttttaaattcgttgacccttcacaggaccatgctttggcgaagaggtccgtggatggcgggttgatggtgaaaggtcccagacacaaacctggtattgtacaggaaactactttcgacttaggaggcgatattcatagcggtactgcactgcccacttccaaaagcacaaccagattagatagcgaccgggtgtcatccgcatcgtcaaccgctgaaagggggatggtgaagccgatgatcagagtcgagcagcaaccagattacaggcgacaggagtctaggacgcaggatgccagtgggcctgagctaatccttccagcctccatcgagttccgagaatcctctgaggacagcttcttgtctgccatcatcaactatacaaattcctccactgttcacttcaagttgagtccgacctatgtcctgtatatggcttgcaggtatgtgctgagtaatcagtatcggccggatatctctccaactgaacggacacataaagttattgcggtggttaataaaatggtgtctatgatggagggggtaatccaaaagcaaaagaatatcgctggtgcactggctttttggatggccaacgcctccgagctactcaatttcattaaacaggatagggatctgagccgcatcacactcgatgctcaggatgtactggcccatctcgttcagatggctttcaagtaccttgtgcattgcttacaatccgaacttaacaattacatgccggccttcctcgacgacccggaggaaaatagtctccaaaggcctaagattgacgacgtactgcacacacttacaggcgccatgtcacttctaagaaggtgtagagtcaacgctgcgctgacgatccagctattttcccagttgttccatttcataaacatgtggttatttaacagactggtgacagaccccgatagcgggctgtgcagtcactactggggtgcaattattagacagcagctgggacacatagaggcctgggctgaaaaacaaggcctcgagcttgccgcagactgtcacttaagccgaattgtacaagccacaacactgcttacaatggataaatatgcccctgacgatatccctaatataaacagcacctgcttcaaacttaattctcttcaactccaagcactgctccaaaattatcattgtgccccagacgagcccttcattcccacagatttaattgaaaacgtggtgaccgttgcagaaaacactgccgatgagttagcacgaagtgatggacgggaagtgcagcttgaggaagatcctgatttacagctcccttttctgctgccagaggatggatattcatgcgacgtggtgcgcaatattcctaacggattgcaagaatttcttgatccactatgccagagaggattctgtcgactgatcccacacaccaggtcacctggaacctggaccatttacttcgagggcgccgactatgagtcacatctcttacgtgaaaatactgaactcgcccaacccctgcggaaagagcccgagattatcactgtgactctgaaaaagcagaatggtatgggattgagcatcgttgctgccaagggcgccggacaggacaaactgggtatctacgtgaaatccgtagttaaggggggagccgcagacgttgacggaaggctcgccgcaggcgatcagctgctatctgtggatggcaggagcctggtcggcctgtcacaggagcgcgccgcggagctaatgactagaacatcttccgtcgttactctcgaagtggcaaagcagggcgccatctaccatggtctcgccacattgctgaatcagcctagcccgatgatgcaaagaattagcgataggagaggctctggaaagccaagaccgaaatcagaggggttcgagctttacaacaacagtacccaaaatggttcacccgagtcccctcagctcccatgggcggagtactcggaaccaaagaagcttcctggcgacgaccgtttgatgaaaaacagggccgatcacaggagtagccccaatgttgccaaccagccacccagccccgggggaaaatccgcctacgcaagcggtacaacagcaaaaatcacctccgtgtctaccgggaacctctgtacagaggagcagactccacctccacgtccagaggcatatcccatacccactcagacttacactagggagtactttacgtttcctgcgagtaagagccaggacaggatggcccctccgcagaatcagtggccgaactacgaggagaaacctcacatgcataccgattcaaaccactcctctatcgctatccagcgggttaccaggtctcaggaggagctgcgcgaggataaggcctatcagctggaacgtcaccgcatcgaagcagccatggaccgcaaatcggacagcgacatgtggatcaatcagtcctcgtcccttgattcttctacaagttctcaggagcacctgaaccactctagcaaaagtgtgacccctgcttcaactctgacaaaaagtggccctggccggtggaagacccccgctgctattcccgccactcccgttgctgtgtcccagcccatcagaactgatctcccaccccctccgccaccaccacctgtccactatgccggtgatttcgacggcatgtctatggatcttcctctgcctcctccaccctccgctaaccaaatcggactgccctctgctcaggttgcggcagctgaaagaagaaagagagaagaacaccagcgatggtacgagaaagaaaaggctaggttagaggaagagcgggagcgtaagaggcgagaacaggagcggaaactggggcagatgcggacccagagcttaaatccagctcctttctcaccgctgaccgcacaacagatgaagccggaaaaaccttctacgcttcagagaccccaggaaacagtgatccgggaactgcagccccagcaacagcctagaacaatagaaaggcgggacctgcagtacattactgtctccaaggaggaactgtcttccggtgattctttgtctcctgatccttggaagagagacgcaaaagagaaattggagaaacaacagcagatgcacatcgtggacatgttgagtaaagagatccaggagttgcaatcaaagccagaccgcagtgctgaggaaagtgacagactgcgcaaactcatgctggaatggcagtttcagaagcgcctccaggagtcgaagcagaaagacgaggacgatgaggaagaggaagacgacgacgtggacaccatgttgattatgcagagattggaagctgaacgcagagctagactgcaagacgaagagaggaggaggcagcagcaactcgaagagatgcgaaaaagagaagcagaagaccgcgcgagacaggaagaggagaggaggcgacaagaggaagaacggacaaaacgcgatgccgaagaaaagagacgccaagaagaaggctattattctaggctcgaggcagagcggcggaggcagcacgacgaagccgcgcggaggctgcttgagcccgaggcacccggcctttgtcgacctccgctgcccagggattacgaacccccctcgccttctcctgctccaggcgcgcctcctcctccaccgcagagaaacgcctcttacctgaaaacacaggtattatcacctgacagcttgtttacggccaagtttgtggcgtataacgaggaagaagaagaagaggattgctccctggccggaccaaactcctatcctgggtccacaggcgctgctgtaggggcccatgatgcctgccgagatgctaaagagaaaaggagtaaatcgcaggacgccgattccccaggatcgtcgggcgcacctgaaaatcttacgttcaaggagaggcagcggctcttttcacagggccaggatgtctccaataaagtgaaggccagccgcaaacttaccgagctcgaaaatgaattgaatactaagtag

SEQ ID NO: 125251 - DNA, 3282 bp, synthetic construct
  misc_feature 1..3282: note = Description of Artificial Sequence: Synthetic coding sequence
  source 1..3282: mol_type = other DNA
atgaaagagatggtgggcggctgctgtgtttgcagtgatgagcgcggctgggcggaaaatccccttgtgtactgtgacgggcatgcctgttccgtggtggtgcatcaggcatgctacggtatcgtacaagtccctaccgggccctggttctgccgaaagtgcgaatctcaggagcgcgccgctcgtgtccgttgcgaactgtgcccgcacaaagacggagcattgaaacgtacagacaacggagggtgggcacacgtggtgtgcgcgttgtacatccctgaggtacagttcgcaaatgtccttaccatggagcccatagtgctccaatatgtccctcatgaccggtttaataaaacgtgctatatctgtgaagaacagggccgcgagagcaaagccgcctcaggtgcttgtatgacttgcaaccggcatggatgtagacaagcgtttcacgtgacatgtgctcagatggcgggtctgctttgcgaagaagaggtcctggaagtagacaacgttaagtactgtggctactgtaagtatcatttttccaaaatgaagacttctcgtcatagttccgggggtggcggcggcggtgcaggtggaggtggtgggagtatgggaggcggtggcagcggatttatctcaggtaggcgcagccggtcagccagcccctcgacacagcaggagaaacatccaacacatcacgaacgcggacagaagaaaagccgtaaggacaaggagagactcaagcagaagcacaagaaaagaccagaatccccacctagtatactgactccgccggtcgtgcctaccgcagacaaagtgagcagctctgcctcctcgtcctcccatcatgaagctagtacacaggaaactagtgagagctcccgcgaaagcaaggggaagaagtcatccagccactcgctgtctcataagggcaaaaagttaagttccgggaagggagtgagctcgtttacctccgcgtcgagcagttccagctctagctcaagttcctcagggggccctttccagccagccgtgagttcccttcagtcctctcctgatttttctgccttcccaaaactggagcagcctgaggaagacaaatactcgaagcccaccgcccctgccccctctgccccaccatccccatccgcgcccgagcctcctaaagccgacctgtttgaacagaaagtggtgttttctggatttggaccaattatgaggttctctacgacgacttctagcagcgggagagctagggctccttctcctggcgattacaagtcgcctcatgtgacgggttccggggcgagtgccggcactcataaacgaatgccagcgttgtcagctacgcccgtgcctgcagacgaaaccccggaaaccggcttaaaggagaagaagcacaaggcaagcaaaaggagtcggcatggcccaggtcgtcctaaaggatcgaggaacaaagaagggactggcggcccggccgccccatctctgcccagcgctcaactggctggattcaccgccaccgcggcgtcaccctttagcgggggaagccttgtgtcatccggactgggcggcctcagtagtcggaccttcgggccatcaggtagtcttccatctctgtccctggagagcccattactgggtgccggtatttacacctctaacaaagatcctattagccactctggaggcatgctgagggccgtatgcagcaccccactgtcctcatctctcctcggaccccctggcactagcgcactgccccggctgagcaggagcccctttacatctactctcccatctagtagtgccagtattagtactacccaggtgttcagcttagcaggctctaccttctcgttacccagcacccacatttttggcactcctatgggcgcagtcaacccgttgctgtcacaggctgaatcctctcataccgagccagacctggaagactgctcatttcggtgtagaggaacttcgccacaggagagcctgagttcaatgtcccccattagctctcttcccgccctctttgaccagacagctagtgccccctgcgggggagggcagcttgaccctgccgcccctgggacaaccaacatggaacagctgctcgaaaaacagggggacggggaggcaggggtcaatatcgtggaaatgctcaaggcactgcacgctcttcagaaggaaaatcagcgccttcaggagcaaattttgagcctgactgcgaagaaggaacgactgcagatcctgaatgtgcagctgtcagtacccttcccagcactccccgccgctctccctgcagcaaacggacctgttccaggaccttacgggttgccacctcaggccggttccagtgattctctgagcacaagcaagtctcctcctggtaaaagttctctgggactcgacaactccttaagcacttccagcgaggacccccattccgggtgtcctagccgcagctccagcagcttaagtttccactccacacccccaccgctgccgctcttgcagcaatctcccgcgacattacccctcgctcttccgggcgctccagcccccctgcctcctcaaccacagaacggactaggtcgcgcacccggtgcggccggacttggagccatgccaatggctgaaggcctgctcggcggcctagccgggagcgggggactgcctttaaacggtctgctgggtggcttaaatggcgctgccgccccaaaccccgctagcctgtcccaggccggcggtgccccgacactgcagctccccggttgcctcaacagcctcactgaacagcagcgtcatctgctgcagcaacaggaacaacagctgcagcagctgcagcaactcctggctagcccgcagctgacaccagagcaccagaccgtcgtgtatcagatgattcaacagatccagcagaaaagagaattgcagcggctgcagatggcaggtggtagccaactgcctatggcatctctgctggccggcagtagcactcctttgctgagcgcgggcacccctggcctgctcccgaccgcgtccgctccaccactgttgcccgccggcgcattagtcgcaccctctctcggcaataataccagccttatggccgctgccgctgccgccgcagcagtggcagccgcaggtggacctcccgttctgaccgcacagactaacccgttcctttctctatcgggcgccgagggatctggcggaggcccaaaggggggaaccgcagataaaggagcatctgcaaaccaggagaagggttag

SEQ ID NO: 125252 - DNA, 978 bp, synthetic construct
  misc_feature 1..978: note = Description of Artificial Sequence: Synthetic coding sequence
  source 1..978: mol_type = other DNA
atgaaagagatggtcggcggatgctgtgtgtgttccgacgagaggggctgggccgaaaatccactcgtgtactgcgatggccatgcttgttccgtggttgtgcaccaagcttgctatggaatcgtacaggtgccgactggcccgtggttttgtcgcaagtgcgagtctcaggagcgggccgcacgcgtacgatgtgaactgtgcccgcataaggacggagcactgaagcggacggataatggaggatgggctcacgtagtgtgtgccctgtacatccccgaggttcagtttgctaatgtgctgaccatggaaccaattgtgctgcaatatgtgccccacgacaggttcaacaaaacctgttacatttgcgaagagcagggccgagaaagtaaggcggcatctggcgcctgcatgacctgcaatcgacacgggtgtcgacaggcattccatgtcacttgcgcacagatggccgggctgctgtgcgaggaggaggttctcgaagtagacaatgttaagtactgtggatactgtaagtaccatttttccaaaatgaaaacgtcccgccactcttcaggaggtggggggggaggcgccgggggcggtggggggagcatgggagggggtggctctggcttcattagcggaagacgctctagatccgcaagcccctccactcagcaggagaaacacccaacacaccacgaacgcggccagaaaaagtcacgcaaggataaagagagacttaaacaaaagcacaaaaaacggcccgagtctccaccctccattctcactccacccgtagttccaactgcagacaaaccacgacgtggccaccaaagccctactaaccacggaattggttccctggggtgctgcttgcctgatacacccatttgcctttgtcccgaggggttatccccaggactcctgtctgcagaaagcggaggccggcattctggactcctttcaaaattctag

SEQ ID NO: 125253 - DNA, 16614 bp, synthetic construct
  misc_feature 1..16614: note = Description of Artificial Sequence: Synthetic coding sequence
  source 1..16614: mol_type = other DNA
atggacagtcagaaattggctggagaggataaagacagcgagcccgccgccgatggccctgccgctagcgaagatcccagcgctaccgagtctgatctccctaatccccatgtaggcgaagtgagcgtgctgtcttcagggagccctaggctccaggagaccccccaggattgttccgggggccctgttcggcgatgtgcattgtgtaactgcggcgagccgtctttgcatgggcagcgggagctgcggagattcgagttgccgttcgattggccaagatgccctgttgtcagccctggcgggtcgcccgggccaaatgaggccgtactaccttctgaggatcttagccagatcggcttccccgagggcctcacccctgctcacctgggcgaacctggaggctcatgttgggcccaccactggtgcgctgcttggagcgcaggagtgtggggacaggaagggcccgaactttgtggtgtggacaaagctatattctccggtatcagccagagatgcagtcactgcactcggctcggggcctccattccctgccgctcccctggctgtcccaggctttaccatttcccatgtgccaccgcatctggaagctttctctctatgaagacgttacagttgctctgtcccgagcactccgaaggggcagcctatttagaggaggcgcgatgtgccgtatgtgagggccctggggaactctgtgaccttttcttttgtaccagctgtgggcaccattatcatggtgcatgtttggacacggcgctcacggcacggaaacgagctgggtggcagtgtccagagtgtaaggtttgtcaggcgtgtagaaaacccggcaacgactccaagatgctggtgtgtgagacttgtgacaagggttaccatactttttgtctgaaaccacccatggaggaattgccagcacactcctggaagtgcaaagcttgcagagtgtgcagagcgtgcggcgcaggctccgcagaattgaatccaaacagcgaatggtttgagaattattctctctgccaccgctgtcacaaagctcagggagggcagactatacggtctgtggcagaacaacacacaccagtgtgtagcaggttttcgcctccagagccaggtgacacccccacagatgagccggacgccctttacgtggcatgtcagggccagcccaagggagggcacgtgacgtccatgcagcccaaggaacctgggcccttgcagtgtgaggctaaacctcttggcaaggcaggcgttcagttggagccacagctggaagccccgctgaacgaagagatgcccctcctaccgccaccagaggaatctcctttgtctccgcccccggaggaaagtcccacatccccaccgcccgaggcctccagactctccccaccccccgaagaacttcccgcgtcacctcttcctgaagcgctccatctgtctaggcccctagaagaatctcccctgtctcctccgccagaggaatcaccactcagcccaccacccgagagttcaccttttagccccttggaggagagtccacttagtcccccggaagaaagccctccctcccctgccctcgagaccccgctgagccctcctcccgaagcttctcccctctcacccccttttgaggaatctccactgagtccccctcccgaggaactgcctacgtccccccctcctgaggcgtctcggctgtcgccccctccggaggagtctcctatgagtccgccccctgaggagagtcccatgtcaccaccccctgaggcatcacgacttttcccccctttcgaggagagccctttatcacctcctcctgaggagtccccactcagccccccacctgaggcctcaaggcttagcccccccccggaggacagcccaatgagccccccacccgaagagtcacctatgtctccaccccctgaggttagccgcctgagcccactgcccgttgtcagtcggttgtcccccccacctgaagagagcccgttgtcaccacccccagaagaaagtccaacgtccccacctccagaggcctccagattatcgccaccgccagaggactctcccactagccctcccccagaagattctccggcctcgccaccacccgaagacagcctcatgagcctgcccttagaagaatcacctctgctcccactgcccgaagagccccagctgtgtcctaggtcagaaggcccccatttatctcccaggcccgaggaaccacatctttccccacgccccgaagaaccccaccttagccctcaggccgaggagccccatctgtctcctcagcctgaggagccgtgcctgtgtgcagtcccagaagagccccatttgtctcctcaagcggagggaccccacttgtccccccaacctgaggagctccacctctcaccacagactgaagagccccacctctctcccgtccccgaggaaccttgcctcagtcctcagccagaagaaagccatttatccccccagtccgaagaaccatgtctgtcacctcgccctgaggagagtcacctgagccctgagctggagaaacctccgcttagtccacgccccgagaagcctcctgaagaacctggacagtgtcctgcaccggaggagctgcctctattccctccaccgggggagccttctctcagcccattgctaggcgaacccgccctttccgaacccggcgagccccctctatctcctctgccagaagagcttcctctgagtccctcaggagagccttccctatctccccaactcatgccgccagatccactccctccccccctgtcccccatcatcactgctgcagccccaccagctttaagccccctgggcgaactcgaatatcctttcggcgccaaaggagatagcgaccccgaatctccattagctgcaccaatcttggaaacccccatcagccccccgcctgaagctaattgtacagacccagagcctgtgcccccaatgatcctcccaccttcccctggatctcctgtcgggccggcgagtccgatcttgatggaacccctgcctccccagtgctcccctctcttgcagcacagtctggtgccacagaatagtccccctagccaatgttcaccccccgcgcttccgctgtccgtcccttccccactgagtccaatcgggaaggtagttggggtgtctgacgaagctgagctgcacgaaatggagacagagaaggtttcagaacccgagtgcccagccctggagcccagtgcgacatctccactaccatctccaatgggtgacctgtcctgccccgctccctcccccgcccccgctctcgatgacttcagcgggctgggcgaggacacggcacccttggacgggatagatgcccctggttcgcagcctgaaccgggacaaacaccagggagcctcgcatctgaactcaaaggctctcctgttttgcttgaccctgaggagctcgcccccgtgacacctatggaggtttatccagagtgcaaacaaacagcaggtcaggggagtccctgtgaagagcaggaggagccacgcgctcccgtggcaccaacgcctccaaccttgattaaatctgatattgtaaacgaaatcagcaacttatcgcagggggatgctagcgctagttttcctggtagcgaaccactgctgggcagtccagacccagaggggggaggctccctgtctatggaacttggggtatcaactgacgtttctccagcacgggatgaagggagccttcggttatgcactgattctctcccagagaccgatgattccctgctgtgcgatgccggaaccgctatttccggcggaaaagccgagggggagaaggggcgccgcaggtcaagtccagcaaggtcccggatcaaacagggaagatcctcctcctttccgggcagaagacgaccccgcggcggggctcacggagggcgaggacggggacgtgccaggcttaagagtacagcatcctccattgagaccctcgttgtggccgacattgatagcagcccctctaaagaggaggaagaagaagatgacgataccatgcagaatacagtagtcctcttttcaaacaccgataaattcgtgttaatgcaggacatgtgtgtagtgtgcggaagcttcggacggggcgctgaggggcaccttctggcatgctcccagtgctcgcagtgttatcacccttattgtgtcaacagtaagatcacgaaggttatgctgctgaaaggatggaggtgcgtggagtgcattgtctgcgaggtttgtggtcaggcctccgatcctagcaggctgctcctctgtgatgactgtgacatttcgtaccatacgtattgtcttgacccccccctgttgactgttcccaagggggggtggaaatgtaaatggtgcgtttcttgcatgcagtgtggggccgcgtcaccaggcttccactgtgagtggcaaaactcttacacacactgtgggccatgcgctagtctggttacatgcccgatctgtcatgcaccctacgttgaggaagaccttctcattcagtgccgccattgtgaaaggtggatgcacgccgggtgcgagagtttgttcacagaagatgacgtggaacaggcagccgatgagggcttcgactgtgtgagttgtcagccctacgtcgtgaagccagtcgcccccgttgcccccccagaactggtcccaatgaaggtcaaagagcccgagccgcagtacttcagattcgagggcgtctggcttactgaaacaggaatggcgctgctccgtaacttgacaatgtcacccctgcacaaacgccgacagcggaggggacggctggggttgcccggtgaggcaggactggaaggatctgagcccagcgatgccctgggacctgacgataagaaagatggcgacctagatactgacgagctgctcaagggcgagggcggtgtcgagcacatggagtgcgagatcaaactggaaggcccagtgtcacccgatgtcgaacccggaaaggaggagacagaagaaagcaagaagagaaaaaggaaaccctacaggccagggatagggggatttatggtgcggcagcgaaagtcacatactcgcacgaaaaagggccccgctgcccaggctgaagttttgtctggagatggtcagccagacgaagtaatcccggcagatctgcctgctgagggagccgtcgaacagtcattggcagaaggcgatgagaaaaagaaacagcaaaggcggggccgaaagaagagtaaacttgaagacatgttcccagcatatctgcaggaggcgttctttggaaaagaactgcttgacctgtcccggaaggcgctctttgcggttggggtgggcagaccatcatttggcctgggaacccctaaagctaagggcgatggcggaagcgaacgcaaggaattgcccacgtcacagaagggagatgacggtcccgacattgccgatgaggagtcgagaggcctggagggcaaggccgacacgccagggccggaggacgggggagtgaaggctagtcccgtgccctctgacccagaaaagccagggacgcctggtgaaggtatgctctcttccgatttagaccggatctctaccgaggagctgccgaagatggaaagcaaagatctgcagcagctcttcaaagatgtgctgggttcagaacgggagcaacatctcggatgcggcactcccggcctcgaagggtcccgaaccccactgcaacggccttttctgcagggcggtctgcctttagggaacttgccctcctctagcccaatggattcataccctggtctttgccaaagtcctttcttggattcgagagaaagagggggctttttttctccagagcccggggaacccgattcaccttggaccggcagtggcggcaccacacccagcacccccacaacgcctactacagagggagagggtgatgggctatcttataatcaacgatcactgcagagatgggaaaaggacgaggagctgggccaactctcaacgatttcacctgtgctctatgccaacataaattttcccaatctgaaacaagactatccagactggtctagccggtgcaagcagataatgaaactctggaggaaggtcccggcagctgacaaagccccctacctacagaaagctaaagacaatcgcgctgcccataggataaataaagttcagaaacaggctgagtctcagatcaataagcagacaaaagtgggcgacatagccaggaaaaccgatcgtccagccctgcacctgcgtatcccaccacagccaggggccctaggttccccaccacctgccgctgctcctactatttttattgggagccctaccaccccagcaggcctctccaccagcgcggatggattcttgaagccgcccgctggtagcgttcctggcccagattctccaggggagctttttttgaaactgcctccgcaggtcccagctcaggtgccttcgcaggatccttttggcttggccccagcttaccccctagagccccggtttccaacggctccccccacataccccccttacccttctccaaccggggctccagctcaacccccaatgctgggggcaagctcccgcccgggagcgggccagcctggagaattccacaccactccaccagggactcccagacatcagccgagtaccccggatccttttctcaagccgcggtgcccttctctagataacctggcagttcccgaatcaccgggagtcggaggtggaaaagcctcagagcccctgttgtcccccccgccttttggtgagtcccgaaaggccttggaggtgaagaaagaggagctgggtgcctctagccctagttacggacccccgaatctcggctttgtcgacagcccctcaagcgggacacatctcgggggcctcgaactcaaaacccctgacgtcttcaaggccccactgactccccgggcctcacaggtggaaccacaaagcccaggcctgggtctgagaccgcaagagcccccccccgcccaagcccttgccccatcccctccatcccaccccgacatcttccggccagggtcctatacagacccttatgcccagcctcccctgacgcctagaccccaaccgccgccaccggaatcctgctgcgctctcccaccgagatcgttaccctctgacccctttagcagagttccagcatcacctcaaagccagtcttcctcccagagtcccctaaccccgagaccactcagtgcagaggccttctgcccctcacctgtaacaccacgctttcagtcgccagatccatattccagaccgcctagcagacctcaaagccgcgatcccttcgcacctcttcataaaccccccagaccacagcctcccgaggtcgcattcaaagccgggtcactggcccatacttctctcggagccgggggcttccccgcagcactgccagccgggcccgctggagagcttcacgcaaaggtccctagcgggcagccacctaactttgtccgcagcccaggaacaggtgcgttcgtggggacccccagcccgatgaggtttaccttcccccaagccgttggcgaacccagcttaaagcctccagttccccaacctggcctgccgccccctcacggcataaactctcatttcggccccggccctacattagggaagccgcagtccacaaattataccgtagctacaggcaactttcacccatccggcagccccctggggcccagctccggctcaacaggtgagtcctatggactgagcccgctgagaccaccaagtgtgttgcctccaccggcccccgacggctctctcccctacctgtctcacggggccagtcaaagatccggcattacttcgccagtggagaagagagaggaccctgggactggcatgggatccagcctggcgaccgccgaacttccaggtacacaggacccgggcatgagtggactcagtcaaacagagctggagaaacagcgacagcgccagcggctgagggagttgctcatccgccagcagattcagcgcaatacccttagacaggagaaggagaccgccgccgcagccgccggcgcagtcggacctccagggtcctggggggcggagccttcctcaccagcattcgaacaactgtcccggggccagaccccttttgcagggactcaggacaaatcttcgttagtggggctgcccccctcaaaactgtccggtcctattttgggccccggatcttttccgtccgatgaccggctgagccgccctccccctcctgcaacacccagctcaatggacgtgaattcgcgccagctcgtgggcggctcacaggccttctaccagagggctccctatcccggaagtctacctcttcaacagcagcaacaacagctttggcagcaacaacaggctaccgcagcaacctctatgcggttcgccatgtccgctagatttccgagtaccccagggcctgagctgggcaggcaggctcttggcagtcctctggccggcatttccaccagattgccaggcccgggcgaaccagtcccaggaccagcagggcccgcacagtttatcgagctcagacataatgttcagaagggactgggtcccgggggcactccatttccagggcaggggccgccccagagaccacgcttctatccagtctctgaggaccctcacagacttgctccagaggggcttaggggcctcgcagtttctggcttgcctccgcagaagccatccgcaccacctgccccagagctaaacaattctcttcatccgacacctcacacaaaggggcccaccctcccaaccggccttgaattagtgaataggcccccctcctcaacggagctagggaggcctaaccccctggcattagaggccggaaagctgccttgcgaagatcctgaattagacgacgatttcgatgcccataaggcactggaggatgacgaagaactcgcccacctgggtctgggggtggacgtggccaaaggcgacgacgagttgggcacactcgagaacctggaaaccaatgaccctcatctggacgatttactgaacggagatgagttcgacctgctggcctacactgacccagagttggacactggcgataagaaggacatatttaatgagcacctgcggctcgtggagtcggcgaacgagaaagctgaaagggaggcactgttacgcggtgtggagcctggtcctctgggaccggaggaaagacccccacccgccgcagacgcgagcgaaccccgattggcgtccgtcctcccagaggtgaagcctaaagttgaggagggaggtcgccaccctagtccgtgccagttcactattgcgactcctaaggtggaaccagcacccgcagcgaacagcctcggtctcggcctcaagccaggacaatctatgatgggttctcgggatacaaggatgggtaccggcccattctcatcctccggccacaccgccgaaaaagctagtttcggcgccacagggggacccccggcgcatctcctcactccctctcctctcagcgggcctggagggtcatcgctgcttgaaaagttcgaactagaatccggggcgctgacactgccaggaggcccagcagcctccggagacgaactcgataaaatggaaagcagtctggtggcgtccgagttgccactgttaatcgaagacctcttagagcatgagaagaaagagctgcagaagaaacaacaactgtcagcacagctgcagccagctcaacagcagcagcagcaacaacagcagcatagtttgctgtcagccccaggccccgcgcaggccatgagcctccctcatgaaggctctagcccatcattagcaggctctcagcagcagttgtccctggggctcgcgggcgctcggcagcccggcctgccccagcccctaatgcccacccagccacctgcccatgctctgcagcagcggctggcacctagtatggcaatggtctcaaatcagggccacatgctgtcaggacaacacggaggacaggccggcctggttccccaacagtcatcacaaccggtcctctcccagaaaccaatggggacaatgccaccgagtatgtgtatgaagcctcaacagctggccatgcagcaacagctggctaattccttcttccccgataccgatcttgataaatttgcagctgaagacatcatcgacccaatcgcaaaggcaaagatggtcgcattaaagggaatcaagaaggtgatggcccagggcagcatcggggtggcccccggcatgaatcggcagcaggtgtcgttactggctcaacggttgagtgggggcccctcttctgatttacagaaccacgttgcagccgggtccggacaggagaggagcgctggcgacccaagccaaccgaggcccaatccgcccacatttgcgcagggggtgattaacgaggctgaccagcgccagtatgaggagtggttgttccacacccagcaacttctgcagatgcaactgaaagttctggaagagcaaatcggagtccatcgcaagtctcggaaagccctgtgtgccaaacagcggaccgccaaaaaggctggaagagagttccctgaagctgacgcggagaaactgaagcttgtcactgagcaacagagcaaaatccagaagcaactagaccaggtgcgcaaacagcaaaaggagcacaccaatcttatggccgaataccggaacaaacaacagcagcagcaacagcagcagcagcagcagcagcagcagcactctgcggtactggcccttagcccctcacaatccccgcggcttttgaccaagctaccaggccagttgctacccggccacggtcttcagcctccacagggtccacctgggggccaggcggggggccttcggctcactccaggcggtatggctcttccggggcagcccggtggaccgtttctcaacaccgccctggcccaacagcagcagcagcagcattccgggggtgccggctctttggcaggtccaagcggaggtttctttcccggcaatctggcccttagatcgcttgggcccgatagccggctgcttcaggaacgacagctccagctccaacagcagagaatgcagctggctcagaaactccagcaacaacagcagcagcagcaacagcagcagcatctcctgggccaggtggctattcagcagcagcaacaacagggaccgggggtgcagacaaaccaagctctcggtcccaaacctcaggggctgatgcccccctcttcccaccagggactgctcgtccagcagctgtccccccaacccccgcagggcccgcagggcatgctgggaccagcccaggtcgcagtcctgcagcaacagcatcctggggcactagggcctcagggacctcatagacaggtgctgatgacccagtctcgtgtgctttcaagtccccagctcgcacaacaggggcaagggttaatggggcataggctggtaactgctcaacagcagcaacagcagcagcagcatcagcagcagggctcaatggccggattatcccaccttcagcagagcttgatgagtcattcaggtcagcctaaactgagcgctcagccaatggggtctttgcagcagctccagcagcagcagcagctccagcagcaacagcagttacaacagcagcaacagcagcagcttcagcagcagcagcaacttcagcagcagcagttgcaacagcagcaacagcagcagcagctacagcagcagcagcagcagcagcttcagcaacagcaacagcaactgcagcagcagcaacagcaacagcagcaacagttccagcaacaacagcagcaacagcagatgggtttactgaaccagtctagaactcttctgtcccctcagcagcagcaacagcagcaggtcgcacttgggcctggcatgcctgctaagccactgcagcacttttcatcccccggagcgctcggccctacgttattgcttaccgggaaggaacagaacaccgtggatccagccgtcagctccgaggctacggagggtccgtctactcaccaaggaggaccactggcaatcggcacaactccagaaagtatggctacagaaccaggcgaagttaagccttcattatcgggggacagccagttgctgctcgtacaaccccaaccccaaccacagccctcctccttgcagcttcagcctcccctgcggctgcccggacagcagcagcagcaggtatccttgctgcatacggccgggggagggtctcacgggcagctcggttctggctcgagctccgaagcctccagcgtgccacatttgcttgcacaaccctctgtatcacttggcgatcagcccgggagcatgacacagaatttgttgggcccgcaacaacccatgttggagcggccgatgcagaacaatacgggtccgcaaccgcccaaaccaggcccagttcttcaatccggtcaaggcctgcccggtgtgggaatcatgcctaccgtgggccagctgcgggcacagctacagggcgtcctggcgaagaacccccagttacgtcacctctccccccagcagcagcagcagctccaggccctgcttatgcaacggcagttgcagcaatcacaggctgtccggcagactcctccctatcaggagccgggaacgcagaccagtcctctacagggccttctggggtgccaaccgcagctggggggtttcccaggtccccaaaccgggccactccaggagctcggcgctggcccgaggccacaaggcccgcccagattgcccgcccctcctggcgctctgtcaaccgggcctgtgcttggccctgtccatccaacaccccccccatcatcgcctcaagagcccaaaaggccctcacagcttcccagcccctcgtctcagctgccaacggaagctcaacttcctcccacccatcccgggacccctaaacctcaaggtcccaccctcgagccgcctccaggtcgagtcagccctgccgcagcccagctggctgacacgttgttctcaaagggcttaggtccctgggaccctccggataatctggccgaaacccagaagcccgagcaatcttccttggtgcctggccatctcgaccaggttaacggacaggtcgttccagaagccagccagctgtccattaagcaggaaccacgggaggaaccttgcgcactgggagctcagagcgtaaaacgcgaggcgaacggagaacccattggggcacccggcacaagtaaccacctcttgctcgccggccccaggtctgaagctggacatctgcttttgcagaaactgctgagggctaagaatgtccagctgagcactggaagagggagcgaaggacttagagctgagatcaacggacatatcgacagtaagcttgctggactcgaacagaagctccaaggtaccccgagtaataaagaagacgccgcagcaaggaagcccctaacccctaagccaaagcgcgtgcagaaggcgagcgaccggttggtgtcctcccgcaagaagctgcgcaaagaggatggcgtccgggcttccgaagcgctgctgaagcagttgaagcaggaactgagtctgttgccactgacagaacccgctattacagctaattttagtctttttgctccgttcggatcagggtgccccgtgaacggccagtctcagttacggggcgccttcggttctggcgctctgccaactgggcccgattactattctcagctgctgaccaagaataacttgagcaaccctcctaccccccccagcagcctcccccccacaccccctccctcagttcagcaaaaaatggtgaacggagtcacaccgagtgaggagctcggagagcatcctaaggatgccgccagtgctagggactccgagcgagctctgagggacacaagtgaggtcaaaagcctggatctgctggctgcactccccacaccaccccacaatcagactgaagacgtgcggatggaatccgatgaggatagtgatagccctgactccattgtgcctgcctccagcccggagtcaatacttggagaagaggccccgagatttccccatttaggatccgggcggtgggagcaggaggatagagcactgtctcctgtgatccccttgatccctcgcgccagcatcccagtgttccctgatacaaagccttacggggctctgggacttgaagttccgggaaaacttccagtcacgacatgggagaaaggcaagggaagtgaggttagcgtaatgttaactgttagtgcagctgccgcaaagaacctgaatggggtaatggttgccgtggccgagcttcttagcatgaagattccgaattcctatgaagtcctgtttccagagagtcccgctagagcagggacggagcctaagaagggcgaagcggagggccctggggggaaggaaaagggtttggagggcaagagccccgacactgggccagattggctcaagcagtttgacgccgtgctgcctggctacaccctgaaaagccaattggacatactgagcctattgaagcaggagtctccggcccctgaacctcccacgcagcactcctacacctataacgtgtctaatttggatgtgcgccagctatctgccccacccccagaggagccttcaccgccaccatcacctttggccccatctccagcctctcctcctactgaaccacttgtggagctgccaactgaaccccttgcagaacctccggtcccttcccctcttccattggccagctccccggaaagtgcgagacctaaacctagagccaggccacctgaggaaggtgaggattcacgccccccccgtctcaaaaaatggaaaggcgtacgatggaagcgtctccgactcctgctgacaattcaaaagggaagcggccggcaggaagatgagcgagaggtcgctgagttcatggagcagctcggaacagccctccgccccgataaggtcccaagagacatgaggaggtgctgtttttgtcacgaggaaggcgatggcgctactgacggaccggctcgtctgttaaacctcgatctggatctctgggttcacctgaactgtgcactgtggagcactgaagtgtatgagactcaggggggggcgctgatgaacgtggaagtcgctcttcaccgcgggctgctgaccaagtgtagcctctgtcagcggactggcgctacgagcagttgtaataggatgcggtgccctaacgtgtaccacttcgcatgtgccattcgcgccaagtgcatgttcttcaaggacaaaactatgctgtgtccgatgcataaaatcaaaggaccctgcgagcaggaactgtccagcttcgctgtgtttagacgtgtatacatagagcgggacgaagtgaaacaaatcgcttctattattcagcgcggggagcgcctgcatatgtttcgagtgggcggcctcgtgttccatgccattggccaacttctgccccaccaaatggcagactttcattcagctaccgccttataccccgtaggatacgaagccacacgtatttactggtctctgaggacgaataatcggcgttgttgttaccggtgcagcattggggagaacaatggcagacctgagtttgtaattaaggtaatagaacagggcctggaagacctagtgttcacagatgcttctcctcaggccgtctggaataggattattgaacccgttgccgccatgagaaaagaggctgatatgctgagactcttcccagaatacttgaaaggggaggaattgtttggcctaaccgtgcatgctgtattacgaatcgcagagtccttgcccggggtggagagctgtcagaattatctgtttcgttacggcaggcaccccctgatggagctgccattgatgatcaatccaacaggatgtgcccgatccgaacctaagatcctgacccactacaaacgacctcacacactgaattccacctccatgtccaaggcctatcagtcaacctttacaggggagaccaacacgccgtattctaagcagtttgttcattccaagagttcacaatacaggaggctgcggaccgagtggaagaacaatgtgtatctggcgcgtagccgaatccaaggcttgggcctgtatgcagcaaaggacttagagaagcacaccatggtcatagagtatattggaaccatcatcagaaatgaggtggctaatagacgtgaaaagatctacgaagagcagaaccgcggaatttatatgtttcgcattaataatgagcacgttatcgatgcaacattgaccggaggacctgctcggtatatcaaccatagttgtgccccaaactgtgtggccgaggtggtaactttcgacaaggaagacaagatcatcattatatcttcacgccgtatccctaagggagaggaactgacgtacgattatcagttcgatttcgaagacgaccagcacaagattccatgtcactgcggagcctggaattgtcgaaaatggatgaactag

SEQ ID NO: 125254 - DNA, 441 bp, synthetic construct
  misc_feature 1..441: note = Description of Artificial Sequence: Synthetic coding sequence
  source 1..441: mol_type = other DNA
atggactcccaaaagcttgccggagaagataaggactcggagccagccgccgacggacccgcagcttccgaggacccatctgcaaccgaaagtgatctgccaaatccccacgtgggggaggtgagcgtactgtcttccgggagccctaggctgcaggagactcctcaagactgttcgggtgggcctgtgcgccggtgtgctctttgtaattgcggtgagcctagcctgcatggccaaagggaacttagacggtttgaactgccatttgattggcctcgatgccctgtggtgtccccagggggctcccccgggcctaatgaggctgtgcttccttccgaagacctcagtcagataggctttcctgaggggctgacccccgcccacttgggagagcctggaggatcctgttgggctcaccactggtgcgcagcctggtcttag

SEQ ID NO: 125255 - DNA, 14736 bp, synthetic construct
  misc_feature 1..14736: note = Description of Artificial Sequence: Synthetic coding sequence
  source 1..14736: mol_type = other DNA
atgtcatctgaggaagacaaaagtgttgaacagccacagcctcctcctccgccccctgaggagccaggcgcccctgctcccagtcccgcagccgcagacaagaggccgagaggccggccacgcaaggatggcgcttccccatttcaacgggcccgaaaaaagccccggagtcggggcaaaacagctgtagaggacgaggactctatggatggtctcgagacaaccgagaccgaaacgatcgtagagaccgagatcaaagagcagtccgcagaagaagatgcggaagccgaggtggacaacagcaagcagctcattcccactctacagcgttctgtgagcgaggaatctgctaacagcctcgtctctgtgggggtggaagccaagatttcagagcagctatgcgcattttgctattgtggcgagaaaagctcccttggccagggggatctcaaacaatttcggatcacccccggcttcatcctcccctggcgaaatcagccttccaataaaaaggacattgatgacaatagtaacggtacatacgagaaaatgcagaactcagcgcccagaaaacagagaggacagagaaaagagcgcagtccccagcagaatatcgtttcgtgcgtttctgtctcgacccagaccgcaagtgacgatcaggcgggtaagctttgggacgaactttctttagtgggcttgcccgatgcgatcgatattcaggctctcttcgatagcacaggtacctgctgggcccatcaccgctgcgtggagtggtctctcggggtttgccaaatggaagagccccttcttgtgaatgtcgacaaggctgtcgtgtccggatcgactgaacgctgcgcgttctgcaagcatcttggagctacaattaagtgttgcgaagagaagtgtacccagatgtatcactacccgtgcgcagcgggcgccggaacctttcaggacttcagtcatatctttttgctctgccccgagcatatcgatcaagcccccgagcgcagcaaggaggacgctaactgcgcagtgtgcgactcacccggagatttgctggaccagttcttttgcaccacctgtggccagcattaccatggaatgtgcctggatatcgcagtcacaccacttaaacgcgctgggtggcagtgcccggagtgcaaggtgtgtcagaattgcaagcaatccggggaggattctaagatgctggtttgtgacacttgcgataaaggatatcatacattttgtctgcagcccgtcatgaagtccgtacctaccaatggctggaaatgcaagaattgtaggatctgtatcgagtgcgggacccgatccagttcccagtggcaccacaattgcctgatttgcgataattgttatcagcagcaggacaacctctgtccattttgtgggaagtgctaccacccagagctgcagaaagacatgttgcactgtaatatgtgtaagcgctgggtacacctagagtgcgacaagccaacggaccacgaactggacactcaattgaaggaggaatatatctgcatgtattgtaagcatctaggcgccgagatggatcgcctgcagcctggcgaagaagtggaaatcgctgagctgacaactgactataataacgagatggaagtggagggtcccgaggaccagatggtcttttccgaacaagctgcaaataaggatgtgaatgggcaggaatcaacccccgggatcgtcccagacgctgtgcaggtgcataccgaggagcagcagaaaagtcacccctctgagagcttggatactgactcactactcattgccgtgagttcccagcacacagtgaacacggagctggaaaagcagattagcaatgaggtagattcggaggacctcaagatgagcagcgaggtgaagcatatctgcggagaggatcagatcgaggataaaatggaggtgacggagaatatcgaagtggtgacccatcagattacggtgcagcaggaacagctccaactcctggaggagccagagactgtcgtttcgcgagaggagagtaggcccccaaaactcgtcatggagagcgtgacgctgccgctggaaacccttgtttcccctcacgaagaatcaatttctctgtgtcctgaggagcagctggtgatagagaggctccagggcgagaaggaacagaaggaaaacagcgagctctccacaggcttaatggactcggagatgacaccaactattgaaggctgcgttaaagacgtcagctaccagggtggtaagagtatcaaactgtcatccgagaccgaatctagctttagctcctctgccgacatctcaaaagccgatgtttccagtagtcctactccctcttccgacttgccctctcatgatatgctgcataactaccccagtgccttgtcttcctccgcaggaaatatcatgccaactacttacatcagtgttacacctaaaatcggtatggggaaacctgccataaccaagaggaaattctctcccgggcggccaaggtcgaagcaaggcgcttggagtacccataacacggtgagccctcccagctggtccccagacatctccgaggggagagagatttttaagcccagacagctccctggatccgctatatggagcataaaggtgggaagggggtctggattcccaggaaagcggcgaccacggggcgcgggcctgtcagggcggggcggcaggggacgtagcaaactgaagtcgggaatcggcgcagttgtcctacccggcgtttctacagccgatatcagttctaataaagacgatgaggagaatagcatgcataataccgtggtgctcttctctagctcggacaaatttacgctgaaccaggacatgtgcgtcgtttgtggatcattcgggcagggtgcggaaggcagattgctagcctgttctcagtgtggccagtgttaccacccatattgcgtaagtataaagatcaccaaggttgtgcttagtaagggatggagatgtctggaatgcacagtgtgtgaagcttgtggtaaggcaacggacccgggaagactcctgctgtgcgatgattgtgacatatcttaccacacttactgcctggatccacctttgcagaccgtgcctaaaggtggttggaaatgcaagtggtgtgtttggtgcagacattgcggagcaacctccgcggggcttcgatgcgagtggcagaataactacactcagtgcgccccatgcgctagcctgtcttcctgcccggtctgttaccggaactatcgtgaggaagaccttatcctccagtgtcggcagtgcgacaggtggatgcacgccgtgtgccagaatctgaatacagaggaagaggtagaaaacgttgcagacattggttttgattgttccatgtgccgcccctatatgcctgcttccaacgtgccctccagcgactgctgcgaaagcagcctggtagcgcagatcgtcaccaaagtgaaagaattagatcccccaaagacctatacccaggacggagtgtgcctcacagagtcaggcatgacacagctgcaatccctgacggtaaccgtgccacgccggaagagaagtaaaccgaagctgaaactcaaaataattaatcagaatagcgtggccgttttacagacccctcctgatatccagtctgaacacagcagagatggggagatggatgattcaagggaaggggagctgatggattgtgatgggaagtccgagtcatcgcccgaacgcgaggctgtggatgacgagactaaaggagtggagggaaccgacggcgtgaagaaacgcaagcgcaagccttacaggcctggcattggcggattcatggttcggcagcgtagtcggacaggtcagggtaagaccaaaaggtctgtgatccgcaaggactcttcaggctccatttcagaacaactgccctgtcgggacgacggctggtctgagcagctgcctgatacgttagtcgacgaaagcgtttccgtcacagaatccaccgagaaaatcaaaaagcggtataggaagcgcaaaaacaaattggaggagacattccccgcttacctgcaggaagctttcttcgggaaggatctgttagacacaagtagacagtccaagatcagcctggataatttatccgaggatggtgcacaacttctttataaaacaaacatgaatactggatttcttgatccaagcttggatcccctattgagcagtagtagcgcaccaaccaagtctgggactcacggccccgccgacgatcccctggctgatatcagtgaggtgctgaataccgatgacgatatattgggaattatcagtgatgacctggcaaaatctgtggaccactctgatatcggccccgttaccgatgacccaagttccctcccgcaacctaacgtcaatcagtcatcaagaccactgagtgaagagcaactggacggaatactcagcccagagctagataaaatggtgacagatggggccatcctgggcaagctgtacaaaattcctgagctggggggcaaagacgttgaggacctgttcactgccgtgctgtctcccgccaatactcagcccaccccactgcctcagcccccaccccccacccagcttctgcctattcataatcaagatgcctttagtcggatgcctctcatgaatggcctgatagggtctagccctcatttgcctcacaactctctgccacccggatccggcctgggaacattttcagctattgctcagtccagctacccagacgcaagggataaaaactccgcctttaatccgatggccagcgatccgaataacagttggacgtcttcggcacccaccgttgaaggagagaacgataccatgtccaacgcccagcgctcgacactgaagtgggaaaaagaagaagcactgggcgagatggctactgtggcgccggtgctgtacacgaacattaatttccctaacttaaaagaggaattcccagactggaccactcgggtgaagcagatcgcaaagctgtggcgtaaggccagctcccaagagcgggcgccgtacgtccagaaagccagggacaacagggcggcattgcgaattaacaaagtccagatgtccaatgatagcatgaaacgccagcaacagcaggactccatcgatccaagctccaggatagattccgagctcttcaaagatccgctgaaacagcgggagtccgagcatgaacaggagtggaaatttcgacagcagatgcggcagaaatctaagcagcaggcgaagatagaagctacacagaaactggaacaagtaaaaaacgagcaacaacagcagcagcaacagcagttcggcagccagcacctgctagtgcaatccggctcagatacgccatccagtgggattcagtcccccctgacaccccagcctgggaatggtaacatgagcccagctcagagctttcacaaggagctctttaccaagcagcctccctcgacccctacctccacatcgagtgacgatgtgtttgtgaagccgcaggccccacccccccctcctgcccccagcaggatccctattcaggactctctgtcacaggcacagactagccagcccccaagtccgcaggtcttctctcctggctccagcaatagtcggcccccgtccccgatggatccgtacgcaaagatggttggcactcctcggcccccacccgttggacattccttctcccgtaggaacagcgcggctcctgtcgagaactgcactcctttgagttcggtctcccgccccttacagatgaacgaaacgactgccaaccggccctcccctgttcgagatctctgttcaagctcgactacgaataatgacccatacgctaaaccaccagacacaccacgccctgtgatgacagatcagttccctaaatccctgggtctctcaaggagtcccgtggtgagcgagcagacggcaaaggggcccattgctgccggaacttccgaccatttcactaagccctcacctcgggctgacgtatttcaacggcaaagaattccagacagttatgctaggccattactgacaccagctcctttggattccggacccgggccttttaaaacccctatgcagccaccgccctccagccaggacccctatggatcagtcagtcaagccagcaggaggctctctgtcgatccttacgaaagacccgcgttgacacctcggcctatcgacaactttagtcataatcagtctaatgacccctactctcagccaccactgacacctcacccagcagtgaacgagagcttcgctcacccttcgcgcgcatttagtcaacccggaactatcagtcggccaacatcccaggacccatattctcagcctcctggtacgccgcggcccgtggtggactcgtattcacagagctctggcaccgcacgtagtaacacagatccctactctcaaccacccgggacccctcgacccaccacggtcgacccatattctcagcagccccaaactcctcggccaagtacacagacagatctgtttgtcacacctgtaaccaatcagcgccattctgacccctatgcgcaccccccgggcacaccccgcccaggaatctctgtgccatacagccagccgcctgccaccccgcgcccgcggatatctgaaggatttactcgaagctcaatgacacgcccagtgctgatgcctaatcaggaccctttcctccaggcggctcagaacaggggacctgccttgcctggccctctggtgagacccccagacacctgctctcagacaccacgtccgccgggtccgggactgagtgacacttttagcagggtaagtcctagtgctgccagagatccctatgaccagtctcccatgacccctcggtcccaatcggactcattcggcaccagccaaacagcgcacgacgtagcggaccagcctaggcccggttccgagggtagcttttgcgccagttccaactcccctatgcattcccaggggcagcagttctctggcgttagccagctgcctgggcctgtgcccacaagtggagttaccgatacacagaacaccgtcaacatggcacaagccgacactgagaagctaagacagcgacagaaattacgggagatcattctgcagcagcagcaacagaagaagatcgcggggagacaggagaaaggaagccaagattcccccgccgttccacaccccggcccccttcagcattggcagccagagaacgtcaaccaagcctttactcggccccccccaccatatcccggcaatatccgttcgcctgtagcacctcctctcggtccaagatacgctgtctttccaaaggatcagaggggaccctaccctccagatgtggctagtatgggcatgcgaccacatggatttcggtttggattcccgggaggctcacacggcactatgccctcccaggagcgctttctcgtgccgccgcagcagatccagggatccggggtctcccctcagctgcggagaagcgtatctgtcgatatgccgcgtccactgaataattcccagatgaataatcctgttggactcccgcagcacttcagcccacagtctctgcccgtccagcagcataacatcctaggtcaggcgtatattgaactaaggcatagggcgccagacggccggcagagactgccctttagcgcgccgccgggtagcgtggtggaggcttctagcaatctgagacacggaaacttcattccgagacccgacttcccaggcccgagacacaccgatccgatgaggcggccaccacagggattgcccaaccagctgccagtccaccctgacctggagcaggtccccccatctcaacaagaacagggacactcggtgcattctagctccatggtcatgcgcactcttaatcaccctctgggcggggagttttctgaagccccactttccacttcggtgccttccgaaaccactagcgacaacctccagataaccacccagcctagcgacggtctggaggaaaagctcgattcagacgacccgtcagtgaaggaattggatgtgaaggaccttgagggggtggaggtgaaggatctcgatgatgaggatctcgaaaatctcaatctggacaccgaagatggcaaagtggtggagctggacactctggataatctagagacaaacgatccaaacctggacgatctgctgcgatctggagagtttgatattatcgcctacaccgatccagagttggacatgggggataagaagagtatgtttaacgaggaacttgacctgccaattgacgacaaactggataaccagtgtgtctcggttgagccaaagaaaaaggaacaggagaacaagacccttgtgttgtcagataagcacagtccgcagaaaaagtcgactgtgacaaacgaagtgaaaaccgaagtcctgagcccaaatagtaaagtggaaagtaaatgcgagacagagaaaaatgacgaaaacaaagacaatgtggacaccccatgctcccaggcctctgctcattcggacctgaatgacggagagaagacatccctccatccttgtgatcccgatttgtttgagaaacggaccaacagggagaccgcaggacctagcgccaatgtcatccaggcttcaacccagctccctgcacaagatgtgatcaactcatgtggcattacaggctccacacctgtcctgtcctctctgctggctaatgaaaagtccgacaatagcgatatccgaccttctgggagcccccccccacctaccctacccgcctccccgagcaatcacgtcagtagtttacccccctttatagcgcccccaggcagggtgctagacaacgctatgaactcaaacgtgacagtggtgagtagggtgaatcatgttttctcccagggagttcaggtcaatcctgggctgattcctggacagtcaaccgtgaatcatagcctcggcactgggaaaccagccacccagaccggcccccagacgtcccagtcgggcactagctccatgtctggtcctcaacagctcatgattccccagacacttgcccagcagaatcgcgagagaccattattgctggaggagcaacctctactgctacaggatctgcttgatcaggagcggcaggagcaacagcagcagcgtcagatgcaggctatgataagacaacggagcgaacccttcttcccaaacattgactttgacgcgatcaccgaccctatcatgaaagcaaagatggtggccttgaagggtatcaacaaagtcatggcacagaataatctcggtatgccacccatggtcatgtcacgttttccattcatgggccaggttgtgaccggcacacagaattctgaagggcagaatctcggcccgcaggctatcccccaagacggctcaatcactcaccagatcagccggcccaacccgcccaacttcggccctggcttcgtgaatgattctcaaaggaagcagtatgaggaatggttacaggagacccagcaactactccaaatgcagcaaaaatacttggaagagcagataggagcccacaggaaatctaaaaaggctcttagcgccaagcagaggacagctaaaaaggctggaagggaatttccggaagaagacgctgaacagctcaagcatgtgactgagcagcaatcaatggttcagaaacagctcgagcagataagaaagcaacagaaagagcacgcggaactcatagaggattatcgaataaagcagcagcagcaatgcgccatggccccgccaacaatgatgcccagtgtgcagccccagccccctctgattccaggagccaccccccccacgatgagccagcctacgtttcctatggttcctcaacagctgcagcatcaacagcacacaactgttatcagcggccacacctcgcccgtaagaatgccctccctgccgggttggcaacccaatagcgctcccgctcacttacctctgaatcccccacggatccagcctccaatcgcgcaactccccataaaaacatgcaccccagctccgggcacggttagcaacgctaatcctcagagcggtcccccgccccgggtggagtttgacgacaacaatcctttttccgaaagcttccaagaaagagagcggaaggaacgcctccgggaacagcaggaaaggcaaaggattcagctcatgcaagaagtagataggcagagagccctgcagcaacggatggagatggagcagcacggcatggtggggtcagagatatcctccagtcgaacatccgtctctcagatccctttctattccagcgacctgccatgtgactttatgcagcccctgggccccctgcagcagagcccccagcaccaacagcagatgggtcaagtgcttcagcagcaaaacattcagcaaggctctatcaactctccctcgacacagacattcatgcagaccaacgagcggcgccaggtgggtccaccctccttcgttccggactcgccatcgattcctgttggtagtccaaacttctcatccgtgaagcagggccatggcaacctatcaggtacctcatttcagcagagccctgttagaccctcatttacaccggcgcttcccgcagcaccgccagtcgccaattcttctctgccttgtgggcaagacagcacaatcacccacggacactcctacccaggatccacgcagagcttgatccaactttactccgacatcatcccggaggaaaaaggaaaaaagaaacggactcgaaaaaaaaagagggatgacgatgctgagtccacaaaggcaccgtctacccctcactcggatattacagccccaccaacccccggtatctcagagacaacgagcacgcctgctgtgtccacgccctctgaactgcctcagcaagcagaccaggagagcgtggagcctgtgggcccctcaacacccaatatggccgccgggcaattatgtacagaactcgaaaacaagctgcccaactctgatttctctcaggctacaccaaaccagcagacatacgcgaattccgaggtcgacaaactcagtatggagacccctgcaaagaccgaagagatcaagctcgagaaggccgagaccgaatcttgtcctggccaagaggaacctaaactcgaggagcagaacgggagcaaggtagagggcaacgctgtggcctgcccagtgagctcagctcagtcccctcctcactcggctggagccccagcggccaagggtgattccggcaacgagctgttgaagcatctgctgaaaaataaaaagtccagcagcctgttaaaccagaagccggaggggtccatttgctcagaggatgactgcactaaggacaataaactggtcgaaaaacagaacccggcagaaggtttgcagaccctgggggctcaaatgcaggggggcttcggatgcggcaatcagctccctaagacggatggaggcagcgagactaagaagcagcgatccaaacgcacacagagaaccggcgagaaggcggcaccacgtagcaagaagaggaaaaaggacgaggaggagaaacaagctatgtactcttccactgacaccttcactcacctgaagcagcagaacaacctatcaaaccctccaacgcctccagctagcttacctccaacccctccaccaatggcctgtcagaagatggccaacggcttcgctaccaccgaggagcttgcaggcaaggcaggcgtgctcgtcagtcacgaagttaccaaaacgcttggccctaaaccttttcagctgcccttccggcctcaagacgacttgctcgcccgcgctctcgcccagggtcccaagactgtagacgtgccagcctccctcccgacccctcctcacaacaaccaggaagaactgagaattcaggaccactgcggagatcgggataccccggacagctttgtcccatcttcctcccctgagtcagtcgttggagtggaagtgtcacggtatcctgatctgtcactggtaaaggaagaacctccagaacctgtacctagccctatcatccccattttacccagtacggcgggaaagtcctcagaaagtcgcagaaatgacataaaaactgaaccagggaccctgtatttcgccagtccttttggccccagcccaaacgggcctcgaagcggcttaatttcagtcgccataaccctccatcccactgctgccgaaaacatcagcagcgtggtagccgcttttagtgatctactgcatgtgaggatacccaactcatatgaagtgtccagtgcccccgatgtcccttctatggggctcgtctcatcccatcgtatcaaccccggtctggagtatcgccagcatttgctgttgaggggcccaccccccggatccgcaaaccctccacgcctagttagctcgtaccggcttaagcagcccaacgtccccttcccacccactagcaatggcctgtctgggtataaagattctagtcacgggatcgcggagagcgctgccctcagaccacaatggtgttgccactgcaaggtggttatccttggcagtggggtacggaagagtttcaaagacctgactctgctcaacaaggattcaagagagtccaccaagcgagttgagaaagatattgtcttctgtagcaacaattgtttcatactctactcctcaactgctcaggcgaaaaatagtgaaaataaagagagcatcccaagcctcccacagtcccccatgcgcgagactccaagcaaggctttccaccagtattcaaacaacattagtacactggatgtacattgtttacctcagctgcctgagaaggcgtccccaccagctagccctccgatagccttcccacccgccttcgaggccgcacaggtggaggccaagccagacgaactgaaggtcactgtgaagctgaagcctcgacttagagcggttcatggcgggtttgaggattgcaggccgttgaacaaaaagtggcgaggcatgaagtggaagaaatggtcaattcatattgttattcccaaaggcacatttaagccaccttgtgaagatgagatcgatgagttcctaaagaaactgggaacctcccttaagcctgatccagtcccaaaggactaccgcaaatgctgtttctgccatgaggagggagacgggctcaccgatgggccggcaagactccttaatctggatctggatctgtgggtgcaccttaactgcgccctgtggagtactgaagtgtacgaaacgcaggcgggtgcactgatcaacgtcgagctggccctaagaaggggactacaaatgaagtgtgtattttgccacaaaactggcgccaccagcggctgtcaccgcttccgttgtaccaacatttatcattttacttgcgccatcaaggcacaatgcatgttctttaaggacaaaaccatgctgtgccctatgcacaagcctaaggggatacatgaacaagaattgtcttactttgctgtgttccgccgggtgtacgtgcaacgcgatgaggtccgtcaaatcgcctctattgtccagcgcggagagcgagaccacacattcagagtcggatctctaatcttccacactatcgggcagctgctgccacaacagatgcaggcctttcacagccctaaggccctcttccccgtggggtatgaggctagcaggctgtactggagcacaaggtacgccaatcgccgttgccgctacctgtgcagcatagaagaaaaggacggcaggcccgtgttcgtgataaggatcgtcgaacaggggcatgaagatcttgtcctgtcagacatctccccgaaaggcgtgtgggataaaatcctagagcctgtggcctgcgttaggaagaaatccgaaatgctgcagctctttccagcctacttgaaaggagaggacttattcggcttaacagtttctgcagttgcgcgaatcgcagaaagcctgccgggggtggaagcctgcgagaactataccttccggtacgggagaaatcccctcatggagctccccctagccgtgaatcctaccggctgtgcccgatctgagcccaagatgtcagcccatgtgaaacgctttgtcctgcgtcctcataccctcaacagcacttccacctccaagagttttcagtctaccgtgaccggtgaactcaatgccccatactccaaacagtttgtacactctaaatctagccagtacaggaagatgaaaaccgaatggaagagcaacgtgtaccttgcaaggtcccgtatacaggggctgggcctgtatgcagcccgagatatcgaaaaacataccatggttattgaatacataggaactatcatccgtaacgaggtggccaacaggaaggaaaagctgtacgagagtcagaacaggggagtgtacatgtttagaatggataatgatcatgttatcgatgctaccctgacaggaggaccagcgcgatacatcaatcattcgtgtgcccctaattgcgtggctgaggtggtgacgttcgagcggggccataagatcattatctcctcctcacggcggattcagaagggcgaagagttgtgttatgattacaagttcgattttgaggacgatcaacataaaattccctgccattgcggtgccgtgaactgtcggaaatggatgaactag

SEQ ID NO: 125256 - DNA, 14907 bp, synthetic construct
  misc_feature 1..14907: note = Description of Artificial Sequence: Synthetic coding sequence
  source 1..14907: mol_type = other DNA
atgagcagcgaagaggataagagcgtggagcagccccagcctcctccgcccccgccagaggaacctggtgccccagcaccctcacccgctgccgccgataaaaggcctcggggaagaccccgcaaagacggcgctagccctttccagcgtgcccgaaagaaaccgagatcccgcggaaagaccgctgttgaagacgaggacagcatggacggattagagacaaccgaaaccgaaaccatagtcgagactgagattaaagaacagtccgctgaggaagatgcggaggccgaagtggacaacagcaagcagctgattcccaccctccagagaagtgtgagcgaagagagtgccaatagcttggtgagcgtcggagtagaggctaaaatctctgaacagctgtgtgcattttgctactgtggggagaaaagctcgctcggccagggtgacctgaagcaattcagaataacacctggcttcattcttccttggcggaaccagccatcaaacaagaaggatattgacgacaattccaatggaacctatgaaaagatgcaaaactccgccccaagaaaacagaggggccaacgtaaggagcggtcaccacagcagaatattgtgagctgcgtgagtgtgtctacgcagaccgcctcggacgatcaggccggaaagctttgggatgaactttctctcgtcgggttgcccgacgcgatagacattcaggccctctttgactctacagggacatgctgggctcatcatcgctgcgtggaatggagtctgggggtgtgtcagatggaagagccactcctagtgaatgtggataaggctgtggtctccggctccacggaaagatgtgccttttgtaagcatctgggggctaccattaagtgctgcgaagagaaatgcactcagatgtaccactacccgtgcgccgccggcgcaggcaccttccaggacttctctcacatctttctgctttgtccagagcatatcgatcaggccccagagagatccaaggaagacgccaattgtgcggtttgtgacagtcccggcgatttgctagaccaattcttctgtactacgtgcgggcaacattatcatggtatgtgcctggatattgccgtcaccccactgaaaagggctgggtggcagtgtccggagtgtaaggtgtgccagaactgtaaacagagcggtgaagatagcaagatgctggtgtgtgacacctgtgacaagggctaccacaccttctgtctgcagccagtgatgaagagcgttcctaccaatggttggaagtgtaagaactgtaggatctgtatcgagtgcgggaccaggtcctcttcacagtggcatcacaactgtttgatctgtgataactgctaccaacagcaagacaatctttgtccattttgtggcaagtgctaccatccggagctccagaaggacatgctgcattgcaacatgtgcaagagatgggtccatttagaatgcgacaaacctactgatcacgagctggatacccaactaaaggaggagtacatttgtatgtactgcaagcatttgggcgccgagatggacagactccagcctggagaggaagttgaaatcgcagagcttaccactgactataacaacgaaatggaagtggaaggccctgaagaccagatggtcttctcagaacaagccgccaataaagatgtgaacggccaagagagtacacctggaatcgtacctgatgctgtgcaggtacacacagaggaacagcagaagtcccacccttccgaatcactggataccgactccttgctgatcgccgttagcagccagcataccgtgaatacagagctggagaagcaaatcagtaacgaagtcgactctgaagatctgaaaatgagctcggaggttaagcatatttgtggtgaagaccagatcgaggacaagatggaagtgacagagaacattgaggtcgtaactcatcagatcactgtacaacaggaacaactgcaattgttggaggagccggaaacagtcgtgtcccgcgaggaaagtcgccctccaaagctggtgatggaatccgtgactctgcctctggaaaccctggtttccccccatgaagagtccatctctttgtgccctgaggaacaactggtcattgagcgcctccaaggagaaaaggagcagaaagagaactcggagctatcgacagggcttatggattcagaaatgacgcccactattgaaggttgcgtcaaggacgtttcgtatcaaggggggaagtcaatcaaactttcatctgagacggaatcatcattctccagctccgccgatattagcaaggctgatgtcagttcctctcctacccctagtagcgatcttcctagtcatgacatgttgcacaattacccttctgcattgtccagtagcgcaggaaacatcatgccgacaacttacatctctgtcactcccaaaatcggtatgggtaaacctgctatcaccaaacgcaaattttcacccggcagaccacgctctaagcaaggagcctggtccacccacaacactgtgtctcctcccagctggtcgcctgacatcagcgagggccgtgaaatattcaaaccaaggcagctccctggctcagctatttggtcaattaaggttggccgggggagcggattcccggggaagcggcggccacgaggagccggactgtccggaagaggcggacgcggtcgctcaaaactgaaatccgggattggggccgtcgtcctcccaggggtttccacggccgacattagttctaacaaggacgatgaagaaaacagcatgcataacacagtggttttgttctcttcttcagataagttcacacttaaccaggacatgtgcgtggtttgtgggagcttcggccagggggcagagggaagattgctggcttgtagccagtgtggccagtgctatcacccatactgtgtcagtatcaaaattacaaaagtcgtcctttctaaaggttggcggtgcctggagtgcaccgtgtgtgaagcatgcggaaaggccacagatcccggcaggctattgctgtgcgatgactgcgacatctcttaccatacttattgtctagacccacctttgcagactgtacctaagggagggtggaagtgtaagtggtgtgtttggtgtagacattgcggagccacaagcgcgggcctaaggtgcgaatggcagaataattacacacagtgcgccccatgcgcatccctctctagttgtcctgtgtgttacaggaattatcgcgaagaggatctcatactgcagtgccgacaatgtgacaggtggatgcatgctgtatgccagaaccttaacacagaagaagaggtcgaaaacgtcgccgatatcggcttcgattgttctatgtgtaggccctatatgcccgcgtctaatgtgccaagtagcgactgctgtgagagtagtttagttgctcagatcgtgacaaaagtgaaggaactcgaccctcctaagacttacacacaagacggcgtctgcctgaccgagtctggtatgacccagcttcaatcgctgactgtcaccgtgcccagacgtaaaagatcaaaaccaaagctgaaattgaagatcataaaccagaactcagtggcagtgctccagactcctcctgatatacagtctgagcatagccgtgatggcgaaatggatgatagccgagaaggcgaactaatggactgcgacggaaagtctgagtctagtccggaacgggaagccgtcgacgacgaaacaaaaggcgttgagggtacagacggtgtcaaaaagaggaaacgcaagccttacaggccgggcatcggggggtttatggtgcggcagcgatccaggacgggacaaggaaaaactaagagatccgtgattagaaaagattcctctggctccatatccgagcagctgccatgtagagatgacggatggtctgagcaactgcccgacaccctagtcgacgaaagcgtttctgtgactgaaagcacagagaagatcaaaaagaggtatcggaagcgcaaaaacaaattggaagagaccttccccgcttacctacaggaagcattcttcgggaaagatctcctggacacctcgcgtcagtccaagatatctctggacaatttgtccgaggacggagcccagctgctttacaagaccaacatgaacaccggattccttgacccctccttagacccgctcttatcgtcctcgtctgcaccaacgaagtcaggcactcatgggcccgcggatgatcctcttgccgacattagcgaagtgcttaataccgatgacgacattctggggatcattagtgacgacctggcaaaaagtgtggatcattctgacataggccccgtgacagatgacccctctagtctcccacagccaaatgtgaaccagtcctccaggccactttcagaagaacagttagacgggatcctctcacccgaattggacaagatggtgacggacggagccatcttaggcaagctctataagatcccagagctgggtggaaaggatgtggaggacctgtttaccgccgtgctgagccccgcaaatacacagcccacccccctgccacagcccccaccacccacccagctgctgccaatacataaccaagacgccttcagtagaatgcctttaatgaatgggctcatcggatcaagcccgcacctccctcacaattccctcccaccaggatcagggctgggtacttttagtgcaattgcacagtcttcttacccagacgcccgagataaaaattctgcgttcaatcccatggcttccgaccccaataatagttggacctcgagtgcccccactgtcgaaggcgagaacgatactatgtcaaacgcacaacgcagcaccctgaagtgggaaaaggaggaagccctgggggaaatggccaccgtggccccggtgctgtacaccaatattaacttccctaacctcaaggaagagtttccagactggacaacaagggtgaaacagattgctaagctctggcgcaaagcctcctcgcaggagcgcgcaccatatgttcagaaggcaagggacaaccgtgctgccctgcggattaataaggttcagatgtccaacgatagtatgaagagacagcagcaacaagattcaatcgatccaagctcccgcatcgactctgagctcttcaaagacccgctgaagcagagagagagcgagcacgagcaagagtggaagttcagacagcagatgagacagaagtccaagcaacaagcgaagattgaggcaacccagaagcttgagcaggttaaaaacgagcaacagcagcagcaacagcagcaattcggaagccagcacctgctggtacagagtgggagcgatactccctcttctgggatccaatcccctctgaccccccaaccagggaatggcaatatgtcccctgctcaatcttttcacaaggaactgtttactaagcaaccccccagcactcccacctcaacatcgagcgatgatgtgttcgtgaaaccgcaggccccgcctccccctccagctccatccaggattccaatacaggatagcctgagccaggcccagacttctcaaccgccctccccccaggtcttcagtcctggatcctccaatagccgaccccccagcccgatggatccatatgctaaaatggtcggcacaccacggcctcctccggtgggccactccttcagtcgcagaaattcagcagcccccgtggagaactgtacgcctcttagttcggtgtctagaccccttcagatgaacgaaactactgccaatagaccttcccctgttagagatttgtgctccagttcaaccacgaataacgacccgtacgcgaagcctcctgacacccctagacctgtcatgaccgatcagtttcctaagtccctggggctgtcacggagccctgtggtgtcggaacagacagccaagggcccaatcgccgccggtacatctgaccacttcactaagccgagtccccgtgcggacgtgtttcagagacagcggatccccgactcatatgcccgtcctttgctgacaccggcccccctggactctggaccaggtccttttaaaactcccatgcaaccacccccctcctcccaagacccatacggaagtgtttcccaagcatcgcggcgattgagtgtggacccttacgaacgtccagccctgacgccacggccgatagataatttctctcacaatcagtctaacgacccctactcacagccacccctcaccccacatccggcggtcaatgagagctttgctcatccctctcgtgccttttcacagccaggcaccatcagcagaccaacatctcaggacccctactcccaaccgccggggactcccaggcccgttgttgatagctactctcaaagctcgggcaccgcccgctccaacaccgacccctattcacaaccgccgggtactcccaggcctactacagtcgacccctactcccagcaaccccagactccaagacctagcacacagaccgacctctttgtcacgcctgtcacaaatcagcgccactctgatccctatgcccatcccccaggaacgcctcgcccggggatctcagtaccttatagtcagccgccagccactccaaggccccgcatctccgaggggtttactagaagtagtatgactcgacctgtcctgatgcccaatcaagacccctttctccaggccgctcagaatagaggccccgctctgccaggcccacttgtccgacctccagatacttgcagtcagactccaaggccccccgggcctggccttagcgacacatttagcagggtgagtccaagcgctgcccgggatccatacgatcagagccccatgacccctcgtagtcagagtgactcgtttgggacgagccagaccgcacacgatgtcgcagaccagccccggcctgggtccgagggatctttttgcgcatcttccaatagccccatgcactcccaggggcaacaattcagtggtgtgtcacaattgcctggccctgtcccaactagcggcgtcaccgacacccagaatacagtcaatatggcacaggctgacaccgaaaagcttcggcagcgccagaaactgagagagattatcctacagcagcagcagcagaaaaaaatcgctggaagacaggaaaagggatctcaagattcccccgccgtgcctcatccaggcccactgcaacattggcagccagagaatgttaaccaagcctttactcgtcctcctcctccatacccagggaacattaggagtcccgtcgctccacccctgggaccccggtatgcggtgttcccaaaggatcagaggggtccctacccccccgacgtcgcctctatggggatgaggccacatggatttcggttcggcttcccagggggcagccatggcacaatgccctctcaggaacgtttcctggtaccgccccagcaaattcagggttctggcgtgagccctcagttacgccggtctgtgagcgttgacatgcctcgtccactgaacaattctcaaatgaataatcctgttggcttgccacaacacttttctccacagtctttgccagttcagcagcacaacattctaggacaggcatacatcgagctaaggcatcgtgctcctgacggtcggcaaaggctaccctttagtgccccacctggctcggttgtggaggcttctagcaatctccggcacgggaatttcatccccagacccgatttccccggacctcggcacaccgaccctatgcggcgaccaccccaggggctgcccaatcagctccccgtgcacccggacctggagcaggtgccaccttcccagcaggagcagggacacagcgtacactcctccagcatggtgatgcgcaccctcaatcaccctctaggaggagagttttccgaagctcccctttctacaagcgtgcctagcgaaactacgtccgataacttgcagatcaccacccaaccatccgacggactagaggagaagttggactcagacgacccttccgtcaaagagctcgacgtaaaagacctggaaggcgtggaggtcaaggatctggacgatgaggatctcgaaaacctgaacctggataccgaggatggcaaagtggtcgaactagatacccttgacaacctggaaactaatgacccgaatctagatgatctgctgaggtctggggaatttgatatcatcgcatacaccgaccctgagctcgacatgggagataagaaatccatgttcaacgaagaactggatctccccattgatgataaactggacaatcaatgcgtttcagtggaacctaagaagaaagaacaagagaacaagaccctggtgttgagtgacaagcacagccctcagaaaaagagtaccgtgaccaacgaggtgaaaacagaggtactaagccctaactcaaaagtcgaaagtaaatgcgaaaccgagaagaatgacgaaaacaaagacaatgtggacactccgtgctcccaagcttcggcccatagcgacctcaatgatggtgaaaagacatccttacacccctgtgatcccgatctctttgaaaagcgcaccaaccgcgaaaccgcgggcccctcggctaacgtaattcaagcgtccacccagttgcctgcccaggatgtaatcaattcatgcggaatcaccggatctactcctgttctatcttccttacttgctaatgagaaatcagacaacagtgacatccgcccttcgggttccccaccgccccctacattgccagcaagcccctcgaaccatgtatctagtctgcctccatttatcgcgcctcctggccgcgttctcgataacgctatgaacagcaacgtcacagtggtaagccgcgtgaatcacgtgttcagccagggcgttcaggtgaatccgggactgatccctggccagtctacagtaaaccatagcctcggtacaggcaaacccgctacacaaaccggccctcagacatctcagtcaggcacaagtagcatgagtgggccgcagcagctcatgataccacagacactcgcacagcaaaatcgtgaacgacctctcttgttggaggaacaacctctcctgcttcaagacctgctggatcaggagcgccaagagcagcagcagcagcgccaaatgcaagcaatgatccgccagcgatctgagcctttttttcctaatattgattttgacgcgatcactgaccccattatgaaggccaagatggtggcgctcaagggaattaataaggtgatggcgcagaacaacttaggaatgcctcccatggtgatgtctcgatttccatttatgggtcaagtggtaaccggtacccaaaactccgagggccagaatctgggaccacaggccattccccaggacggcagtatcacccatcagatcagcagaccaaacccacccaacttcggccccgggtttgtgaatgattctcaaaggaaacagtacgaggaatggctgcaggagacacagcagttactacagatgcagcaaaaatatttggaagaacagattggcgcccatcgtaaaagtaagaaggcgctttctgcgaagcagcggacggccaagaaggcaggaagggaatttcctgaggaagacgccgaacagttgaagcacgtgaccgaacagcaaagtatggtacaaaaacagctagagcagattcgcaaacagcagaaagaacatgctgagctgatagaggactatagaatcaaacaacagcaacagtgcgctatggcgccccccacgatgatgcctagcgttcaaccgcagcccccactgatcccaggagcaaccccgcccacaatgtctcaacccacatttcccatggtcccccaacaactccaacatcaacagcacaccactgtgattagtggacacacctccccagtgagaatgccctcgctacctggttggcagccgaactccgcccccgctcaccttccacttaatcctcctcgcattcagcctccaatcgcccagttgccgattaagacctgtacacctgcccccggtaccgtcagtaacgccaatccacagtcagggccccctcctcgcgtggagtttgatgacaacaatcctttcagcgaatccttccaagagcgggaacgcaaggagaggctgagagagcagcaggaacgacagcggattcaattaatgcaggaggtggacaggcagcgcgcactccaacagcgtatggaaatggaacagcatggcatggtcggatcggaaatcagtagctcccggacaagcgtctctcagatccctttctacagctctgacctgccatgtgactttatgcagcctctgggaccattacaacagtcccctcagcaccaacagcagatgggtcaggttttgcagcagcaaaatatacaacaaggaagtatcaattcgccttctacccagacattcatgcagaccaacgaaagacggcaagtaggaccccctagctttgttccggattcaccctcaattcccgtcggcagcccgaatttttcatccgtgaaacaggggcatggcaacttatctggcactagctttcagcagtcacccgtgcgccccagcttcacaccggccctacccgccgctccccctgtggccaattcctcccttccatgcgggcaagacagcactattacgcacggacattcttatcccggaagcactcaaagtctgatccagctctattccgacataataccagaagagaagggaaaaaagaagagaacccggaaaaaaaaaagggatgacgatgcggagtctaccaaagctccttccacgccacattcggacattacagccccgcctacacccggtatcagcgagacgacgtcaacacctgctgtgagcacaccatccgaactacctcagcaggccgatcaggaaagtgtagagcccgtaggaccgtccacacccaatatggctgcgggccagctgtgcacagaactggagaacaagcttccgaatagtgacttcagccaggccactcctaaccagcagacctacgcaaactcggaggtggataagctgagtatggaaactcctgccaagacagaggagatcaagcttgagaaggcagagactgagagttgtcctgggcaggaggaaccaaaactggaggaacagaacggcagcaaagttgaggggaatgcagtagcgtgccctgtatcgagcgcgcagagcccacctcactctgcgggggcgcctgcggctaaaggagacagtgggaacgagttactgaaacatttgctaaagaacaaaaagtcatcttccttactcaaccagaagccggaaggcagcatctgcagtgaggacgactgcactaaggacaataaactcgtcgagaagcagaatcccgcggagggcctgcagacactcggggcccagatgcaaggcggattcggatgcggcaatcagctgccaaagactgatggggggagcgagacgaaaaaacagcgctctaaacggacgcagcggacaggtgaaaaagctgcgcccagaagcaagaagcggaagaaggacgaagaagaaaaacaagccatgtatagttctacggataccttcactcatttgaagcaggttcgtcaattatctctgctgcccctgatggaaccgataattggggtcaattttgcccacttcctgccatacggaagcggccagttcaactctggaaaccggctgctgggaacctttggatccgccacactggaaggtgtcagtgactactactcccagctaatttacaagcagaataacctgagcaatccaccaacccctccagcctccctgccaccaacaccccccccaatggcttgtcagaagatggctaacgggtttgccactaccgaagagctagcaggcaaggccggtgtgctggtcagccacgaggtgacgaagacactagggccaaaaccgtttcagttgccgtttaggcctcaggacgatttgctggccagggctttagcccaaggacctaagactgtagacgtgccagcctctctgcccaccccaccacataataatcaggaggagttaagaatccaggaccactgcggggaccgggacaccccagactcctttgttccatccagctctcccgagtcagtggttggcgtggaagtgagtcgctatcctgatctgtccctggtaaaggaggagcctcctgagcctgtgccttcccctattattccaattctcccttctacagctggcaagagcagcgagtctagacgcaacgatataaaaacagaacctggtacactgtatttcgccagcccgtttggacctagccccaacggcccccgatctgggttaatttctgtggctatcaccctgcacccaactgcagccgagaatatttcaagcgtcgtggccgcctttagcgacttactccacgttcggataccaaactcatatgaagtatcctcagctcctgatgtccccagcatgggcctggtaagcagccataggatcaatccagggcttgagtacaggcagcacctgctgttgagaggccctccacctggatctgccaatcccccgaggctcgtgtcctcctatagactgaaacagcccaatgtgccttttccgcctacctccaatggcttatccgggtataaggactcctcccacgggatagctgagagtgccgctctgagacctcagtggtgttgtcattgtaaagtagtgatccttggctcaggggtgcggaaatcatttaaggacctcacactcctgaataaagactcccgcgagtctactaaacgggtggagaaagatattgtgttctgttccaataactgctttatattgtatagcagcactgcacaggccaaaaattccgagaacaaggagtcaatcccaagcctccctcagtccccgatgcgagaaacacctagcaaagctttccatcagtacagcaacaacatttccactctggacgtgcactgtctccctcagctgccagagaaggcctcaccacccgcgagtccccccatagcgttccctcctgccttcgaagccgcccaggttgaagccaagcccgatgagctgaaggtgaccgttaagctgaaacctcggctgcgagcagtacacggaggatttgaggattgtcgcccgctgaacaagaagtggcggggtatgaagtggaagaagtggtcaattcacatagtgattccaaaggggacattcaagcccccatgtgaagacgaaatagatgagtttctcaaaaagcttggcaccagtttaaagccggacccggtgcctaaagattatagaaaatgttgcttctgccatgaagaaggagatggactaaccgacgggccagctcgactcttaaacctggacctggacctttgggtgcacctcaactgcgccctgtggtcaaccgaggtatacgagacacaggctggggctctcattaacgtagagctggctctgaggagaggacttcagatgaaatgcgtgttctgccacaagacaggggcaacatctggctgtcaccggtttaggtgtacaaatatctatcatttcacatgtgccatcaaggcacagtgcatgttttttaaagacaaaacaatgttgtgtccgatgcacaagccaaagggcattcacgaacaggagctgtcctacttcgcagtcttcagaagggtgtacgttcagcgagacgaagtgagacaaatcgccagcatcgttcagaggggcgagagggaccatacctttcgggtgggctctttgatctttcacacgatcggacagctgttgcctcaacagatgcaggcattccattcccccaaagccctcttccccgtcgggtatgaggcctccaggctgtattggagtactcgctacgctaatcgacgctgcagatatctgtgttctatcgaggaaaaggacggcagacccgtttttgtgattagaatcgttgagcagggacatgaagatttggtgctgagtgatatctcacctaaaggagtttgggacaaaatcctagaaccagtggcctgcgtgagaaagaaaagcgaaatgctgcaactgttccccgcctatctcaagggcgaggacctttttggacttaccgtttccgccgtggcacgtatcgctgaatccctacctggtgtggaggcatgcgagaactacacatttcgctacgggaggaacccactgatggaactgccccttgccgtcaaccccacaggatgcgctcggagcgaacccaagatgagcgcccacgtgaaaaggttcgtccttaggccacatacccttaactcaactagtacctctaagtctttccagtccacagtgacaggagagttgaatgcaccatactccaaacagtttgtgcactccaaatcttctcagtacaggaaaatgaagacagagtggaagagcaatgtgtaccttgccagatctagaatccaggggctgggattatatgcggctcgggatattgaaaaacacaccatggtcatcgagtatatcggcacaattatccggaacgaggttgcaaatagaaaagagaagctatacgaatcgcaaaatagaggtgtgtacatgttcaggatggacaacgatcatgtcatcgatgccactctgacaggtggacctgccagatacatcaaccactcttgcgccccaaactgtgttgcagaggtggttacttttgagcggggccataagattatcataagcagctcccgccgaatccaaaaaggtgaagaactgtgctacgactataagtttgacttcgaggacgatcagcataagatcccttgtcactgcggtgccgtgaattgccgcaagtggatgaattag

SEQ ID NO: 125257 - DNA, 4575 bp, synthetic construct
  misc_feature 1..4575: note = Description of Artificial Sequence: Synthetic coding sequence
  source 1..4575: mol_type = other DNA
ctcatgcaggaggttgatagacagcgcgccctgcagcaacgtatggaaatggaacaacacgggatggtcgggtccgaaatcagttcctctcgcacctctgtttctcagataccattctatagtagcgacctgccttgcgattttatgcaacctctgggacccctgcagcaaagcccccagcatcagcagcagatgggccaagtgctgcaacaacagaatattcagcaggggtccatcaactccccttccacgcaaactttcatgcagaccaacgaaagaagacaggtcggcccaccaagttttgtgcctgatagccctagcattcctgttggtagcccgaacttcagcagtgtgaagcaagggcacggaaacctgagtggtactagcttccagcagtccccagtgagaccatcctttacccctgcgctgcctgcagccccccctgtggccaacagctctctgccttgcggtcaggactccaccatcactcacgggcattcctaccctgggtcaacccagtcactgattcagctgtattccgatattatccctgaagaaaagggtaagaagaagcgcactcgaaaaaagaaacgggatgacgacgccgaatccactaaggcccctagcactccacacagcgatattactgcaccccccacgcccggcatcagcgaaaccactagcacccccgcagtcagcactccctccgaactcccccagcaggcagaccaggaatctgtagaacctgtcgggcccagcacccctaatatggcagcagggcaactgtgcaccgagctagagaataagctgcccaactccgactttagccaggccacacctaaccagcagacctacgcgaactctgaagtcgacaagttgagcatggagacgcctgccaagacagaggaaatcaaactcgagaaggcagagacagaatcctgccccgggcaggaagagccaaagcttgaggaacagaacggctctaaagtggaaggtaatgccgtggcctgtccagtttccagcgcccaatccccacctcattcagctggtgctcctgctgctaagggagatagcgggaatgagctattgaagcatctgctgaagaataaaaagagctcaagtttactcaaccagaagccagagggttcaatttgctctgaggacgactgtactaaggacaataagctggtcgagaaacaaaaccctgccgaaggcctgcagactctgggcgctcagatgcagggaggcttcggctgtggtaaccagctacccaagacagatggaggctctgagacaaaaaaacagagaagcaaaagaacacagaggaccggtgaaaaggcggccccccggtctaaaaaacggaagaaggacgaagaagagaagcaagcgatgtactcaagcaccgataccttcacccacttaaaacagcaattgtcccttttgccactgatggagccaattattggagtgaatttcgcgcacttcctgccatatggctcaggccagttcaatagtgggaatcgcctgctgggcacctttggaagcgctacccttgagggtgtttcggactactactcccagctgatttacaagaaaatggccaacgggtttgcaaccaccgaggagctggccggcaaagctggagtcctggtgtcccatgaggtaacaaagacattaggtccaaagccctttcagctaccctttaggcctcaggatgatcttctcgcaagggcgctggcacaagggcccaaaaccgtcgatgtcccggcatccctgcccactccgccgcacaataaccaggaagagcttcgcatacaggatcactgcggggatagggacacccccgacagcttcgtgccctcttcttcccccgagagcgtggtgggcgtcgaggtttcaaggtaccccgacctcagcctagttaaagaggaacccccagagcctgtgcctagtccaattatccccattctgccctccacagccggaaaatcctcggagtcaaggcggaacgacataaaaaccgaacccgggaccttgtacttcgcgagcccattcgggcccagcccaaatggaccccgttcaggactcatttctgtggcaataacgctccaccccaccgctgcagagaacatctctagtgttgtcgctgcattctctgacctcctgcacgtgagaattcccaattcttacgaagtttccagcgccccagacgtccctagcatgggcttagtgtcctcgcacagaattaatcccggtttggagtaccgccagcatttgctcctccgcggaccccccccaggttccgccaacccaccccggctcgtatcttcgtaccgtctgaagcaaccgaacgtccccttcccacctacatcaaacggcctatcaggatataaggattcaagccacggcatcgctgaaagtgcagccttgcgccctcagtggtgttgtcactgtaaggtcgtcatcctgggtagcggcgtgagaaaaagtttcaaggacctgacattattaaataaagatagtagggaatcgactaaacgggtcgaaaaagatattgtgttctgttccaataattgttttatattgtactcatccactgcccaagctaaaaactctgagaacaaggagtccatcccttccctgccacagagtcctatgagggagaccccctcaaaggcttttcatcagtactccaacaatatctccacactggacgtgcattgcctgccccaactcccggaaaaggccagcccccccgcttcacccccaattgcgttcccccccgcgttcgaagcggctcaagttgaagcgaaaccggatgaattgaaggttacagtaaagctgaagcctcggcttagagcagtgcacgggggcttcgaggactgccggcctctgaacaaaaagtggagaggcatgaagtggaaaaaatggtctattcacatcgtcattccaaagggaactttcaaaccaccatgtgaagatgagattgacgaatttctgaagaagttggggacatccctcaaaccagatcctgtgcccaaggattaccgcaaatgctgtttttgtcacgaggaaggtgacggtctgaccgacggaccagcacggctcctgaatctcgaccttgatctgtgggtccatctgaactgcgcgttgtggtccacagaggtgtatgaaacacaggcgggcgcgctgattaacgttgagctggcccttaggagaggtctccagatgaagtgtgtgttttgccacaagactggcgccacatctggctgccataggtttcggtgtaccaatatctatcattttacatgtgcaatcaaagcccagtgcatgtttttcaaagataaaactatgctgtgccctatgcacaaacctaaagggatccacgaacaggagctgagctactttgctgtcttccgacgtgtgtatgttcagcgcgatgaggtacgccagattgcatctattgttcagaggggggaacgcgatcacacgttccgggtggggtctctgattttccatacaatcgggcagctgttaccacagcagatgcaggcctttcattctcctaaagctctgtttcccgtgggttatgaggcaagtcgcctgtattggtctacaagatatgcgaaccggcgctgcaggtatctttgcagcatagaggaaaaggacggaagaccagtcttcgttattcgcatcgtggaacagggccatgaagatctggtactgtcggatatctcgcccaagggggtctgggacaaaattctggagcctgtcgcctgtgtccgtaagaagagcgaaatgttgcagctgtttcccgcttacctgaaaggcgaagatttgttcgggctgacagtaagcgccgtggcaaggatcgcagagagcctgcccggagtcgaagcgtgtgaaaactatacttttagatatggcaggaatccattaatggaattaccactagccgtgaatcccaccggttgcgcccggagtgagcctaagatgtccgcacatgttaagagaccacataccctgaattccacctccaccagcaagtccttccaatccacagtgacaggcgagctgaatgccccatatagcaaacagttcgtgcattcaaagagtagccagtatcgaaagatgaagactgagtggaaaagcaatgtgtatctcgctcgctcgcggatacaagggttgggcctgtacgctgcaagagacatcgaaaaacatacaatggtcatcgaatacattggtacaatcattcgcaacgaagtggctaatagaaaggaaaaactttacgagtctcagaataggggcgtgtacatgtttcggatggacaacgaccacgtcatcgacgccaccctcacaggtggacccgcccggtatatcaatcattcgtgtgctcccaattgtgtggccgaggtggtgacgtttgagcgtggccacaagattatcatctcttctagccgccggatacagaaaggggaagagttatgttatgactacaagtttgacttcgaggatgatcagcacaaaatcccctgtcactgcggagctgtcaattgccggaaatggatgaattag

SEQ ID NO: 125258 - DNA, 351 bp, synthetic construct
  misc_feature 1..351: note = Description of Artificial Sequence: Synthetic coding sequence
  source 1..351: mol_type = other DNA
atggtcatcgagtatatcggaacaatcattaggaacgaagtagccaatagaaaagagaagctgtacgaatcccagaacaggggagtctacatgttccgaatggataacgatcacgtgattgatgcgaccctaacgggcggtccagccaggtatatcaaccactcttgcgctccaaattgcgtcgcagaagtggttactttcgagcggggccacaagattatcatctccagtagccgacgcattcaaaagggcgaggaactgtgttatgactacaagttcgattttgaagatgatcagcacaaaatcccttgtcattgtggcgccgtgaactgcagaaagtggatgaattag

SEQ ID NO: 125259 - DNA, 5577 bp, synthetic construct
  misc_feature 1..5577: note = Description of Artificial Sequence: Synthetic coding sequence
  source 1..5577: mol_type = other DNA
atgagcatagtcatcccgctgggcgtggacacagctgaaacctcatatttagagatggccgcaggaagcgagccagagagtgtggaagctagccctgttgtggttgaaaagagcaacagttatcctcaccagctctacacctcctcttcacatcactcacattcttatatcggccttccatatgcggatcacaactacggagcacggcctccccctactccccccgcgtcccctccaccctccgtcctgatcagtaagaacgaggtgggtatttttactactccaaacttcgacgaaacctcgtccgctaccaccataagcacttcagaggatgggagctatgggactgacgtgacccgatgcatatgtggcttcacacacgacgacggctacatgatctgttgtgacaagtgctctgtatggcagcacatcgactgtatgggcattgatcggcagcacattcccgatacttatctgtgcgaacgctgccagcccagaaacctggataaggagcgcgctgtgctgctccagcgccgcaaacgggaaaacatgtctgacggggacacttctgctactgaaagtggggacgaggttccagttgagctgtacaccgcctttcagcacacaccaaccagtatcacgctcactgctagtagggtatcaaaagtgaatgataagaggaggaagaaatctggtgagaaagaacagcatatatctaagtgcaagaaggctttccgggaggggtctaggaagagctccagggtcaaagggtccgcccccgaaatcgatccaagctcggacggcagcaactttggctgggagacaaaaataaaggcctggatggatcggtatgaggaggccaacaataatcagtattcggaaggggtccagcgcgaggcccagagaatcgccctgcgcctcgggaacggcaatgataaaaaggagatgaataagtctgacctcaatacaaataatcttcttttcaagcctcctgttgagagccatatccagaaaaataagaaaatcctgaaatcggcaaaggacctgcctcccgacgcactgatcattgagtatcgggggaaatttatgctccgcgagcagttcgaagccaacgggtatttctttaaaaggccctatccgttcgtgcttttctatagcaaattccatggattggaaatgtgtgtggacgctcgtaccttcggtaacgaagctcgctttattcggcggtcgtgcactccaaatgcagaggttcgacatgaaatccaggatggaactatccatctctacatttattccatccattccatcccgaagggcacggagatcacaatcgcttttgattttgactatggcaattgtaagtacaaggtggactgcgcctgcctgaaggaaaatcctgaatgccccgtgcttaaaaggagtagcgagtctatggaaaacattaacagcggttatgagacccggagaaagaagggtaaaaaggataaagatatttccaaagagaaagatacgcagaaccagaatattacactcgactgcgagggcacaacaaataaaatgaagtctccagagaccaagcagaggaaactctcgcctctaaggctgagtgtatctaacaaccaggaaccagacttcattgacgacatcgaggagaaaactcctatatccaatgaggtggaaatggaaagcgaggaacagatcgccgaaagaaaaagaaaaatgacccgagaggaacgcaagatggaggctattctccaggcgtttgctaggttagaaaagagggagaagagaagagaacaggccttggagaggatcagtacagccaagacggaagttaagactgaatgcaaggacacgcaaatagtcagcgacgccgaagttatacaggaacaagctaaagaggagaacgcatccaaaccgacgccagcaaaggtgaatcggaccaagcagcgaaagtctttcagccgatccaggacccatatcgggcagcagagaaggcggcataggactgtgtctatgtgcagcgacatccaaccgagctctcctgacattgaggtgacttcccagcagaatgacattgagaacactgtgctgactatcgagcctgagactgagacagctctggccgagatcattaccgaaaccgaagtgcccgccctgaacaaatgccccacaaaatatcccaagaccaaaaaacacttagtaaatgagtggctctccgaaaaaaatgaaaagaccggcaagccgtctgatggcttaagtgagcgccctctgcgaattacaacagacccggaggttcttgcaacacaacttaattccctgcctggcctgacctacagcccccacgtgtacagcacaccaaaacactacatccgattcacgtccccgtttctatcggaaaagcgccgccgaaaggagcccactgaaaacattagcggaagctgcaaaaagcggtggctcaagcaggctttagaagaggagaatagtgcgatcttgcacaggttcaattccccatgccaggagaggagtcggagccctgcagttaatggagaaaataaatcaccgcttctgctcaacgactcatgcagcctacccgatctgacaacaccccttaaaaagaggcggttttatcagctgctggatagcgtttacagcgagacctcaacacccactccatccccctatgcaacaccgacacacacggacattaccccaatggatccaagctttgcaaccccccctagaattaagtcggatgatgaaacttgcaggaacggctataaaccaatctactcacccgtgactccagtcacaccaggaacccccggaaataccatgcacttcgagaatatcagcagccctgagagcagccctgagattaagcgcaggacctattcacaggaagggtacgaccggtcttccactatgttaacactgggaccttttcgcaattcaaatctgaccgaattgggcctgcaggagattaaaactatcggctatacctctcccaggtctagaacagaggtaaaccgacaatgtcccggagaaaaagagcccgtctctgatctgcagctcggactggatgcggtcgaacctacggccctccacaaaactcttgagaccccagcccacgatcgggcagagcccaattcacaactcgattcaacccacagcggcagggggaccatgtatagctcttgggtcaaatcccctgaccgcacaggagtcaattttagcgtcaattcaaacctccgcgacttgacaccaagccatcagctggaggtggggggcggcttcaggatctctgagtctaaatgccttatgcaggatgacactagaggaatgttcatggagactaccgtattttgtaccagtgaggatggactggtcagcggctttggcaggacagttaacgacaatctgattgacggcaattgcacaccacaaaatcccccccaaaagaagaaggtatcactattagagtatagaaaacgacagcgagaggcccgcaagtccggaagtaagaccgagaattttcccctcatatcagtatcacctcacgcttccggatcactgagcaacaacggagacggatgtgcatcctccaatgacaatggagagcaggtagaccacaccgcaagtttgcctctccctacccccgcaaccgtgtataatgctacgagtgaagagaccagtaataattgccccgtgaaggacgccaccgcctcggagaagaatgagcccgaggtgcagtggaccgcctctacgtcggttgagcaagttagggagcgcagctatcagagagcgctgttgctttctgatcaccgcaaggataaggacagtgggggggagtccccctgcgtctcctgttctccatcgcacgttcagtccagtcccagctcgcactctaaccacataccacagctgcaagctaaaggtcctgtccccagcttctcggagctgatggaagaccccgacccagagaacccagagcccaccaccacgaatgagtgccctagtccagacaccagtcagaatacctgtaagtccccccccaagatgagtaaaccaggaagccccggcagcgttattcccgctcaggctcacggaaagatctttaccaagccagacccacagtgggactccacagtctccgcatcggaggctgagaatggggtccatctgaaaactgaattacaacaaaagcagctgagcaacaacaatcaggccttgtcaaagaatcatcctccacagacccacgtcaggaacagctctgaacagttgtcccagaaactgcccagcgtcccaacgaagctgcattgtcctcctagcccacaccttgagaaccccccaaagtcttcgacaccccatactcccgttcaacatgggtatctgagccctaagcccccatcacaacagcttggctccccctacaggccccatcatagccagagcccacaagttggaactcctcagagggagccacagcggaatttctacccagccgctcagaacctgcccgctaatacccagcaggctacaagcgggacactgttcacgcaaactccctcagggcagagttcagccacatactcacaattcaaccaacagagtctaaactccacagcgccccccccgcccccgccaccccctccaagttcttcatactatcagaaccagcagccatccgcgaacttccagaattataaccagctcaagggctcactgtcacagcagaccgtatttaccagcggcccaaatcaggctctcccaggcaccacgagccagcagacggtgcccggtcatcacgttactcccggccacttcttgccctctcaaaacccaaccatccaccaccagaccgcagccgccgttgtgccaccaccccctccccctcccccagccccaggcccacatttagtgcagcagcccaattcccaccagcagcactccgtcgcccacgtggtgggtcctgttcacgccgtgactcccggatcccatatccactcgcagactgcaggccatcacctcccaccacctccgccaccacccggcccagcaccccaccatcaccccccacctcacccttcaactggactgcaaggactccaggcccagcatcagcacgtggtcaattccgcaccccctccaccacccccaccaccaccctcctccgtcctggcttctggacaccatacgacctcagcacaggccttgcatcatcctccccatcaaggaccccctttgttcccttccagcgcccatcctacagtgccaccttatcctagccaggccactcaccacacgacactcgggcccggaccccagcatcaaccctctgggacaggtccgcactgtcctcttcccgtcaccgggcctcatttgcaaccccagggccccaatagtatcccaactcctacagcctccgggttctgccctcatcctggcagcgttgcccttccacacggcgtgcagggcccccagcaagcctcacctgtcccaggccagatcccaatccaccgggcccaggtaccaccaacattccagaacaactaccacgggtcaggctggcattag

SEQ ID NO: 125260 - DNA, 5577 bp, synthetic construct
  misc_feature 1..5577: note = Description of Artificial Sequence: Synthetic coding sequence
  source 1..5577: mol_type = other DNA
atgtccatcgttattccccttggcgtagataccgccgaaacctcatatctggagatggctgctggctctgaaccagaaagtgtggaagcatcccctgtcgtggtagaaaaaagcaactcttacccacaccagttatacaccagcagtagtcaccactctcacagctatattggcctgccatacgcggaccacaattacggagcccgtccacctcctacaccacccgcttccccaccacccagcgttctgatatccaagaacgaggtgggcatatttactacaccaaattttgatgagacatcctcggccacaacgatctcaacatccgaggacgggtcatacggcaccgatgtcaccagatgcatttgcggcttcacccatgatgatgggtatatgatatgttgtgacaagtgctccgtgtggcagcatatcgattgtatgggtatcgaccgtcagcatatccctgatacgtacttgtgtgagcgctgtcaacccaggaatctggataaagagcgcgccgtccttctccaacgccgtaagcgcgagaatatgtccgacggcgatacgtccgccaccgagtccggagacgaggtgccggtggagctgtataccgcctttcagcacacccctacttccatcactctgactgcatcaagagttagcaaagtgaacgacaaacggagaaaaaaatccggcgaaaaggaacagcacatttccaagtgtaaaaaggccttccgggaggggagtaggaagtcatcgcgagtcaaaggatccgctcccgagattgatccttcctccgacggatctaattttggttgggaaactaagattaaagcatggatggaccggtacgaagaggccaacaataaccagtatagtgagggcgtgcagcgagaagctcagcggatcgccctacgcttagggaatggaaacgacaaaaaagagatgaacaagtcagacctgaatactaataacttgctgtttaagcctcctgtcgagtcacacatccagaaaaacaagaaaatcttaaagtctgcaaaggacctcccacctgacgcgttgattatcgagtacagaggaaagtttatgctgcgagaacagttcgaggcaaacgggtactttttcaaaagaccgtacccgtttgtgcttttttattcaaaattccatggacttgaaatgtgcgtggacgcacgcacattcggcaacgaagcccggtttattcgtcgttcttgtactcctaatgctgaggtgagacacgagattcaagatggcactatacatctgtatatttattctatccactccatacccaaagggaccgagatcactatagcttttgactttgattacggaaattgcaagtataaagtcgattgcgcatgtcttaaggagaaccctgaatgccccgtgctgaaaaggtcatccgagtccatggaaaacataaactcagggtatgagaccagacgtaagaagggcaaaaaagacaaggatatctccaaggagaaagacacacagaaccagaacatcactctggattgtgagggaaccactaacaagatgaagtccccggagaccaaacagcggaagctctcccccctgaggctctcagtgtccaacaaccaggagccagatttcattgacgacatcgaggaaaaaactcctatttccaacgaggtcgagatggagtctgaggagcagatagccgaacggaagagaaagatgacaagggaggagaggaaaatggaggcaatcctacaggcttttgctaggttggagaaacgagagaaacgcagagagcaagcactggaaagaatctccaccgccaagaccgaagtgaaaactgagtgcaaggatacgcagatcgtgagtgacgctgaggtcatccaggagcaggctaaggaggaaaatgcttcgaaacctacgccagctaaggtcaatagaacaaaacaacgcaagtctttcagccggagtagaacccatatcggccagcaaagaagaaggcatcgaacagtgtctatgtgtagcgacatacagccgtcttcaccagacattgaagtgacgtctcagcagaatgacatagagaacactgtgctcacgattgaaccagagacggagaccgcacttgccgagataatcaccgagacagaagtgcccgcgctgaacaaatgtcctacgaaatatcctaagactaaaaagcacctggtcaatgagtggctgagcgagaagaacgaaaaaaccggcaagccatccgacgggctgtccgagcgcccacttcggattacaacagaccctgaagtattggccacccaactgaattcgctcccaggacttacatactcaccacacgtttattcaacccctaagcattatattaggtttacgtcacctttcttgagcgagaaacgcaggcgtaaagaacccactgaaaacattagcggatcctgtaagaagcgatggttgaagcaggccctcgaggaggaaaacagtgcaattctccatagattcaattcaccatgtcaggagcgatctagatctcccgctgtgaacggcgagaacaagagtcctctactgctaaacgattcctgtagccttcctgatttaacaactcctcttaaaaaaagacgcttttatcagctcctggacagtgtgtattcagagaccagtactcctacgccctccccttacgccactccgacacacactgatatcactcctatggaccctagcttcgccacgcctcctaggatcaagtccgacgatgagacctgtcggaacggatataaaccgatttactcccccgtcaccccggtcactcctggaacacccggcaacactatgcacttcgagaacatctcaagtccagaaagcagtcccgaaataaagcgcagaacttatagccaggagggctatgaccgcagctctactatgctgactctcggtccttttaggaactccaatctgactgagctcggtctgcaggagatcaagaccatagggtatacatccccaagaagccgcacagaggtcaacagacagtgtccgggggaaaaggaaccagtgtcagatctgcagctgggactggatgctgtcgagcccaccgccctgcataaaacattggaaactccagcacacgacagggccgagccaaattcccagctggactccacccactctgggcgaggaactatgtacagcagttgggtcaaatctcccgacagaacgggagtcaattttagcgtgaattctaacctaagagatttgacaccaagtcaccagctggaggtgggcggtggcttcaggattagcgagtctaagtgtcttatgcaggatgatactcgcggcatgttcatggagacaactgtgttctgtaccagcgaagacggactagtctccggctttggtagaaccgtcaacgataatctgatcgatggcaattgcacacctcagaacccaccccaaaagaaaaaggtgtcgctgctggagtacagaaaaaggcagcgtgaggcccggaaaagcggatccaagactgaaaacttcccactgatttccgtttctccccacgcttccggatcactgtcaaacaacggtgacggatgtgcatcaagtaatgataatggggagcaagtagaccacacagcaagtctcccattacctacgccggccacagtgtataacgccacatcagaggaaacttctaacaattgcccggtgaaggacgcaacagcctccgagaagaatgaaccagaggtccagtggacagccagcacatctgtcgaacaggtgagggaacgcagctaccagcgagctctgttgctgagcgatcataggaaggataaggacagtggcggggaaagtccctgcgtcagctgttcaccgagccatgtgcagtcttccccttcatcccactcaaatcacatcccccagcttcaggccaagggacctgttccttccttttctgagttgatggaagaccccgatcctgagaaccccgagcccacaactaccaatgagtgcccttcaccagacacctcacagaatacatgcaaatcaccacccaagatgagtaaaccaggtagcccagggtcagtgattcccgctcaggcccatgggaaaatctttaccaaaccagatccacagtgggactctactgtgtcggcgtcagaagccgagaatggggtccacttaaagactgagctgcagcagaagcagctgtcaaacaataatcaagccctgagtaaaaaccacccaccacagacacacgtgcggaattcctcagagcagctgtcacagaagctcccaagcgttcccacaaaattacactgccctccttcgccacatttagaaaatccaccaaaatcttctaccccccatactcctgttcagcacggctacttatctcccaaaccccccagccagcagctggggagcccctatagaccacaccacagccagagtccacaagtgggaacaccccaaagagaaccacagaggaacttctaccccgcagcccagaatctcccggccaacacccagcaggccacctctggtaccctgttcacgcagacgccatctggccagtcatccgcgacttactcacagttcaatcagcaaagcttaaacagcacagccccacccccaccccctcctccaccaccaagttcaagctattaccaaaaccaacagcctagcgcaaactttcagaattacaaccagcttaagggctcattgagccagcagacagtattcacgtccggcccaaaccaggccctcccaggcacaacatcacagcagacagttcctggacatcatgtgactccaggacacttcctgccctcacagaatcctacaatccaccaccagacagcagcagcggtggttccaccgcctccgcctccgcctcccgccccagggccacatttggttcaacagccaaattcccatcaacagcatagtgtggcacatgtcgtgggcccggtgcatgcggttactcccgggtcccatatacactcacagactgctggccaccacctccccccacctccccctccacccggacctgccccccatcaccatcccccaccccacccaagtacaggcttgcaaggactgcaagcccagcaccaacacgtggtcaactcggccccaccccccccgcccccgcctccgccttcgtctgtgctggcaagcggacatcacacaaccagcgcccaggccctgcaccatcctccgcaccagggtccccccctgttcccctccagcgcccatcccaccgtgcccccctatccctcgcaggctactcatcacactacactcgggcccggcccacagcatcagccttcaggtaccggccctcactgccctcttcccgtgacaggaccccacctccagcctcagggtcctaactcaattcccaccccaacagcgagtggtttttgcccccacccaggcagtgtggcgctgccacacggggtgcaggggccacagcaagcaagtcccgtgccgggccagataccaattcaccgggcccaggtgccccctacctttcagaataactaccatggttccggctggcattag

SEQ ID NO: 125261 - DNA, 5451 bp, synthetic construct
  misc_feature 1..5451: note = Description of Artificial Sequence: Synthetic coding sequence
  source 1..5451: mol_type = other DNA
atgtctattgttataccattgggcgtggacacagccgaaacgtcctacctggaaatggcggcaggatcagaaccagagagtgtcgaggctagccccgtggtagtggaaaagtccaatagttatccgcaccagctgtacacatcttcaagccaccactcacacagctatataggtctaccttatgccgaccacaattacggagctcggcccccacccacgcctcccgcctcccccccgccttcggtgctgatctccaagaatgaggtaggcatctttaccactcccaacttcgatgagacttcatccgccaccaccatcagcacttcagaagatggctcttatgggacagacgtgacccgatgtatctgtgggtttacccacgatgacggctacatgatatgttgcgataaatgctcggtttggcagcatatcgactgtatgggcatcgatagacaacatattcccgatacctatctgtgcgaacgctgtcagcctcgtaatctggacaaggagcgggccgtgctacttcagagacgcaaaagggagaatatgtccgacggggatacaagcgccacagaatctggagatgaagtgcctgtggaactgtacaccgcctttcagcatacgccaacaagcataactctaaccgcgtccagggtctcaaaggttaatgacaagcgacgtaagaagtcaggagaaaaggagcaacatataagtaaatgtaaaaaggccttccgggaaggcagccgaaagtcttccagggtaaagggctctgcccccgaaatagacccctcctcagacggatctaactttggctgggagacaaaaattaaagcctggatggatcgctacgaagaggccaacaataatcagtattctgagggggtacagagggaggcacagcgtatcgccctacgtctgggcaacggcaatgacaaaaaggaaatgaacaagtccgacttgaacacgaataacctgcttttcaaaccacctgtggagagtcatatacaaaaaaataagaagatattgaagtcggccaaggacctccctccagatgcactaattatagagtacagggggaaattcatgctccgcgagcagtttgaagcgaatgggtacttttttaagcgaccctatccattcgtgctgttctatagcaaattccacggtctggagatgtgcgtggacgcccgcacttttggaaatgaagccagatttatccgacggagctgcacccctaacgcagaggttcggcatgagatacaagatggcacaatccacctgtatatctatagcattcatagtattcctaagggcactgagatcactatcgcattcgattttgattatggcaattgcaagtacaaagtcgattgtgcttgcctaaaagagaatccagagtgccccgtgctgaagaggagctccgaaagcatggaaaacatcaatagtggttacgaaacccgccgaaagaaaggaaaaaaagacaaggacatcagcaaagagaaagatactcagaatcaaaacatcaccctggattgtgaggggacaaccaacaagatgaagtcgcctgagaccaaacagcggaaactgagccctctccgactcagcgtgtcaaacaaccaagaacctgactttattgacgacatcgaagaaaaaacacccattagcaatgaagtggagatggaatccgaggagcagattgccgaacgcaagaggaagatgacaagagaagagcggaagatggaggctattctccaggcctttgcccgtctagagaagcgggaaaagcgtcgcgaacaggcactcgagaggatcagtacagccaaaaccgaggtgaagacggagtgcaaggatacgcaaatcgttagcgacgctgaagtcatccaggagcaggcgaaggaggaaaatgccagtaaaccgacccccgccaaggttaataggaccaaacaacgcaaaagcttcagccgcagtcgcacgcacattggacagcagcggcgtagacacaggactgtgagtatgtgctctgatatccagccttccagtcctgatatcgaggtaactagccagcaaaatgatattgagaatactgtcctaaccatcgaacctgagacggaaacagctcttgctgagatcatcaccgagactgaagttcctgcacttaataaatgcccgaccaaataccccaagacgaaaaagcacctcgtcaacgagtggctgtccgagaagaatgagaagactggtaaacctagcgacggcctgagcgagcgccccttgagaatcacaaccgatcccgaagtgcttgcgacgcagctgaactcccttcccgggttgacttacagtcctcacgtgtactccaccccaaaacattatatccggtttaccagcccattcttatctgagaagcggcgtcgaaaggagcccactgaaaatataagtggatcctgcaaaaaacgttggctcaaacaggccctggaagaagaaaatagcgcgattctccaccgctttaacagcccctgccaagagcggtcaagaagccctgcggtaaacggtgaaaacaagtctccattacttctgaacgattcttgttccctgccagacctcaccacgccgcttaaaaaaaggaggttctaccagctgttagatagtgtgtactcagagacatccactcctactccaagtccctatgcaacccccacccatactgatataacgccaatggaccccagcttcgccacgccacctcgaattaagagtgacgacgaaacctgtcgaaatggatataaacctatttattcccccgtgactccagtgacacccgggacacctggaaacactatgcattttgaaaacatctccagccccgagtcatcgcccgagataaaaagaagaacatacagccaagaggggtatgaccgcagttccaccatgctcacactcggacccttcaggaactccaacctgactgagctagggctgcaggaaatcaaaacgattggctacaccagcccaagaagtcggacggaagtcaatcggcaatgccctggagaaaaagaacctgtgtctgacttgcagcttgggctagacgccgtcgaacccactgccctccataagaccctcgagacaccagcacacgaccgggcagagcccaattcacagctagattctacacatagcgggcgaggcacaatgtattcctcttgggtgaagagccctgatagaacaggtgtcaacttttctgttaactcaaaccttcgcgatctcaccccaagccaccagttggaggtaggtggaggctttaggatctccgagtccaagtgtctcatgcaggacgatactcgaggaatgttcatggagactacagtgttttgcaccagcgaggacggtctggtgagcggattcggtcggaccgtgaacgacaatctgatcgacggcaactgcactccccaaaatcctccacagaagaagaaggtgtctctgctggaataccgcaagagacagcgggaggctaggaagtctgggagtaagacagagaatttcccccttatttcagtcagcccccacgcctccggatctttatccaacaacggagatggatgtgcttctagtaacgataatggggagcaggtagaccacaccgcttcgttaccgttgccaacgcctgccacagtatacaacgccacatctgaggagacatcgaacaactgccccgtcaaggatgccacagcctcagagaagaacgagcctgaggtccaatggaccgcatccacttctgtggagcaggtgcgggagcggtcctaccagagggcgctgctacttagcgatcaccgcaaagataaagacagcgaccccgaccctgagaatccagagcctaccacaactaacgagtgtccttcacccgataccagccagaatacttgcaagagcccacctaaaatgtcaaagccagggtctccgggttctgtcattcctgctcaggcacatggtaagatttttaccaagcccgaccctcagtgggacagtacagtctcggcatccgaggcagaaaatggggtgcatttgaagactgagttgcagcaaaaacagctgtcgaacaataatcaagccctctcaaagaatcaccctccgcagacccatgttagaaatagcagtgagcagctctcacagaaactgccatccgttccaacgaagttgcactgtccaccttccccacacctggagaatcccccaaagtctagtactccccatactccagtccagcacgggtacctatcccctaaaccacccagccagcagctcggatccccatatcgtcctcaccattcccagagtccccaagtaggcacgccacagagagaaccgcaacgcaacttctaccctgccgctcagaacttgccagctaatactcaacaagctacctccggcacactattcacacagacaccctccgggcagtccagcgctacatactcacagttcaatcagcagagcctaaatagcaccgccccacccccgcccccgcctcctccccccagctccagttattatcagaaccagcaaccctcggccaactttcaaaactacaatcagttaaagggctccctgtcacagcagacggtttttacgtctggtccaaaccaggcccttcctggcactacctcacagcagaccgttcccggacaccatgtgacccccggccattttctgccgtcccagaatccaaccatacaccaccaaacagcagccgctgtagtgccccccccgccacccccgccgccagccccaggcccacacctagtgcagcagcccaattcgcaccagcaacatagtgtggctcacgttgttggcccagtccatgccgttacgcccggcagccatatccacagccagaccgcggggcaccaccttccgcctcccccgccacccccaggccctgctccacaccaccacccccccccacacccatctactggccttcaggggctgcaggctcagcatcagcacgttgtaaactcggcgccgcccccgcctccccctccacccccttcctccgtgctggcctcaggtcaccacaccacctctgcgcaggcactccatcaccccccccaccaagggccgcccctgttccccagtagcgcacacccaactgtgcccccctacccttcccaggccacccaccacacaactctgggtccgggccctcagcatcagccaagcggaacggggccgcactgtccactgccggtaacaggcccacacctacagccacagggtccgaattccattccaacacctacggcttccggcttctgcccccatcccggcagcgttgccctgccccacggcgtacagggaccacagcaggcaagccctgtccccggacagattccaatccatagagcgcaagtgcctcctacatttcagaacaactatcacggctccggttggcactag

SEQ ID NO: 125262 - DNA, 1770 bp, synthetic construct
  misc_feature 1..1770: note = Description of Artificial Sequence: Synthetic coding sequence
  source 1..1770: mol_type = other DNA
atgcatttcgaaaacatctctagccctgaaagcagtcccgagattaagaggaggacatacagtcaagaggggtatgatcgaagttctaccatgctgaccctgggcccatttaggaattctaatctgactgagcttggccttcaggagatcaagactattgggtatacctctcccagatctaggaccgaagtgaatcgtcagtgtcctggcgagaaggaacctgtgtctgatcttcaactcggactggatgccgtagagcctacagctctgcacaagacccttgagaccccagcccacgacagggccgagccaaatagtcagttggacagcacccactcaggtcggggaacaatgtatagctcctgggtgaagagcccggatcggaccggagtgaacttcagtgttaatagcaacctacgcgacttaacacccagccatcaattagaggttggcggggggttcagaatctccgagagtaaatgcctgatgcaggacgacacacggggaatgtttatggaaacaacggtgttctgcacatcggaggatggcttagtaagcggcttcgggaggactgtaaacgataatctcatcgatgggaattgcacccctcagaacccaccccaaaagaagaaagtgtctctgctggagtatcgcaagagacaacgcgaggcccgcaaatctggctcaaagacggagaactttccacttatctccgtgtctccccatgcaagtggatctctgtcaaataacggtgatggatgcgcaagttcaaacgacaacggtgagcaggtagatcacacagcgtcgctaccacttccaacccccgccaccgtctacaatgctacaagcgaagaaaccagtaacaactgccccgtcaaagatgccaccgcgtcagagaaaaacgagccagaggtccaatggaccgccagcacctctgtggaacaggtgagggaaaggtcctaccaaagagctctgctgctgagtgaccatcgcaaagataaagatagcggaggagagtccccttgcgtatcctgctcgccctctcacgtgcagtccagcccctcttcacatagcaatcacatccctcagctgcaagcgaaaggacccgtgccatctttctctgagctcatggaggacccggacccagagaacccagagccgacaactacaaacgagtgcccaagcccggataccagtcaaaacacatgtaagagtcctccaaaaatgtccaagcctggaagtcctgggagcgtaataccagcccaggcccacggcaaaattttcacaaagcctgatccccaatgggacagtacagtatccgcgtccgaggccgagaacggtgtacacctgaagactgagctgcagcagaaacagctctccaacaacaaccaagctctgagcaagaatcatccaccacagacccatgtacggaacagtagtgagcagctcagccagaaactcccttccgttcccacgaagcttcactgccctccatcacctcacctggagaatccccccaagtccagcacccctcataccccagtgcagcatggctatttgtcccccaagccccccagtcagcaactgggaagcccttatcggccacatcactcacaaagtccacaggtagggacgcctcagcgagagccacagagaaatttctaccctgcggcccagaacctcccagcaaatacccaacaggccacctctggcacgttgtttactcaaacccctagtgggcagtcgagcgctacatatactcagcgctag

SEQ ID NO: 125263 - DNA, 5337 bp, synthetic construct
  misc_feature 1..5337: note = Description of Artificial Sequence: Synthetic coding sequence
  source 1..5337: mol_type = other DNA
atgtccatcgttattcctctgggcgtcgacactgccgaaactagctatctggaaatggctgctggaagcgagcccgagagtgttgaggccagtcctgtcgtagtcgagaagagcaacagctatccccatcagctctatacaagtagcagtcatcactcacacagctatatcgggctgccttacgcggatcacaactacggcgcccggccacctcccacgccgcctgcgagcccacctccctccgtgcttatttccaagaacgaggttgggatttttactacacctaactttgacgagacaagttctgctaccacaatctctacttcggaggacggaagttatggtacagatgtgacacggtgcatttgtgggttcacccacgatgacggttacatgatctgttgtgacaagtgcagtgtgtggcaacacatcgactgtatgggaattgacaggcaacatatccctgatacctacttatgcgagcgttgccagccacgcaacctggacaaggagcgggccgtgttgctacaacgtcggaaaagagaaaacatgagcgatggcgatacatccgcgactgagagtggggatgaggtgcccgtggagctgtacacggctttccagcacactcctacttccatcacactcaccgcctctcgagtcagtaaggtgaacgacaaacggagaaaaaaatctggagaaaaggagcagcatatcagtaaatgcaagaaggctttcagggaggggtctaggaagagttctagagtgaagggcagtgcccccgagatcgatccatcttccgatggttctaactttggctgggagacaaaaattaaggcctggatggacagatacgaagaagctaacaacaaccagtactccgagggcgttcagcgggaagcccaacggatcgccctgcgactgggtaatggaaacgataaaaaagaaatgaataagagtgacctgaataccaataacctgctgtttaaacctcccgtcgaatctcacatacagaaaaataaaaagatcctgaagagcgccaaggacttgccccccgatgcattaatcattgaatatcgaggaaagtttatgctgagagagcagttcgaagctaatgggtacttttttaaaagaccttatccctttgttcttttttactccaagtttcacgggctcgagatgtgtgttgacgctcgcactttcggtaatgaggctcgctttatccgcaggagttgcacccctaacgcggaggtgcgccacgaaattcaagatggtactatccacctctatatttactcaatacactcaatcccaaagggtaccgagatcacaatcgcctttgactttgattacggcaattgtaagtataaggtcgattgcgcctgtctgaaagagaatcctgaatgcccggtccttaagcgcagcagcgagtctatggagaatattaactctgggtacgagacaagacgtaagaagggaaagaagacccgcgaagagagaaaaatggaagcaatcctacaggcgttcgcccgcttggagaaaagagagaaacgaagggaacaggcgctcgagagaatatccactgccaaaacggaggtgaaaacagagtgcaaagatacccaaatcgtgagtgatgcagaggtcatccaggaacaggccaaagaagagaatgcgtccaaaccaactccagcaaaggtaaacaggacgaaacagaggaagtcattctcacggagcagaacccatattggacagcagcgacggagacataggacagtttcaatgtgcagcgatatccagccctcttccccagatattgaagtcacctctcagcagaacgatatcgagaacactgttctgacaatagaacccgaaacagaaaccgctctggcagaaatcattacagagaccgaagttcctgcactgaacaagtgtcctacaaaataccctaagacaaagaaacatctggtgaacgaatggctctctgagaaaaacgaaaaaaccggcaaaccatccgacggcctctcggagcgcccgctgcgcataaccacagatccagaagtgctggccacacagctgaacagtctgcccggcttgacttacagcccgcatgtgtactcgacacccaagcactatattcggtttacttctccattcctctctgaaaaacgaaggcgcaaagaacctactgagaacatttcaggcagctgtaagaaaagatggcttaagcaggcccttgaagaagagaactcggccattctgcatagattcaactccccgtgtcaagaacgctcaaggtccccagccgtgaatggcgaaaataagtcccctctgctgctgaacgattcatgcagcctccctgatctgaccacacctctgaaaaaaagaagattttaccagctgttggattctgtttatagcgagaccagcaccccaaccccatcaccttacgccaccccaacacatacagacatcacgcccatggacccatcattcgcaactcccccacgcattaagtctgatgatgagacctgcagaaatggctataagccgatttatagcccagtgactcccgtcacgccaggaacgcctggaaataccatgcactttgaaaacatcagtagccctgaatctagtcctgaaatcaaacgccgcacctacagccaggagggatacgatcgctcaagcaccatgctcaccttgggtccatttcggaactctaatcttacagaactcgggctccaagagatcaaaacaattggatacaccagtccccggtccagaacagaggttaaccggcaatgtccaggggaaaaggaacccgttagtgacctgcagctgggcctggacgctgttgaaccgactgctctgcacaagacactcgagactccagctcacgatcgggcggagcccaacagccagctagattccacacactccggtcggggcacaatgtacagctcctgggtaaagtctcccgaccgcacaggtgtcaatttctccgtgaattcgaaccttcgcgatctcacaccctcccatcaattggaggtgggcgggggtttccgcatcagcgagagcaaatgcctaatgcaggatgatacacgcgggatgtttatggaaacgacagtgttttgcacgtccgaagatggattagtgtcaggctttggaagaaccgtgaatgacaatcttatagatggcaactgtacccctcagaatccaccccagaagaaaaaagtgagcctcctggagtaccgtaagcgacagcgggaggcaaggaagtcaggctctaagactgagaattttcccctgattagcgtctcaccccacgcttcagggtctctgagtaataacggcgacggctgcgcaagctcaaacgataatggtgaacaggtagatcacactgctagcctgccattgccgactcctgctacggtgtacaacgccacatcagaggaaactagtaataactgcccagtgaaggatgccaccgcatctgagaagaatgaaccagaagtgcaatggactgccagcacatctgtagagcaagtcagagagagatcttaccagagagctctgctgctcagcgaccatcggaaagataaagactcagggggagagagcccgtgcgtctcctgctcgcctagccatgtgcagagcagcccatcctctcactccaatcatataccccaactgcaggccaagggtcccgtgccaagcttctccgaacttatggaggaccctgatcctgagaaccccgaacccacgactacgaacgaatgccctagcccagacacatctcagaacacatgtaaatcccctccaaagatgagtaagccagggtccccagggtcggttattcctgcccaggcacacggaaaaatattcacaaagcccgatcctcagtgggatagtaccgtgtccgcaagcgaggctgaaaatggggtccacctcaaaacagaactccagcagaaacaacttagcaataataatcaagcgttatccaagaatcatccgccccaaacacatgtgcggaactctagtgagcagctcagccagaaattacctagtgttccaactaaactacactgcccgccgagcccacacctggagaacccgcccaagtccagtacgccccatactcccgtacaacacggctacctaagtcccaaaccccctagtcaacaattgggttctccatatcgcccacaccactctcagtccccacaggtcggcactccacaaagggaacctcagaggaatttctaccctgccgcccagaacctgccagccaatacccagcaagcaacaagtggaactctgttcactcagaccccctctggccagtctagcgccacatatagtcaattcaatcaacaaagccttaattcgacggccccacccccaccccccccaccgccaccaagcagcagctactaccagaaccagcagccctcagcaaactttcagaactataaccagcttaagggatccctgtcacagcagacagtgtttacatcaggacctaaccaggccctgccaggtaccacctcacagcagaccgtgcctggacaccatgtcacacctggccattttttgcccagccagaatcccaccatacatcatcaaaccgcggccgccgtcgtcccgcctccacctccgcccccccctgccccaggtccacatctcgtccaacagcccaactcccatcagcagcactccgtggcacatgttgtcggtcccgttcacgccgtgacaccaggtagccatatccactcccaaaccgcaggtcaccaccttcccccccccccaccccctcccgggccggctcctcaccatcatcctcctccacacccttctacggggctacagggcctgcaggcacaacaccagcacgtggttaacagcgctccgccgccaccaccccccccaccaccatcatcggtgttggcatctggtcaccacacgacaagcgcgcaggccctccaccatcccccgcaccagggccctcctctgttccctagctcagcacacccaaccgtaccaccctatccatcccaggcaacacatcacacgactctggggcctggcccgcagcaccagccaagcggcacaggaccgcactgcccattacctgttaccggacctcatctgcagccacagggacccaatagcatccctactcctactgcctcgggcttttgcccgcaccctggttcggttgccctcccacacggagtgcagggtccccagcaagcatcccccgtcccagggcagatcccaattcatcgggcccaggtgccgcctacttttcaaaacaactatcacggaagtggttggcattag

SEQ ID NO: 125264 - DNA, 4962 bp, synthetic construct
  misc_feature 1..4962: note = Description of Artificial Sequence: Synthetic coding sequence
  source 1..4962: mol_type = other DNA
atgtctatcgttataccactgggggtggacaccgcagagaccagttatctcgagatggcagcggggagcgaacctgaatcagttgaagccagccctgtcgtggtggagaagagcaattcttacccacaccagctttataccagcagttctcaccatagccacagttacatcgggctgccatatgctgatcacaattacggtgcgaggccacctcctacaccgcccgcatccccccctccttcggttcttataagtaagaatgaggtcggaatcttcacaaccccaaactttgacgaaacctcctccgccacaacaattagcacatcggaggatggtagctatggtacggacgtcacacgctgtatctgcgggtttacccatgacgatggttatatgatttgttgcgataagtgcagcgtgtggcagcatatcgattgcatggggattgataggcagcatattccagatacctacttatgtgaacgctgccagccccgaaatctggacaaagagcgcgctgtcctcctccagcggcgaaagcgggagaacatgtccgatggggacacctcggccaccgagtcaggggatgaggtgcctgtggagttgtatactgcatttcagcacacccccactagcatcactctgacagcttcaagggtatctaaagtgaacgataaaagacggaaaaaatctggtgaaaaagagcagcacatcagcaagtgtaagaaagctttcagagaaggctcgaggaaaagtagccgagtgaaaggttccgctcctgaaatcgatccctcaagtgacgggagtaatttcggctgggagactaaaataaaggcttggatggatcggtacgaggaagcaaacaataaccagtacagtgagggagtgcagcgggaagctcagcggatcgccctccgactaggtaacggcaacgacaagaaggaaatgaataagtccgacctcaacactaataatctgttgttcaaacctcccgtcgagagtcacatccaaaagaataagaagatcctaaagagcgctaaggatcttccacctgatgctcttattattgaataccgaggcaaatttatgctgagggaacaattcgaggccaacggatatttcttcaagaggccatacccgttcgtgttattctattcaaaattccacggattggagatgtgcgtcgatgcccggaccttcggcaacgaagcacgatttatccgccgtagctgtacccccaacgccgaagtgcggcatgaaatacaggatgggactattcacttgtacatctatagtattcactcaatccccaaagggaccgaaatcacgatagcctttgattttgactatggcaactgcaaatacaaggtagactgcgcctgtctgaaagagaaccccgagtgccctgtcctgaagagatcatctgagtccatggaaaacataaattcaggttacgaaacccgcaggaagaagggaaagaaggacaaggacattagcaaggaaaaggatacacagaatcaaaatatcacactggactgtgaaggaactacaaataaaatgaaatctccggagactaaacagcgcaagctttcacctctcagactctccgtgagtaataaccaggagcccgacttcattgacgacatcgaggagaaaacacccatctcaaacgaggtggagatggagtccgaggaacagatagccgagcggaaaaggaaaatgacgcgtgaagagaggaaaatggaagctatacttcaggccttcgcgcgactcgagaagagagaaaagcggcgggaacaggccctggagcggatcagcactgctaagaccgaggtaaagaccgagtgtaaggacacacaaattgtctctgacgctgaggtcattcaggagcaggctaaagaggaaaacgcatctaagccaacccccgcaaaagtcaaccggacaaagcagaggaaaagcttctctagaagcaggacccacatcggccagcagcgtaggcgccatcggacagtttccatgtgctctgacattcaaccaagttctccagacatagaagttaccagtcagcagaacgatatagagaacaccgtgctgaccattgagccggagacagagaccgccctggcagagattataactgaaaccgaggttcctgccctcaataaatgccccactaaatatccaaagacaaagaaacacctcgtcaatgaatggctctccgaaaagaatgagaaaactggaaagccctctgatggactgagtgagaggccactcagaattactacagacccagaagttttggctacacaactaaattctctgcctgggctcacctactccccccacgtgtactccacccctaagcattacatcaggttcactagtccattcctttctgagaagagaaggagaaaggaacccaccgaaaacatttcaggctcttgtaagaaaaggtggcttaagcaggcccttgaagaagagaactcagccattctgcacagatttaattctccatgccaagaacgatctcgcagccccgcggtcaatggtgagaacaagtcccccctgttgctgaacgattcctgcagtttacccgacctgaccacaccactgaaaaaacgacggttttaccagctgcttgactccgtttactcggaaacctccacgcccactccaagcccttatgccacaccaactcatacggatattacacccatggatccgtccttcgcgacccccccacgaattaagtccgatgatgagacatgtcggaacgggtataaacccatctactcgccagttacccccgttacccctgggacacctgggaatacaatgcacttcgaaaacatctcatccccggagtcctcacccgagatcaaacgccggacgtacagccaagagggatacgacaggagctcaaccatgctgaccctggggccttttagaaacagcaacctcaccgaactgggtttgcaggagattaaaaccattggatatacttcgcccaggtccaggaccgaagtgaacagacagtgccccggagaaaaagagccagtcagtgacctccaattgggactggatgcagtcgagccaacggccctccacaagacgctggagacgcctgctcatgatcgagctgagccaaactcacagctggatagcacacattctgggagaggtactatgtactcctcctgggttaaaagcccagatagaacaggtgtgaactttagcgtcaattctaacctccgcgatttgactccctctcatcagctggaggtaggcggaggtttccgcatttctgagtcaaaatgcctgatgcaggatgacacgcgcggcatgttcatggagacaactgtgttttgcacaagtgaggacgggttggtctctggatttggaaggacagtgaatgataatttgatagacgggaattgcacgccacagaatcccccccagaaaaaaaaagtgtcactgctggagtatcgcaaacggcagcgagaggcccgcaagtctggttccaagaccgagaactttcccctgatcagcgtgtcacctcatgcatctggtagtctgtctaataatggagatgggtgtgcaagctccaatgataacggagaacaggtggatcacacagcatctctgccactaccgaccccagccacagtctataacgccacatctgaggagacctcaaacaattgcccagtgaaggacgctactgcttccgaaaaaaatgaacccgaggtgcagtggactgcttcaacaagcgtcgagcaggttcgagagcgcagctatcagcgggccctcctattgtccgatcaccgcaaggacaaagatagtggcggagagtccccatgcgtcagctgctcgccttctcatgtgcagagttcaccttcatcgcattctaaccacataccacagcttcaggcaaaggggcccgtcccctcattctcagaattgatggaggaccccgatccagagaaccctgagccaaccacaactaatgagtgcccctctcctgacacgagccagaacacatgtaagtccccccccaaaatgtctaaacctggctcccccggcagcgtcatccctgctcaagcacatggtaagatctttacaaaacctgatccccaatgggactccacagtctccgctagcgaggctgagaacggcgtccacttgaagaccgaattgcagcagaaacaactgagcaacaataaccaggccttgagcaaaaatcacccgccacagacccacgtacgaaattcctctgaacagctcagccagaaactgccttctgtgccaacaaaactccactgtcccccttcaccccatctcgagaatccccccaagtcctccacccctcatactcccgtccaacacggttacctctcgccgaagccgccctctcagcagctgggatcgccctatagacctcatcattctcagtcccctcaggtcggaacccctcaacgagaaccacagagaaatttctatccagctgcccagaacctccctgtgttttggctcctgggcataatccctcaccaacttaagccgtacacgactcaccttatcaaagacctgcatttcttcttgagggttctaatccagttgtatcaccggataccacataagctgcacataatacccctgtgggatagagacccttcaacaagtctactggaacagggtcacattgtgcactacttgtcccaagtcctgatctcctcaccaaaggaccagactgtgttccagcatctccttctgcagggttctgtgttgatcttggcactgtggccctgccatatgggctttaaggacttgagcaggcacctccagtgcctggaccgttttcagttcactgagcacaggtgtcaccagcacttcaaaacaataaccatggggcaaggcggcatcaaaatggacagcaaaaatatttttttgaacgtgctctag

SEQ ID NO: 125265 - DNA, 378 bp, synthetic construct
  misc_feature 1..378: note = Description of Artificial Sequence: Synthetic coding sequence
  source 1..378: mol_type = other DNA
tgaggttccttgtccaataatggcgacggttgcgcctcaagcaacgacaacggtgagcaggtcgaccacaccgccagcttaccattgccgactcctgcaaccgtttataacgctacttctgaggaaacctcaaacaattgcccagtcaaggacgccactgcttccgaaaaaaatgagcccgaggtccagtggaccgcctccacttccgttgagcaggtgagggagcggtcttatcaacgcgccctcctgctctccgaccatcgtaaagacaaagattcagatcctgatcctgaaaatcccgagccaacaacaaccaacgaatgtccttccccggacacttctcagaacacgtgtaaaagcccacccaaaatgtcttag

SEQ ID NO: 125266 - DNA, 216 bp, synthetic construct
  misc_feature 1..216: note = Description of Artificial Sequence: Synthetic coding sequence
  source 1..216: mol_type = other DNA
atgagcattgtcatcccgctgggcgtggacacagcagaaacgtcttatctggaaatggcagcaggatccgagcccgagtccgtcgaggcatcccccgtcgtggtggagaagtccaattcctatccccatcaactctatacaagctccagccaccactcccatagttacattggattaccctacgcagaccataactacggggcacgacctccctag

SEQ ID NO: 125267 - DNA, 1830 bp, synthetic construct
  misc_feature 1..1830: note = Description of Artificial Sequence: Synthetic coding sequence
  source 1..1830: mol_type = other DNA
atgtccatcgtgatccctctaggtgtggacactgctgaaacctcctacttggagatggctgcaggaagtgaaccagaatccgtggaggcatcgccggtcgtggtggagaagagcaacagttatccccatcagctgtacactagttcttcccatcactctcattcatacatcgggttgccatatgctgaccataactatggtgcaagacctcctcccaccccaccagcatcccctcctccgagcgtgctgatcagcaaaaacgaggtgggaatcttcacgaccccaaacttcgatgaaacatcctctgctacaacaatttcaacttctgaagatggcagctacgggacagacgtgacccggtgcatttgcgggttcacacatgatgacggctacatgatttgctgcgataagtgctctgtgtggcaacacatagattgcatgggaatcgatagacagcatatccccgacacctacctttgtgagagatgtcagcctcgcaaccttgacaaggaacgcgccgtattgctgcagaggagaaaacgagaaaacatgtcagatggcgataccagtgctaccgagagtggcgacgaggtgccagtggaactttacacagcctttcagcacacgccaactagcataactctgactgcttctcgcgtctccaaggtgaacgacaaacgccggaagaagtctggagagaaagagcaacacatcagcaagtgcaagaaggcctttagggaaggcagtaggaagtcatcaagggtcaagggaagcgcaccagagattgacccaagctctgatggtagcaactttggctgggagactaagatcaaggcctggatggatcggtacgaggaggcaaacaataatcaatattcagagggagtgcagagggaggcccaacgcattgccctgcgccttggaaatggaaatgataaaaaggagatgaacaaaagcgatctcaatactaacaacctgttgttcaaaccacctgtagagtcacacattcaaaaaaacaaaaaaatcctgaagtccgccaaagatctacctcctgatgccctgataatcgagtaccgcggcaaatttatgctccgggaacaattcgaggctaatggatatttttttaaacggccctacccgtttgttttattctactccaagttccacggacttgaaatgtgtgtggatgcaagaaccttcggtaacgaggcaaggttcataagaagatcttgtacgccaaacgcagaagtgagacatgaaattcaggacgggactattcacttatatatctacagtatccatagcatcccaaagggcactgagatcaccatcgctttcgactttgactatggtaattgcaaatacaaggtggactgcgcctgtctgaaggaaaaccctgagtgtcctgtgttaaaacgaagctccgaaagcatggagaatatcaacagtggctacgagacccgccgcaagaaaggtaagaaagacaaagatatttcaaaagaaaaagatacccagaaccagaacataaccttggactgtgaagggactaccaacaagatgaaaagccctgagacaaaacagagaaagctgagcccactgagactgtctgtctctaacaatcaagaacctgacttcatcgatgatatcgaagagaaaaccccaatatctaatgaggtggagatggaatccgaggagcaaattgctgagcgcaagagaaagatggtgtcttgggaggctagcagtctcgggctcgtgacggccgctctccacatggtgatcgtggccgccttcacttgggctttcaccctcttctttgaggtgtctgagtag

SEQ ID NO: 125268 - DNA, 693 bp, synthetic construct
  misc_feature 1..693: note = Description of Artificial Sequence: Synthetic coding sequence
  source 1..693: mol_type = other DNA
atgagtattgttatccctttgggagtagatactgctgagacctcctatctcgagatggcagccgggtcggagccggaatccgtagaagcctcacccgtggtcgttgaaaaaagcaacagttacccacaccagctgtacacatcctcgagccaccactcccactcctacatcggccttccttatgccgaccacaattacggcgctaggcccccccctactcccccagcttcacccccccctagtgtgctgatttctaagaacgaggttgggattttcacgaccccaaattttgacgagaccagttccgctactaccattagcacttctgaggacggctcctacggcacagatgtgactcgttgtatctgtggattcactcatgacgatggatacatgatttgctgtgacaagtgcagcgtgtggcagcacattgattgcatgggaattgatcgtcagcatatacctgatacctacctgtgtgaaaggtgccagccccggaatctggataaggaaagggccgtgttgctgcagcgcaggaaacgggaaaatatgtctgatggcgacacaagcgctacggaaagcggcgacgaagtgcctgttgagttgtatacggccttccaacatacaccaaccagcatcacgctcactgctagtagagtgagcaaggtgaatgacaagagacggaagaaatag

SEQ ID NO: 125269 - DNA, 1362 bp, synthetic construct
  misc_feature 1..1362: note = Description of Artificial Sequence: Synthetic coding sequence
  source 1..1362: mol_type = other DNA
atggtcctggtgctgtccgacacgtctgccagccctccaccctcagtactgatttctaagaacgaggtcggtattttcaccactccaaattttgatgagacatcatccgcgaccactattagcacatccgaagatgggtcatacggcaccgacgtcacgcggtgtatctgcgggtttactcatgacgacggctacatgatttgctgcgacaaatgttctgtgtggcaacacatcgattgcatggggatcgaccggcagcatatacccgacacatatctgtgtgagaggtgtcagcctaggaatctcgataaggaaagggctgtccttctacagagaagaaaacgcgagaacatgagcgatggggacacctccgcgaccgaaagcggcgacgaggtgccggtcgagctgtacaccgcattccagcatacccctacctccatcacactcacagcaagccgcgtgtcaaaagtgaacgacaagaggaggaagaagtctggggagaaagagcaacacatttccaagtgcaagaaggcttttcgggagggatcgcggaagagtagtcgggtgaaaggcagcgctcctgaaatagatcccagtagtgatggctcgaatttcggctgggagaccaagatcaaggcctggatggaccgctacgaagaagcaaataacaatcagtattccgagggggttcagagagaggcgcagaggatcgccctgcgcttgggaaacggcaacgataagaaggaaatgaataagagcgacctgaatactaataaccttctgttcaaaccccctgttgagagccatatacagaagaacaagaaaatcctcaagtccgccaaggacttaccacccgacgcgctgatcatcgaatacaggggaaagtttatgctgcgagaacagttcgaggctaacgggtacttctttaagaggccgtaccctttcgttcttttctacagcaaattccatgggcttgaaatgtgcgtagatgctcggacgtttggaaacgaagcacgttttataaggcgaagttgtacccctaacgccgaggtgcgacacgaaattcaagatggcaccatacacctgtacatatattcaatacacagcattccaaaagggactgagatcaccattgccttcgattttgactatggtaactgtaagtacaaggtggattgtgcttgcttaaaagaaaaccccgagtgccccgtgctcaaacgaagttccgagagcatggagaacattaacagcggctatgagacgcgccgtaaaaaagggaagaagactaagattttccagaagaagaaaatccacaagatccgtatcctgctgtggatcgtgaaagagcgtccaaccaagtag

SEQ ID NO: 125270 - DNA, 969 bp, synthetic construct
  misc_feature 1..969: note = Description of Artificial Sequence: Synthetic coding sequence
  source 1..969: mol_type = other DNA
atgccagtgactgtcactcggacaaccatcacgactaccaccacctcatcctccggccttggctctccaatgatcgttggctccccaagggcactgactcagccactgggcctattgaggctgctgcaactcgtctccacctgcgtcgccttctcattggtcgcgagtgtcggcgcctggacaggctccatgggaaactggagcatgttcacctggtgtttctgcttctccgtgacactgatcattctgattgtcgagctttgcggactccaggcccggttcccccttagttggagaaatttccccattactttcgcatgctatgcagccctgttctgcttatccgcctcaatcatttatcctacaacctacgttcaatttctgtctcacggacgctccagagatcatgccattgctgctacatttttctcctgtatcgcgtgcgttgcttatgcaaccgaagtagcctggacccgagcccgccccggcgaaattacgggctacatggccacagtccccggtctgctcaaggtcctggagacttttgtggcttgcataattttcgcctttatcagcgatcctaacctctatcagcaccagcccgctctggagtggtgtgttgccgtctacgctatatgttttatactggcagccatagctattctgttgaacctcggcgaatgcactaatgttctgcccattcccttcccgagctttctcagcggtctggcccttctgtcagtcctcttgtatgcaacagctctcgttctgtggccactgtatcagttcgatgaaaagtacggcgggcagccccgccggtcccgtgatgtgtcgtgtagccgatctcacgcttattacgtttgtgcttgggataggcggttggcagtggctatcctcacagcgataaatttgctggcctatgttgctgatctggtgcatagcgcccatcttgtgttcgttaaggtatag

SEQ ID NO: 125271 - DNA, 969 bp, synthetic construct
  misc_feature 1..969: note = Description of Artificial Sequence: Synthetic coding sequence
  source 1..969: mol_type = other DNA
atgccggtaactgttacccgaacaaccataaccaccaccaccacctcttcctctggactaggtagtcccatgatcgtgggtagcccccgcgctctgacccaacctctgggattgctgagattactacagttagtctctacttgtgtcgctttctcacttgtagcgagcgtaggagcttggactggcagcatgggtaactggtccatgttcacttggtgtttttgtttctctgtgaccctgattatcctgatagtcgagctatgcgggctgcaggcccgatttccgttgtcctggcggaattttcctatcactttcgcttgctatgccgcacttttctgtctcagcgcatcaattatttaccctacaacctacgtgcagttcctgagtcatgggagaagtagagatcacgccatcgccgcaacttttttttcctgcatagcctgtgtcgcttacgctaccgaagtggcctggacccgcgcccgcccgggtgaaataaccgggtacatggccaccgttccggggctccttaaggttctggagaccttcgtggcttgcattatatttgctttcatctcagatcctaatctgtaccagcatcagcctgccttggaatggtgtgtggccgtttatgcaatctgcttcatcctagctgcaatcgctatcctcctcaacctaggggagtgcactaacgttctgccgatcccctttccttctttcctgagcggtctggctttgctatctgtgctcctgtacgcaaccgctctcgttttatggccactctaccagttcgacgaaaagtatggagggcagcccaggcgaagccgcgacgtgagctgctcaaggtcccacgcatactacgtgtgtgcatgggatcgacgcttggcggtcgcaattctgaccgcaatcaatctgcttgcttatgtagctgatttggtgcactctgctcatctcgtcttcgtgaaggtgtag

SEQ ID NO: 125272 - DNA, 969 bp, synthetic construct
  misc_feature 1..969: note = Description of Artificial Sequence: Synthetic coding sequence
  source 1..969: mol_type = other DNA
atgcctgtaaccgttacaagaacaactataactacaaccacaaccagttcgagcggacttgggtccccgatgattgtgggcagcccgagagctctcacacagcccctggggcttctgaggctgctacagctggtgtctacctgtgtagctttttctctggtcgcaagtgtcggcgcctggaccgggagcatgggtaattggagcatgttcacgtggtgtttctgctttagcgttaccttgattatactgatcgttgagctttgcggactacaggcgcgctttccgttatcatggcgcaattttccaattaccttcgcctgttacgccgcccttttctgcttatcagcctccattatctaccccacaacttacgtgcagtttttaagccacggccggtccagagatcatgccattgctgcgacttttttttcctgcattgcatgtgtcgcttacgcgaccgaggtggcttggacaagagcgagacccggtgaaatcaccggctacatggctacggttccgggccttttgaaagtcctggagacctttgttgcctgtataatctttgcatttatttccgatcccaacctctaccagcatcagccagcacttgagtggtgtgtggctgtgtatgccatttgtttcattcttgccgcgatagcgattctactgaacctaggcgagtgcactaacgtccttccaattccattccccagttttttgagtggcttggcgctgctctccgtgcttctttatgcaaccgcactcgttttgtggcctttgtatcagttcgacgagaagtatggggggcagccgcgccgaagcagggatgtgagctgcagccgctcccacgcgtattatgtgtgcgcatgggaccgcaggcttgccgtagctattcttaccgccattaacctcctggcctacgtggcagacctggtgcactccgcccatctggtgtttgtgaaagtttag

SEQ ID NO: 125273 - DNA, 969 bp, synthetic construct
  misc_feature 1..969: note = Description of Artificial Sequence: Synthetic coding sequence
  source 1..969: mol_type = other DNA
atgcccgtcactgttacccgcacaacaatcaccaccacgaccacgtcctcaagtgggctcggctctcctatgatcgtgggttcacctagagccctcacccagccacttggcctcctgagactgttacagttagttagcacctgcgtggccttctctctcgttgcaagcgtcggcgcgtggacagggtctatgggtaattggtccatgtttacttggtgcttttgtttcagcgtcactctcattatcctaattgttgaattgtgcggcttgcaagcgcgatttcccctcagctggagaaactttccgattaccttcgcttgttacgccgctctattttgtctctcagcatccatcatttacccgacaacttatgtgcagttcctctcccatggaagaagcagagatcacgccatcgcggccactttcttctcgtgtatagcctgtgttgcctacgccactgaagtcgcctggactcgggcacgccctggtgagatcacaggctacatggctaccgtacccggactcctgaaagtcctggagacctttgttgcgtgcattatctttgccttcatcagcgatcctaatctgtaccaacaccaaccagccctggagtggtgcgtggccgtgtacgcaatctgctttatactagccgccattgctattctcttgaatctaggggaatgcacaaacgtgctccccataccctttccttcatttctctcaggtctggctctactctctgtgctgctgtatgcaacagcactggtgctgtggcccctgtaccagttcgacgagaaatacggaggccagccacgccgttcaagagacgtgtcctgcagtaggagtcacgcttactacgtttgcgcgtgggaccgcaggctcgccgtggccattctcacagctattaacctcctcgcatacgtggccgatcttgtacactccgcccaccttgtctttgtgaaggtgtag

SEQ ID NO: 125274 - DNA, 969 bp, synthetic construct
  misc_feature 1..969: note = Description of Artificial Sequence: Synthetic coding sequence
  source 1..969: mol_type = other DNA
atgcctgtaacggtgactagaacgactattacgaccacaacaacatcaagctctggacttggatctccgatgatcgtaggttccccacgcgccctcacacagcccttgggcctgttgagactactgcaacttgtgtcaacgtgcgtcgcattctcactggttgcgtccgtcggagcctggacgggatccatgggaaattggtccatgttcacctggtgcttttgcttctcggttaccctgatcattcttatcgttgagttgtgtggactgcaggccagattccccctgtcttggagaaattttccgatcacattcgcttgctacgcagctcttttttgtctatctgctagcattatatatcccaccacttacgtgcagtttcttagccatggaagatcacgtgatcacgcaatagccgccaccttcttttcctgtatcgcatgtgttgcttatgcaacggaggtagcgtggacccgtgcaaggccaggtgaaatcactggatatatggccacagtgcctggtctcttaaaagtgcttgaaactttcgtggcatgtattattttcgcatttatatcggaccccaatctttatcagcaccagcctgccctcgaatggtgcgtcgccgtgtatgctatatgcttcatcttggccgccatcgccatccttctgaatctgggagagtgtacaaacgttcttccgatcccctttccatcattccttagcgggctggctctgctatccgttctgctgtatgcaactgcgctagtcctctggcctctctaccagtttgacgagaaatacggcggtcagcccaggagatctcgagacgtcagctgcagtcggtcgcacgcgtattatgtatgtgcctgggatcgacgtctggctgtggcgatactgacagcgattaacctacttgcgtacgtcgccgatttggtgcacagcgcccacctggtttttgtgaaggtatag

SEQ ID NO: 125275 - DNA, 444 bp, synthetic construct
  misc_feature 1..444: note = Description of Artificial Sequence: Synthetic coding sequence
  source 1..444: mol_type = other DNA
atgcccgtcactgtcacccgtacaaccataacgaccaccacaacttcttcctccggcttggggtcacccatgattgtcgggtccccccgcgcactgacccagcccctcggtctcctccggcttctgcaattagtgtctacgtgcgtggcattttctctggtcgcttctgtaggtgcttggactggctcgatgggcaattggagcatgttcacttggtgtttttgtttctcagttactcttatcatcctgatcgtagaattatgcggcctgcaggcaaggtttcctctgagttggcggaactttcctataacgtttgcatgttacgcagcactgttctgcttatcagcatctatcatctacccaacaacctacgtgcaatttctctcccacggtcggtccagagaccacgcaatagctgcaacatttttctcctgtatcgcctag

SEQ ID NO: 125276 - DNA, 858 bp, synthetic construct
  misc_feature 1..858: note = Description of Artificial Sequence: Synthetic coding sequence
  source 1..858: mol_type = other DNA
atgccagtaaccgttactagaactacgatcacaaccactactacttcttcctccggtctgggaagccccatgatcgtggggtcacccagggcactgacacagcccttaggacttctgcgacttctgcagttagtcagcacatgtgtagcattctctctggtcgcttctgtgggcgcctggaccggatctatggggaattggagcatgttcacctggtgcttctgttttagcgttaccctgattatcctgattgttgaactctgtgggcttcaggcaaggtttcctctttcttggaggaattttcctattaccttcttctcatgtatcgcctgtgttgcctacgcgaccgaggtcgcatggacgagggcccggccaggagagataactggatacatggccacagttcctgggcttctgaaggtcctggagacttttgttgcttgcattattttcgcattcatcagcgatccaaatctctatcaacaccaaccagccctggaatggtgcgtagccgtctacgcaatctgtttcattctggctgcgatagccatcctgctcaacctgggagagtgcaccaatgtgcttcctatcccgtttccgtctttcttatcaggcctcgcactactttccgtactgttgtatgccactgcactggtgttatggccactataccagtttgacgaaaagtacggaggtcagccgaggagaagccgggacgtgtcatgctctagatctcatgcctactacgtgtgcgcctgggacagaagactggccgtggccatcctgacagctattaatctgttggcttatgtggcagacctcgtgcattctgcgcacttagttttcgtcaaggtgtag

SEQ ID NO: 125277 - DNA, 729 bp, synthetic construct
  misc_feature 1..729: note = Description of Artificial Sequence: Synthetic coding sequence
  source 1..729: mol_type = other DNA
atgcccgttaccgtgacacgcaccacaatcactactacaactacgtcgtcctctggcctgggctccccaatgattgtagggtcccctcgggctctaacacagccactgggccttctccggctattgcagctggtttcgacctgtgtggcctttagcctcgtggcatcagtcggcgcctggacaggatctatgggaaattggtcaatgtttacctggtgtttctgttttagcgtgacactcattattctcattgtggaactgtgtggcctgcaggcccgattccctttgtcatggcggaattttcctatcactttcgcatgctatgccgctcttttttgtctgtccgcaagcataatctatcccaccacttacgtgcagtttttgtcacacggccgctctcgggaccacgccatcgccgcaacctttttttcatgtatcgcctgtgtcgcatacgccactgaggtggcctggacccgagccagacctggcgaaatcactggttacatggcaacagttcctggtctgctcaaagttttagaaaccttcgtggcctgcatcatttttgcattcatctccgatccaaacctttatcagcatcagcctgccctggagtggtgtgtggctgtatacgccatctgctttatcctcgctgccatcgccattctgctcaatcttggagagtgtacaaatgtcctgcctattcctttcccctctttcctaagtgggtag

SEQ ID NO: 125278 - DNA, 780 bp, synthetic construct
  misc_feature 1..780: note = Description of Artificial Sequence: Synthetic coding sequence
  source 1..780: mol_type = other DNA
atgccggtcactgttacacgcacgactattacaacaacaactacctctagcagtggcctggggagtccaatgatcgttggaagcccacgagctctgacgcagccgctcggcctcctgagactgctgcagctcgtgtctacatgtgtagcatttagcttagtggcctcagtcggtgcctggacggggtccatgggaaactggtctatgtttacatggtgcttctgcttttcggtaacacttattatcctgatagtggagctgtgtggccttcaggccagattccccctctcttggaggaacttcccaatcaccttcgcctgctacgctgccctcttctgccttagcgcctccataatttaccccacgacgtacgtccagtttctctcacacggaaggagtcgggatcatgcaattgccgccaccttcttctcatgtattgcgtgtgtggcgtatgccacagaggtcgcctggacccgcgccagacccggggagattacaggatacatggcaacggtaccaggactcttgaaagtgctggagaccttcgtggcctgcattatatttgcttttatttctgacccaaacttatatcaacatcagcctgctttggagtggtgcgttgccgtttatgctatttgcttcattctggctgcaatcgccatcttactcaatctgggggaatgtacaaatgttcttccaatcccgttcccaagctttctgtcgggcttagctctcttgagtgtcttactgtacgctacagctttagtgctgtggccctag

SEQ ID NO: 125279 - DNA, 567 bp, synthetic construct
  misc_feature 1..567: note = Description of Artificial Sequence: Synthetic coding sequence
  source 1..567: mol_type = other DNA
atgcccgtgactgttacaagaacaaccatcacgactacaacaacctcctcaagtgggctaggatcccctatgatcgtaggatctccgcgggccctcacacagcctctgggtctgcttcggcttctgcaactggttagtacttgtgtggccttcagtctggttgcctctgttggtgcctggactgggagcatgggaaactggagtatgtttacctggtgcttctgtttctctgtcacactgatcatcctgattgtggagctgtgcgggcttcaggcacgattccctctgagctggagaaactttcccatcacattcgcctgctatgccgcactcttctgcctgtcagcctctatcatttatcccacaacctacgtacaatttctctcccacggaagaagccgggaccacgctattgctgccaccttcttcagctgtatcgcatgcgtggcgtatgccacagaggtggcctggactcgtgctaggcccggagagatcacaggatacatggctactgttccggggctccttaaagtgctcgagactttcgtagcatgcattatcttctag

SEQ ID NO: 125280 - DNA, 942 bp, synthetic construct
  misc_feature 1..942: note = Description of Artificial Sequence: Synthetic coding sequence
  source 1..942: mol_type = other DNA
atggctcttcgaatatgcgtgacatatactcccgcgcttcccatcgggctgtgcacaaggtgttgcctgtgtctggagcaatcaccgtcttggtgccattgcctgagaggggtcagctttcttacctttcacctccaccagtccgttcctctgggggatcgcgatagtctcctgatgtttacgagacaggccggccatttcgtggaaggatcaaaggccggtaggtcccgcgggcgcctctgtctaagccaggcgctgagagttgccgttaggggggccttcgtttcgttatggtttgccgccggggcgggggaccgcgaaagaaacaagggcgacaagggggcccagactggtgctggcctgtctcaggaggctgaggatgttgacgtgtctagagctagacgagtaaccgatgcaccccagggtacactttgcggcaccggaaatagaaactcaggcagccagtctgccagagtcgtcggcgtggctcatctgggcgaagctttccgagtgggcgtcgagcaggccatcagctcctgccctgaggaagtgcatgggcgccacggtctttctatggaaattatgtgggcacgcatggacgtggcactgcgatcccccggtagaggattgctggctggcgctggcgccctatgcatgaccctcgcagaaagctcatgcccagactacgagcgcggacgtcgcgcctgtttaacacttcacagacaccccaccccccattgttccacctggggcctccccttaagggtggcaggtagctggctgactgtcgtgacggtggaggccctcggggggtggagaatgggcgtgcgccgcactgggcaggtagggcccactatgcaccctcctcccgtaagcggtgcgtccccactcttgcttcaccatctgttactcctgttacttattattatactgacctgttag

SEQ ID NO: 125281 - DNA, 942 bp, synthetic construct
  misc_feature 1..942: note = Description of Artificial Sequence: Synthetic coding sequence
  source 1..942: mol_type = other DNA
atggccctgcgaatatgcgtcacttatacgcctgcccttccaattggcctctgcacccggtgctgcctgtgcctggagcagagcccgagttggtgccactgtttacgtggcgtgtcctttcttactttccatctccatcagtcggtgccactgggagacagagatagcctgttaatgttcactaggcaggccggccacttcgtggaaggctcaaaagcaggaagatccaggggccgcctctgcctgagtcaggccctgcgggtggctgtgcgaggagccttcgtgtcattgtggtttgcagcaggggccggcgaccgggagcggaataagggtgacaagggggcccagactggagcaggacttagccaagaagccgaagacgtcgacgtgagtcgcgcccgcagagtgacagacgcaccccagggcactttgtgcgggaccggcaatcgcaattcaggttcacagtccgcccgtgtggtaggcgtagcacatctgggagaggccttcagggtgggagtggagcaggctatctcaagctgtcccgaagaagtgcatggccgccacggactgtccatggaaatcatgtgggcgaggatggacgtggccctgagatcacctggacgtgggctgttagctggcgccggcgcactctgcatgacgcttgctgagtcatcttgcccagactatgagcgcggtcggagggcctgcctgactttgcataggcaccctactccacactgttctacatggggtttacccctaagagtggctgggtcttggcttactgtggtaacggtggaagccctcggagggtggaggatgggggtcaggagaacgggtcaggtaggtcctacaatgcacccccctcccgtaagtggcgcttcccctctactgctacaccatctgctgctgttgctgctcattatcattttgacttgttag

SEQ ID NO: 125282 - DNA, 279 bp, synthetic construct
  misc_feature 1..279: note = Description of Artificial Sequence: Synthetic coding sequence
  source 1..279: mol_type = other DNA
atgcaggtttcgactgccgcactcgccgttctgctgtgtaccatggccctgtgcaaccagttttctgcttcattagccgctgacacacctacagcgtgttgcttttcatacacaagcagacaaatacctcagaactttattgctgattactttgagacaagctcacagtgtagcaaacctggagtcatctttctgacaaagcgcagcaggcaggtttgcgcagatccgagcgaagagtgggtccagaaatacgtttccgacctggaacttagtgcctag

SEQ ID NO: 125283 - DNA, 2334 bp, synthetic construct
  misc_feature 1..2334: note = Description of Artificial Sequence: Synthetic coding sequence
  source 1..2334: mol_type = other DNA
atgggagtccccttcttctcttcactgcggtgtatggtcgacctggggccgtgctgggccggagggttgactgccgaaatgaaactgttgctagctctcgctggactgctcgctatcctcgccacccctcagccctccgaaggagcagctcccgccgtcctcggcgaagtcgacacatccctggtcttgagtagcatggaagaggcaaagcagctagtcgacaaggcatataaggagagaagagagtcaattaaacaacgcctgagaagcggttcagccagcccaatggaactcctgtcatactttaagcagcccgttgctgccactcggaccgctgtcagggcggccgattacctacatgtggcactggacctgttggagcggaagctccgctctctctggcgacggcctttcaatgtgaccgatgttcttaccccagcacagttgaatgtgctgagtaagtcctccggctgcgcctatcaggatgtcggcgtcacttgcccagaacaggacaagtaccggactatcactgggatgtgtaacaaccggtgcgggtggttgggcgtagctgctggcaccgggcttcgagaggccagccgcacaccacaagcctcgagatgtcagaggccggttcttccttgccgcaggtcacctaccttgggagctagcaaccgcgctttcgttagatggctgcccgcagaatacgaggacggctttagtctcccctatggctggaccccaggtgtgaagcgcaacgggtttcctgtggctctggctcgagcagtctcgaacgaaattgtccgttttcctaccgaccagctcacccccgatcaggaaagaagcctgatgttcatgcagtggggtcagctgttggaccacgatctcgatttcactccggaacctgctgcgcgggccagctttgtcacaggtgtcaactgtgaaacttcctgcgtgcagcagcccccctgctttcctctgaaaatcccacctaacgatccccgaattaagaatcaggccgactgcatccctttctttcgaagttgccccgcatgtccagggtccaacattaccatcagaaatcaaataaacgcacttactagctttgtggacgcctccatggtgtacggatctgaggagcctctggctagaaaccttcgaaatatgagcaaccaattgggcctgctggccgtgaaccagaggtttcaagacaacggtagagcgctccttccattcgacaatctgcacgacgacccctgccttcttactaataggtccgctcggataccttgcttcctcgccggcgatacccgaagttcagagatgcccgagcttacttcaatgcatactctattgcttcgtgaacacaatcgacttgccacggagctaaagagccttaacccgaggtgggacggggaacgactttaccaggaggctcgcaaaatcgtcggggcaatggtgcaaattatcacttatagagactacctgccgcttgtcttgggccctaccgccatgagaaagtacctccccacataccggagctacaatgacagtgtcgatcctaggatcgctaatgtcttcacgaatgccttccggtacggccacaccctgatccagccgttcatgtttcgattggacaaccgctatcagcccatggaacccaatcctcgcgtcccactgtcccgggtgttctttgccagctggcgcgtggtgctggaaggtggaatcgaccccattctgagaggtcttatggcgactcctgcaaagctgaatcggcagaatcagatcgcagtggatgagatccgcgagcgcctgttcgaacaggtgatgcgcatcgggctggacctccccgcattgaacatgcagcggagtcgagaccatggcctacccgggtataacgcctggagacgcttttgtggcctgccacagccagagaccgttggccagctcggtactgttctccgcaacttaaaactcgctcgaaaactcatggaacagtacgggactcccaacaacattgacatttggatgggcggtgtatccgaaccactcaagcgaaaaggaagagttggacctctacttgcttgtattataggtacccaattcaggaagttgcgggacggcgatcgtttttggtgggagaatgaaggtgtcttttccatgcagcagagacaggctctcgctcaaatcagcctgcccagaatcatctgtgacaatactgggatcacaaccgtttctaaaaataacatattcatgagtaactcctacccccgggatttcgtgaactgcagcacattgcccgctctgaatctggcctcatggcgggaagcaagctag

SEQ ID NO: 125284 - DNA, 1542 bp, synthetic construct
  misc_feature 1..1542: note = Description of Artificial Sequence: Synthetic coding sequence
  source 1..1542: mol_type = other DNA
atgccctcttgggctctatttatggtgacgtcttgcctgttgttagcacctcagaatctggcccaagtctcttctcaagatgtatccctcctggctagtgatagcgaacccctgaaatgcttctcccgcactttcgaggacctcacatgcttctgggatgaggaggaagctgcgccatcgggaacatatcagttattgtacgcttatcctagagagaagccccgcgcatgccctctgtcatcgcaatccatgccacactttgggactagatacgtttgccagttcccagaccaggaggaagtgaggctgtttttccctctccatctctgggttaagaatgtcttcctgaatcaaacgcgcacccagagggtgttattcgtggatagcgtgggtctccccgcacccccgtcaatcatcaaggcaatgggtggcagccaacctggagaactgcagatttcctgggaggagccagcacctgagatctcagactttctgagatatgagctgcggtatggcccccgcgatcccaagaactccaccggacctacagttattcagctgattgccacagagacctgttgccctgcacttcaacgcccacatagcgcatccgcactggatcagtccccttgtgcccagcctactatgccttggcaagatgggcctaaacagacctctcccagccgagaagccagtgccctcactgctgaaggtggatcgtgcttaatcagtggactgcaaccaggtaatagttactggttacagctgcggtccgagccggacggcattagccttggcggctcctggggatcttggagtctgccagtcacggtggatctgccgggggatgctgtcgcgctgggactgcagtgctttacactcgacctgaaaaatgtgacctgccagtggcagcagcaggatcatgcaagctcccaggggtttttttatcactcccgtgctcgctgttgcccccgggatcgctatccaatttgggagaactgtgaggaagaggaaaaaactaacccggggcttcagacccctcaattctcccggtgtcactttaaaagcagaaatgacagcatcatccatatcctagtagaggtcacaactgcgcctgggacggtacactcttacctgggatcgcctttttggattcaccaggcagtgaggctgcccacccctaatttgcattggagggaaattagctccggccacttagagctggagtggcagcatcctagttcctgggcagcccaggaaacatgctaccagctgcggtatacaggcgagggccaccaagattggaaggtgctcgagccaccgcttggagcaagagggggaaccctagagctgcggccccgaagtcgctaccggcttcagctgagggccaggctcaacggacctacttatcagggcccttggtccagctggtccgacccaactcgcgtcgaaacggccacggagacagcctggatctctctagtgactgcgctccatctagtgcttggactgtctgccgtgctgggacttctcttgctctag

SEQ ID NO: 125285 - DNA, 1908 bp, synthetic construct
  misc_feature 1..1908: note = Description of Artificial Sequence: Synthetic coding sequence
  source 1..1908: mol_type = other DNA
atgccatcttgggccttgtttatggtgacatcttgcctcctgctggcaccacagaatttagcacaggtgtcctcgcaggatgtgagcttgctcgcctctgactctgagcctctgaagtgctttagtcgcacatttgaagacctcacctgcttttgggacgaagaggaggcagcaccttcggggacgtatcagctcttatacgcctaccctcgggaaaaaccaagggcctgtcccctgtcgtctcagagcatgccccacttcggaacgaggtacgtgtgccaattcccagaccaggaagaggtgaggttattcttccccctgcatctgtgggtcaagaacgtgttcctgaatcaaacacggactcaaagagtgctgttcgtggattcggtcggtctgcctgccccaccctcaatcatcaaagcgatggggggtagccagcccggagagctgcagatcagttgggaagaacctgctcctgagatcagcgatttcctcagatatgagctgcggtatggcccacgtgatcccaagaattccactgggcccactgttatccagcttatagccacagagacatgttgtccagctctgcaacgaccgcactctgcaagcgccctggatcagagcccttgtgctcagcctacaatgccttggcaggacggtccgaagcaaacttcaccctccagggaggctagcgctctgacagccgaggggggctcctgtctgattagtgggttgcagcccggtaattcctactggcttcagctcagaagcgagccagatgggatttctctgggcggctcttgggggtcctggtcactccctgtaaccgtggatctccccggagatgcagttgccctcggcctccagtgcttcacccttgacctgaaaaacgtgacatgccagtggcagcagcaagaccatgcatcatcacaggggtttttctaccatagtcgcgctcgctgctgcccccgcgataggtaccccatctgggaaaattgcgaagaggaagagaaaactaatccagggctgcagaccccgcagttcagtcgttgccactttaaatcccgcaacgactctatcatccacatcctagtagaagtgacaacagcgcccggcaccgtccactcatacctggggagtcccttctggatccatcaggcggtgcgccttccgactccaaatcttcattggcgtgagatatctagtggccacctggagctagaatggcagcaccccagttcatgggcagcccaagagacatgttaccagctcaggtacaccggggagggtcaccaggattggaaggtgcttgagccacccctcggcgctcggggcggcaccctcgaactgcggccacgtagtagatacagacttcaacttagagctcgtctgaatggtccaacgtaccagggtccgtggtcctcttggtctgaccctacacgggtggagactgccaccgaaaccgcctggatctctctggtgacggctctccacctggtgctgggtctgtccgccgtcctgggacttctgctactgcgatggcagtttcctgcccattatcgccgtctgcgccacgccctctggccaagcttgccagaccttcacagagtgctcgggcaatacctacgagatacagccgctttaagcccaccaaaagcaaccgtatccgatacatgcgaagaggtggagccctccctgctcgagattctccctaagtcttccgaacgaacccccctgcctttgtgcagctctcaagcacagatggactaccgtcgcctgcaaccctcttgtctgggaaccatgcccctgagcgtttgcccacctatggccgagagtgggagctgctgtacaactcacatcgccaatcattcttacctgccattgtcttattggcagcaaccctag

SEQ ID NO: 125286 - DNA, 1650 bp, synthetic construct
  misc_feature 1..1650: note = Description of Artificial Sequence: Synthetic coding sequence
  source 1..1650: mol_type = other DNA
atgcctagttgggctctctttatggtcacaagctgcctcctcctggccccccagaatctggcacaggtgtcctcccaagatgtttccctgctggcaagcgacagcgagcctcttaagtgcttcagccgcacattcgaggacttaacctgcttctgggatgaggaggaggcggccccttccggcacctaccagctgctctacgcatatccacgagaaaagccgcgcgcttgccctctgagcagccagtccatgccccacttcggaacacggtatgtgtgccaattccctgaccaggaagaggtgcgactgttttttccactgcacctatgggttaagaacgtcttcctgaatcagactcgaacccagcgggtcctctttgtggactccgtgggtctcccggcgccgccatccatcataaaggctatgggtggttcgcagccaggagagctgcagataagttgggaagagcctgcccctgagatctccgattttcttcgttatgagctgcgttatggaccacgggatcctaagaatagtaccggccctaccgtcatccaactgattgctacagaaacttgttgtccggcgttgcaacggcctcatagtgccagtgccctggatcaatccccatgtgctcagcctacgatgccctggcaagacggccccaaacaaactagtccttctcgcgaagcctctgcacttaccgcggaaggcggcagctgtctgattagtgggctgcaacccggaaactcatattggctgcaactgaggtccgaacccgacggtatttcgctaggggggtcgtggggctcttggagcctgccagtcacggttgatcttccaggagacgctgttgctttagggctgcaatgcttcacccttgacctgaaaaatgtcacatgtcagtggcagcaacaagatcacgcaagcagccagggcttcttttatcattcaagagcgaggtgctgtcctagggaccgctaccccatctgggagaactgcgaggaggaggaaaaaacgaaccctggactccagacaccgcagtttagcagatgtcacttcaagtcacgcaatgattctattatccacatcctagtagaggtgacgactgctcccggtaccgtccattcctacctgggaagcccattttggatacaccaagctgtccgccttcctacccccaacctgcactggcgggagatttcctcaggtcatctggaactggagtggcagcacccatcatcatgggctgcgcaagaaacatgctaccagctgcgatacactggggagggacaccaggactggaaggtcctagagccacccctgggcgcgcggggcggaaccctggaattacgcccaaggtcccgatacagattgcagctaagggcaagactcaatggtccaacctaccagggtccttggtctagttggtccgaccctacgcgcgtcgagaccgctaccgaaaccgcttggatcagcctagtgacagcattgcacctcgtgttagggctctcggctgtgctgggcctactgctgctgcgatggcagtttcccgcccattatcgctatcggccccgacaggccggtgactggcgctggaccagatggtctagacgcccagtgaaccggcactcatggttcgctctctag

SEQ ID NO: 125287 - DNA, 2817 bp, synthetic construct
  misc_feature 1..2817: note = Description of Artificial Sequence: Synthetic coding sequence
  source 1..2817: mol_type = other DNA
atgactctcctggggtctgagcactcactgctcattcgctctaagtttcgcagcgtgttacagctccgcctgcagcagcgacgtacgcaggagcagctcgctaatcaggggatcattcctcctctcaagcgccccgccgagtttcacgaacagcgcaagcacctcgactccgacaaagctaagaattcattgaagcgaaaagcacgaaatcggtgcaactcagcagatctggtgaatatgcacattctgcaggcatctacggcagaacggtcgattccgaccgctcaaatgaaactcaaaagggctcggttggccgacgacctgaatgagaaaattgctcttagacctgggcctctagagttagtggagaagaacatattgccagttgacagcgccgttaaggaagccataaagggcaaccaggtgtccttcagcaagagcaccgatgcgttcgcattcgaagaggacagctcctcagacgggttaagcccagatcagaccagatctgaggatccccaaaacagcgcagggagtccccctgatgccaaagcttctgacactccatcaacagggagcctgggcaccaaccaagatcttgctagcggctcggagaacgatcgaaatgattccgcgtcccagccatcccatcagtcggatgctggcaaacagggcctgggacctccctctacacctatcgccgtgcacgccgccgtgaagtccaaatccttaggcgatagcaagaaccgccacaaaaagccaaaagacccaaagcccaaggtcaagaagctgaagtaccaccagtacatcccgccagaccagaaggcagaaaagtcacctcctccgatggattcagcttatgccaggctgttgcagcaacaacaactgtttctacagctccagatcctctcgcagcagcagcaacagcagcagcacaggtttagctacctcggcatgcaccaagctcagctcaaagagccaaatgagcagatggtgagaaatcccaactccagtagtacaccactcagtaacacaccgctgagtccagttaaaaactcgttctcgggtcagaccggagttagctcattcaagccgggaccccttccccctaacctcgacgaccttaaggtctcagaactgcggcagcagcttcgtatccggggactgccagtgtccggtacaaagacggccctgatggaccgcctgaggccgtttcaggattgttccggcaatcctgtccctaactttggtgacattactactgtgaccttccctgtgaccccgaacactctccccaactaccagagctctagttcgacgtcggcactgtcaaacgggttttatcatttcggatccacttcgagcagccctcccatctctcccgcttctagcgacctttccgttgccggctcactccctgacacatttaacgacgcatcacctagctttggtctacaccccagccctgtgcatgtgtgtacggaggagtctctgatgtctagtctgaacggggggagcgtcccttctgaactggatggcctggattcagaaaaggacaagatgctagtcgagaagcaaaaagttattaatgagctcacgtggaaactgcaacaagagcaacggcaagtggaagaacttcgaatgcagcttcagaagcagaaaagaaataactgctcagagaagaagcctttgcctttcctggctgcaagcatcaagcaggaggaggccgtatcttcgtgccccttcgcaagtcaggtcccagtgaagagacagagttcgagcagcgagtgccacccgcccgcatgtgaagccgctcaacttcagcctctcggcaatgcccactgcgtggagtcatctgaccagactaacgtgcttagttcaacatttctgtcaccgcagtgctccccgcaacatagcccactaggggctgtaaagtcacctcagcacatttctttgccaccaagccccaataacccacatttcctgcccagctctagcggtgcccagggggagggtcaccgcgtctcaagcccaataagctcacaggtgtgtaccgcccagatggctggacttcactcaagcgacaaagtggggcctaaattctctatcccgtcacctacgtttagcaagagctcttctgccatatccgaggtgacccaaccaccctcgtatgaggacgcagttaaacagcagatgactaggtcccagcagatggacgaactcttggatgtgctgattgaatctggggagatgcccgccgacgcccgtgaagaccacagttgtcttcagaaagtcccaaagatccctaggtccagcagatcccctaccgctgtgctgactaaaccaagcgcaagcttcgagcaggcttcttctggatcacagattcccttcgatccctatgccaccgacagtgatgaacacttggaggttttacttaactcacagtcgccccttggaaagatgagtgatgttactttgctaaaaatcggttcagaagagcctcactttgacggaattatggatgggttttcaggcaaggctgctgaggatctgtttaacgcacacgaaatattgcctggacccctaagtcccatgcaaactcagttctccccgagctctgttgattctaacgggcttcagctgtctttcactgaatctccgtgggaaactatggagtggttggatcttacacccccgaactccacgccgggcttctcagcactgaccacaagcagcccttctatctttaacatcgattttctagacgtgacggatctgaacctcaatagcagcatggacctgcatttgcagcaatggtag

SEQ ID NO: 125288 - DNA, 1989 bp, synthetic construct
  misc_feature 1..1989: note = Description of Artificial Sequence: Synthetic coding sequence
  source 1..1989: mol_type = other DNA
atggatagtgcgtacgcccgcctgctacagcagcagcagctgttccttcagctgcaaattctctcacagcaacagcagcagcagcagcaccgcttttcctacttggggatgcaccaggcccagctgaaagaacctaatgagcaaatggtgaggaaccctaactcctcttcgacacccctgagtaatacgccccttagccctgtaaaaaattctttttccggacaaacaggagtgagcagcttcaaaccgggtcccctgccccccaatctggacgatttgaaagtgtctgagttgaggcagcagctgcgcatcagaggattacctgtgagtggtacaaagacggcccttatggaccgcttgagaccattccaggattgctcaggaaatccagtcccaaattttggcgatattacaactgtcacctttcctgtcaccccgaatacactacctaattatcagtctagtagttcgacgtcagccctgagtaacggcttctaccatttcggcagcacaagctcctctcctcctatatccccagcttcttctgatctgtccgtcgcagggagtcttccagatacctttaacgacgcaagcccgtctttcggcctgcaccccagccccgtacacgtttgtacagaagagtctctgatgagcagtctgaacggcggatctgtacctagtgaacttgacggactcgattcagaaaaggacaagatgctggtcgagaagcagaaggtcatcaacgagctgacttggaagttgcagcaagagcagaggcaggtggaggagttacgcatgcagctgcagaagcagaaaagaaacaactgtagtgaaaagaagccattgccatttttagctgccagcatcaaacaggaggaggccgtctcctcctgtccctttgcttcccaggtccccgtgaagagacagtcttccagcagcgaatgccatccccccgcctgtgaggcagctcagttacaaccccttggcaacgcacattgcgtggaaagctctgaccagaccaatgtcttaagctccacattcctgtcccctcagtgttctccacagcactcccctctgggtgccgtcaagtctccgcagcacatctctctgccgccttctcctaataacccccactttctcccctcttcctcaggtgcccaaggtgaggggcatagggtgtcatcccccatttcctcacaggtatgcacagcgcagaatagtggtgctcacgacgggcaccccccatcatttagtcctcactcctcttctctccatccacctttctccggcgctcaagctgatagtagccatggtgctggaggcaatccctgtcctaaaagcccctgcgtgcagcagaaacagatgaccaggagccagcagatggacgagcttctggacgtgttgatcgagtcaggagaaatgcctgctgacgctcgagaagaccattcttgcctgcagaaggtacccaaaatacctagatcgtccagatcccccaccgccgtcctcacaaagccttctgcctcattcgagcaggcctcctcaggatctcagatcccctttgatccctatgccacagacagtgacgagcacctagaagtgctgcttaacagccaaagccctctgggcaagatgagtgatgtaacactgttgaaaatagggtcagaggaaccccattttgacggcatcatggacgggttcagcggcaaggctgcagaggatctgttcaacgcacacgagatcctccctggacctctgtctccaatgcagactcaattctccccgtcctcagtggactccaacggactacagttgtctttcacagagtcaccctgggaaaccatggaatggctggatctcacaccgccgaacagtacaccaggcttttctgccctgacaaccagttcccccagcatcttcaatattgacttcctcgacgtgacagatctgaatctcaatagtagcatggatttacacctccagcaatggtag

SEQ ID NO: 125289 - DNA, 2055 bp, synthetic construct
  misc_feature 1..2055: note = Description of Artificial Sequence: Synthetic coding sequence
  source 1..2055: mol_type = other DNA
atgaagttaaagagagccagactcgctgatgaccttaacgagaagattgcgctgaggcccggtccgttagagcttgtagaaaagaatattttgcctgttgacagcgcggtcaaagaggccatcaaaggcaaccaggtgtcattttcaaagagtactgatgccttcgcatttgaagaggacagttcttcggatgggctgtcccccgatcaaacacgcagcgaagatccacagaacagcgcaggttcaccgcctgatgctaaggcctcagacaccccttcaaccggatctctaggcactaaccaagatctcgcctcaggctctgaaaatgatcgcaacgactctgcaagccaaccttctcatcagtccgatgcgggaaagcaagggctgggtcctccttccactccaatcgcagtacacgccgccgtcaagagcaagtcactaggggactctaagaacagacataagaaaccaaaagaccctaagcctaaggtaaagaaactgaaataccatcagtacatcccacctgaccagaaagccgagaaatcgcctcccccgatggattcagcctatgccaggctcctgcagcaacaacaactcttcttgcaattgcagattctctctcaacagcagcagcagcagcaacaccgcttctcctatctcggaatgcaccaggctcaacttaaggagcccaatgaacagatggttcgcaacccaaacagtagcagtactccactatcaaataccccgttatcccctgtgaaaaactccttttctggccagaccggtgtcagctccttcaagccaggtccccttcccccgaacttggatgatctgaaagtctccgagcttcggcaacagctcaggataagggggctgcccgtgagcggaaccaagacagctcttatggatcggttgcgtccgtttcaggattgttccggcaacccagtccctaactttggtgacattacgacagtgacgtttcccgtgactcccaataccttgcctaattaccagtccagcagttcaacctcagccctgtccaacggattttaccatttcggttccacctcatcttcacctccaatatctcccgcctcaagtgatctctcggtcgccggttccctccccgacacctttaatgacgcctctccgagcttcggactgcatcccagccctgtgcacgtatgtacggaagaaagcctgatgtcttccttaaacggtggctccgtcccctcagagctggatggcctcgatagcgaaaaggataagatgttagttgagaagcagaaagtgatcaatgaattgacctggaaacttcagcaggagcagcggcaggtcgaggagctacgtatgcagctccaaaagcagaagaggaacaactgtagtgagaaaaagccactgcccttcctggcagcctctatcaaacaagaggaagccgtaagctcctgcccatttgccagtcaagtgcccgtcaaaaggcagtccagctcatcggaatgccacccccctgcctgcgaggccgcccagctccagcctctcggaaacgcgcactgcgtagaaagctcagatcagaccaatgtgctgagctcaacattcctgtcacctcagtgctctcctcaacactccccattgggggccgttaagtcgcctcagcatatctcgcttccaccctcaccgaataaccctcatttcctccctagctctagcggtgcccagggcgaaggccatcgcgtgagttcacctatctccagtcaggtgtgcaccgcacagaattccggcgctcatgacggccacccaccctctttttcacctcactctagcagtctgcatcctcccttctccggggcccaggccgactcctcccacggagcagggggtaacccttgccctaagtccccttgcgtccagcagaaaatggcaggcctgcattcttccgataaagtcgggcccaaattctcgatcccgagcccaacattctctaagtcttcttccgccatttcggaggtcacccagccaccatcatacgaagatgcggttaaacaagtcactatgtag

SEQ ID NO: 125290 - DNA, 2961 bp, synthetic construct
  misc_feature 1..2961: note = Description of Artificial Sequence: Synthetic coding sequence
  source 1..2961: mol_type = other DNA
atgacacttttggggtccgaacatagcctcctgatcagatccaagttcagatctgtgttgcagctgcggctgcagcagaggcgaacccaggagcagttggcaaaccagggcattatcccccctcttaagaggcctgctgaattccatgagcagcggaagcatctggattccgacaaagctaagaatagcttgaagcgcaaggctcggaatagatgcaacagcgcggatctagtgaacatgcatatcctccaagcttccaccgctgagaggagcatccctactgctcagatgaaactgaagagggcccgcctggccgatgacttgaacgagaaaattgctcttcgccccggcccactggaactggtggagaaaaacatccttccagtggactccgccgtcaaagaggctattaaaggaaaccaagtgtcattctctaaatcaacggatgccttcgcgttcgaagaagatagctcatcagacggcctttcacccgaccagaccaggtctgaagatccacagaacagtgctggctcccccccagatgccaaggcaagtgacacaccctcaaccggctccctcgggaccaatcaggatttagcttccggctccgaaaatgatcgcaatgattcagccagccaaccctcgcaccaatccgatgctggtaagcaaggtctgggccccccgtcaacacccattgctgttcatgccgctgtgaaaagtaagtctttgggggacagcaagaacaggcataaaaagccgaaggaccctaagcccaaggttaagaaactgaagtatcaccaatatatccccccagatcagaaggctgaaaaaagccctccaccaatggactctgcctacgccagactgttgcagcagcagcagctgttcctacagcttcagatactgagccagcagcaacagcaacagcagcataggttcagttatctggggatgcaccaggcccaactgaaggagccaaacgaacagatggtcaggaatccaaattcatcatcaactcccctcagtaatactcctctgtctccggtcaaaaacagcttctcagggcaaacaggcgtatcctccttcaagccagggccactcccccctaatttagatgatctgaaagtcagcgagttacgacagcagctgcggatcaggggattgcccgtctctggaaccaagaccgcacttatggatcggttgaggcccttccaggattgtagcggcaaccccgtcccaaattttggggacattaccactgtgaccttccccgtgacccctaatactttgccaaactaccagtcctcgtctagcacttctgcactgagcaatggtttctaccacttcggtagtacctccagcagtccacccatcagtccggcttccagtgacctaagcgtggccgggtctctcccagataccttcaacgacgcaagcccatctttcggtctgcacccctcacccgtgcatgtctgtacagaagagtccttgatgagcagtctgaacggcgggtctgtgccttccgaacttgatggcctcgattccgagaaggataaaatgttggtcgaaaaacagaaggtgatcaatgaactgacatggaagcttcagcaggaacagcgacaggtagaagagctgaggatgcaattgcaaaaacaaaagagaaacaactgcagcgaaaaaaaacctttgccttttttagcagcatctataaaacaggaggaggcggtgtcctcttgtcctttcgctagccaggtccctgtgaaaaggcagtcttctagctctgaatgtcacccgcctgcctgtgaagcagctcaattgcagcctctgggtaacgctcattgtgtggagtcctcggaccagacaaatgtgctctccagtacttttctctctccccaatgttccccccagcactctccattgggggcagttaagtcgccccagcacattagcttacctccttcacccaataacccgcacttcctcccttcctcatcaggagcccagggtgagggacatcgcgtgtcctctccaatctcatcccaggtctgtaccgcacagaactcgggggcccatgacggccacccaccttctttcagtcctcattctagcagcctgcatcctccttttagcggcgctcaggccgactcatcgcacggggctggcggaaacccgtgccctaaatccccctgcgtgcagcaaaagatggctggcctccactcgtcagataaggtggggcccaaattcagcattcccagcccaacgttcagcaaatcaagtagcgcgatctctgaggtcacacaaccgccaagctatgaagatgcagtaaaacagcaaatgacacggagtcaacagatggacgagctgctggacgttctcattgagtccggcgaaatgcctgccgatgcgcgggaggatcattcttgcttgcagaaggtgcccaagatcccccgctccagcagaagcccaaccgcggtgctcacaaagcccagtgcatcattcgaacaggcatccagcggaagccagataccgtttgacccctatgctacggacagcgacgagcatctcgaggtcctcctaaattcacagtctccactgggtaagatgtctgacgttacacttttgaagattgggtcggaagagcctcacttcgatggcatcatggacggcttcagcgggaaggctgctgaggatctcttcaacgctcacgagattctcccagggccgcttagccctatgcagacacaattctctccctcaagcgttgactctaatgggctccagttgtcatttacagaaagcccttgggagacaatggaatggttggacctcaccccaccaaattccacccctggattcagcgccctgaccacctcctcccccagtatttttaatattgatttcctggacgtcaccgatctgaacctgaactcaagtatggatctgcacctgcagcaatggtag

SEQ ID NO: 125291 - DNA, 1947 bp, synthetic construct
  misc_feature 1..1947: note = Description of Artificial Sequence: Synthetic coding sequence
  source 1..1947: mol_type = other DNA
ttcctgcagttgcagatcctgagccagcagcagcagcagcagcagcatcggttctcttatctgggaatgcaccaagcccagctgaaggaacctaacgagcagatggtccggaatccaaattcgagttccacaccccttagcaataccccgctctcccctgtgaaaaacagtttctctggccagacgggcgtttcttccttcaaacccggtcctcttcccccgaaccttgacgatctaaaggtgtcagaactacgtcagcaactgaggatccgggggctgcccgtgtcagggaccaagaccgccttgatggatagactgaggccattccaggactgtagtggcaaccctgtccctaatttcggggatataaccactgtgacatttccggttacaccaaacacactgcctaattaccagagtagctccagcacctctgcactgtctaacggcttctatcatttcgggtcaacttctagctcaccgcctatatcccctgctagcagcgatctatcggtggccggaagcctccccgacacattcaacgatgctagccccagtttcgggcttcacccctccccggtgcatgtgtgcacagaggagtcactgatgtctagcctgaacgggggctctgtgccgtccgagcttgatggcttagacagcgaaaaagacaagatgctggtcgaaaagcagaaggttataaacgagcttacttggaaactgcaacaggagcagaggcaggttgaagagcttcggatgcagctgcagaaacaaaagagaaacaactgctcagagaaaaaacctttaccttttctggccgcctcgattaagcaagaggaagctgtgagctcatgcccgtttgcctcccaagtgccagtgaagaggcagtcttcaagctctgaatgtcaccctcccgcttgtgaggctgcacagctacaaccgctgggcaatgctcattgtgtcgagagtagtgatcagaccaatgtgctcagcagtacgtttctttccccgcaatgctccccccaacattccccgctgggcgcagtaaaaagtccccagcatatttcccttcctccttcacccaataacccccactttctgcccagtagcagcggcgctcaaggggagggacaccgggtgtcatcacctatctcatctcaagtgtgcacagcccagaattccggtgctcatgacggacacccaccgagcttcagcccacactcctcttcgctgcatcctcctttcagtggagctcaggccgatagctctcacggggctggtggaaatccgtgtccaaagagtccatgcgtgcagcagaagcagatgacccgtagccaacagatggatgaactgcttgacgttctgatcgagtctggagagatgccagccgacgcacgtgaggaccattcttgtcttcaaaaggtccccaaaatcccacgcagctcacgctctcctacagcagtgctcacaaagccaagcgccagctttgaacaggccagttccggttcacaaatcccattcgatccctatgctactgattccgatgagcatctagaggtactacttaactctcagagcccacttggcaaaatgagcgatgtgacattgcttaaaatcggcagcgaggagccacacttcgacggtataatggacgggttttcgggcaaggctgcagaagacctttttaatgcccatgaaatactccccggccctctttcacctatgcagacccagtttagtccatcaagcgttgactccaacgggttgcagctgagttttaccgagtccccctgggaaactatggagtggctcgacttgacccctcctaactcaacacctgggtttagtgctttgaccacttcttctccaagcatcttcaacattgatttcttggatgtgaccgatttgaatcttaattcaagcatggatctgcacctccaacagtggtag

SEQ ID NO: 125292 - DNA, 1515 bp, synthetic construct
  misc_feature 1..1515: note = Description of Artificial Sequence: Synthetic coding sequence
  source 1..1515: mol_type = other DNA
atgagattcttctgcgcccggtgttgcagttttggtcccgaaatgccggccgttcagctcctgctgcttgcttgcctggtgtgggatgtgggcgctcggaccgctcagctgcggaaggctaatgatcagtccgggagatgtcagtacacttttagcgtggccagtccaaacgagagctcctgccccgaacaatctcaggccatgtctgtcatacacaatctccagcgcgactcttcaacgcagaggttggacctggaggccaccaaggcccgcctatcaagccttgaaagtctactgcaccagctgacactcgaccaggccgccaggccccaggagacacaggagggtctgcagagagaactgggcacacttcgccgggagcgtgaccagctagaaactcaaacacgcgagttggaaactgcgtattccaatctacttcgcgacaaaagcgtgttggaggaggaaaaaaagaggctacggcaggagaacgagaatctggccagacggttagagagttcgtcccaggaagtcgcaagattgcgcaggggccaatgtcctcaaactcgggatactgcaagggcggtgcctcctgggtcccgcgaggtgagtacctggaatctggacacactcgcctttcaagaactgaagtccgagttaacagaagtgcctgcctcccggattctgaaagagtctccaagcggctatctgagatctggtgagggcgacacaggatgtggggaactggtgtgggttggagagccactgactctgcgtaccgccgaaacaatcactgggaaatacggagtgtggatgcgagaccccaagccgacatacccctacacccaggaaaccacctggaggatagatacagtgggaaccgatgtgcggcaggtcttcgagtatgacctcatcagccagtttatgcaggggtacccgtcaaaggtccacatcctgccgcgccccctagaatcaaccggggctgtggtatactccgggtcactttactttcagggagccgaatcaaggaccgtaattcggtatgagctaaacaccgagacagtcaaggctgagaaggagattcccggagccggatatcatggacagttcccatattcttggggtgggtatacagacatagacttggccgtggatgaggctgggctgtgggtcatctattcaacggacgaggccaaaggagccattgtcctgagcaagctcaaccccgagaacctagaactagaacagacgtgggaaacgaatatccgcaagcagtcggtcgcaaacgcattcataatatgcgggactctttataccgtttccagctatacctcagccgacgccactgtaaactttgcctacgatactggaactgggatcagcaagaccctgaccatcccattcaagaatagatataagtatagttcaatgatagattacaatcccctggaaaagaagctgttcgcttgggacaacttgaacatggtcacatatgacatcaaactcagtaagatgtag

SEQ ID NO: 125293 - DNA, 1374 bp, synthetic construct
  misc_feature 1..1374: note = Description of Artificial Sequence: Synthetic coding sequence
  source 1..1374: mol_type = other DNA
atgcggttcttttgcgctaggtgttgctccttcgggcctgagatgcccgcggtgcagctattgctcctcgcgtgcctggtgtgggacgtgggagcacggactgcccaattaagaaaagccaacgaccagagcgggaggtgccaatataccttctccgtggcctccccaaatgagtccagctgtccagagcagtctcaagctatgtccgtcatccacaatctgcagcgggactcatccacacagcggctcgatctggaggcaactaaggctaggctgtcctcactggagtctctgctgcgtgacaaatccgtccttgaagaggagaagaagagacttcggcaggagaatgaaaatctggcccgtaggctggaatcttctagccaggaagtagcccgactgcgacgcggacagtgccctcagacaagagacacagctcgcgcagtccccccaggtagcagggaagtcagcacctggaacctagacaccctggctttccaggagttaaaaagcgagttgaccgaggttccagcctctcggattctcaaggaatcgccttctgggtacctgagaagtggggaaggtgatacaggttgcggggagctggtgtgggtcggagaaccactgacacttagaaccgcggaaacgattacaggcaaatacggggtttggatgcgcgacccaaaacctacatacccctacacgcaggagactacttggagaatagacacagtggggaccgacgtgcgtcaggtgtttgaatatgacctgatcagccagtttatgcagggttatccctcaaaagtccacatactgcccagacccctggagagcaccggtgctgtggtatacagtgggagcctctacttccagggggctgagtcgagaactgtaatcaggtatgaactgaacacggagactgtgaaagccgagaaagaaatcccaggcgcgggttatcatggacagtttccctactcttggggaggatacacagatatcgacttagccgtggacgaggcaggactctgggtcatttactctaccgatgaagctaagggcgccatcgtgctcagtaagttgaaccccgaaaaccttgaattggaacagacgtgggaaacaaacattcggaagcaatccgtggcaaacgcgttcattatctgtggtaccctttacaccgtaagttcttatacaagtgcagacgctaccgtgaacttcgcatacgacaccggcacaggaatttctaagaccctcacgatacccttcaagaacaggtacaaatatagctccatgattgattacaaccctttggaaaaaaaattgtttgcttgggataatctcaatatggtcacgtatgacatcaaactcagcaaaatgtag

SEQ ID NO: 125294 - DNA, 1314 bp, synthetic construct
  misc_feature 1..1314: note = Description of Artificial Sequence: Synthetic coding sequence
  source 1..1314: mol_type = other DNA
atgagtgtgatccacaatttgcagagggattctagcacacaaaggctggacttagaagcgacgaaagcccgattaagtagtctggaatcactgctgcaccagttgaccctggatcaggccgcacggccccaggaaactcaggagggtctccaacgggagctgggaacattgcgtagagagcgcgatcagctcgagacccaaacaagggaactggagaccgcttacagtaacctactgagggacaaatctgtcctggaggaggaaaagaagagactcaggcaggagaacgaaaatctggcgcgccgtcttgagagctcatcccaggaggtcgcacgcctgcgtagaggtcaatgccctcaaacacgggataccgcgagggctgtgcccccaggatccagagaagtttccacatggaatctggatactcttgcattccaggagctgaagtccgagcttacggaggttcccgcaagtcgtatcctgaaggagtctccttccggttatctgagaagcggcgagggggacacagggtgcggtgaactcgtctgggtaggggagcccctgacgctgcgcaccgcagaaaccattaccggaaaatacggagtatggatgcgcgaccctaagccaacatacccttatactcaggaaacaacctggagaattgataccgtcggtaccgacgtcagacaggtgttcgagtacgatcttatatctcagtttatgcaggggtacccttcaaaagtgcacatccttcccagacccttggagtcgaccggggctgtggtatatagtggcagcttgtacttccaaggcgccgaaagccgtactgtgattcggtacgaacttaataccgaaaccgtcaaggcagagaaggagattcccggcgccgggtaccatggtcagttcccttacagctggggaggctatacagatattgatctcgctgtagacgaggccggactttgggtgatatacagcaccgatgaggcaaaaggggccattgtattgagtaagctgaacccagaaaatcttgagctagagcagacgtgggagacaaatatcaggaagcagtccgtggctaacgcctttatcatctgtggcacgctgtataccgtgagtagttatacgtccgcagatgctacagttaacttcgcatatgacacaggcaccggtatctccaaaaccctgactatcccttttaagaatcggtataagtattccagtatgattgactacaaccccctcgagaagaagttgttcgcctgggacaatctgaacatggtaacctacgacattaagctctcaaaaatgtag

SEQ ID NO: 125295 - DNA, 1035 bp, synthetic construct
  misc_feature 1..1035: note = Description of Artificial Sequence: Synthetic coding sequence
  source 1..1035: mol_type = other DNA
atgaggtttttctgcgcacggtgctgctcctttggcccagagatgccagccgtgcagctgctgctgttagcgtgtcttgtgtgggacgtgggggctcggaccgcgcagctccggaaggcaaacgatcagagcggccggtgtcagtacaccttttcggtcgcctcccctaatgagtcttcgtgccccgaacagtctcaggctatgtcagtgattcacaacttgcagagggactcctctacgcagaggctggatctggaggccaccaaggcccgactgagttcacttgaatctcttctgcaccagctgacgctggatcaggccgcacgcccccaggaaacccaggaagggctgcaacgcgagctcggaaccttgcggagagagagggatcagctggagacacagaccagagaacttgaaaccgcctactcaaaccttctccgagataagagtgtgctcgaggaggagaagaagcgattgcgccaggagaacgagaatctggccagacggttggagtcatcttctcaggaggtggcacggttgaggcgagggcagtgtccgcagacccgtgacactgctagagctgtgccccctgggagcagggaggtaagtacatggaacctcgacactttagcgtttcaggagcttaagagtgaacttacagaggtgcccgcctccagaattctcaaggaatccccgtccggatatctgagaagtggagagggggacaccggctgcggcgagctggtgtgggttggtgagccacttaccttaagaacggctgagacaataacaggcaagtatggcgtgtggatgcgagacccaaaacctacctacccctacacgcaggagacgacttggcgaatagatacggtgggcactgacgtccgccaggtcttcgagtatgacctgatttcccaatttatgcaaggctatccaagcaaggtacacatcctgccccgacccttggagtccaccggcgcagtggtgtacagtggaagtctctatttcagagctctaagtcccgaactctcttag

SEQ ID NO: 125296 - DNA, 1521 bp, synthetic construct
  misc_feature 1..1521: note = Description of Artificial Sequence: Synthetic coding sequence
  source 1..1521: mol_type = other DNA
atgggacggaagaaaatccaaatcactagaattatggatgagcgcaatcgacaagtcacatttaccaaaagaaaattcgggctgatgaagaaagcatatgagttatctgtgctttgcgactgcgagattgctcttattatcttcaactccagcaataagctgttccagtatgcgtccaccgatatggacaaagtgctactgaagtataccgagtacaatgaaccacacgaatcccggaccaactccgacatcgtcgaaacacttagaaagaaaggactaaatggatgtgagtctcccgacgccgatgattattttgagcactcacctctgagtgaagacaggttcagtaagttgaacgaagatagcgactttatcttcaagcggggtccgcccggactgcccccccagaatttctccatgtcagtgacagtccccgtgacaagcccaaacgcgctatcttataccaatccgggttcctctttggtgtccccgtcactggcggcctccagcaccctgacggatagttcaatgctgtctcctcctcagaccaccctgcacagaaacgtgagtccaggcgctccccaacgtccaccttcgactggcaatgccggcggcatgctttccaccacagacttgactgtccctaacggtgcaggttcatcccccgtgggaaatggcttcgttaactcacgtgccagcccgaatcttattggagccacaggggccaactccctgggcaaagtgatgcctaccaagtccccccccccaccaggcggtggcaacctgggaatgaactcccggaagccggatttgagggtggtaatccctccgtccagcaaaggtatgatgccaccactgtacttaaaacgtcagctcaatacaaacaacacccaaaggataagctctagtcaagctactcagcctctcgctacccccgtggtgagcgtaacaaccccttcactgcctccacaaggtttggtgtactccgccatgccgacagcctataatacggactactcattgactagcgcagacttaagcgcactgcagggatttaacagtcctgggatgctgtccctaggccaggtgagcgcctggcaacagcaccaccttggccaggctgcactgagctcccttgtggccggaggccagcttagccagggcagcaatttgtcaatcaacactaatcagaacattagtattaaatctgagcccataagcccccccagagacagaatgaccccgtctggattccagcagcagcaacagcagcagcagcaacagcaaccgccaccccctccccaaccccaaccacagccacctcagccacagcccagacaggagatgggaagatcaccggttgatagcctttccagttcctcctcctcctatgacgggtcggaccgagaggatccccgtggtgattttcactcccccattgtcctcggccgaccacctaacacggaagaccgagagagtcccagcgtgaagaggatgcgcatggacgcctgggtgacctag

SEQ ID NO: 125297 - DNA, 1500 bp, synthetic construct
  misc_feature 1..1500: note = Description of Artificial Sequence: Synthetic coding sequence
  source 1..1500: mol_type = other DNA
atgggtcgcaaaaagatacaaatcacacgaatcatggacgagagaaatcggcaggtgacttttacaaaacggaagttcggtctgatgaagaaagcatatgagcttagcgtgctatgtgactgtgaaatcgccttgattatctttaattccagcaacaagctgttccagtatgcaagtaccgacatggataaggtgctgctgaagtacaccgagtacaatgaaccacacgaaagtaggacgaatagcgatattgtggaagctctcaataagaaggaacataggggctgtgactcccccgatcccgatacttcttatgtccttacccctcataccgaagagaaatacaaaaaaatcaacgaagaatttgataacatgatgagaaatcacaagattgctccaggcttacctcctcagaattttagtatgtcagtcaccgtgcccgtgactagccctaatgccctatcttatacaaatcccggctcaagcctggttagcccctcattggccgcctcttcaactctgacggacagctccatgctgtccccacctcagacaaccctccatcgcaatgtttccccgggagcccctcaaaggccaccttctactggaaacgctggaggtatgctaagtacaactgacttaaccgtgccaaacggcgcaggctcctccccagtcgggaatggatttgtaaactcaagagcctcacccaatcttatcggggccactggtgcaaacagtctaggcaaggttatgcccaccaagtcgcctcctccacccgggggtggcaatctcggcatgaattcacgcaaacccgacctgagggttgtcataccaccatcttcgaaggggatgatgcctccactcaatacgcagagaatctctagttcccaagcgactcagcccctggcaaccccagttgtgagtgtaacaacaccctccttaccaccccaaggactggtctactcagcgatgcctaccgcgtacaacactgactattcactcaccagcgcagacctatccgcactgcaggggtttaactccccaggaatgctctctctgggccaggtgagcgcttggcagcaacaccacctgggacaggccgccttgtccagtctggtggcgggtggtcagttgagtcagggctctaacctgtctattaacactaaccaaaatatctctattaaaagcgagcccatcagccccccaagagatcgcatgactcctagtggctttcaacagcagcagcaacagcagcaacagcaacagcccccccccccacctcaaccacagccccagcctccacagcctcagccacggcaggaaatgggtcggagccctgtggactcattgagtagcagctccagttcatatgacggttccgacagagaggacccgcggggtgacttccactctccaatcgtcctcgggcgacctcccaacacagaggaccgcgagtcaccaagtgtgaaacggatgaggatggatgcgtgggtcacatag

SEQ ID NO: 125298 - DNA, 1290 bp, synthetic construct
  misc_feature 1..1290: note = Description of Artificial Sequence: Synthetic coding sequence
  source 1..1290: mol_type = other DNA
atgggccggaaaaaaattcagatcactagaattatggacgaacgcaatcggcaaacactaaggaaaaaaggacttaatggatgcgagtcacccgatgccgatgactactttgaacatagccccctgtcagaagaccgattctcaaagctcaacgaggatagcgacttcattttcaaacgcggaccccccggcttgccaccccagaatttttcaatgagtgtcacagtacccgtcacttcgcctaatgccttgtcatacactaaccccggatcgtcgctggtttctccgtctctggctgcctctagcacgctgactgattccagtatgctgtctccaccacagacaacacttcacaggaatgtcagccccggagctccgcagcggccaccaagtactggcaatgctggcgggatgctcagtacgactgatttgaccgtaccaaacggagctggaagctcacccgtgggtaatgggttcgtaaactcacgcgctagtcccaacctgatcggcgctacaggggccaatagtttgggaaaagtgatgcccactaagtctccacccccgcccggtggcggtaacctcggaatgaatagtcgtaagcctgacctgagagtcgttattccacctagctcgaaaggcatgatgcctccccttaacacacaacgtataagttcaagccaagccacacagccactggcaaccccagtagtttcagtgacaactccctccctgccaccccagggtcttgtctactcagccatgcccacagcttataatactgattatagtctgacatctgcagatctgagtgcacttcaaggcttcaacagtcccggcatgctgagtcttgggcaggtgagtgcctggcagcagcaccaccttggtcaagccgctctgagctccctcgtggcgggagggcaactgagccaaggaagtaacttgtcaatcaacaccaatcagaacatttcgatcaagagtgaaccgatttctcctcccagagaccggatgacccctagcgggttccaacaacagcagcagcagcagcaacagcagcagcctcctcctcctcctcagccccagccacaacctcctcagccccaaccacgtcaggaaatgggacggtctccagtcgactctttgtcttcatcgagcagctcgtatgatggcagtgatcgggaggatcccaggggcgattttcactcaccaatcgtcctgggccgcccgccaaacactgaggatcgggaaagtccctctgtaaagcgaatgaggatggatgcctgggtgacatag

SEQ ID NO: 125299 - DNA, 1494 bp, synthetic construct
  misc_feature 1..1494: note = Description of Artificial Sequence: Synthetic coding sequence
  source 1..1494: mol_type = other DNA
atggggagaaagaagatccagatcacgaggattatggatgagcgcaatcggcaggtgacattcactaagcggaaattcggtttgatgaagaaagcctacgagctgagcgtactgtgcgattgtgagatcgctttgattatattcaattcaagcaataagttattccagtacgccagcaccgacatggataaggttctcctgaagtacactgaatataacgagccgcacgagtcccgtactaactcagatatcgtcgagactttgagaaagaaaggcctgaacggctgcgagtccccagacgccgacgattactttgagcatagcccactctcagaagaccggttctctaagcttaacgaagacagtgacttcatttttaaacgcggacctcctgggctaccaccccagaacttcagcatgtcagtgacagtgcctgtgactagtcccaacgccctgtcatatacaaatcccggatcaagccttgtgagcccgagcttagccgctagctccactctcaccgactcttcaatgctgagcccacctcagacgactctccatagaaatgtaagtcccggcgctccccagagacctcctagtactggcaatgcaggcggaatgctttcaacgacggacctgaccgttcctaatggcgccgggtcatctcccgtggggaatggatttgtcaactctcgtgcctcacctaatctgattggtgcaacaggagccaattccctggggaaggtgatgcctaccaagtctccccctcctccagggggcgggaatttggggatgaatagccgcaagcctgacctccgcgtggttatacccccctcctccaaggggatgatgccacctctgaacacccagcggatatcaagctcgcaagcaacacagcccttagctacaccggttgtttcggtgactaccccttcgctgcctccccagggcctggtctatagcgctatgcctaccgcatacaataccgattacagccttacctcagcagatctctcagcgctgcaggggttcaattcaccaggaatgctgagcctcggccaagtctccgcttggcagcagcaccacttaggccaagctgcgctcagcagccttgtggcagggggccagctttcccagggttctaacctgagcatcaatacaaatcagaatatatcgataaagagcgagccgatttcaccacctcgcgatcgcatgacaccctctggtttccagcaacagcagcagcaacagcagcagcaacagcccccacctccaccccagccacaaccccaacccccacagccgcagccaagacaagagatgggccgatcccccgtggatagcctgagcagcagttccagttcttatgatggtagcgaccgggaagatcccaggggggacttccacagcccgatcgttctgggccgccccccaaacacggaggatagagagtctccctcggtcaagagaatgagaatggacgcgtgggtcacttag

SEQ ID NO: 125300 - DNA, 1494 bp, synthetic construct
  misc_feature 1..1494: note = Description of Artificial Sequence: Synthetic coding sequence
  source 1..1494: mol_type = other DNA
atggggagaaaaaagatacagatcactcggatcatggacgaacgcaaccggcaagtgacgttcaccaagcgcaagttcggcctgatgaaaaaagcatatgagcttagcgtgctttgtgactgcgagatagccttgattattttcaattcatcaaataagcttttccaatacgcttccacggatatggataaagtactgctcaagtatactgagtacaacgagccccacgaatctaggacaaattcagatatcgttgagacccttagaaagaaaggcttgaatggctgtgaatcccctgacgccgacgactacttcgagcacagccccttgagtgaagatagattctctaagttgaatgaagattccgactttatctttaaacgtggtccgcctggactgccacctcagaacttctcaatgagcgtcactgtgcctgttacatcccctaatgccctgagctacaccaaccccggatcctccctggtgagcccatccctggcggccagcagtaccttaacagactcatctatgctgagtccaccccagacgacgctccaccgaaatgtgtcaccaggagcaccgcagagacctccaagcaccggaaacgctgggggcatgctctccacaacagacctaacagtgcctaacggcgcaggtagcagcccagtcgggaatggcttcgtgaattctcgagcatcacccaatcttatcggagccactggtgccaattccctgggcaaggtgatgcctaccaagtcccctcccccacccggcggcggtaatctggggatgaactcgcgcaagccagacctgcgggtagtcatccccccctcgtcaaaagggatgatgccccccctcaatacccaacgtatatctagtagccaggccacacagcctctggcaaccccagttgtgagcgtaactacaccaagtcttcctcctcaggggttggtgtatagcgctatgcccacagcttataacaccgactactctctaacctctgctgacctctctgccttgcagggatttaattcccccggcatgctctccttgggacaggtctccgcctggcagcagcaccacctcgggcaggctgccttatcatctttagtagccggcggccagctgtcccagggatctaacctctccataaatacgaatcagaatatcagcatcaagagcgaacccatttccccaccacgcgaccgcatgacaccaagtggcttccagcagcagcagcagcagcaacagcagcagcagccaccccctccccctcaaccccaaccgcagccgccacaaccccagccccggcaggagatggggcgatcacctgtcgattcactgtctagcagctccagctcctacgatggatctgacagggaagacccgcggggggacttccatagccccatcgtgcttgggaggccacccaataccgaagaccgcgaatctccaagcgtgaaacggatgagaatggacgcctgggtcacctag

SEQ ID NO: 125301 - DNA, 1518 bp, synthetic construct
  misc_feature 1..1518: note = Description of Artificial Sequence: Synthetic coding sequence
  source 1..1518: mol_type = other DNA
atgggtagaaagaagattcagatcacgagaataatggatgagcgaaacagacaggtgaccttcacaaaacgtaagttcgggctgatgaagaaggcttatgaactttctgttctctgtgattgcgagatcgcgctgatcatattcaattcatctaacaaattgtttcaatatgcgtccaccgacatggacaaagttctgttgaagtacaccgagtataatgagccccacgaaagccgaacaaattctgacattgtggagactcttaggaaaaagggcctgaatggctgtgaaagcccggatgcagatgattacttcgagcacagcccgttaagcgaagatcgattcagcaaactgaatgaggacagcgactttatcttcaaacgaggtccccccggtcttcccccccaaaacttcagcatgtccgtcacagtgcccgttacttctcccaatgcccttagttacactaaccctgggtcatctcttgtgagtcctagcctcgcagcaagtagcactctcaccgacagctccatgctcagtcctccccagacaactttgcatcgaaacgtgagccccggcgccccacaacggccaccttcaacaggcaacgcagggggcatgctgtccacaacggatctgacggtgcctaacggagcaggctcctctcccgtaggtaatggattcgtgaattcacgagcctctccgaatctgattggagcaacaggggccaacagccttggcaaagtgatgccgaccaaatctccccctccccctggaggagggaacctcggcatgaactctagaaaacctgacctcagagtcgtgatcccccctagcagtaagggcatgatgccacctctttctgaggaggaggagttagaacttaacacacagcggatctcttcaagccaagccactcaaccactcgccacaccagtagtgtccgtgactaccccctccttgccacctcagggactggtgtattcagcgatgcccaccgcttataatactgactactccttaacttctgccgatctgtccgcactgcagggatttaatagccctgggatgctaagtctgggccaggtgagtgcctggcaacaacaccatctggggcaagccgctctttcgtcactagtcgccggcggccagttgtcacaggggagtaacctttccatcaatactaaccaaaacatatctatcaagtcagagccgatcagtccgcctcgggatagaatgacaccttcagggtttcaacagcagcagcagcagcagcagcagcagcagccacctcctcccccacaaccacagccccagccacctcagccccagcctcgccaggagatgggccggtccccggtcgactctctttcatctagctcatcttcctacgatggtagcgatagggaggatccccgtggagattttcactcacctatagtgctggggagaccccctaatacagaagatagagagtccccctccgtgaaaaggatgcggatggacgcctgggtaacatag

SEQ ID NO: 125302 - DNA, 117 bp, synthetic construct
  misc_feature 1..117: note = Description of Artificial Sequence: Synthetic coding sequence
  source 1..117: mol_type = other DNA
atgggacgaaagaaaatccagatcacgagaatcatggatgaacgcaacagacaggtgacctttactaaacggaagttcggcctaatgaagaaggcctacgagctctcagtactgtag

SEQ ID NO: 125303 - DNA, 1314 bp, synthetic construct
  misc_feature 1..1314: note = Description of Artificial Sequence: Synthetic coding sequence
  source 1..1314: mol_type = other DNA
atgggaaggaagaaaattcaaataacccggattatggacgagcgcaatcgccagacactgcgcaaaaaagggttgaatggatgtgaaagccctgatgccgacgattacttcgaacacagcccactttcagaagatcgtttttcaaaactcaatgaggattcagattttatatttaaaagggggccccctggcctccccccccaaaacttcagcatgtcagtgacagtgcctgttacatcgccgaacgccctgtcatataccaatcccggttcatcgcttgtgagcccttctctggccgcaagctctaccctgaccgatagcagcatgctatccccaccacaaacgaccttacatcgaaacgtcagccctggggcacctcagcggcctcccagtaccggcaacgctggtgggatgctgtctactacagatcttaccgttcccaatggagcaggcagctcaccagtggggaacggtttcgtgaatagcagagcatctccaaatctgataggggccaccggcgccaatagcctaggcaaagtgatgcccacaaaaagcccgcctcctcccggcggcggaaatctgggaatgaactccaggaagcctgacctccgcgttgtgatcccaccttccagcaagggtatgatgccccccctcagcgaagaagaagagcttgagctgaacacccagcggatttctagctctcaggcaacacagcccctggccaccccagtggtctctgttaccacaccctccttaccccctcagggattagtgtactctgcaatgcctaccgcctacaacactgattacagcctgacctccgctgatctatctgccttgcagggctttaattcccccggaatgctatccttaggccaagtgtcggcctggcagcagcatcacctcgggcaggctgccttgtcctccctggtagctggtgggcagctctcacagggaagtaatctgtccatcaacaccaaccagaacatctctataaaatccgagcccattagcccacctcgcgaccgaatgaccccctcagggttccaacagcagcagcagcagcagcaacagcagcagccccccccccctcctcagccccagcctcagccaccacagccccagccccgccaagagatgggcagaagcccagtcgattcgctctcgtcaagttcatcctcttacgacggttcagaccgcgaggacccccggggggatttccactcccctatagtcctgggacgcccacccaacacggaggatcgagagtcaccttctgtaaagaggatgcgcatggatgcctgggtcacatag

SEQ ID NO: 125304 - DNA, 234 bp, synthetic construct
  misc_feature 1..234: note = Description of Artificial Sequence: Synthetic coding sequence
  source 1..234: mol_type = other DNA
atgggtcgcaagaaaattcagatcacgaggatcatggacgagcgtaatcgacaggtcacctttaccaagagaaaatttggcctcatgaagaaggcttatgaactgagcgttctgtgtgactgtgaaatcgccctgatcatctttaattcttccaacaagctgttccagtatgcctccacagatatggacaaagtacttctgaaatatactgagtacaatgaaccccacgaatag

SEQ ID NO: 125305 - DNA, 258 bp, synthetic construct
  misc_feature 1..258: note = Description of Artificial Sequence: Synthetic coding sequence
  source 1..258: mol_type = other DNA
atgggccgcaagaagattcaaattactagaataatggatgagcgcaatagacaggtcacctttactaagcgaaaattcggtcttatgaaaaaggcctatgaactgtccgtactgtgtgactgcgaaatcgccctgatcatttttaattcttctaacaaactgttccaatacgcctcgacagacatggacaaagtgctcctcaagtacactgagtacaacgagccacacgagtcacgcacaaattcggatatcgtgtag

SEQ ID NO: 125306 - DNA, 1107 bp, synthetic construct
  misc_feature 1..1107: note = Description of Artificial Sequence: Synthetic coding sequence
  source 1..1107: mol_type = other DNA
atgggcagaaagaagattcagatctcccggatcctggaccaaagaaatcgacaggttaccttcactaagcgaaagttcggcttaatgaaaaaagcctatgagctctccgtgttatgtgactgtgagattgctctcattattttcaactccgcaaatcggttatttcagtatgcatccacagatatggaccgtgttcttcttaaatatacagaatacagcgaaccccatgagtccagaactaacaccgatatcctcgagactctcaagcggaggggcatcgggctggacggtcctgaactggagcctgatgaaggccccgaggaacccggggaaaaattcagaagactggccggcgaaggtggcgaccccgccctcccaagacctcgactgtacccagccgctcctgcaatgcctagccccgatgttgtgtacggggcactgcctcccccaggttgtgatccaagcggccttggcgaggcactgccagcgcagtcaaggcccagcccgtttagaccggccgcacctaaagctggcccccctgggctcgtgcatcccttattttctccgagccatctaaccagcaaaacacccccaccgctctacttgccaaccgagggcagacgctccgacttaccagggggccttgctgggcccaggggcgggctgaatacctcccggtccctatacagcggcctacagaatccatgttctactgccactcccgggcccccgttgggctctttcccctttctgccagggggccctccagaatacggcttgggtgatccaccaccaccccccggcctcctgcagccaccgacattggccccttggcagccctcaagaggagacggaccccctgccgtgtcttcacagccctccggcggtagatcacttggtgaggaaggccccccaactcgcggtgcatcccccccaaccccccccgtgtcgattaagagcgaacgtctctccccagccccaggtgggcctggggactttccaaagactttcccctaccccctcctgttggccagatccctggccgagcctctgaggccgggtcctgccttgcggcgactgcctctagctgacggttggccaagatag

SEQ ID NO: 125307 - DNA, 894 bp, synthetic construct
  misc_feature 1..894: note = Description of Artificial Sequence: Synthetic coding sequence
  source 1..894: mol_type = other DNA
atgggtcgaaaaaagattcaaatctctcgaatcctggaccagaggaaccgtcaggtcacatttacaaaaagaaagttcggactgatgaaaaaggcctacgagctgtccgtactatgcgattgcgagattgctctaatcatatttaacagcgcaaaccgtttgttccaatacgcctcaacagacatggatagagtgctcctcaagtacactgagtacagtgaaccacatgagtcccggactaacactgacatcctggaagtgccacagaccctgaagcgtaggggcatcggacttgatgggccagaactagagccagatgaggggccagaagagcccggagaaaagttcagaaggttagccggtgaggggggtgaccccgccttgcctcgcccccgcctctatcctgcagcgcctgccatgccttcacctgatgtggtttacggggctctcccacctccaggctgtgatccctcaggactgggagaggccctgccagcacagtctaggcccagtcctttccgccccgcggctcccaaggctggcccccctggtctcgtccaccccttgtttagccctagtcacctgacatcaaagacaccccccccgctgtatttgccaacagagggcagacggagcgacctccctggaggactcgcaggcccacgaggtggcttaaacacgagcagaagcctgtatagcgggctccaaaatccatgttctactgccaccccgggcccgccacttggcagttttccattcttgcccgggggacctccggagtacggtctcggagatcctccccctccgcccggcctgcttcagccacctacactggctccctggcagcccagcagaggagacggaccacccgccgtgtctagccagccaagatag

SEQ ID NO: 125308 - DNA, 1107 bp, synthetic construct
  misc_feature 1..1107: note = Description of Artificial Sequence: Synthetic coding sequence
  source 1..1107: mol_type = other DNA
atgggtagaaaaaaaattcaaatctcccgaatcttggaccagagaaatcgccaggttacattcaccaaacggaagttcggactgatgaagaaagcttacgaactgtcggtactgtgtgattgcgagatcgcactaataatcttcaattcagcaaacagattgttccaatacgcttcaacagacatggatcgcgtgctcctcaagtacaccgaatatagtgagcctcacgaatcaaggactaataccgatatcctggagactctgaaacgacggggcatcggcctggacggcccggagctagaacctgacgagggcccagaggaacccggggaaaagtttaggcgcctggcaggcgagggaggcgatccagcgctgccaagaccacgcctgtatccagcagccccagctatgccttctcccgacgtggtctatggcgccttgccccccccagggtgcgatccatccggcctgggagaagcgcttcccgcacagagtcgaccaagcccattcaggcctgctgcccccaaggccggtccacctggactggtgcatccattattcagcccctctcatcttacatctaaaacgccccctccactctacctgcccacagaaggccggagaagtgatttgcccggcggcctagctggacccaggggagggctgaatacctcacggtcgctctactctggtcttcagaatccttgtagcactgcaacgccaggccctcctctaggatccttccccttcctgcctgggggcccccctgagtatggcctcggagatcccccacctccccccgggctgctccagccaccgactttagcaccttggcagccgagtcgcggcgacgggccgcccgctgtgtcgagtcaaccttctggaggaagatcccttggagaagaaggaccccccaccaggggagcctcacctccgactcctccagtgtcaattaagtcagagcgactttccccggcacctggcggacccggggatttcccaaagaccttcccataccccctacttcttgcacgaagtcttgctgaacccctgcggcctgggccagccctcagaaggctgcctttggccgacggctggccaaggtag

SEQ ID NO: 125309 - DNA, 1098 bp, synthetic construct
  misc_feature 1..1098: note = Description of Artificial Sequence: Synthetic coding sequence
  source 1..1098: mol_type = other DNA
atgggaaggaaaaaaatacagatcagcagaatcctcgaccagagaaataggcaagtaacattcaccaaaagaaagtttggcttgatgaaaaaggcctacgaacttagtgtgctgtgcgactgtgaaatagcccttatcatctttaattctgctaatagactgttccagtacgctagtaccgacatggacagggtgctgttaaaatacactgagtattcggaaccgcatgaaagtcgaaccaatacagatatcctggagaccctgaagcgccgcggcataggtctggacggaccagaattagagccagacgagggcccagaggagcctggggagaagtttagacgactggcaggcgagggtggagatccagctctgcctaggccacgactataccccgccgcccctgccatgccatctcccgatgtggtctatggagctctgccccctcctggatgcgacccatcaggtctgggcgaagccctgccggcccagtcgcgaccttctcccttccggcctgcagcccccaaggctggccctccgggactggtccatccactattcagtccctcacacctgacctccaaaacccctcctcctttgtatctgcccacagaaggcagacgctcagacctccccgggggattagcgggcccacgcggtggacttaatacatctcgctcgctgtacagcggcctccaaaacccatgtagcacagccacacctggaccacctttgggaagcttcccttttctgcccggaggtccgcccgtgggagcagaggcctgggctcgccgggtcccacaaccagcggctcccccacgccgaccgcctcagtccgccagtagtctttctgccagcctgaggccacctggtgcacccgcaacattcttaaggccctcacctatcccttgctcatctcctggtccatggcagagcctctgcggtctcggtcccccatgtgccgggtgtccttggcccactgccggacccgggagacggtccccaggcgggactagcccggaacggtctccgggtactgccagagctaggggtgatccaacttcactgcaggccagcagtgaaaagacgcagcaatag

SEQ ID NO: 125310 - DNA, 1392 bp, synthetic construct
  misc_feature 1..1392: note = Description of Artificial Sequence: Synthetic coding sequence
  source 1..1392: mol_type = other DNA
atggggcggaagaaaattcagattacccgcatcatggatgaaagaaacaggcaggtgacgttcactaaacggaaatttggtttaatgaagaaagcctatgagctcagcgtactgtgcgactgcgaaatagccctgataattttcaatagtacgaacaagctgttccagtacgcctccaccgacatggacaaggtacttctcaagtacactgaatataatgagccgcacgagagcagaacaaatagtgacatcgtcgaggccttgaataaaaaagagaacaaaggctgtgagagtcctgatccagacagttcctacgcactgacccccagaacggaagagaaatacaaaaaaattaatgaggagttcgacaatatgatcaaatcccataagattcctgctgttccacccccgaacttcgagatgccagtgtctatccccgttagctctcataactccctcgtctattccaatccggtgagttcattggggaacccaaacctgttgcccttagctcacccatcgctgcagcggaattcaatgagtcccggcgtgactcacaggcctcccagcgccggaaatacaggggggcttatggggggcgatcttaccagcggcgccggaacttcagcgggcaatgggtatgggaacccacggaattctcctggtcttttggtgtcccctggcaacctaaataaaaatatgcaagcaaaatcaccacctccaatgaaccttggtatgaataatagaaagccggacctgcgcgtactcatccccccaggatcgaaaaatacaatgccatctgtgaaccagaggattaataattcccagtcagcccaaagcctggcaaccccagtggtcagcgtggcaaccccaacgctcccggggcagggtatgggcggctacccgagcgcgatatcgactacttacggtaccgaatacagcctgagctccgcagatctgtctagcctcagcgggtttaacactgcctccgcattgcacctggggtccgtcactggatggcaacagcagcacctgcataacatgcctccgtccgctttgagccagctgggagcctgcactagtactcaccttagccaatcatctaatcttagtttaccctctacacagtctctaaacatcaaatccgagccagtcagccctccacgggaccggacaaccacaccatctcggtaccctcagcatactcgtcacgaggcaggtcgctccccggtggatagcctttcgtcttgttcttcctcttacgatgggtctgaccgggaggatcacaggaacgagtttcacagccctataggactgacccgtccgagtcccgatgagcgcgaatcacccagcgtgaagcggatgcggctgagtgagggatgggcaacatag

SEQ ID NO: 125311 - DNA, 1422 bp, synthetic construct
  misc_feature 1..1422: note = Description of Artificial Sequence: Synthetic coding sequence
  source 1..1422: mol_type = other DNA
atgggacgcaagaaaattcaaataaccaggattatggatgaacgcaacagacaggtgaccttcaccaaaagaaagttcggcctcatgaaaaaagcctacgaactgtctgtcttgtgcgactgcgaaatcgccctcattatcttcaattcaactaacaaattgtttcaatacgcctccacggacatggataaagtcttgctcaaatacaccgagtataatgaacctcacgaaagccggaccaactctgacatagtcgagacactgaggaaaaaagggctcaatggttgtgactcccccgaccctgacgctgacgattccgtggggcactccccagagtcggaagataaatataggaagattaacgaggacattgacctgatgatatctagacagcgattgtgtgccgtacccccacccaatttcgaaatgcctgtgtccattccagtgagttcacataattcgctcgtgtactctaatccggtgtcttcccttggtaaccctaacttgttgcctctggcacatcctagtctgcaaagaaactccatgtcacctggcgtgactcatagacctcccagcgccgggaacaccggtggcctcatgggaggcgacttaacatctggggctggaactagcgctggcaacggttacggcaacccaagaaattctcctggcctactagtctccccaggcaacctaaacaagaatatgcaggccaagtcaccccctccaatgaatttgggtatgaataatagaaagccagatctgagagtgctcatcccacccgggtcaaaaaataccatgccatctgtgtccgaggacgtcgacttactcctgaaccagcgcatcaataattcacagtcagcccaatcattggcaactccggtcgtgagtgtggcaacccccactctgcctggccagggtatgggtgggtacccttctgccatttccactacgtacggcactgaatattcactgtccagcgcagatctgagttcccttagtggctttaacaccgcgtccgcactacacctgggatctgtgaccgggtggcaacagcaacacctacataatatgcccccttcagccttgagccagctcggagcttgtacgtccacccacctgtcgcagtctagcaacctgtcactcccaagcactcagtcgctgaatattaaaagtgaacccgtgtcgccgcccagagacaggaccaccactccaagcagatacccacagcacacaaggcacgaagcggggcggagtcctgtcgattccctcagttcatgttcttcctcttatgatggaagtgatcgcgaggaccataggaatgagtttcattccccaataggactgacccgcccgtccccagacgagcgagaatccccctcagttaaaaggatgcgacttagtgaagggtgggccacttag

SEQ ID NO: 125312 - DNA, 297 bp, synthetic construct
  misc_feature 1..297: note = Description of Artificial Sequence: Synthetic coding sequence
  source 1..297: mol_type = other DNA
atgggcagaaagaaaattcagatcacccgcatcatggatgagcgcaaccgacaggtgacttttactaaaagaaaattcgggctcatgaagaaagcttatgagttgtcagtactttgcgactgtgaaatagcacttatcatttttaatagcaccaacaagctttttcagtatgcgagcacagacatggataaagtgcttctcaagtacaccgaatataatgagccccatgagtcccgaaccaactccgatatcgtggagacgcttagaaaaaagggcctcaatggctgcgactcctag

SEQ ID NO: 125313 - DNA, 390 bp, synthetic construct
  misc_feature 1..390: note = Description of Artificial Sequence: Synthetic coding sequence
  source 1..390: mol_type = other DNA
atgggccggaaaaagattcagatcacccgcataatggacgagaggaatcggcaggttacattcacaaagaggaaattcggtctgatgaaaaaggcctacgagctgagcgttctgtgcgattgtgagatcgctcttataatatttaacagcactaataagctgttccagtatgcatccacggacatggataaggtcttgctgaagtacactgagtataatgagccccacgaatcgagaaccaattcagatatcgtggagaccttgcgcaagaaaggcttgaacggatgtgatagccctgaccccgacgccgatgatagtgttggacatagcccggagagtgaggacaaatatagaaagattaacgaggacattgacctgatgatctcttag

SEQ ID NO: 125314 - DNA, 264 bp, synthetic construct
  misc_feature 1..264: note = Description of Artificial Sequence: Synthetic coding sequence
  source 1..264: mol_type = other DNA
atgggccgtaagaaaatccagataaccagaattatggacgagcgtaacagacaggtaacctttaccaagcgtaagtttggcctcatgaagaaagcatatgaactgtcagtcctgtgcgattgcgagatcgcgctgatcatctttaattcaacgaacaagctgttccagtatgcctccactgacatggacaaagtcctgctgaaatatacagagtataacgagcctcatgaatctagaactaactcggacatagtagagacctag

SEQ ID NO: 125315 - DNA, 1422 bp, synthetic construct
  misc_feature 1..1422: note = Description of Artificial Sequence: Synthetic coding sequence
  source 1..1422: mol_type = other DNA
atgggtcgaaagaagatccaaatcacaagaataatggatgagcggaatcggcaggtgacctttactaagcgaaaattcggtctgatgaaaaaggcctacgagctgtccgtgctgtgtgattgtgaaatcgccctcatcatttttaatagtactaataagctgtttcagtatgcttcgaccgacatggataaggtgctcttgaagtatacggaatacaatgaaccacatgaaagcaggacaaattcagatattgtggagaccctgcgtaagaaaggcctcaacggttgtgactctcccgatcctgatgccgacgatagcgtcgggcattccccggagagcgaagataaatatcgcaagatcaatgaggacatcgacctaatgattagcagacagaggctctgtgcagtgccacctccaaatttcgaaatgcctgtgagcattcctgtgtcttctcataatagtctggtctatagcaatcccgtgagttcactgggtaatcctaacctgcttcctcttgcgcatcctagcttgcagaggaatagtatgagccccggagtcacacacagacccccatccgccggaaatacaggcggcctgatgggtggtgaccttacctccggcgccggaacctccgctgggaacggttatgggaaccccaggaattcacccgggctgctagtctcccccgggaacctcaacaagaatatgcaggcaaaatcccctccccccatgaacttgggcatgaataataggaaacctgatctcagggtcttgatcccgcccgggtcaaaaaacactatgcctagtgtggtgatccagaactatatcctgaaaaatcaaagaatcaacaatagtcaatccgctcaatctctcgcgacgccggtggtctccgtagctactccgacgctccccggccaggggatgggcggctacccatccgccatctctactacctacgggacggaatattcactctcctccgccgacttaagttcactgagtggatttaacaccgcaagtgccctgcatctggggtccgttactggctggcagcagcaacacctacacaatatgccgccctccgcccttagccagttgggggcctgtaccagtacccatctttctcagagtagcaacctgtcattaccctccacccaatcactgaacattaagtctgaacctgtgtcccctccaagggaccgcacgaccacgccttccaggtacccacaacacacccgacatgaagcaggcaggagcccggtcgattctttgtcctcttgttccagttcctatgatggtagcgatcgggaagatcataggaatgagtttcacagcccaattggcctcacaaggcccagccctgatgagagagaaagtccgtctgtaaaacgcatgagactgtcagaaggatgggctacatag

SEQ ID NO: 125316 - DNA, 684 bp, synthetic construct
  misc_feature 1..684: note = Description of Artificial Sequence: Synthetic coding sequence
  source 1..684: mol_type = other DNA
atggggaggaaaaaaattcagattacacggattatggatgaacgtaatagacaggtcaccttcactaagcgcaagttcggtttgatgaagaaagcctatgagctttccgtgctgtgcgattgcgagattgcactgataatttttaacagtactaacaagcttttccagtatgcatccactgatatggacaaggtactattaaaatacaccgaatacaatgaacctcacgaatcccggacaaattcagatatcgttgaggcccttaataaaaaggagaataaaggttgcgaaagtcccgacccagatagcagctatgcattgactcccagaaccgaggaaaagtataaaaaaattaacgaagaattcgacaacatgataaagagccacaaaataccagctgtcccacctcccaacttcgaaatgcccgtgagcatccccgtttcctctcataacagcttggtgtattctaaccccgttagcagcctcgggaatcctaatctgctacctttggcccaccccagtctgcagcgcaactctatgtctcccggcgtgacacatagacccccaagcgccggtaacaccggggggctgatgggcggtgacttaactagtggagccgggacgagtgccggcaatggctatggcaacccccgaaacagcccaggcctgctggtcagcccatag

SEQ ID NO: 125317 - DNA, 363 bp, synthetic construct
  misc_feature 1..363: note = Description of Artificial Sequence: Synthetic coding sequence
  source 1..363: mol_type = other DNA
atgggccgaaagaaaatccagattactcgtataatggacgagcggaaccgacaagtgacattcactaaacgcaaattcggactaatgaaaaaggcttacgaattgagtgttctgtgcgattgcgagatagccttgatcattttcaacagcacaaataagctattccagtatgcgagcaccgacatggacaaggtgctgctaaagtatacggagtacaacgaaccacacgagtctaggaccaactcagacatcgtcgaagcacttaataaaaaggaaaataaggggtgcgagtcacccgaccccgactcttcctacgcgctgacccctcgaaccgaggaaaagtacaagaaaattaatgagtag

SEQ ID NO: 125318 - DNA, 381 bp, synthetic construct
  misc_feature 1..381: note = Description of Artificial Sequence: Synthetic coding sequence
  source 1..381: mol_type = other DNA
atgggccggaagaaaatccaaattacaagaattatggacgagcgcaacagacaggtgaccttcacaaagagaaagtttggactgatgaagaaggcctacgaactctcagtgttgtgtgactgcgaaattgcccttatcatctttaactcaacgaacaagcttttccagtacgcctctactgacatggacaaggtcttgctcaagtatactgaatataacgagccccacgaatcccgcacaaactctgatatcgtggagactctccgaaaaaaaggcttgaatggatgcgactctccagatcctgatgcagacgactccgtcggacactctcccgaaagcgaagataagtataggaagattaacgaagatattgatctttag

SEQ ID NO: 125319 - DNA, 87 bp, synthetic construct
  misc_feature 1..87: note = Description of Artificial Sequence: Synthetic coding sequence
  source 1..87: mol_type = other DNA
atggggcgcaagaagatacagatcacgcgcataatggacgagaggaataggcaggtaacatttacaaaacggaaattcggtctgtag

SEQ ID NO: 125320 - DNA, 1398 bp, synthetic construct
  misc_feature 1..1398: note = Description of Artificial Sequence: Synthetic coding sequence
  source 1..1398: mol_type = other DNA
atgggtcgcaagaagatccagatcacccgcatcatggacgagcggaaccggcaggtgacctttactaaacgaaagttcggtcttatgaagaaagcctacgagctgagcgtcctgtgtgattgcgagatagcacttattattttcaattcaactaataaactcttccagtacgcttccactgacatggataaggttctcctcaaatatactgagtacaacgaaccacacgaatccaggaccaactcagacattgtggaaaccctgcgtaaaaagggtttgaacgggtgcgattctcccgacccagatgctgacgattctgttgggcactccccagaaagcgaggataagtatcgaaaaattaacgaagatatagatctcatgataagtcgccagcgtttgtgcgctgttccaccacccaattttgaaatgcctgtatctatccccgtgtcttctcacaattctctcgtttatagtaacccagtgagcagcctcggcaaccctaatttgctccccctagctcatccctctttgcagaggaattccatgtcaccaggcgtgacacatcgcccaccctctgcaggtaatacgggcgggctgatgggaggggacctgacgtccggcgccggcacctccgctggcaacggctatggcaatcctagaaattcgcccggattattagtatctcccggaaatctgaataagaatatgcaggcaaaatctccacctcccatgaacctggggatgaacaaccggaagccggatctgcgtgtactgataccccctggaagtaaaaatactatgccctctgtcaaccagaggattaacaactctcagtccgcccagtctcttgcaacccctgtcgtatctgtagcgacaccaactttacctggtcaggggatgggggggtatcctagtgctattagtacaacatatggcacagagtactccttaagttcagcggatctgagctcactatcagggtttaatacggccagtgcccttcatctgggctctgtcacaggctggcagcagcagcacttacacaatatgccaccatctgccctcagccagctgggggcatgtacaagtactcacctctcacagagctctaacctctcgcttccctcaactcaatcgctgaacattaagtctgagcctgtctcgcccccgcgggatcgaacaactacgccctcgcggtatccacaacacacaagacatgaagctggcagaagcccagtggactccctttcatcatgttcctcttcatacgatggtagtgaccgggaggaccaccgcaatgagttccactcaccgattggtctaacaaggccgtcacccgatgagagagaatcaccaagcgttaagcgcatgcggttgtctgagggctgggcgacatag

SEQ ID NO: 125321 - DNA, 729 bp, synthetic construct
  misc_feature 1..729: note = Description of Artificial Sequence: Synthetic coding sequence
  source 1..729: mol_type = other DNA
atggggagaaagaagattcagattactaggattatggacgagcgaaaccgccaggtgactttcacaaaacggaagtttggccttatgaagaaggcgtatgagctgagcgtactatgtgactgcgagatcgctctgatcatctttaattctaccaataagcttttccaatatgcaagtaccgacatggacaaggtgctactcaagtatacagaatataatgaaccccacgaatctaggactaacagtgatattgtggaggcgttgaataaaaaagaaaataagggctgtgaatcgcccgaccctgacagtagctacgcgctcaccccccgtacggaggagaaatacaaaaaaatcaatgaagaatttgacaatatgatcaagagccataagataccagctgtgcccccacccaacttcgaaatgccagtctctattccggtgtccagtcataattcactggtgtacagtaaccctgtctccagcttgggcaatcccaatctgctacctttggctcatcccagcctccagcgtaactccatgtctcctggcgtgacgcacaggccccccagtgccggcaataccggcgggctaatgggcggagatctgacctcaggcgcaggtacgtctgcggggaacggatatggcaaccctagaaactctcccggactgctggtgagtccaggaaacctgaacaaaaacatgcaggcaaaaagccctccccctatgtag

SEQ ID NO: 125322 - DNA, 1326 bp, synthetic construct
  misc_feature 1..1326: note = Description of Artificial Sequence: Synthetic coding sequence
  source 1..1326: mol_type = other DNA
atgggacggaaaaaaatccagataactcgcattatggacgagaggaaccgtcaggtaaccttcacaaagaggaaattcggtcttatgaagaaagcctacgaactctctgtgctgtgtgattgtgagatagctctgattatatttaactccacaaacaaattgtttcagtatgcgtctaccgatatggacaaggttttgctgaagtacaccgaatacaatgagccacacgagtcccgcacaaactcagatatcgtggaaacactgcggaagaaaggtctgaatgggtgcgatagtcccgatcctgacgcagatgacagcgtgggccacagtcctgagtctgaggacaagtatagaaagattaacgaggacattgatttgatgatcagtcgacagagactctgtgctgtgcctccgcctaattttgagatgcccgtctctatccccgtgtctagtcataacagcctagtgtactccaaccccgtgtcttcccttggtaatccaaacctcctaccactagcccacccatctctccaacggaactcaatgtctcctggtgttacccaccgcccacctagtgcaggcaacacggggggtcttatgggcggagatctgacgtcaggggcggggaccagcgcggggaacggatatggtaacccacgtaattcgccaggcctcctggtgtctccaggaaatctcaacaaaaatatgcaggccaaatctccccctcctatgaatttagggatgaacaaccggaaacctgaccttcgggtgctcattccccccgggtcaaagaacacaatgccaagcgtaagcgaggacgtggatctcttgttgaatcagagaattaataatagccagtccgcgcaaagccttgcaacaccggtagtttctgtcgccacccccacgctgcctggacagggcatggggggctacccatccgctattagcacaacctatggaaccgaatacagcctctcctccgcagacttgtcttccctcagtgggtttaacacagcttctgccctgcatctgggttcagttacaggatggcagcagcagcacctccataacatgccgccatcggctttatctcaactgggtgataggacaaccactccttctcggtatccgcagcacaccaggcacgaggctggccgatctcctgtggactcacttagctcttgtagctcgtcctatgatggcagcgatagagaagaccatagaaacgaattccatagccctatcggcctaactaggcccagtcctgatgagagagagagcccatcagtcaaacgcatgcgcctcagcgagggttgggccacatag

SEQ ID NO: 125323 - DNA, 1422 bp, synthetic construct
  misc_feature 1..1422: note = Description of Artificial Sequence: Synthetic coding sequence
  source 1..1422: mol_type = other DNA
atgggaagaaagaagattcagataacacgtatcatggatgaacggaatcgccaggtcacattcaccaaaagaaaattcgggcttatgaagaaggcttatgagctgagtgtcctttgcgattgtgaaatcgcgctgatcatttttaacagcacgaataaactttttcagtatgcaagcacagacatggacaaagtgttgctgaagtacactgagtataatgaaccgcacgaatcccggacaaattcagatatcgtggaaacgctgaggaagaaggggctcaatggatgcgattcacccgaccccgacgcagatgattccgtcggtcactcccctgagagcgaggataaatatcgcaagatcaacgaggacatcgatctgatgatcagcaggcagaggctgtgtgctgtgcccccccctaattttgaaatgccagtgagcattcccgtatcatcccacaattcattggtctattccaacccagtgtcctcgctgggcaaccccaacctgctccctctggcccacccttccctgcagcggaattctatgtctcctggagtaacccaccggcccccatccgccggcaacacaggtggactgatgggtggagatcttacaagtggggctgggacctcagccggcaatggttatggtaatccccgcaactcacctgggctgctagtatcccctggaaacctgaataagaacatgcaagccaaatctccccctccaatgaacctcgggatgaacaatcggaagcctgatctcagagtgctgataccacctggctccaagaataccatgccatccgtttccgaggacgtggacctcctcctaaatcagaggatcaataattcccaatcagcacaaagcttggctacgccagtggttagtgtggccactcccacgctgccgggacagggaatgggtggctacccatctgcgattagtacaacttatggaaccgaatatagcctgagcagcgccgatctatcttccttgtctggcttcaacacggcgtcggcgctgcatttaggcagcgttaccggctggcagcagcagcacctgcataacatgcccccatctgcgctgagtcaactcggagcttgtacatcaacccatttgagccagtcctctaacctcagtttaccgagtactcagagtttaaatattaaaagcgagcccgtgtctccaccgcgggaccggacaactaccccctctagataccctcagcacacacgacatgaagcaggtcgctctcccgtagactcactttcctcctgttcctctagctacgatggaagcgatcgcgaggatcatcgcaatgagtttcattccccaatcgggttaacgcgacctagccctgacgagagagagagtcctagcgtgaagcggatgcggctttcggaaggctgggcgacatag

SEQ ID NO: 125324 - DNA, 1254 bp, synthetic construct
  misc_feature 1..1254: note = Description of Artificial Sequence: Synthetic coding sequence
  source 1..1254: mol_type = other DNA
atggggaggaagaagatacagatcactagaatcatggacgaaaggaaccgtcaggttacctttacgaagcggaaattcggactgatgaaaaaggcatacgagctgtctgtcctctgtgactgtgaaatcgcgctgattattttcaacagcacaaacaaactattccaatatgcctcaacagacatggataaggtgctccttaaatacaccgaatacaacgagcctcacgagtcgcgaactaattctgacatcgtagaagccgtccccccaccaaactttgagatgcccgtgtctatcccggtgagttcacataactccctggtgtacagcaacccagtgtcctcattggggaatcccaatctattgcccctcgcccacccgagtcttcagaggaattccatgagccccggtgtgacacatcgtcctccttctgctgggaacaccggcggtctcatgggcggtgatctgacaagtggcgctggcactagtgcggggaatggttacgggaatccacgtaacagtcccggcttactcgtgtcaccggggaacctgaataaaaacatgcaggcgaagagtccccccccgatgaatttaggcatgaacaaccgcaaacctgaccttagagtcttgattccccctggtagtaagaacaccatgccgtctgtgaatcaacgtatcaataacagccagtccgctcagtcccttgctactccggtggtatcagtggccaccccaaccctgcccggccaagggatggggggttacccaagtgcaatctctactacttatggaacagaatattccctgtcaagcgcagacctcagctcgctgagtggcttcaatacagctagtgcccttcaccttggttctgtgaccggctggcagcagcagcacctgcataatatgcctcccagcgctctgagtcaattgggcgcctgcaccagcacgcacctgagtcaatcctccaatctgtctctgccatcaactcagagcctgaacattaagtccgaacccgtgtctcccccgcgcgatagaacaaccaccccctctaggtacccccagcacacgcggcacgaagccggacgatcccccgtcgactcattatccagctgtagttcctcctacgatggttcagatagagaagatcatagaaacgagttccacagtccaataggcttaacaaggccgtcccccgacgagagggaatcaccaagcgtgaaacgaatgcgcctgtctgagggctgggccacatag

SEQ ID NO: 125325 - DNA, 1452 bp, synthetic construct
  misc_feature 1..1452: note = Description of Artificial Sequence: Synthetic coding sequence
  source 1..1452: mol_type = other DNA
atgggcaggaagaaaatacaaatcactcgaataatggacgaacgcaataggcaggtgacttttaccaagagaaaatttgggcttatgaagaaggcttacgagctgtcagtgttgtgtgattgcgaaatcgccctgattatttttaacagtaccaataagctcttccagtacgcatccactgacatggacaaggtgctgcttaagtacactgagtacaacgagccccacgagtctcggaccaattccgatatcgtggagacattacgcaaaaaggggttgaatggctgcgactcccctgatcctgatgccgacgattcggctctcaacaaaaaggaaaacaaaggctgtgaatcccctgaccccgacagcagctatgcgttgacacccaggacagaagagaaatacaagaaaatcaatgaggaattcgacaatatgattaagagccataagattccagccgtgccccctcccaacttcgaaatgccagtttcaatcccggtgtcctcacacaactccctggtctacagcaatcctgttagctctctgggaaatcccaacctgctaccactggcgcatccatcattgcagagaaactccatgtcaccgggcgtgacccataggccccccagtgccggcaacaccggcggtctcatgggcggagatctaacctctggcgcagggaccagtgccgggaacggctacgggaacccccggaatagcccagggctgctcgtgagtcctgggaacttgaataagaacatgcaggccaaatcacccccacctatgaacctcggaatgaataatcggaaaccagacctcagagttctgattcctccgggatccaaaaacactatgccctctgtcaatcagcgcattaataattcgcagtcagcacagagcttagcaacaccagtggtgtcggttgccacccccaccctgccaggccagggaatgggtggctacccttccgcgatcagcactacatatgggacggagtatagtctatctagtgcggatctctcctccctttctggattcaacactgcgtctgccctgcacctcggtagtgtgactgggtggcaacagcaacatttgcataatatgccacccagcgccctgtctcagcttggtgcatgcacatctacacacctgtcccagtctagcaatctgtcactgccatcaacccagtctttaaacatcaagtctgagccagtatccccccccagagatcgcaccaccaccccgtctcgttacccacagcacactcgtcacgaggccggcaggtcccccgttgacagcctatcatcctgttccagcagctatgacggatcagaccgagaggaccaccggaacgagttccattccccaatcgggctgaccaggccaagccctgacgaacgcgagagccccagtgtcaagcggatgcgcctgagcgagggttgggccacgtag

SEQ ID NO: 125326 - DNA, 1563 bp, synthetic construct
  misc_feature 1..1563: note = Description of Artificial Sequence: Synthetic coding sequence
  source 1..1563: mol_type = other DNA
atgggtaggaaaaagatacagatacagagaatcaccgacgagaggaacagacaggtcaccttcaccaagcgtaaatttggattgatgaagaaggcctatgagctgagcgttctctgcgattgcgagatagctctgatcatctttaatcattcaaataaactcttccagtacgcttccaccgacatggataaagtgttacttaagtataccgaatacaatgagccacacgaatccagaacaaatgcagacattattgaagccctgcacaagaaacatagagagtgcgaaagtcctgaagttgatgaagtgtttgccttaacaccccagactgaggagaaatataagaaaatcgacgaggagtttgataaaatgatgcagtcctatcgactcgcctccacagtgccggccccaaattttgcaatgcctgtgacggtgcccgtatcaaatcaatcctcactgcagttctcaaatccgtccgggtccctggttactccatcactcgtgacatcgagtctcacagaccctcgcctattgagcccacagcaacctgcccttcagcgcaacagtgttagtccgggcctaccgcagagacccgcctctgcaggagctatgcttggcggcgacttgaatagtgctaacggagcctgcccttcccctgtaggaaacggatatgtgagcgcccgggccagtcctggcctgttgcctgttgccaacggaaattctctgaacaaggtcattcccgctaaaagcccaccacccccaacccacagcacccagctgggtgccccaagccggaagccggaccttcgggtcatcacctcccaagccggtaagggtctaatgcaccatctgactgaggaccacctcgacctgaacaacgcacagagactgggagtgtcccagtctacccattcactgactactcctgtggtgtccgtggccaccccatccctactgagccaggggttgccttttagctcaatgcctacagcctataatacggactatcagctgacatccgcagagctgtcctctctgcccgcttttagctctccaggaggactgtctctcgggaacgtgactgcctggcagcagccacagcagcctcagcaaccccagcagccacagcctccacagcaacaaccacctcagcctcagcagccccaaccccagcaacctcagcagccgcagcagccccctcagcaacagagccacttggtgcccgtcagtttgagcaacctcattccaggctcacctctgcctcacgtcggtgcagctctaacagtcaccacgcatcctcacataagcattaaaagtgagccagttagtccatctagagagcggtctcccgctccccctcctcccgcggtgtttcctgctgcccgccccgaacctggtgacgggctgtctagtcctgctggggggtcatatgaaaccggcgatagagacgatgggcggggcgacttcggcccgaccctgggacttcttagaccagcacccgagcctgaagcagagggcagtgcagtgaaacgtatgagacttgatacatggacactgaagtag

SEQ ID NO: 125327 - DNA, 1566 bp, synthetic construct
  misc_feature 1..1566: note = Description of Artificial Sequence: Synthetic coding sequence
  source 1..1566: mol_type = other DNA
atgggcagaaagaaaattcagattcaacgcatcacagacgaacgaaatcgccaggtgactttcactaaacgcaaattcggtctgatgaaaaaggcatacgaactgtccgttctctgcgattgcgaaatcgccctgatcatctttaaccacagcaataagctctttcaatacgcttccactgacatggacaaggtgcttctgaaatatacggagtataacgagccccatgagagccgtaccaacgcggacatcattgagacacttaggaaaaaaggcttcaacggctgtgacagccccgaacctgatggggaggattcattagagcagagcccactgctcgaagataagtatcgtcgcgcgagcgaagagttagacggcttgttcaggaggtatggttctacagtccctgctcctaacttcgctatgcccgtaacggtacctgtgagcaatcagtccagccttcagttctccaatccttccggtagcctggttactccctctcttgttacttcatcactgacggaccctagactcctctccccacaacaacctgcactccagcgtaacagcgtgagcccggggctgccacaaaggcccgctagtgccggggcaatgctcggaggtgatctgaacagcgcaaatggagcgtgcccaagccctgtaggaaatgggtacgttagcgcccgagcaagccctggactcttgcccgtggcaaatgggaacagcttgaataaagtcatacccgctaaatctcctccgcccccaacgcattccacccaattaggcgcccctagccgaaagcctgaccttcgggttatcaccagccaggcgggaaagggtttaatgcaccatctgacagaagatcacctggacctgaacaatgcgcaaaggctgggtgtgagtcagagcacccacagcttgactaccccagtcgtcagcgtcgccacaccctctttactgagtcaagggctgcccttctccagcatgccgacagcctacaacacggattaccagcttacctcagccgagctgtcttcactaccagctttctcgtctcctgggggcctatccctagggaacgtgactgcatggcagcaaccacagcagccccagcagccccagcagccgcagccccctcagcagcagccccctcagcctcagcaaccacagcctcagcagccacaacagccccagcagcccccacagcagcagtctcacctggtcccagtaagcctgagtaatctaatcccggggtcccctctgcctcatgtcggtgccgccctgaccgtcacaactcatccacatattagcatcaagtctgagcccgtctctccttcaagagagaggtctcctgccccacctccacctgctgtgttccccgctgctcgacccgaaccaggcgacggactctcctcacccgctggcgggtcttacgaaaccggagaccgcgatgatggtcggggcgattttggaccaacactaggcttgctgaggcctgcccctgagcctgaggccgagggcagcgccgtcaaacggatgcgactggatacgtggacattgaagtag

SEQ ID NO: 125328 - DNA, 1428 bp, synthetic construct
  misc_feature 1..1428: note = Description of Artificial Sequence: Synthetic coding sequence
  source 1..1428: mol_type = other DNA
atgggccgtaaaaagatacagattcagaggataaccgacgagcggaatcgccaagtgactttcaccaagcggaagttcgggttgatgaaaaaggcttacgaactgtccgtgctgtgtgattgcgaaatcgccctgatcatattcaatcatagcaataagctgtttcaatatgccagtaccgatatggacaaggtactcttgaaatacaccgagtacaatgaaccgcatgagtccaggaccaacgccgacatcatcgagtctacggtccctgcacccaacttcgccatgcccgtcactgtgccagtgagtaatcagtcttctctgcagttcagtaacccttctggaagtctcgtgactccctctcttgtaacctcttcactcacggatccccgtctgctgagtccccaacagccagcgctgcagaggaatagtgtatcaccaggcctacctcagcgccccgcttccgcaggggctatgctcggcggggatctgaatagcgcgaatggagcttgtccctcccctgttggcaacgggtatgtttccgccagggctagcccagggcttcttccagtcgctaatggtaatagtctgaacaaagttattccagcgaaaagcccaccaccccccacccatagcacgcagctaggggctccatcacgcaaaccggaccttagagtgattacttcacaagcagggaaagggcttatgcaccaccttaccgaagaccatcttgacctcaacaacgcgcaacgtttgggcgtgtcccagagcacccacagtctgacgactccagttgtgagtgtcgctaccccgtccctcctgtctcagggtctcccattttcctctatgccaaccgcatacaatactgattaccagcttaccagcgccgaactttcaagtttgccggctttttcgtcccctggtggactctctttaggcaacgtgaccgcatggcaacagccccagcagccacagcagccccagcagcctcagccaccccagcagcagccacctcaacctcagcagccacagccacaacagcctcaacagccacagcagccgcctcagcagcagtcacacttagttcccgtgtcactgagcaatttgattcctggctccccgcttcctcacgtgggagcagctctgactgtgacgactcatccccatatctctattaagtctgaacccgtatctccgtcccgcgaacggtcaccggcccctccaccccccgccgtgtttccagctgcgcgaccagagccgggcgacggcttgtccagtcctgcaggaggatcttacgaaactggggatagagacgatggtagaggagactttggacccacactgggcctgctgcgccccgccccggagccagaggccgaaggctcagcagtgaagcgcatgaggctggatacctggacccttaaatag

SEQ ID NO: 125329 - DNA, 1545 bp, synthetic construct
  misc_feature 1..1545: note = Description of Artificial Sequence: Synthetic coding sequence
  source 1..1545: mol_type = other DNA
atgggtaggaagaaaatccaaattcaaagaatcacagacgaaaggaataggcaggtgacttttaccaaacgaaaattcggactaatgaagaaagcctatgagttgagcgtcctgtgtgattgcgagatagccctgataatcttcaaccacagtaacaagctgtttcagtatgccagcacggatatggataaagtactactgaagtacaccgagtataatgaaccacatgaaagcagaaccaatgctgacattattgaaactctgagaaagaaagggttcaatggttgtgacagcccagaaccggacggcgaggattctctagaacaaagcccgttgcttgaggacaagtacaggcgcgcctcagaagaattggatgggctgttccgaaggtacgggtctacggttcccgctccaaacttcgcaatgcctgtcacagtgcccgtgagcaaccagagtagcctacagttcagtaatccctcgggctcactggtgacaccctcactggtgacttcttcactgaccgatcctcggctactcagcccacaacagccagcattgcaacggaatagcgtctctcctggactccctcagcgccctgctagtgccggcgccatgctggggggggacctgaactcagccaatggcgcctgcccttcccctgtgggaaacggatatgtctcagcaagggccagccccgggctgctgcctgtagcaaatggtaacagccttaacaaggtaattcctgctaagagccccccacctcctacccactcaactcagctgggcgcaccatcgcgaaagcctgacctccgcgtcataacctcacaggctggcaaaggacttatgcaccatctcaataacgctcagcgcctgggtgttagccagtctacccatagccttactactcccgtcgtctctgtggctaccccttccttgttaagccagggtctccccttcagctctatgccaaccgcatataatacggactaccagctgaccagcgcggagctttcaagtctgcctgccttcagtagccctggcggccttagtctgggtaatgtcacggcttggcaacaacctcagcagcctcaacaaccccaacaaccccagccgccccaacagcagcccccacagcctcagcagccacaaccacagcagcctcagcagccccaacagcctccacagcaacaatctcacctggtgcccgtcagcctctcgaaccttatacccggatctcccttaccacatgttggagctgctctaacagtcaccacacacccacatatttcaatcaagtccgagccagtcagcccgtcccgcgagaggagcccagccccgccaccccctgcagttttcccggccgcaagacccgaacctggcgacggactctccagcccggcaggcggatcctatgaaactggagacagagacgatggccgcggcgactttggacccacactaggtctgctcagacccgcgcccgagcccgaagctgagggttcagcagtcaaacggatgcggctggacacctggacgctgaaatag

SEQ ID NO: 125330 - DNA, 1545 bp, synthetic construct
  misc_feature 1..1545: note = Description of Artificial Sequence: Synthetic coding sequence
  source 1..1545: mol_type = other DNA
atgggtcggaagaaaatccagattcagaggatcaccgacgagagaaatagacaagtgactttcacaaaaagaaagttcggcctgatgaaaaaagcctacgagctttccgtactatgtgactgcgaaattgctctgattatctttaaccattccaacaagctcttccagtacgcatctacagatatggacaaggttcttttaaaatacaccgagtataacgagccgcatgagtcccgcacaaacgctgacatcatagagactctacgcaagaaaggattcaacggatgtgattctcctgaacccgacggtgaagatagtctggaacagtcgcctttacttgaggataagtacagacgcgcctcagaggagctcgatggattgttccgacgttacggctcaaccgtccctgctcccaactttgcgatgcccgtgaccgtgccagtgagcaatcagagttccttgcagttctccaacccaagcggaagtctcgtcactccaagcctagttacatcctcccttacagaccctcgactgctcagccctcaacagcccgccctccagcgcaactccgttagccctggtcttccccaacgtcccgcttcagccggggctatgctgggcggagacctgaactccgcaaatggagcctgtccatctcccgtggggaatggatacgtttccgcacgggcctcccctggacttctacctgtcgcaaacgggaattctctgaataaggttatcccagccaagtcgccaccaccacctactcatagcacacaactgggtgcgcctagtcggaaaccggacctcagggtcatcactagccaagcaggtaaaggtctgatgcaccatctgaataacgcacagaggttgggagtatctcagtcaactcacagtctgacaacacccgtggtgtcagtggccactccctcccttttgtcccagggcctgccttttagtagcatgccgaccgcatataacactgattaccagctgacgtccgctgagctgtcaagcctccccgccttttcatcacctgggggattgtctcttggaaatgtgaccgcttggcagcagccacagcagccccaacagcctcagcagccccagcctccccaacagcagcctcctcagcctcagcagccgcagccacaacaaccccagcagccccagcagccgccacagcagcagtcacatctggtgcccgtgtccctgtccaatttgatccctgggtccccccttcctcatgtgggagccgccttaacagttactacacacccccacatttccataaaaagtgagcccgtttcgccatcccgggaacgaagtcccgcgccaccaccacccgctgtcttcccagcggcccgccctgaaccaggcgacgggctttcctctccagcgggcggaagctatgagacaggcgatagggacgatggacggggtgactttggaccgacgctcgggctgcttcggccggccccggaacccgaggcggaaggatccgcagtgaagcggatgaggctggacacctggactctcaagtag

SEQ ID NO: 125331 - DNA, 1533 bp, synthetic construct
  misc_feature 1..1533: note = Description of Artificial Sequence: Synthetic coding sequence
  source 1..1533: mol_type = other DNA
atgggaaggaagaaaatccagatccagcgaatcacagatgaacgtaacaggcaggtgacatttactaaaaggaaatttggcttgatgaagaaggcctatgagctgtctgtgctgtgcgattgcgaaattgcgctcatcatctttaaccactcgaacaaactgtttcagtatgcctccactgatatggataaagtcctgcttaagtacacagagtacaacgaaccccacgaatcccggaccaacgctgacataatcgaggctctccacaaaaaacaccgggaatgcgaatcacccgaagtggacgaggtgttcgcactgactccccagacagaagagaaatacaagaaaatcgacgaagaatttgacaagatgatgcagtcatacagattagcctctaccgttcccgccccaaactttgctatgccagtcactgttcccgtcagcaaccagtcaagtctgcagtttagcaacccctccgggtctctggtgactccttcacttgtcaccagctccctcactgacccccgcctcctgtcaccacagcagcctgcactccaaagaaactcagtgtctcccggtctgccccagcggcccgcaagcgccggcgcaatgctagggggcgatctaaactcggccaatggcgcatgtccaagtccagtcggcaatgggtacgtgtctgcccgcgctagccctggcctgctgcccgttgctaatggaaatagcctgaataaggtcataccagcaaaatcccccccccctcctacgcacagcacccaactcggagccccatcgcggaaacctgatcttcgggtgattacctcccaggcaggtaagggccttatgcaccatttgaacaacgcacagcggctcggtgtcagccagtctacccactctctgacaacaccagtcgtgagcgtcgcaacccccagccttttgagccaggggctgcctttttccagcatgcccaccgcgtacaatacggattatcaactaaccagcgcggaactgagctcgctgcccgctttttctagccccggcggcctgtcactagggaacgtgactgcctggcaacagccccagcaacctcagcaaccccaacagcctcaaccacctcagcaacaaccaccccagccacagcagccacaacctcagcaacctcagcagccccagcagcctccgcagcagcagtcccatctggtacccgtgtcgctcagtaatctgattcctggctcacctttaccccacgtcggagccgccttaaccgtgacaacacatccccatatctctatcaagagtgaaccagttagtccaagccgggagcgcagcccagcgccgcccccacctgctgtcttccccgccgcaagacccgaacctggcgacggattgtcttctcctgctggtgggagttacgagactggagacagggacgatgggagaggagatttcggcccaactctggggctgttgcggcccgctcccgagccagaggctgagggctctgctgtgaagcggatgcgattggacacttggtag

SEQ ID NO: 125332 - DNA, 420 bp, synthetic construct
  misc_feature 1..420: note = Description of Artificial Sequence: Synthetic coding sequence
  source 1..420: mol_type = other DNA
atggggcgcaaaaaaattcagattcagagaattactgacgagcggaatcgccaggtcacctttactaagcgcaagttcggactcatgaagaaagcttatgaactgagtgtcctctgcgattgtgagatcgccttgattatctttaaccactcaaataaactgttccagtatgcttcgactgacatggacaaagtcctgctgaaatacacagagtacaatgagccccacgagtcgcgtacgaatgcagatattatagaaactttacgaaaaaaaggattcaacgggtgcgattcccccgaacccgatggcgaggactccctggagcagagcccactgttagaggacaaataccggcgggcgtccgaggagttggatggactcttccggcgatacggcggcccctgctggggagtgacttag

SEQ ID NO: 125333 - DNA, 1410 bp, synthetic construct
  misc_feature 1..1410: note = Description of Artificial Sequence: Synthetic coding sequence
  source 1..1410: mol_type = other DNA
atggccgaggaacgcgagccagaattgtatttgaaatggaaacattgtgagactccaggggtgaaaaccctttgcaatctgaaacactgcgagactccgggagtcaaaacactctgcaatctgaagaagctgcttaaccggctgcagaaagatcatagggaggatgtgtatctgtacatctcgggtcaccttaatcccaacaagctctatcaacccccggagacaatcctccagcattggcccaatgctcatagaccaaagggcgagagggccagtgaagtgggcgagccacctgccgggaaagtcgcccgaatgaaggaagctctggcccactttactatccataccgctctggtcccttcggaggcccaggacaccccactgtttcgctacctgaatcctcaggcaagcttgtcacacacgtccgaagaggattttctccccgtggaagccgtgcgagaaggtaaggaggaaaaaaaagggggaccacctggacgtggtccccctggttggcgacgtcgggaagagctgcggcttccagacttaaaagtgctgtgctaccaggaggcaggtagtcggggtacccgggaccgtcaccattacgtttcgagttacctggctggggccacctccgctgatcgataccggatgtttctgcgctttcagaaagaggtcctcgcaaagcaggatcttctgaagaacgatttcactgggtcaaaggccgcagcaggccatgagagaaaactccagcaggagcttcagaagatctgtacctgtagcccacagcagttcaacagactgcatgtgttcggcaaggtgtttgaggacatctgtaatagctccctgatctttggtgacctgctgaagaaagtgaaggacgagtacgaactatatatggctacactgctggagtcgcagccagccgcacagtatgaagccctgctggcccagcttaaagcattgggacagcggccagtaaagaccgccgacatggatctagctcgcgaagaactgaggatgcttgtgaccgccactaaggccgcccttgaacagaatgatcggttacggagtgaactggagatggaggtcgccttgctgcagtccgccaaagagcgaagtgagagttctgagaagcacatcattgatgaaaaccggcttacactgacagagaaggttgagaaaaaaagatgtgagatcctctcaaaatgggatgagattcaggcactggaaaaagaaatcaagactacactagtacatactgggatcagtgacataactgagaatagaatcaaatccatcgaacacgaagccattcagcttgaaacggagaacatgattcttaagaagaaaatcaaaggacccctggaaatttaccaggggatctgcaagattcgtgggaatcgaaggtag

SEQ ID NO: 125334 - DNA, 741 bp, synthetic construct
  misc_feature 1..741: note = Description of Artificial Sequence: Synthetic coding sequence
  source 1..741: mol_type = other DNA
atgtatcaagtttccggccagcgcccttccggatgtgacgccccctacggggctccaagcgcagccccaggcccagcccagaccctgagtctcttgcccggtctggaggttgtgactggttcgacccaccctgccgaggcagccccagaggaagggtctctcgaagaagcggccacaccgatgccacaggggaatggacccgggatcccacagggattggacagcaccgacctcgatgtaccaacggaggcagtaacttgtcagccccagggcaaccccttagggtgtacacctcttttgcccaacgactcagggcaccctagtgagctcggaggaactcgccgtgccgggaacggagctctggggggacctaaagctcaccggaaactccaaacacacccatctctcgcttcgcagggctcgaaaaagagcaagagctcttctaaatcaaccacttcacaaatcccgttgcaagctcaggaggattgttgcgtgcactgcatcctgtcttgccttttctgtgagttcctcacactctgtaatatcgtgctcgactgtgccacttgcggcagctgctcctcagaggattcatgtctttgttgctgctgctgcggaagtggagaatgtgctgactgtgacttgccctgtgacctggactgcggcattctggatgcttgttgtgagtcggccgattgtttggagatctgtatggagtgttgtggcctctgtttcagttcctag

SEQ ID NO: 125335 - DNA, 696 bp, synthetic construct
  misc_feature 1..696: note = Description of Artificial Sequence: Synthetic coding sequence
  source 1..696: mol_type = other DNA
atgtaccaggtgagcggacagcgtcccagcgggtgcgacgctccttacggtgcccccagcgctgccccgggtcccgcacagacactgtcccttctgccggggctcgaggttgtgactggcagcacacatcccgcagaggccgctcctgaagaaggcagcctggaagaggccgcgacccccatgccacaaggcaatggccccggtatcccacagggcttagactccaccgacctggacgtccccactgaagccgtgacgtgtcagcctcaaggcaaccccctcgggtgcactcccttactaccgaacgattctgggcatccgtcggagctaggtgggacacggagggctggtaatggcgcccttggtggacccaaagcgcataggaaactccagactcaccccagcctggcctcacagggcagtaaaaagtctaagtcatcatctaagtccaccacctcacagattcctctgcaagcccaggaagactgctgtgtgcactgtatcctatcttgcctcttttgcgagtttctgaccttgtgcaacatcgtgttagactgcgccacatgcgggagttgctctagtgaagattcatgcctgtgttgctgctgctgcggaagtggagaatgtgccgactgtgatttgccatgtgacctcgactgcggaatcctggatgcctgttgcgagagcgcagattag

SEQ ID NO: 125336 - DNA, 642 bp, synthetic construct
  misc_feature 1..642: note = Description of Artificial Sequence: Synthetic coding sequence
  source 1..642: mol_type = other DNA
atgtaccaagtctccgggcagcgaccatcagggtgcgacgccccttacggagctcccagcgccgcccccggtcccgctcagaccctcagtctgctgccagggctggaggtggtgacaggatcaacccatccggcagaggctgcaccagaggagggctccctggaagaggcggccacacccatgccgcaggggaacggtccgggaatccctcaaggactggacagcacggatctggatgtgcccaccgaggccgtcacctgccagccgcagggaaatccactgggttgcacaccactgctccctaatgattcaggtcatccatccgaactcgggggaactagacgtgcgggtaacggagccctggggggtcctaaggctcatcggaagttacagacacacccttccctagcaagccaaggatccaaaaagtctaaaagttcctctaagtctaccactagccagattcccctgcaggcacaggaagactgctgtgtacactgtatcctgtcttgcctgttttgtgagttcctgaccctatgcaacatcgtcctcgactgtgctacatgtggaagctgttcatctgaggactcgtgtctatgctgctgctgttgcggctcgggtgaatgcgctgattgtgactag

SEQ ID NO: 125337 - DNA, 297 bp, synthetic construct
  misc_feature 1..297: note = Description of Artificial Sequence: Synthetic coding sequence
  source 1..297: mol_type = other DNA
atgtatcaggttagcggtcagcggccttccggttgcgatgccccttacggcgcaccatcagccgccccagggcctgcccaaacccttagtttgctccctggtttggaggtggtcactgggagtactcacccagcagaagcggcgcccgaggagggctcattagaggaagccgctacaccaatgccgcaaggtaatgggccaggtatccctcaaggccttgacagcactgatcttgacgtacctacggaggcagttacctgtcagccacaggggaatccacttgggtgtacgccttag

SEQ ID NO: 125338 - DNA, 387 bp, synthetic construct
  misc_feature 1..387: note = Description of Artificial Sequence: Synthetic coding sequence
  source 1..387: mol_type = other DNA
atgtaccaggtgagtggtcagcggccctccggctgtgacgcaccctacggtgccccttctgctgcacccggccccgctcaaaccctgtcgcttttgcctggactcgaggtggtcaccggttctacacaccccgccgaggccgctccagaggagggttcgctcgaggaggctgctacccccatgccacagggcaatggacctggcataccacaggggcttgacagtacagacctcgacgtgccaacggaggctgtcacctgccagccccagggtaacccactggggtgcacacccctcctgccaaacgatagcggacatccttctgagcttggaggcactagacgggccggcaatggagctctaggcgggcccaaggcacacaggtag

SEQ ID NO: 125339 - DNA, 741 bp, synthetic construct
  misc_feature 1..741: note = Description of Artificial Sequence: Synthetic coding sequence
  source 1..741: mol_type = other DNA
atgtaccaggtgtccggccaacgtcccagcggttgcgacgccccgtacggcgctccatcggctgctcccgggccggcacagaccctcagtctgttgcccgggctggaagttgtaactggcagtacacatcccgccgaagccgcaccagaggagggctcactggaggaggcagcaacgcctatgccccagggcaacggacccggcatcccgcagggccttgattccacggatctggatgtcccgactgaggctgtgacttgtcagccacaggggaatcctctcggctgtacccctctgttgcccaatgactctggtcatccaagtgagctcggtggaacccgacgggccggcaatggcgccctgggcggcccaaaagctcaccgaaagctacagacgcacccttcgcttgcctcacagggcagcaagaagagcaagtcttcgagcaaatcgaccacctcacaaatccctctgcaggcccaagaggactgctgcgtgcactgcatcctgagctgtctgttctgtgaattcttgaccctgtgtaacattgtgctggactgtgctacctgtggcagttgttcatctgaagacagctgtctttgttgctgctgttgcggcagcggggaatgtgcagattgtgatcttccttgcgatctcgattgcggcatactggacgcttgctgtgaatcggccgactgcctggaaatctgcatggagtgttgcggtctctgcttctcatcatag

SEQ ID NO: 125340 - DNA, 729 bp, synthetic construct
  misc_feature 1..729: note = Description of Artificial Sequence: Synthetic coding sequence
  source 1..729: mol_type = other DNA
atgatgatggatttgtttgagacgggtagctatttcttttatctggatggagagaatgtcacgctccagcccctggaggttgccgaaggatctcccttgtaccctggttccgatggtacactgagcccttgtcaggaccagatgccgccagaggccggctctgacagttccggagaagagcacgtgctcgcacccccgggcctccagccacctcactgccccggtcagtgtcttatctgggcatgcaaaacctgcaagaggaaatccgcacccacagaccggcgcaaagccgctacgctgagagaaaggcgcaggctgaaaaaaattaacgaggctttcgaagctcttaagcgtcggaccgttgcaaatccgaaccaacgcctccctaaggtggaaattctccgctccgctatctcttatattgagcggctgcaggatcttctgcatcgcctcgatcagcaggaaaagatgcaagaattgggcgtggatcctttttcttataggcctaagcaggaaaacctggaaggtgccgatttcctaaggacatgctcctcccagtggccctccgtttccgatcacagtagaggtctggttattactgccaaggaaggcggcgccagcatcgattcgtctgccagttctagtcttagatgcctttcctcgatcgtggatagtatcagtagcgaagagcggaagcttccctgtgtagaagaagtagtagagaaatag

SEQ ID NO: 125341 - DNA, 1527 bp, synthetic construct
  misc_feature 1..1527: note = Description of Artificial Sequence: Synthetic coding sequence
  source 1..1527: mol_type = other DNA
atgacccaaaccctgaaatatgcttcacgggttttccaccgggtgcgatgggccccagaactgggcgccagcctgggttacagagagtatcacagtgctcgccgaagtttggcagatattccgggcccatcaacaccctcctttctcgcggaactcttctgcaaaggcggattatcacgattacacgagctgcaagtgcagggagccgcgcacttcgggcccgtgtggttagcctcattcggcactgttagaacagtgtacgtggcagctccggcactcgttgaggagctcttgcgccaggaagggccaagaccggaaaggtgttcttttagcccctggacagagcaccggaggtgcagacagcgagcttgcgggctcctgaccgcagagggggaagaatggcagagactcagaagtttactcgctcccttgctgctcagaccacaggctgccgcgaggtacgcaggtacgctcaataacgtggtctgtgatctcgtgcgccggctcagacggcagaggggccggggtacgggacctcctgctctagtgagagacgtcgccggagaattttacaagttcggcttagaaggtatcgccgcggtgttattaggatcccgcctgggctgcctggaggcccaggtgcccccagacaccgagactttcatcagagctgtgggatccgtgtttgtctccaccttgctcactatggctatgccccattggctccgccacctcgtaccaggcccctggggtcgcctctgccgagactgggaccagatgtttgcttttgcacaacgacacgtggaaaggcgggaagctgaagctgcaatgcgcaacggtgggcagcctgagaaggatcttgaatcaggggctcatctgacccacttcctgtttagggaggaattgccagcacaatccatactgggaaatgtgacagaactgttgcttgccggcgtggataccgtaagcaatactctttcctgggccctgtacgagcttagccggcatcccgaggttcaaactgctctccattccgagattacagcagccttatcccctgggtccagtgcatatccttcagccacagtcctttcacagctccctctgctgaaggctgtcgtcaaggaggtattgcggctttaccccgtggtccctggcaattctagggtcccagacaaggatatccacgtgggcgattatatcattccgaaaaataccctggtgaccctgtgtcattatgccacatcgcgggacccggctcagtttccagagccgaattcattccgccccgccaggtggctgggtgagggcccaacgccccatccattcgcctccctgccgttcggcttcgggaaaaggagctgcatgggtagaaggcttgccgagctcgaactccagatggcgctggctcagattctcactcattttgaggtacagcctgagccaggagcagcccccgttcgccccaaaactagaacagtgctggtccccgagagatcaatcaacctgcaattcttggataggtag

SEQ ID NO: 125342 - DNA, 675 bp, synthetic construct
  misc_feature 1..675: note = Description of Artificial Sequence: Synthetic coding sequence
  source 1..675: mol_type = other DNA
atggaactgtacgaaactagcccttacttctatcaggaacctagattttatgacggggaaaattacctgcctgtacacctgcaagggtttgaaccgcccggctacgagaggacggagctgaccttgagcccagaagcccccgggcccttagaggataaaggactggggacgccagaacattgcccaggccagtgcttgccatgggcttgcaaagtgtgtaaacggaagagtgtgtccgttgataggcggagggcagcaacattgagagaaaaaaggaggctcaagaaggtaaacgaggctttcgaggcactaaagaggtctactttactcaatccaaaccagagactccccaaggtcgaaatcctgagatccgcaattcagtacattgagcgcttgcaagcgctgttatctagcctgaaccaggaagagagagacctgcgctatcgtggcggtggaggaccacagcctggcgtgccaagcgagtgtagtagtcactccgccagctgctcccctgagtggggaagtgccctagagtttagcgccaatccgggagatcacctactcaccgccgaccccacagacgctcacaatctgcatagcctgactagtattgtggattcgataaccgtggaagatgtgtctgtggccttcccggacgagaccatgcccaactag

SEQ ID NO: 125343 - DNA, 465 bp, synthetic construct
  misc_feature 1..465: note = Description of Artificial Sequence: Synthetic coding sequence
  source 1..465: mol_type = other DNA
atggggctgtccgacggggagtggcagctagtgcttaatgtgtggggaaaagtcgaggctgatatccccggacacgggcaagaagtcctcattcgactattcaaagggcatcccgaaacacttgagaaatttgacaagtttaaacacctcaagagcgaagatgaaatgaaagccagcgaggacctcaagaaacatggagcaacggtgctgactgcattgggtggcattttaaaaaagaagggccaccatgaagcggagataaaaccactcgctcagtcgcacgcaaccaagcataaaatccctgtcaaatacttagaattcatttctgagtgtatcatacaggtgcttcagtccaaacaccctggagatttcggcgcagatgctcaaggggcgatgaacaaagcactggagttattccgcaaagatatggcctccaactataaggagctggggtttcagggttag

SEQ ID NO: 125344 - DNA, 465 bp, synthetic construct
  misc_feature 1..465: note = Description of Artificial Sequence: Synthetic coding sequence
  source 1..465: mol_type = other DNA
atgggtttgagcgatggcgaatggcagctggtactgaatgtgtggggcaaagtagaagccgatatccctggtcacgggcaggaagtcctgataaggctgtttaaggggcacccggaaactctcgaaaagtttgacaaattcaagcacctgaagtcagaggacgagatgaaagcatccgaagaccttaagaaacatggcgccacagtcctgaccgctctgggtggtatactgaagaaaaaaggccaccacgaggccgagatcaagcccctggcacaaagccatgctacaaaacacaaaatcccggtgaaatacctggaattcatatctgagtgtattatccaggttctacaaagcaagcatcctggagatttcggggccgatgcccagggtgcgatgaacaaagcgttggagcttttcaggaaggacatggcttccaactacaaggagctggggtttcagggctag

SEQ ID NO: 125345 - DNA, 465 bp, synthetic construct
  misc_feature 1..465: note = Description of Artificial Sequence: Synthetic coding sequence
  source 1..465: mol_type = other DNA
atggggctgtctgatggcgagtggcagctcgtcctgaacgtgtgggggaaagtggaagcggatatcccaggtcatggccaggaggtgctgattcggctgtttaagggccaccccgagactctagagaagtttgacaagttcaagcacctaaaaagcgaggacgagatgaaggcttcagaggatctgaagaaacatggagcaacagtattaactgcgctcgggggcatactgaaaaaaaaggggcatcatgaggccgaaataaaaccgctcgcacaatcccacgctacaaagcataagataccagtcaaatatcttgagttcatcagcgagtgtataattcaagtgttacagagcaagcaccccggcgattttggggcagacgcacagggagccatgaacaaagctctggagttgttcagaaaggacatggcctcaaattataaggagctggggtttcaggggtag

SEQ ID NO: 125346 - DNA, 465 bp, synthetic construct
  misc_feature 1..465: note = Description of Artificial Sequence: Synthetic coding sequence
  source 1..465: mol_type = other DNA
atgggcctaagcgatggtgaatggcagctagtactgaatgtgtggggaaaggtcgaggctgatatcccgggccacggacaagaagttcttattcgtctgttcaaagggcaccccgaaactctagagaaattcgacaagttcaagcacctcaaaagcgaggatgagatgaaagcctcagaggatctgaaaaagcatggcgccactgttctaacagccttaggaggcatattgaagaagaaaggccaccatgaggcagaaataaaaccactggctcaatcacacgctactaaacacaagattccagtgaaatatttggagttcatttcagagtgcatcatccaggtgttacagagcaaacatcctggggattttggcgccgacgctcagggtgctatgaacaaagctttagagctgtttcgcaaagacatggcctctaactataaagagttgggtttccaggggtag

SEQ ID NO: 125347 - DNA, 234 bp, synthetic construct
  misc_feature 1..234: note = Description of Artificial Sequence: Synthetic coding sequence
  source 1..234: mol_type = other DNA
atggggctctctgacggcgagtggcagctcgtgctgaatgtatgggggaaagtggaagctgatatacctgggcatggccaagaggtcctgattcggctttttaagggtcaccccgaaacacttgaaaagttcgacaagttcaaacacctgaagagtgaggatgagatgaaggcatctgaggacctgaaaaaacatggcgcaactgtcctcacagctctggggggtatcctgtag

SEQ ID NO: 125348 - DNA, 432 bp, synthetic construct
  misc_feature 1..432: note = Description of Artificial Sequence: Synthetic coding sequence
  source 1..432: mol_type = other DNA
atgggactgtccgatggggagtggcaactggtcctgaatgtatggggcaaggtggaagccgatatccctggccatggccaggaggtactcattaggctcttcaagggtcatcctgaaactctggaaaaattcgacaaatttaaacatctgaaaagcgaagacgaaatgaaggcaagtgaagacctgaaaaagcacggagccacagtgctgaccgcactgggcgggatcctgaagaagaagggtcatcatgaggccgagattaaaccacttgcacagtctcatgccacgaagcacaaaattcccgtgaaatatctagaatttatttccgagtgcatcattcaggtcctgcaaagtaaacatccgggcgacttcggagctgatgcccagggcgccatgaataaagctctagagttatttcggaaagacatgtag

SEQ ID NO: 125349 - DNA, 321 bp, synthetic construct
  misc_feature 1..321: note = Description of Artificial Sequence: Synthetic coding sequence
  source 1..321: mol_type = other DNA
atgggccttagcgatggagagtggcaacttgtattgaacgtgtggggaaaggtcgaggcggacattcccggccacggccaggaagtccttatcagactgtttaaggggcaccctgaaacactcgaaaaattcgacaagtttaagcacttaaaatcagaagacgaaatgaaggcatccgaggatctcaagaagcacggtgcaaccgttcttacggctcttggaggtatccttaaaaagaaaggccatcacgaggccgaaattaagcccttagcacagagccacgccacaaagcacaaaatcccggtaaaatatctggaatag

SEQ ID NO: 125350 - DNA, 321 bp, synthetic construct
  misc_feature 1..321: note = Description of Artificial Sequence: Synthetic coding sequence
  source 1..321: mol_type = other DNA
atgggcctctctgacggggagtggcagctcgtgctcaatgtgtggggcaaggtcgaggcagatatcccgggccatggccaggaagtcctaatacgcctctttaagggtcacccagaaaccctagagaaatttgataagtttaaacatcttaaatcagaggatgagatgaaagcttctgaagatcttaaaaagcatggggctaccgtactcactgccctgggaggtattctcaaaaagaagggacaccatgaggctgaaattaaacctctcgctcagtcgcatgcgaccaagcacaaaatccccgtgaaatatttggaatag

SEQ ID NO: 125351 - DNA, 411 bp, synthetic construct
  misc_feature 1..411: note = Description of Artificial Sequence: Synthetic coding sequence
  source 1..411: mol_type = other DNA
atggccgtgggagctgagaggttgggggaagtcctcattcgactgtttaaagggcaccctgagaccctcgaaaaattcgataagttcaaacatctgaagagtgaggatgaaatgaaggccagcgaagacttaaaaaaacacggagccactgttttgaccgctctggggggaatactcaaaaagaagggccatcacgaggctgaaataaagccgctggctcagtcacatgctactaagcacaagatacccgtgaaatacctagaatttatcagtgagtgcatcatccaagtccttcagagcaagcaccccggtgattttggcgcggatgcccagggcgcaatgaataaggccctcgagctgtttaggaaagacatggctagcaactataaggagctcggcttccagggttag

SEQ ID NO: 125352 - DNA, 4398 bp, synthetic construct
  misc_feature 1..4398: note = Description of Artificial Sequence: Synthetic coding sequence
  source 1..4398: mol_type = other DNA
atgtctctggtgacagtgcctttctatcaaaagcgtcaccgccactttgaccaaagctataggaatatccagacgcgctatctgctggacgaatatgcctctaagaagcgcgcatccacgcaggccagcagtcagaagagcttgagtcaacggtcttcaagccagagggccagctctcaaacttctctggggggcactatttgtagagtctgcgccaagcgggtgagcacacaagaggatgaggagcaagagaacaggtccaggtatcagtctctcgttgctgcttacggagaggccaaaagacagaggtttctgagtgaattagcccacctggaggaagatgtgcatctggccagatctcaagcccgggacaagctggacaaatatgcaatccagcagatgatggaggataaactcgcctgggaaagacatactttcgaagagcgtattagccgggctccggagatccttgtccggctgagatctcatactgtctgggaacgcatgtccgtgaaactgtgtttcacagttcaaggcttcccgactccagtcgtgcaatggtacaaagacggatcactgatctgtcaggcagctgagcccggtaagtataggatagagtctaattatggtgtccacactcttgagataaaccgggcggactttgacgacaccgccacctattctgctgtggccaccaatgcgcatggccaagtttctacgaatgctgctgtggtggtacggcgatttcgcggagacgaagaacctttccgaagcgtcggccttcctatcggacttcccctgagctctatgattccctacacacacttcgacgtccagttcctcgaaaaattcggcgtcaccttccgccgggagggggaaaccgttaccctcaagtgtacgatgctggtgacacctgatctgaaacgggtgcagccgagagccgagtggtacagggacgacgtcctcctgaaggagtccaagtggaccaagatgttctttggagaaggccaggcgtcccttagtttctcccacctccataaggacgatgagggattgtacaccctgaggatagtatcccgcggcggagttagtgaccactccgcctttctgtttgttcgcgacgccgacccattggtgaccggagcccctggcgcacccatggatcttcagtgccacgacgcaaacagggactacgttattgttacctggaagcctccaaacacgacaacagagtcccccgtgatggggtactttgtagatcgctgcgaagtcggcaccaataactgggttcagtgtaacgatgcccccgtgaagatttgcaaatacccggtcactggtctgtttgagggaagatcatatatcttccgggtccgcgctgtcaactctgcaggaatctccagaccctcccgagtgagtgacgccgttgccgccttggacccattggatcttagacgccttcaggcagtccatctggagggggaaaaggaaatagctatatatcaggatgatctcgaaggagacgcccaggtgcccggcccgccgactggcgtgcatgcgtctgagatcagtcgcaactacgtagtgctgtcttgggagcctcctactcctcgcggaaaagaccctttaatgtattttatagaaaagtccgtggtcgggtccggttcgtggcaacgcgttaacgctcagacggccgttagaagcccgcgctatgctgttttcgacttaatggagggaaaatcttatgtgtttcgcgttctctccgctaataggcacgggctgagcgaaccctccgagatcacatccccaattcaagcacaggacgtcacagttgttccatcagcccccggtagagtcctggcatccaggaacaccaaaaccagcgtcgtggtgcagtgggaccgcccgaagcacgaagaggatctcctgggctattatgtggactgctgtgtcgctgggaccaatttatgggagccttgtaatcacaagccaattggatacaacaggttcgttgtccatggtctgaccacgggcgagcaatatatcttccgtgtcaaggccgtcaacgccgtaggcatgagtgaaaacagccaggagtctgacgtaattaaggtgcaggcagccttgacagtgccatctcacccctatgggataactttgttaaactgcgacggacattctatgacattggggtggaaagtgcccaaatttagcggaggatcaccaatcctggggtattatctggacaagagagaggtgcaccacaaaaattggcacgaggtgaattcaagcccttcaaaaccaacaatactgactgttgacgggcttacagagggctctctttatgagtttaaaattgcggccgtgaatctggctggtattggggaaccttccgatcctagcgaacatttcaaatgcgaggcatggactatgcctgagcccggacctgcctatgacctgacgttctgcgaggtgcgcgacaccagcctggtgatgctgtggaaagcccccgtgtactcggggtctagcccggtaagcggttattttgtggatttcagggaagaggatgctggcgaatggatcaccgtcaaccagactacaactgctaaccgatatctcaaggtgtcagacttacagcagggaaaaacttacgtgtttcgggttagagccgtgaatgcgaatggagtggggaaaccatcggacacttccgaaccagtcttagttgaagcccgtccaggaaccaaagagattagcgctggagtggatgagcaggggaatatttacctcggattcgactgccaagaaatgacggacgcctcccagtttacatggtgtaagagttacgaggagatttctgacgacgaaagattcaaaattgagactgtcggcgaccactccaaattgtatctcaaaaaccctgacaaggaggacctgggcacatactctgtctccgtctccgatacagatggggtgtcgtctagtttcgtgttggatcccgaggaattggaaaggctgatggccttatccaatgagatcaaaaaccccacaattccgctgaagagcgagctggcctacgaaatcttcgataagggtagggtgcggttctggctccaggcagaacatctgtctccagacgctagctacaggtttattatcaacgatcgcgaggtgagtgactctgaaattcaccgtatcaaatgtgacaaggctaccggcatcatagagatggttatggatcgcttcagcattgagaacgaaggcacctacaccgtccagatacatgacggaaaagctaaaagtcagtcaagtctggtacttatcggcgatgcattcaagactgttctcgaggaggccgaattccagcgcaaggagttcctgagaaaacagggcccccactttgcagagtatttgcactgggatgtgaccgaggagtgtgaggtgaggctggtgtgcaaggtggctaacacgaaaaaagagacagtgtttaaatggctcaaggacgatgtgctgtacgagacggagactctgccaaacttggagaggggcatctgcgagctgctaatccccaagctgtccaagaaggatcatggggaatacaaggctacacttaaagatgataggggacaggacgtctcaatcctggagatcgccgggaaagtgtacgatgatatgatcctcgctatgtctcgggtgtgcggcaagtccgcttcccctctgaaggtgctttgtacccccgaaggtattagactccagtgcttcatgaagtacttcacagatgagatgaaggtcaactggtgtcataaggacgccaaaatttcatcatccgagcatatgaggattggaggaagtgaggaaatggcttggctgcagatttgtgaacccactgaaaaggacaagggaaagtatactttcgagatttttgatgggaaagataaccaccaacggtctcttgacctcagtggacaggcttttgatgaggcttttgccgaattccagcagttcaaagccgctgcatttgccgaaaaaaacagggggaggttgattgggggattgcccgacgtcgtgactattatggaaggcaagacgttaaacttaacctgtacggtattcggaaatccagatccggaagtgatatggttcaaaaatgatcaggacattcagcttagtgaacattttagcgtgaaagttgagcaggcaaaatacgtatccatgacaatcaaaggggtcacttccgaggacagcgggaagtactctatcaacatcaaaaataaatacggaggggaaaagatcgatgtgaccgtcagcgtctacaaacacggggaaaagattccagacatggcaccaccacaacaggctaagcccaaactgatccccgcttcggcaagcgcagcaggccaatag

SEQ ID NO: 125353 - DNA, 3420 bp, synthetic construct
  misc_feature 1..3420: note = Description of Artificial Sequence: Synthetic coding sequence
  source 1..3420: mol_type = other DNA
atgcctgaacctacaaagaaagaggacgaggaagaagtaagtccgcccagcgcacttccaccggattggactctagttgaaactccacctggcgaagaacaggcaaagcagaatgccaacagccagttgagtattctctttattgagaagccccaaggtgggactgtgaaggtgggagaggatattacgtttattgcgaaagtcaaggctgaagaccttctccgtaagcctacaatcaaatggttcaaaggtaagtggatggacctggcttctaaagcaggaaaacaccttcagcttaaggagacgttcgaacgtcattcccgcgtatatacctttgaaatgcagattataaaggccaaggacaattttgccggcaactatcggtgcgaggttacttacaaggacaagttcgatagctgctcgtttgaccttgaggtgcatgaatcaaccggcaccactccaaatatcgatattagaagtgcattcaagaggtctggagagggccaggaggacgccggggaattggacttctctggccttcttaaaagaagggaagtgaagcagcaggaagaagagccacaggttgatgtctgggagttacttaagaacgcaaagccgtctgagtacgagaagattgccttccaatacggaataaccgatctgagggggatgctcaaacgcctaaaaaggatgcgccgagaggagaagaaatccgctgcatttgccaagatactggaccccgcttaccaagtggacaagggtggaagggtgaggttcgtcgtcgaactcgccgatcccaagctggaggtgaaatggtacaaaaacggtcaagaaatcaggccatctaccaaatacatctttgagcataaggggtgccagaggatactgtttataaataactgccaaatgactgatgattcagagtactacgtgactgcaggcgatgagaaatgttccactgaactgttcgttagggagcccccaattatggtaacaaaacagttggaggacacaaccgcatactgcggggagcgcgttgaacttgaatgcgaggtaagtgaggatgatgccaatgtcaagtggtttaaaaacggcgaagagatcatcccgggtcctaagagtaggtatcggatccgagtcgaagggaaaaagcacatcctgattattgaaggcgccacaaaagcagatgccgcagaatatagcgtcatgacaaccggcggtcagagcagcgccaagctgagtgtggatctcaaacctctcaagatacttacaccactaaccgaccagacagttaacctcgggaaagaaatatgtttgaagtgcgagatcagtgaaaatataccaggcaagtggaccaagaacggcctcccggttcaagaaagcgatcgcctgaaggtggtgcataaggggcgcatacataagctagtaattgctaacgctctgacggaggatgagggagactacgtgttcgctcctgacgcctacaacgtcacccttcccgccaaggtacacgtcatcgaccccccaaagataatcctggacggtttggatgctgacaacactgtgaccgtcatcgctgggaacaaactgcgacttgaaatcccaatttccggagaaccacccccaaaggcgatgtggtccaggggtgacaaggcaattatggaggggtcaggcaggattagaaccgaatcgtatccggattcctcgactctagtgatcgacattgctgagagggatgacagtggcgtctatcatataaatctgaagaacgaggcgggggaggcccacgcttcaatcaaggtgaaagtggttgactttcctgaccctcccgtggcccctaccgttacagaagtgggagacgactggtgcattatgaactgggagcccccagcttatgacggcggtagtcctattttgggctattttatcgagaggaaaaagaagcagtcttccaggtggatgaggctgaatttcgacctgtgcaaagaaacaaccttcgaaccgaaaaagatgatcgaaggagtcgcttacgaagtgaggatattcgcagtcaatgctataggtatctcaaagccctcgatgccatctcgcccatttgtacctctggcagtgacctcaccccccaccctgctcacggtggactcagtgacagacacaacagttacaatgcggtggcgaccgcccgaccatatcggagccgccggactggatggctatgtcctcgagtactgctttgagggcaccgaagactggattgttgcaaataaggacttaatcgacaaaaccaagttcaccattaccgggctgccaaccgacgcgaaaatcttcgtgagggtgaaggccgtaaatgcagcaggagccagtgaaccaaagtactattcacagccaatccttgtcaaagagatcatagagccaccaaaaataagaatcccccgccacctgaaacagacttatattagacgcgtgggtgaggccgttaacctggtgattccattccaggggaaacctcggcctgaactgacatggaaaaaagacggggccgaaattgacaagaatcagattaacatccggaattctgaaacagataccattatcttcattaggaaagccgagaggtctcactctggcaaatacgatctccaggtgaaggtagacaagttcgtcgagacagccagtatcgatatccagataattgatagacctggtccgccccagatagtgaagattgaggacgtgtggggggaaaatgtcgctctgacctggaccccccccaaggatgatggcaatgccgccatcaccggctacaccatccagaaggccgataaaaagtcaatggaatggttcactgtcattgagcactatcacagaactagcgctaccatcacagagctagtgattgggaacgagtactatttccgcgtgttttccgaaaatatgtgtggtctgtcagaggatgcaacgatgactaaggaaagtgcggtgattgctcgagacggtaaaatctacaagaatccagtgtacgaggattttgacttttccgaagcccctatgtttacccaaccgttggtcaatacctatgccatcgcaggctataatgccactttaaattgttcagtcagaggcaaccccaagcctaagataacatggatgaaaaataaggttgcaattgtcgatgacccccggtacagaatgtttagtaatcagggggtatgcaccttggaaattcgtaaaccctccccctatgatggtggaacctactgctgtaaagctgtcaatgacctgggcacggttgagatcgaatgcaagctagaagtaaagggtggtctaagtttctgtcgactcctgctgcagggggtcccccccaatatcattgacagctacttgagagacctgcattcttccaatcccgaggagtactag

SEQ ID NO: 125354 - DNA, 3522 bp, synthetic construct
  misc_feature 1..3522: note = Description of Artificial Sequence: Synthetic coding sequence
  source 1..3522: mol_type = other DNA
atgccggaacctaccaaaaaggaagagaatgaagtacccgctcccgccccaccgccggaggaacccagtaaggaaaaagaggcaggcacgacaccggctaaagactggacgctcgtggaaacacctccaggcgaggagcaggcaaagcaaaacgctaacagccaactaagtattctgttcatcgagaagccccagggtggtaccgtgaaggtgggcgaagatattaccttcatcgccaaggtaaaagcggaggacctactgaggaagcctacaattaaatggtttaaagggaagtggatggaccttgccagcaaggccggaaagcacctgcaactcaaagagaccttcgagcggcattcgagagtttataccttcgagatgcaaatcatcaaggccaaggataatttcgcaggcaactaccgctgtgaggtgacttataaagataagttcgatagctgcagttttgacctcgaagtacacgaatcaactggcactacgccaaacattgatatacggagtgctttcaaacgcagcggcgaaggccaggaggatgccggcgaactggacttctctggtctgctgaaacgaagagaagtaaagcaacaggaggaggagccacaggtcgatgtgtgggagctgctgaagaacgcgaagccatccgagtatgagaaaatcgcgttccagtatggcatcaccgacctccgagggatgttaaagcgcttaaaacgaatgcgacgtgaggagaagaagtcggccgccttcgcaaagatattggatcctgcttaccaggtcgacaagggcgggcgggttcgcttcgtcgttgagctggctgaccccaagctcgaggtgaaatggtataagaatgggcaggagatcagaccctccactaaatatatcttcgaacataagggctgccagcgcattctgttcattaataactgccaaatgactgatgattccgaatattatgtcaccgcgggagatgagaaatgttccaccgagctgtttgtcagagagcctcccatcatggtcacaaaacagcttgaagatacaacggcctactgtggtgagcgagtggagctggagtgcgaagtgagtgaagacgacgctaatgtgaagtggtttaagaacggagaagaaattattcctgggccgaagtccaggtacaggatcagggtcgaagggaaaaagcatattctcattattgagggcgcaacaaaagccgatgccgcagagtactccgtaatgactacagggggccaatctagtgccaaactcagtgtggaccttaaaccccttaaaattctgacacccctcactgatcaaacagtcaacctcggcaaagaaatctgcctaaaatgtgagattagcgagaatatccccggcaaatggacaaaaaatgggctgccagtgcaggagagtgaccggctcaaagtggtgcataaaggaaggatccataagttggtgatagccaacgccctgactgaagatgaaggcgattacgtgttcgcccctgatgcctacaacgtcacccttcctgctaaagtgcacgtgatcgaccctcccaagattattttagatggcctagacgctgataatactgtaacagtcatagccggcaacaaactcaggttggaaattcccatttccggcgagccacctcccaaagcgatgtggtcccgtggtgataaggccataatggaaggatcaggccggatcaggacagagtcatacccagactcctctaccctagtgatcgacattgctgaacgggacgacagtggggtctaccacattaatctgaagaacgaggcaggcgaggcgcatgcatccataaaagtgaaggtcgtcgatttccctgatccccccgttgctcccaccgtgaccgaagtgggcgacgattggtgtataatgaattgggaaccacccgcctacgacggggggtcccctattctcgggtatttcatagagcggaagaagaagcagagctcacgctggatgcgtctcaacttcgatttgtgcaaggaaacaaccttcgagcctaaaaaaatgatcgagggcgttgcatacgaagtgcgaattttcgccgtgaacgctattggaatcagcaagccttccatgccaagtcgaccctttgtccctctggcagttacaagccctcccaccctgctgacagtggattcagtgaccgacacaaccgtaactatgaggtggcgaccccccgatcatattggagccgccggcctggacggttacgttctggaatactgctttgaaggcagcacatctgccaagcaaagtgacgagaatggagaggcggcttacgaccttcccgccgaagactggatcgtggcgaataaagatctcatcgataaaaccaaattcacaatcactggtttgccaactgatgccaagatttttgttcgagtcaaggccgttaacgcagccggcgcaagcgaacccaagtattactcacagccaatcctggtcaaagagatcatcgagccgcctaagatccggatccctcggcacctcaagcagacctacattagaagagtgggagaagctgtaaatctggtgattcctttccaggggaaacctcggcccgaattaacatggaaaaaggatggagcagaaattgacaagaaccagatcaatatcagaaatagcgagactgataccataatcttcatccgcaaagccgaacggtcgcactcagggaaatacgaccttcaggtgaaggtggataaattcgtggagactgcctccatcgacatccaaataatcgacaggcccggcccacctcaaattgtcaagattgaagacgtctggggggagaatgtagctctgacatggacacctcccaaggatgatgggaatgccgccatcacgggatataccattcagaaagctgacaagaaaagtatggagtggttcactgtaattgaacattaccacaggaccagcgcaacgatcacagaacttgtgattggcaacgaatactacttcagggtctttagtgagaatatgtgcggcctgagcgaggacgccactatgaccaaggaatctgccgttatagcaagggatggtaaaatttacaagaaccccgtctatgaagattttgatttttccgaggcacctatgttcacccaacccttagtaaacacatacgcgattgccgggtataacgcaaccctaaattgttccgtcagaggcaatcctaagcctaagataacctggatgaagaataaggttgccattgttgacgatccacggtatagaatgttttctaatcagggagtgtgtacgctagagatcaggaaaccaagcccatacgatggcggtacttactgttgcaaagccgtgaacgatctgggtacagtggaaatagagtgtaagctggaggtgaaagtgatttatcagggcgtaaacactcctggtcaaccagtctttctggagggccaacagcaagtaggctcaccttcagcagattcatcttgcaaggcctacctacagacttag

SEQ ID NO: 125355 - DNA, 3384 bp, synthetic construct
  misc_feature 1..3384: note = Description of Artificial Sequence: Synthetic coding sequence
  source 1..3384: mol_type = other DNA
atgcctgagcctaccaagaaggaggagaatgaagtgccagctcctgctccccctcctgaggagccatcaaaggagaaggaggctgggacaacgcctgccaaagactggaccctggtggagacacctcctggcgaagagcaagcaaagcagaatgcaaatagtcagctctctatcctgtttattgagaagcctcagggtggaacagtaaaagtgggtgaggacattacattcatcgcgaaggtcaaggcggaggacctgctgcggaagcccaccattaagtggtttaaaggaaagtggatggatctagcttccaaagctggaaagcatctccaactgaaggagaccttcgagaggcactcgagggtgtatacattcgagatgcagatcattaaggccaaggataatttcgcgggcaactacagatgtgaagttacatataaggataagtttgactcatgtagcttcgacctcgaggtgcacgaatccaccggaaccacacctaatattgatatacggtctgccttcaagaggagggaagtaaaacagcaggaggaggagcctcaggtagatgtatgggaactcctgaaaaacgccaaaccctccgaatacgagaagattgccttccagtacggcatcaccgatctcagagggatgttgaaaagattgaaaagaatgcgaagagaggagaaaaagagcgctgccttcgcgaaaattctggacccagcgtatcaggtcgacaagggcgggcgggtgagatttgtcgtcgagttagccgaccctaaactggaggtaaagtggtacaaaaacgggcaggagattcggccctctactaagtacattttcgagcacaaaggatgtcagaggatcctgttcataaacaactgtcagatgacggatgacagcgaatactacgtgacggccggcgacgaaaagtgttccactgaactgtttgtgcgcgagccgcccatcatggtgactaagcagctggaggataccacagcgtactgtggtgagagagttgagctcgaatgtgaagtgtccgaggacgacgccaatgtgaagtggtttaagaatggagaagaaatcattccaggacccaagtctaggtaccgcattcgggtggaaggcaaaaaacatattctgattatcgagggcgccaccaaagccgacgcggcggagtattcagttatgactacaggtggtcagtcctcagccaaattgagtgttgatctgaagcctctgaaaattctgactccattgactgatcaaacggtgaatctgggaaaagagatttgtctgaaatgcgagatctctgaaaacatacccggcaagtggaccaagaatggattgccagtgcaggagagcgatcgcctgaaagtagtacataaaggtcgcattcataagctagtgattgctaacgccctcactgaggacgaaggagactacgtttttgcaccggacgcctataatgtgacactgccagctaaagtgcatgttatcgatcccccaaaaatcatcctcgatgggctcgacgccgataacacagtcacagtgatcgctggcaataaactccgtttggagatcccaatttccggggaaccccctccaaaggcaatgtggagccgcggcgataaggctattatggaaggttccggcaggatcaggacagaatcttatccagatagcagcacattggtcattgatattgcagaacgggatgatagcggcgtgtatcacattaatttgaaaaatgaggccggtgaggcacatgcctcgattaaggtaaaggttgtggacttcccagaccctcctgttgctccaaccgtgacagaggttggcgacgattggtgcatcatgaactgggaaccccccgcctatgacggaggttctccaatcctcggttatttcattgaacggaaaaagaagcaatccagtaggtggatgagacttaacttcgacttgtgtaaggaaaccacattcgagccgaaaaaaatgattgaaggggtggcatacgaggtgcggatcttcgctgtgaatgccataggaatttccaagcccagcatgcctagcagacccttcgttcctctggcagtgaccagccctccaacacttctgaccgtggacagcgtgactgataccactgtgacaatgcggtggagaccccctgatcatatcggcgccgctggactcgacgggtatgtgcttgagtactgctttgagggcactgaggactggatagttgctaacaaagacctgattgacaaaacaaaattcacaatcacaggtttacccactgatgccaagatatttgttagagtgaaggccgttaacgccgccggcgcctccgaaccaaaatattattcccagcctattttagtgaaggaaattatcgaaccacctaagatcaggattccccggcacctgaaacagacgtacatccgcagggtgggagaggccgtcaatttggtgatcccttttcagggtaaaccgcgccctgaattgacatggaaaaaggacggagcggagattgacaagaaccagataaatatcagaaacagcgaaaccgacactattatttttattcggaaagctgagcggagtcactcagggaagtatgatctgcaggtcaaggtggacaagttcgtggaaaccgcaagtatcgatattcagatcatcgatcgtcctggtccacctcagattgtgaagatcgaagacgtgtggggcgagaacgtcgctttaacctggacacccccaaaggacgacgggaacgctgcgatcactggatacacgatccaaaaggccgacaagaagtcaatggagtggttcactgtgatcgagcactaccaccgcaccagcgcaaccataacagaattagtcatcggcaacgaatattactttagggtgttcagcgagaatatgtgcggacttagtgaggatgctacaatgaccaaggagtccgctgtcattgctagagacggcaagatttacaagaaccctgtttacgaagatttcgatttcagtgaggccccaatgttcacccagccgctggttaacacatacgcgatagccggttacaatgcaaccctgaattgtagtgtccggggcaacccaaagcccaagattacatggatgaaaaacaaggtcgccattgtggatgatcccagatatcgcatgttctccaatcagggcgtgtgcacactcgagatcaggaagccgagcccatacgacggcggcacatattgctgcaaagcagtgaatgacctgggcaccgtcgaaattgaatgcaaacttgaggttaaggtgatctaccaaggtgtcaacacgccggggcaaccagtgtttctagagggacaacagcagtctctgcataacaaagacttttag

SEQ ID NO: 125356 - DNA, 3363 bp, synthetic construct
  misc_feature 1..3363: note = Description of Artificial Sequence: Synthetic coding sequence
  source 1..3363: mol_type = other DNA
atgccggagcccacaaagaaggaggattggactctcgtggaaacaccgccaggcgaagaacaagcaaaacagaacgcgaatagccagctgagtatcttatttattgagaaaccgcaagggggaacagtcaaggttggagaggacatcaccttcatagctaaagtcaaggcagaagacttacttcgaaagcctacgatcaaatggttcaaaggaaaatggatggacttggcttctaaagcggggaagcatctgcagctgaaggagacattcgaaaggcactcgcgtgtctatactttcgagatgcagataatcaaagcaaaggacaactttgcagggaactataggtgtgaagtaacctacaaggacaagttcgattcttgcagcttcgatttggaggtacacgagtctacaggaaccacgcccaacatagatatccggtccgcctttaagagatccggagaggggcaggaggacgcaggcgaattggatttctctggcctactgaagcgccgagaggttaaacagcaggaagaggagccacaggtggacgtgtgggagctgttaaagaatgcaaagccctcagagtatgagaaaattgccttccagtacggaattaccgatctgcgaggcatgctgaagagactgaagcggatgagacgggaggaaaaaaagtctgccgcgtttgccaaaatcctggaccccgcctatcaagtcgacaagggtggaagggtccgattcgtggtcgaattagctgaccccaagctggaggtgaagtggtataagaacgggcaggaaatacgaccaagcacaaaatatatctttgagcacaaaggatgtcagcgaattttgtttatcaacaactgtcagatgaccgacgattcagagtactatgtaacagccggagacgagaagtgctcaacggagcttttcgtgcgagagccacccatcatggtcacgaagcagctggaggacacaactgcttattgtggggagcgcgtagaactcgagtgcgaagtctcagaggatgatgcaaatgtgaagtggttcaaaaacggcgaggagattattcctggccccaaatctagatacaggatccgtgttgaaggcaagaaacacatactgatcattgaaggggcgacaaaggctgatgccgcagagtactccgttatgaccactggtggtcagagctcagccaaattgtctgtcgacctgaaaccacttaagattctaactcctctgacagaccagacagtgaatctcggtaaggaaatttgtctgaagtgcgaaatatccgaaaatataccaggaaaatggactaaaaatggcctgcctgttcaagagtccgaccgcctgaaagttgttcataagggtcgcatccacaagttagtcatcgcaaatgctctcactgaggatgagggtgactatgtattcgcccccgacgcatacaacgtcacactgcccgctaaagtacatgtgatcgacccccctaaaataatcttggatggactggacgctgataacacagtcacagtaatagccggaaacaagctcaggctggaaatccccatcagcggggagcctccgcccaaggcaatgtggagccggggtgataaggctatcatggagggcagcggcaggatacggactgagtcctatccagattcctctaccttggtcattgacatcgccgagcgtgatgatagcggagtctaccacattaatctgaagaatgaagctggcgaagcccatgcttccattaaggtgaaggtggttgactttcctgacccgcctgtcgcccccacagtgacagaagtgggcgacgactggtgtattatgaattgggaacctcccgcctatgatggagggagccccattttgggttatttcattgagcgaaaaaagaaacagtctagccgctggatgagactaaatttcgacctttgcaaagaaaccactttcgaaccaaaaaaaatgatcgagggcgtcgcatatgaggtgcgcatttttgccgtaaacgcaataggcatctcaaaaccatctatgccttctagaccatttgtacccctggcggtgacctcacctccaacactacttacagttgactccgtgaccgatacgactgtgaccatgcggtggcgacctccagatcatattggtgctgctggcctcgacggatacgtccttgagtactgctttgaaggtaccgaagactggatcgtggcgaataaagatctgatagacaagaccaagtttacaatcactggtctgcccacggacgccaagatcttcgtcagggtgaaagcagtgaacgccgctggagccagcgaaccaaagtactactctcagcccatccttgtgaaagagattatcgaaccacctaaaatcaggatccccagacatctgaagcagacatacatccgtagggtaggggaggcagtgaatctggtaatcccctttcagggcaagccgcggcccgagctgacatggaagaaggatggtgcggaaatcgacaaaaaccagatcaacattaggaactccgaaacggataccataatatttatccgaaaggcggagcgatcgcactccggtaagtacgacctccaggttaaggttgacaagtttgtcgagactgcttccattgacattcagatcattgatcggccaggtccgccgcagatagtgaaaattgaagatgtctggggcgagaatgtggcgttgacctggactccccccaaggacgacgggaacgccgccatcactggctacacgatccagaaggcagataagaaaagcatggaatggttcaccgtcatagaacactaccacagaaccagcgccaccatcaccgagctggtgatcggcaacgagtactactttcgtgtctttagcgaaaacatgtgcgggctttccgaggatgctaccatgacgaaggagtccgcagtaatagccagggacggcaaaatctataaaaaccccgtctatgaagacttcgacttcagtgaggctcctatgtttactcaacctctcgtcaacacctacgctattgcaggctacaatgcaacactcaattgtagcgtgcggggcaatcctaaaccaaaaatcacatggatgaaaaataaagtggctatcgtggatgatcctcgttacaggatgtttagcaaccagggggtgtgcaccctggaaatacggaagccctcaccctacgatgggggcacatactgctgtaaagctgtaaacgatctcggcaccgtagagattgaatgcaagctggaagtgaaggtgatctatcagggtgtgaacaccccaggccagcccgtgtttctggaaggtcagcagcagagtctgcataacaaagacttttag

SEQ ID NO: 125357 - DNA, 3399 bp, synthetic construct
  misc_feature 1..3399: note = Description of Artificial Sequence: Synthetic coding sequence
  source 1..3399: mol_type = other DNA
atgccagaacccaccaaaaaggaggagaacgaagtccctgcgcctgcccctccacctgaagattggactctggtggagacaccccctggagaggagcaggccaaacaaaacgctaactcccagctctcaatcctctttattgagaagccccagggcggaacggtcaaagttggtgaggacataaccttcatcgctaaggtgaaggccgaggatttactcaggaagccaacaattaagtggtttaagggcaagtggatggatctggctagtaaggctggcaagcatctacagttaaaggagacctttgagcgccattcccgagtgtatacctttgagatgcagatcatcaaagctaaagacaattttgccggaaattatcgctgtgaggtgacgtacaaggataagttcgacagctgttccttcgaccttgaggtgcacgagagtacagggacaacgcccaatatcgatattaggagtgcgttcaagagaagcggcgaaggacaggaggacgctggagagctcgattttagtgggctgctgaaaaggagggaagtgaagcagcaggaggaggaacctcaggttgacgtctgggagcttctcaaaaatgccaagccctcagagtacgaaaagatcgcattccaatatggcataaccgatcttcgggggatgctgaaacgccttaaaaggatgaggcgggaggaaaagaaatcagctgcatttgcgaaaatcctggaccctgcctaccaggttgataaagggggcagggtgaggtttgtcgtggagctggcagacccaaagctggaggtcaaatggtacaaaaatgggcaggaaatacgcccgtctacgaagtatatatttgagcataaaggatgtcagcggatactttttattaataattgccaaatgacagacgactctgaatattacgtgaccgccggggatgagaaatgttctaccgagctctttgtccgtgaacctccgatcatggtgaccaaacagctagaggacacaacagcctactgtggagaacgtgtggaactcgaatgcgaggtctctgaggacgatgctaacgtcaagtggtttaagaacggcgaagagatcatacctggccccaaatcaaggtaccggattagggtagagggcaaaaagcacattttaattattgaaggggcgacgaaggcagatgcagcggaatactcagtgatgactactggcggccagagctccgccaagttgtctgtggacctaaagcctttgaagatccttacccctttgaccgaccaaaccgtgaacctgggcaaagagatctgtttgaagtgtgagatttcggaaaacattcctggcaagtggaccaagaatggtctgccggtgcaggagagtgaccgactcaaggtggtccataaaggaagaatccataagcttgtgattgccaatgccttaaccgaggacgagggcgactacgttttcgcccccgacgcatataatgtcacactccccgcgaaggttcatgtcatagaccctcccaagatcatcttggacggcctggacgccgataataccgtcactgtcattgccgggaacaaacttaggctggaaattcctatatccggcgagccacctcccaaggctatgtggagcagaggtgataaagccattatggagggctcaggtaggatcaggaccgagtcttacccagacagcagcactctcgtgatcgacatagcagaaagggatgactccggtgtgtatcatatcaatttgaagaacgaggccggagaagctcatgctagcattaaggtaaaggtggtggattttccagacccaccagtcgcccccaccgtgactgaggtgggcgacgactggtgtatcatgaactgggaaccccccgcatacgacggagggagccccatcctgggatattttattgaaaggaagaagaagcagtcttctcgttggatgcgcctgaacttcgacctgtgcaaggagacgacgtttgagcctaagaagatgatcgagggagtggcttatgaggtgcgcattttcgctgtgaacgccatcggtatcagcaagccgtccatgccctcaaggccctttgttccactcgccgtgacttcgccgcctaccttgttgaccgtggacagtgtaacagacactacggtgaccatgcgctggcggccgcctgatcacattggagctgctgggttggatggttacgtcctcgagtattgttttgagggcactgaagactggattgtggccaacaaagacctaatcgataagaccaaattcacaatcactggactgcccaccgatgccaaaatttttgtgcgtgtgaaggctgtcaatgccgctggggcctccgaaccaaaatactatagccaacctattctagtcaaagaaatcatagagccccctaagataaggatccctcgacatctcaagcagacctatatccgaagagtgggggaggctgtgaacctcgtgattccatttcaaggcaagccccggcctgagctgacgtggaaaaaggatggggctgaaattgataaaaaccagattaacattagaaacagcgaaactgatacaatcatcttcattcgaaaagccgaaaggtcccattcaggcaagtatgacctgcaagtcaaagttgacaagttcgtcgaaactgcgtccatagatatacagattatagaccggccaggcccgccacagatagtgaagatagaggatgtgtggggagaaaacgttgccctgacttggacgccacctaaggatgatggaaacgccgccatcaccgggtatactatccagaaagccgataagaagtcaatggagtggttcacagtgattgagcactaccatcggacctctgcgacaatcacggagctggttataggtaacgagtattacttccgagttttcagcgaaaacatgtgtggactctccgaggatgcaacgatgactaaagagagtgcagtaattgctagggacggcaagatttacaaaaacccagtgtacgaggattttgatttttccgaggctccgatgttcacacagcctcttgtgaatacatacgctatcgctggctataatgccacgctaaactgtagcgtcaggggtaacccaaagcccaaaatcacctggatgaagaataaggtggccatcgtcgatgacccccgataccgtatgttttcgaaccagggggtgtgtaccctggagatccgcaaaccatccccatacgacggtggcacctactgttgtaaagcagtgaacgacttgggaacagtggaaatcgaatgtaaactggaagtcaaggtgatttaccaaggcgtgaacacaccgggacagcccgtgttccttgaaggccagcagcagtccttacataacaaggatttctag

SEQ ID NO: 125358 - DNA, 3822 bp, synthetic construct
  misc_feature 1..3822: note = Description of Artificial Sequence: Synthetic coding sequence
  source 1..3822: mol_type = other DNA
atgccagagccaggtaagaaacctgtgtcggccttttcgaagaaacccaggagcgtggaggtggccgccggttctccagctgtgtttgaggccgaaaccgagagagcaggagttaaggtccgatggcaacgaggggggtctgacatcagtgcctctaataagtatgggctggctaccgaagggaccagacatactctgactgtcagggaagtcggccctgcagatcaagggagttacgctgtaatcgctggatcaagtaaggtgaaatttgatctgaaagtgattgaggctgagaaggccgaacctatgttggcccctgcccctgcccctgccgaggccacaggggctcccggcgaggcccctgcccccgccgcagagctgggcgagtctgccccctccccaaagggaagttccagcgcagcactgaacggccccacaccaggcgccccagacgatcctatcggactgtttgtgatgcggccacaagatggcgaggtaactgttggcgggagtatcactttttcagcacgcgttgcgggtgccagtctcctgaaacctcccgtcgtcaaatggttcaagggcaaatgggtcgacctctcctctaaggtgggacaacacctccagcttcatgactcttacgatcgggcttccaaggtgtatctgtttgaacttcacattacagacgcccaaccagcctttacggggtcttacagatgcgaagtttcaactaaggacaaatttgactgctccaactttaatttaactgtgcatgaagcaatgggcaccggagatttggatctcctgagcgcattccgcagaacatccctcgctggaggaggacgacgcattagcgattcccatgaagacacaggcatactggatttcagtagcctgctgaagaagtcctcttcattccgaacaccacgggactccaaactagaagcacccgctgaggaagacgtgtgggagattctgcgacaggccccaccgtccgaatatgaacggatcgcttttcagtatggtgtcactgacttgaggggcatgcttaaacgcctgaaggggatgagacgggatgagaaaaagtccaccgcttttcagaaaaagctggagcccgcctaccaggtgagcaagggccataaaattcggctcaccgtcgagctggccgaccatgatgctgaagtgaagtggctgaaaaatgggcaggagatacagatgagcgggcgctatatattcgaatctataggagccaaacggacccttacgattagtcagtgctcccttgctgatgatgcggcttatcaatgtgtagtagggggcgagaaatgcagcacagagctatttgtaaaagagcctccggtattgattaccagacctctggaagaccaacttgtcatggtgggacagcgcgtggaattcgagtgtgaggtgagcgaggaaggagcgcaggtcaagtggctaaaagacggcgttgaactgactagagaagagaccttcaagtacagattcaagaaggacgggcaacgccatcatttgattatcaacgaagcaatgctggaggacgccggccactacgctctctgtactagcggagggcaggctctggctgagctgatcgtgcaggagaaaaaactagaggtttatcagtccatcgccgacctgatggtgggtgccaaagaccaggccgtgttcaagtgtgaagtgagtgacgagaacgtgcgcggggtgtggctaaagaacggcaaagagctggtgcccgactcgcggatcaaggtctcacatatagggcgagtccataaactgactatagatgatgtgactcctgctgacgaggcggattattcgttcgtccccgaaggattcgcttgtaatctaagcgcaaaactccatttcatggaggtcaagatcgatttcgtgccccggcaagagcctccaaaaattcacctggactgtcccggtagaatcccggatacaatagtcgttgtcgctggaaacaagctgcgtctggacgtgccaatttcaggggacccagctcctactgtcatttggcagaaagccatcacacagggcaacaaagcacccgccagacctgcacccgacgctcctgaggacacgggggactctgatgaatgggtgttcgataaaaagctgctttgtgagaccgaaggtcgtgtcagagtggagaccactaaggatcggagtatcttcaccgttgagggggcagagaaggaggatgaaggtgtttataccgtcacagtgaaaaatcctgtgggtgaggatcaggtgaatttaacagtcaaggtcattgatgtgccagacgcccccgcagcacccaagatctccaatgtgggggaggatagctgcacagtacagtgggaaccaccggcatatgatggtgggcaacctattctgggttacatcctggagagaaaaaaaaagaagtcctacaggtggatgaggttaaatttcgacctcattcaagaactgtcacatgaggcccggaggatgatcgagggcgtggtgtacgagatgagagtgtacgcagtcaacgcgatcggaatgtccagaccttccccggccagccaaccattcatgcccatcggtccacctagcgagccgacgcacctggcggtggaggatgtcagtgatacaacagtgagtctgaagtggcgtccacccgaaagggtgggggccgggggattagatggctattccgttgagtattgtcctgagggctgctctgagtgggtggcagcccttcaggggttaactgagcacaccagcattctggtgaaggatcttccaaccggcgcccggttgttgttccgggtgagagcccacaatatggccgggcccggagcgcctgtcacgactacagagcccgtgactgtgcaggaaatccttcaacgcccacgcctccagttgcccagacacctgcggcaaaccattcagaagaaggttggtgagcccgtgaatctgttgattccgttccagggaaagcctcggccccaggtgacctggacaaaggaggggcagccgttggctggagaagaagtgtccattcgcaatagtcctaccgacactattctgtttattcgcgccgccaggcgcgtgcactccgggacctaccaggttacagtgcggatcgagaatatggaagataaagccacactggtgctacaggtcgtggataaaccgagccctccccaagatctgagagtaaccgacgcttggggactaaacgtggctctggagtggaagccaccccaggacgtgggtaataccgaactctggggttatacggtgcaaaaggcagataagaagactatggagtggttcacagtgctggagcactataggagaacacactgtgtggtgcctgaactgatcatcggaaacgggtactattttagggtgttcagtcagaatatggtcggtttctctgatcgcgctgccacaactaaagaacccgtcttcattccaaggcctggaatcacctatgagccccccaactacaaagcactggacttcagtgaggctcccagcttcacacagcctttggtcaatagatcggtgatcgccggttataccgctatgctttgctgcgctgtgcgggggagccccaagcccaaaatcagctggtttaaaaatggattagatctcggcgaagatgcacggtttcgcatgttctcaaagcagggagtgttgactctcgaaattcgcaaaccctgcccgttcgacgggggcatctacgtctgtcgagcgaccaatctacagggagaagcccgctgtgagtgccggctagaggtgcgagtgcctcagtag

SEQ ID NO: 125359 - DNA, 3825 bp, synthetic construct
  misc_feature 1..3825: note = Description of Artificial Sequence: Synthetic coding sequence
  source 1..3825: mol_type = other DNA
atgccagagcctggcaaaaagcctgtttccgcattctcaaagaaaccaaggtcagttgaggtagctgccggctctccagccgtattcgaggccgagactgagcgcgctggagtcaaagtgaggtggcagagaggcggcagtgacatctccgcctccaacaagtacggcctcgcgacagaaggcactaggcatacgcttaccgttagggaagttggacccgcagaccagggtagctatgcagtgatcgccggaagctccaaagttaagttcgacttaaaagtcatcgaggccgaaaaggccgaacccatgctcgcacccgccccagccccggctgaagccaccggagcccctggtgaagcacctgcccctgctgctgagctgggagagtcagcaccctcccctaaagggtcttcctctgccgcccttaacggccctacaccaggagccccagacgaccccatcggacttttcgttatgagaccgcaggacggcgaagtcaccgtgggagggagcatcacattttctgctcgggtggctggagcgagtctgctaaaacccccggtggtcaagtggtttaaaggcaaatgggttgatctcagctccaaagtgggtcagcacttgcagctgcacgatagctacgatagggcctcaaaggtgtacctgttcgaacttcacatcacagatgcgcagcccgctttcacaggctcttacagatgtgaggtttcaaccaaggataaatttgattgcagtaatttcaacctcacggtgcatgaggctatgggtaccggtgatttagaccttctgtcagccttccgccgaacaagtctcgccggaggaggcagacgcatttctgactcacatgaggacacgggtatcttggacttctctagcttgctgaagaaatcatcctcttttcggacaccacgagactcaaaactggaagctcctgccgaggaagacgtctgggagatccttcgacaagcccctcctagcgaatatgagaggatcgcctttcaatacggtgtcaccgatcttagaggtatgctcaaacgccttaagggcatgcgaagagacgagaagaaatctacagcatttcagaagaagctggagcctgcttaccaggtttctaagggccataaaatcaggctcactgtggagttggccgaccacgatgccgaggtcaagtggctgaaaaacggtcaggaaatccagatgtccggtagtaagtacatcttcgagagtatcggggcgaaaagaacactgacaatttcacaatgttctctcgccgacgatgcggcataccagtgcgtcgtcgggggagaaaagtgtagtacggagctgtttgttaaagaaccacctgtgctgatcaccaggcctctggaagaccagctagtgatggtcggccaacgcgtggaattcgagtgtgaggtgtctgaggaaggcgcgcaggtgaagtggctgaaggatggggtcgaactgactcgggaggagacatttaagtatcggttcaaaaaggatggacagcggcaccaccttattatcaatgaagcaatgctggaggatgctggccactatgccctctgcacgtccggcggccaggctctggctgagctgattgtccaagaaaagaaattagaagtgtatcagagtattgcagaccttatggtcggcgctaaagaccaagccgtgttcaaatgtgaggtttctgacgagaacgtgcggggggtttggctcaaaaatgggaaggagttggtgcctgatagtaggattaaggtgagccatattggccgcgtgcataaattgacaattgatgacgtgactccggccgacgaagctgattactcctttgtcccagaaggattcgcctgtaatctgtctgcaaagcttcactttatggaggtgaagatcgacttcgtgccccgacaggagcccccaaaaatccacctcgattgcccgggtcgaattccagatactattgtggtggtggctggcaataaactgcgcttggatgtaccaataagtggtgatcctgcccctacagttatctggcaaaaggccatcacgcagggcaataaagcccctgctcggccggctccagacgcccccgaagatacaggagactctgacgaatgggtctttgataagaagctcctctgcgaaacagagggccgagtgcgtgtcgaaactactaaagatagatccatatttaccgtggagggtgctgaaaaagaagatgaaggagtttacacagtgactgtgaaaaaccccgttggggaggatcaggtgaatttaaccgttaaggtgattgacgtgcctgacgccccggccgcgccgaagatcagcaacgtcggagaggacagctgcacagtacaatgggaacctcccgcttacgatggcggacagcccattttgggctatattttagaacgcaagaagaagaagagctaccggtggatgcggttaaattttgatctcatccaggagctctcacatgaagccagaagaatgatcgaaggagtcgtgtatgagatgagagtctacgccgtgaatgccattgggatgtccagaccttcacccgctagccagccctttatgcctatcggtcctccatccgagcccacacacctcgctgttgaggacgtttcggatacaacagtttcgctgaaatggcgccctcccgagagggtgggagccggcgggttagacggatattcagtagagtattgccctgagggctgctcagaatgggtggcggcactgcagggactgacagagcacacctctatccttgtcaaggacctgccaactggcgcccggctcttgttcagagtgagagcgcacaatatggccggtccaggggccccagtcaccacgaccgagcccgtcaccgttcaagagatcctgcagagaccaaggcttcagttgccacgtcacctccggcagaccatccagaaaaaagttggagagccagtgaacctcttaatcccattccaggggaagcctaggccacaggtcacttggacaaaagaaggccagcccttggcgggcgaggaagtttcgatcagaaacagtcctaccgacactatactctttattcgggcagctcgcagagtccactctggcacttaccaggtgactgtcaggattgagaacatggaagacaaagcaaccctggtcctccaggtggtcgataagcctagtcctccccaggacctgcgggtgaccgacgcatggggcctgaatgttgcattagagtggaaaccacctcaggacgtgggtaacaccgagctctggggctataccgtgcagaaggccgacaagaagacaatggaatggtttacagtcctggaacactacaggcggacccactgcgtggtgcccgaactgattatcggaaacgggtattatttcagagtattctctcagaatatggtaggtttctccgaccgcgcagcaaccaccaaagagcctgtattcataccccggccaggcatcacctacgaaccccccaattataaggccctcgatttttctgaggctccatcttttacccaacctctggttaaccgctccgtgatcgccggctatacagctatgctgtgctgcgctgtgagaggctcaccaaaacctaaaatatcctggttcaagaatggtttggatctgggggaagacgcccgctttaggatgttttcaaagcaaggagttttgaccctcgagatacggaaaccgtgtcccttcgacggaggaatctacgtctgccgcgcaaccaatctgcaaggtgaagcccgatgcgagtgtcgactcgaggtccgagttccacagtag

SEQ ID NO: 125360 - DNA, 3825 bp, synthetic construct
  misc_feature 1..3825: note = Description of Artificial Sequence: Synthetic coding sequence
  source 1..3825: mol_type = other DNA
atgcccgagcccggaaagaagcctgtctcagccttctcaaaaaaaccacggtcagtggaagtagccgctgggtcaccagccgtattcgaagccgaaacggagagagctggggtgaaggttcgctggcaacgaggagggtcagacataagcgcctcgaataaatacggtctggcaacggagggcacacgtcatacccttactgtccgtgaggtgggcccagccgaccaggggtcttatgccgtgatagctgggtcctcaaaagtcaagtttgacctgaaggtgatcgaggcagaaaaagccgagcctatgcttgctcctgcccccgctcctgctgaggccactggggccccgggtgaagcccctgcgcccgctgcagagctgggagaatctgcacccagccctaaaggtagcagcagtgccgctttgaatgggccgactcccggagccccggacgatccaattggactctttgtcatgcgccctcaggacggagaagtgacagtgggcggatctatcacattcagcgcccgcgttgcaggggctagccttcttaaacctcccgtagtgaaatggtttaagggaaagtgggttgacctaagctccaaggtaggccagcacctgcagctgcatgatagctacgaccgcgcttctaaagtatatctgtttgaactgcatattacagatgcccagcccgccttcacaggcagctaccggtgcgaggtgagtacaaaagataaattcgactgttcaaatttcaatctaactgtacacgaggccatgggcacaggtgacctggatctgctgtctgccttccggcgcacttccttggccggcggaggcaggagaatctctgattcccatgaggatacagggattctggatttctcatccctgctgaagaaaagggatagcttcagaactcctcgcgacagcaaattggaggctcctgccgaggaggacgtctgggagatcctgaggcaggctccacccagcgaatacgagcgtattgcctttcagtacggagtgaccgaccttcggggtatgcttaagcgactcaagggtatgcggcgtgatgaaaagaaatctactgcctttcagaaaaagctggagcctgcttaccaggtatcaaagggccacaagattaggctgactgtcgagcttgctgaccacgacgccgaggtgaagtggctcaaaaatggccaggaaatccagatgtccggcagcaagtatatattcgaatctataggagcaaagcggaccctgaccatctcccagtgttcactggccgacgatgccgcttatcagtgcgtcgtcggaggtgagaagtgtagtaccgagctctttgtgaaggagcctcccgttctgatcacacgtcctcttgaggatcaactggtaatggtgggacagagggtggagttcgagtgtgaagtgagtgaagaaggggctcaggttaagtggctgaaagatggcgtggagctgacccgggaagaaacttttaagtatcggttcaaaaaggatgggcaacgccatcacctgataattaatgaagctatgctggaggacgcagggcactacgctttatgcaccagcggcgggcaagctttagctgaactgattgtccaagaaaaaaagctggaagtctatcaaagtatcgctgaccttatggtaggagcgaaagaccaggctgtcttcaaatgtgaggtgtcggacgagaatgtgaggggtgtctggctgaaaaacggaaaggagctggtgcctgactccaggattaaggtgtcgcatatcggtcgcgtacacaagctgactatcgacgatgtgaccccagctgacgaggctgactatagcttcgtacccgaagggttcgcttgcaacctgtctgctaagctgcatttcatggaggttaagatcgacttcgtgccaaggcaagaacctcctaaaattcacctcgattgtccaggcaggattccggataccattgtggtggttgccggcaataagttgcgcttggatgttccaatcagtggagacccggcccctacagtgatctggcaaaaagctataacgcagggcaacaaagcacccgcacggccagcgcccgacgcccctgaagatacaggcgactcggacgaatgggtcttcgataagaagttgctgtgcgaaactgagggcagagtgagggtggagaccacgaaagataggagcatctttacggtggagggcgcggagaaagaggacgagggagtgtacactgtgacggttaagaaccccgtgggtgaggaccaggtgaacctcaccgtgaaagtgatcgatgtgccggacgcccccgctgcccccaagattagcaacgtcggcgaagactcatgtactgtgcagtgggaacctccagcctacgatggaggccagccaatcctggggtacattttggagcgcaaaaaaaaaaagtcctatcggtggatgcggctcaatttcgatcttatccaggagctttcccatgaagcaagaaggatgattgagggggtcgtctacgagatgcgggtgtatgccgtgaatgcgatcggaatgtcccgaccctctcccgcatctcagccttttatgccgatcggcccaccctctgaacccacccacctggccgtggaagatgtgagtgatacaacggtatccctcaagtggcggccccctgaacgtgtcggtgctggagggctggacggatatagcgtggaatactgccccgagggatgctcagagtgggttgccgctttgcagggccttacagagcacactagtatcttggtgaaggacttgcccacaggggctagattactgttcagggtgagagcacacaacatggcggggccgggcgctccagtgacgaccacagagcccgtaactgttcaggagattctacagcgaccccgcctccagttaccgcggcatctgcggcagacaatacagaagaaggtcggagagccagtgaacctgctgatcccctttcagggcaagccaagaccgcaggtcacatggactaaggagggtcagccactggccggcgaggaggtcagtattcggaatagcccaacggacactatattgtttatccgggctgcacgtcgcgttcacagcggcacctatcaagtgacggttaggattgaaaatatggaggataaggccacccttgtgcttcaggttgtggataaaccttcgcccccacaggacctgcgcgtgactgatgcttggggcctgaatgtagccctggaatggaagccgccccaggacgttggaaacacggaactctggggttatactgtgcaaaaggctgataagaagacgatggagtggttcacggtcctggagcactaccggcggacgcattgcgtcgtgccagagttgattatcggtaacggctactacttcagggtctttagccagaacatggtaggatttagtgacagggcagctacaactaaagaaccagtcttcattccgcgccccgggattacttatgagccgccaaattataaggcactggacttttcggaggccccttctttcactcaacctctggtgaatcggagcgtgatcgctggttatacagcaatgctttgctgtgccgtgcgcggctctccaaagcctaagatttcttggttcaaaaacggtttagacctaggagaggatgcaagattcaggatgttttccaagcagggagtgctgacactcgagataaggaaaccgtgtcctttcgacggagggatttacgtgtgtcgagcaactaacctgcagggagaagctcgctgcgagtgccgactggaagtaagagtgcctcagtag

SEQ ID NO: 125361 - DNA, 3426 bp, synthetic construct
  misc_feature 1..3426: note = Description of Artificial Sequence: Synthetic coding sequence
  source 1..3426: mol_type = other DNA
atgccagaggccaagcccgctgcaaaaaaggcacctaaaggcaaagatgcgcctaagggagcaccaaaggaagccccccccaaagaggcgcccgccgaggccccaaaagaagcacccccggaagatcaaagtcccaccgccgaagagcctacaggcgtgtttcttaaaaaacctgacagtgtgtctgtggagactgggaaggatgcagttgtggtggctaaggttaatggcaaggagctgcctgataagccaactattaagtggttcaagggaaaatggctggagctaggatctaagagcggggccagattttcgttcaaggagtcacacaactcggcgtcaaatgtttacaccgttgaactgcacataggcaaagtggtgctcggcgatagaggttactatcgccttgaggtgaaagcaaaggatacttgtgattcctgcggctttaacatcgacgtggaggcgccacgccaggatgcctccggccagagtctggaatccttcaagcggacatccgagaaaaagagtgacaccgctggcgaattggatttcagtggtctcctgaaaaaacgagaagtcgtcgaggaggagaagaagaagaagaagaaggatgatgatgacctgggtatccctcccgaaatctgggaactgctgaaaggagcaaagaagtccgagtacgagaaaattgctttccaatatggaattaccgacctgcgaggcatgctcaaacgcctaaagaaggcaaaggtagaagtcaagaaaagcgctgccttcactaagaagttggaccccgcctaccaggtggacagaggaaataagatcaaactgatggtggagatttcggaccccgatctgactctgaaatggtttaagaacggccaggagattaaaccatcttccaagtatgtgtttgaaaacgtggggaagaaaaggatcctcacaattaacaagtgcaccctggccgacgacgccgcttatgaagtcgcagtcaaagatgaaaagtgcttcactgagctcttcgtaaaagagccccctgtcctgattgttactcccctggaggaccaacaggtcttcgtgggcgatcgggtagagatggctgtagaggtgtcagaggagggggcccaagtgatgtggatgaaggacggcgtagagctcacccgcgaagactcattcaaggccaggtaccggttcaagaaggatgggaagagacacatcctcatatttagtgatgtggtccaagaggatagaggacggtaccaggttatcaccaacggcggccagtgtgaggctgaactgatagtggaggagaagcagctggaggtgctccaggatattgcagatttgactgtgaaggccagcgagcaggccgtgttcaagtgtgaggtttccgacgagaaagtcacaggcaaatggtacaaaaacggcgtggaagtgcgaccctcaaaacgcattaccatctcccacgtcggaagatttcacaagctggtaatcgacgacgtccgccctgaggacgagggagactatacgtttgtccctgacggatacgctttgagtttaagcgcaaagctcaatttcctcgaaataaaggttgaatatgtgcctaagcaggagcctcctaaaatccacctggattgttcggggaaaacgtccgaaaatgccattgtggtggtcgcaggcaacaaactgaggctggacgttagtatcaccggagagcctccccccgtggccacatggctgaagggcgacgaagtattcaccaccacggagggacgcactcgcatcgaaaagcgtgtggactgcagcagctttgtgatcgagagcgcgcagagggaggacgaaggccgctacacaattaaggtcaccaaccccgtaggcgaagatgtggcctccatattcctccaagtcgtggatgtgcccgacccgcctgaggcagtgcgcattacaagcgtcggcgaggattgggctattctagtctgggaacctcctatgtacgatgggggtaagcccgtgaccggctacctggtcgaaagaaaaaagaaaggatcacagcgatggatgaaactgaactttgaggtctttacagaaacaacctatgagtccactaaaatgattgaagggatcctctatgagatgagagtctttgccgttaacgccatcggggtgtcacaaccatccatgaacacgaaaccatttatgccgattgccccaactagtgagccactccacctaattgttgaagacgtaactgatacaacaaccacattgaaatggaggccacccaatagaatcggggcgggggggatcgacgggtatctggtggaatattgcctggaagggtccgaggaatgggtgcctgccaacaccgagcctgtagaaaggtgcggtttcaccgtgaagaatctgcctacaggggccagaatcctgtttcgtgtggtgggagtgaatatcgctggcagatccgaacctgccacactggcgcagccagttacgattagggagatcgctgagcccccgaagatccggctgccccgccatttgagacagacctacatcaggaaagtcggcgagcagctcaacctagtcgtgcctttccagggcaagccacgacctcaggtcgtgtggactaaaggcggagctcctctcgatacaagccgtgtgcatgttcgaacgtctgattttgacacagtgttctttgttaggcaggccgccagaagcgatagtggggaatacgagctctccgtgcagatcgagaatatgaaggatactgccacaattcgaatccgggtagttgagaaagccggccctccaatcaatgtgatggtcaaggaagtgtggggtaccaatgctttggtggagtggcaggcccccaaagatgatggaaactctgaaattatgggctactttgtgcagaaggcagacaagaagaccatggagtggtttaatgtttatgagaggaataggcacacctcatgcaccgtgtctgacctgattgtggggaatgagtattatttccgagtgtacacggagaacatctgcggacttagtgactctcctggggtgtctaaaaacaccgcgcgaattctaaaaaccgggattactttcaaaccctttgagtataaggaacacgatttcagaatggcccctaaatttctcactccattgattgaccgggtcgttgttgctgggtactcggcagccctcaactgtgctgttcggggtcaccccaaacccaaggttgtgtggatgaaaaataaaatggaaattcgcgaggacccaaagttcctgattacaaattaccagggcgttcttacactcaatatcagaaggccaagtccattcgacgccggtacttacacctgccgggcagtaaacgagcttggagaagctctggccgagtgcaaacttgaagtgcgcgtcccccagtag

SEQ ID NO: 125362 - DNA, 3426 bp, synthetic construct
  misc_feature 1..3426: note = Description of Artificial Sequence: Synthetic coding sequence
  source 1..3426: mol_type = other DNA
atgccagagcctactaaaaaagaagagaatgaggtgcctgcaccagcacccccccctgaggagccatctaaggagaaagaggcgggcacgactccagctaaggactggaccctcgtggaaactcctcctggtgaggagcaggctaaacagaacgccaattctcaactgtctatattgttcatcgagaagcctcagggcggcacagtcaaagtaggcgaagatataacttttatcgcaaaggtgaaggccgaggacctgttgagaaagcccaccataaagtggttcaaaggcaagtggatggacttagcgtcaaaagcaggcaagcacctgcaattgaaggaaacttttgagcgccattctagggtgtacactttcgagatgcagattatcaaagcaaaagataatttcgctggcaattatcgctgtgaggtgacgtataaagataaattcgacagttgttcttttgatctggaagttcacgagagtaccggaacgacaccaaacatagacataaggtccgcctttaaacgcagcggagagggtcaagaagacgccggggaactagacttcagtggtctactgaagcgtcgagaagtcaagcagcaggaagaggagccccaggtggacgtgtgggaacttctgaagaacgccaaaccttccgagtatgagaaaatcgcgtttcagtatgggattacagatctcaggggcatgctcaaaaggctgaagcgaatgcgcagggaggagaaaaaatcagctgcattcgctaagatcctggacccagcttatcaggtggataagggtggccgggtccgattcgttgtagagcttgccgaccccaagctggaagtcaagtggtacaagaacgggcaggagattcgtccaagtaccaagtatatcttcgaacataaagggtgccaaaggattcttttcattaacaattgtcagatgacagacgacagtgaatattacgtaacggccggggatgagaaatgcagcactgagttattcgtgagggagcccccaatcatggtgacaaaacagttagaggacactaccgcgtattgcggtgagagagtcgagctcgagtgcgaggtgtcagaagacgacgctaacgttaaatggttcaaaaacggcgaggagataattcccggccccaaatccaggtatcgtattagagtggaagggaaaaagcatattctgattatagagggtgcaactaaggccgatgctgcagaatactcggtcatgactaccggaggccagagctcagccaaactgtctgtggacttaaagccattgaagatactgacccctctgacagaccaaacagtgaatctggggaaggagatatgcctgaaatgcgaaatttcggagaacattcccggtaaatggaccaaaaacggactgcccgtgcaagaaagtgatcgactgaaagtggtgcacaagggtcgtattcataagctcgtgatagccaacgccctcactgaggacgaaggcgactacgtcttcgctcccgacgcatataatgtcactttaccagccaaggttcatgtaatcgacccacctaagattattctggatggcctagacgccgataacacggtaactgtgatcgccgggaacaaattgcggctcgagatcccaatcagtggggaaccacctcctaaggcaatgtggagcaggggggataaagccataatggagggaagcggtcgtatccgcactgagtcctacccggatagctctacattagtaatcgatattgcagaaagagatgacagcggggtataccacattaacctaaaaaatgaagctggcgaagcccacgcttccattaaggtcaaagtggtggacttcccggatcctcccgtggccccaactgttactgaggtgggagatgactggtgcattatgaattgggaacccccggcctacgatgggggatcccccattctgggatactttatcgaacgaaaaaagaaacagagctcaaggtggatgaggcttaacttcgacctctgcaaagaaacaacattcgaacctaaaaagatgatagaaggtgtggcttatgaggtacgcatattcgcagtgaacgccattgggatctcaaagccttctatgcccagccgaccttttgttcctctagccgtgacatcccctccaaccctgttaacagtcgattcagtgacagacacaaccgtcacaatgaggtggcgtccacccgaccatatcggggccgccggactggatggttacgtgctggaatactgctttgaaggtagcacttcagctaagcagtctgatgagaatggtgaggctgcatacgacctgccagcagaggattggatcgtcgcgaataaggatttgatcgacaagactaagtttacaatcaccgggctcccaacagacgcaaaaatttttgtcagggtcaaggctgtgaatgccgccggtgcttctgagccgaagtactacagtcagcccatacttgtgaaggagataattgaacctccaaagatcagaatcccgcgacaccttaaacagacttacattagaagagtcggagaagcagttaacctcgtgatacctttccagggcaaacctcgccctgagcttacttggaagaaagatggagcagagattgataagaaccaaattaacatcagaaactccgagaccgacacaatcatctttatccggaaggccgagcggtcccattccgggaaatatgatcttcaggtgaaggtggacaaattcgtcgaaaccgcctccatcgatatccagattattgaccggcctgggccccctcagatcgtcaaaatcgaagacgtgtggggcgaaaatgtcgccttgacttggacccctccaaaagacgacggaaacgcagctattaccggatacaccatacagaaggcggataagaaaagtatggagtggtttactgttattgaacactaccaccggacctcagccacaattactgaactggtaataggtaatgagtattactttcgcgtcttctctgagaacatgtgcgggttgtccgaagacgctacaatgacgaaagagtctgccgttatcgcgcgagatgggaagatttataaaaacccagtctatgaggacttcgatttttctgaggcgcctatgtttacacagcctctggtgaatacttacgctatcgcaggttataacgcaactctgaactgtagtgtgaggggtaatccaaaacctaagattacctggatgaaaaacaaggtcgccatagtggatgacccccgttacaggatgttctccaaccagggagtgtgcactctcgagattagaaaaccttccccatacgacggaggtacatattgctgtaaggcggtgaacgatctgggcacggtggaaatcgaatgcaagcttgaggtgaaggtgattgcccaatag

SEQ ID NO: 125363 - DNA, 3516 bp, synthetic construct
  misc_feature 1..3516: note = Description of Artificial Sequence: Synthetic coding sequence
  source 1..3516: mol_type = other DNA
atgcccgaacctacaaaaaaggaagagaatgaggttccagcaccggccccacccccagaagagcctagcaaggaaaaggaagccggaacaacacccgcaaaggatgaagaggaagtttcacctccgtctgcccttcctccaggtctgggctctagagctctggaaaggaaagacagcgattggacactcgtggaaacccctcccggcgaggaacaggcaaagcagaatgccaacagccagctgagcatcctgtttatagagaagcctcagggggggacggtgaaggttggcgaagatattacattcatcgccaaggtcaaggccgaggatttgctgcggaagcccaccatcaagtggttcaaagggaagtggatggacctggcctccaaagcaggtaagcatctgcagctgaaggaaacgttcgagagacacagccgcgtatacacctttgagatgcaaataattaaagctaaagataattttgcaggcaattatagatgtgaggtgacttataaggacaaattcgacagctgcagctttgacctcgaagtgcatgaaagcacaggcaccacgcccaatatcgatattcgaagcgctttcaagagatctggagaaggacaggaagacgctggagagctggatttctccggcctgttgaaacgcagagaggtaaaacagcaggaggaagagccacaggtggacgtgtgggagctgttaaaaaacgccaaaccatccgagtacgaaaagattgcctttcagtatgggattacagatttacgcggtatgctgaagagactgaagcggatgaggcgagaggaaaagaaaagcgcggcatttgccaagattctcgaccctgcctatcaggtcgataaggggggcagggtgcggttcgtagtagaactcgcggacccaaagctcgaggttaagtggtataagaacgggcaggagatcagaccgtctactaaatatatatttgagcacaaaggatgtcagcgaatcctgtttatcaataattgccaaatgacggacgactccgagtattatgttacagccggcgacgagaagtgttcaacggaactgtttgtcagagagcctccgatcatggtgacgaaacagcttgaagatactacagcttactgcggggagagagtggagctggaatgcgaggtgagtgaggatgatgccaacgtgaaatggttcaaaaatggagaggaaattatcccagggcctaagtcaagatacaggattagggttgaggggaaaaagcacatcctgataatagaaggcgcaacgaaagcagacgccgccgaatattccgttatgaccactggaggacaatcttctgctaagctgtcggtcgatctcaagccactgaaaatcctaaccccactcaccgatcagacagtgaacctgggaaaagagatttgcctaaagtgcgaaatcagtgagaatatccccggcaaatggaccaaaaacggactcccagtccaggagtctgaccgactcaaggtcgtgcacaaaggaaggattcataagttggtgatcgctaatgccttaacggaggatgagggggattacgtgtttgctcctgatgcctataacgttaccctcccagcaaaagttcacgtgattgatccccccaagataatcctagacgggctggatgcagataataccgtcacggtgattgcagggaataaactgcggctggagatccccatctccggggaacctccacctaaggccatgtggtcacgcggagacaaggcaatcatggaagggtccggaaggatcaggacggaatcctaccccgatagtagtacattagtgattgatatcgccgagcgagatgatagtggcgtgtatcacatcaacctgaagaatgaagcgggcgaggcccatgccagcatcaaggtgaaggtggtcgatttccccgatcctcctgtcgcgccaaccgtaaccgaagtaggcgatgattggtgcatcatgaactgggagccgcccgcttacgacgggggcagtcctatcctgggctactttattgagcgtaagaaaaagcagagcagcaggtggatgcgtttaaatttcgatctctgcaaagaaaccacgttcgagcccaaaaaaatgattgaaggagtggcttacgaagttagaatttttgctgtgaacgccatcgggatcagcaagcccagcatgcccagccggccattcgtgccactggccgtgacatctccaccaacacttctgacagttgactctgttactgacactaccgtgacaatgcggtggaggccacccgatcacatcggtgccgctggattggatgggtacgtcttagaatactgttttgaaggaacagaggattggatagtggcaaataaagacctgattgataaaacgaaattcaccataacagggctgcccactgacgctaaaatatttgtgcgcgtgaaagcagtgaacgccgccggcgcgagcgagcctaagtactacagtcagcccattttagtcaaggagattatagagcctcctaagatcagaattcccagacatctcaagcagacatacattcgccgggtaggagaagctgtcaacctggttattcccttccagggaaagcctcgaccggaactgacatggaagaaggatggcgccgagattgacaaaaaccagatcaacattagaaactctgagacagataccatcatttttattaggaaagcagagcgctcacattcgggaaaatatgatctgcaggtcaaggtggacaagtttgttgaaacagcctccatcgatatccagatcattgatcgcccagggccgcctcagatcgtcaaaattgaggacgtctggggggagaatgttgcactgacctggactcctcctaaggacgatggaaacgccgctatcaccggctacacaatccaaaaggccgacaagaaatcaatggaatggtttacggtaatagagcattaccatcggacgtctgccacgatcaccgagttagttattgggaatgagtactactttagggtgttcagcgaaaacatgtgcggactttctgaagacgccaccatgaccaaagaatctgcggtcatagctagggatgggaagatatacaagaacccagtatatgaggattttgatttctctgaggccccaatgttcacacagcccctggttaacacatacgcaattgccggctacaatgctacattgaactgtagtgtgcgcggcaaccccaaacccaagataacatggatgaaaaataaggttgccatcgtggatgatccccgctacagaatgttctctaatcagggggtgtgcaccctggagattcggaagccctctccctatgacgggggaacatactgttgcaaagccgttaatgacctcgggaccgtggagattgagtgcaagctagaggttaaggtcatatatcagggcgtgaacacaccggggcagccagtttttctcgaaggacagcagcagtctttgcacaacaaagatttctag

SEQ ID NO: 125364 - DNA, 3447 bp, synthetic construct
  misc_feature 1..3447: note = Description of Artificial Sequence: Synthetic coding sequence
  source 1..3447: mol_type = other DNA
atgccagaacccaccaagaaggaagaaaatgaagtgcccgctcccgcaccaccgcctgaggagccctcaaaggagaaagaagccggaacaacccccgctaaagatgaggaggaggtttcccctccctcagcactgccacccggcctgggcagtcgggcactagagaggaaggatagcgactggacgctagtggagactccccccggagaagagcaggccaaacagaacgctaacagtcaactttcaatcttgtttattgagaagccccaaggcgggacggttaaggtgggggaggacatcacatttatcgcgaaagttaaggccgaagacctgctgaggaagcccacaattaagtggttcaaaggaaaatggatggatttggcttccaaagctggcaagcacctgcaactgaaagagacatttgaacggcacagcagagtttatacatttgaaatgcaaatcattaaggccaaggacaactttgccggcaattataggtgcgaagttacttacaaagacaaatttgactcctgtagcttcgacctagaagtgcacgagagcaccggtactacgcctaatattgacattagatccgctttcaaaaggtccggcgagggccaggaggatgctggagagctagacttttcaggccttctgaaaaggcgggaggttaaacagcaagaagaagaaccacaggtggacgtgtgggagttgctgaagaatgccaagccatctgaatacgaaaaaatagcgtttcagtacggcatcactgatctacggggcatgctcaagaggctgaagagaatgcgcagagaggagaagaagtctgcagcattcgccaaaattctggatcccgcctatcaagtcgacaagggcggacgtgttcgctttgtcgtggagctcgccgaccccaagctggaggtcaaatggtacaagaatggccaggagattcgaccgtccactaagtacatttttgagcataagggctgtcaaagaattttattcatcaacaactgtcagatgacagacgattctgagtactacgtgactgctggcgacgagaagtgctcaacagagttgttcgtgagagaacctccgatcatggtgaccaagcaactggaggataccacggcctattgtggcgagcgcgtcgaactggaatgcgaggtctccgaggatgacgccaatgtcaagtggttcaaaaacggcgaggaaatcatcccaggccctaaatcacgttatcgcatacgagtggagggcaaaaagcacatcctcatcatcgagggcgccacaaaggccgacgcagctgagtacagcgtaatgacaactggcggtcagagctccgcgaaactgagtgtggaccttaagcccctgaaaatcctcacacctctgacagaccaaacagtcaatctgggcaaggagatttgtctgaagtgtgagatctccgagaatatacccggcaagtggactaagaacggacttccagttcaggagtcggacaggctgaaggtcgtgcacaaaggacggatacataagctcgtgattgccaacgctctcacggaagatgaaggtgattacgtgttcgcgcctgacgcatacaacgtcactctgcccgccaaggtacatgtaatcgacccgcctaagatcatactggacggtctagatgccgacaacacagtaactgtgattgccggcaacaaactgcgcctggaaattcctatctccggtgagccaccaccaaaggctatgtggtccagaggtgacaaagccatcatggagggaagtggacgtatcaggaccgagtcatatcctgacagttcgaccctggttatagacattgccgaaagagacgattctggtgtgtatcatattaacctgaaaaacgaagctggggaagcccacgcctctatcaaagtaaaagtggtggacttcccagaccctcccgtagcgccaacagttacagaggtgggcgatgattggtgtatcatgaactgggaacctcccgcctatgacggggggtcacccattctcggctacttcattgaaaggaagaagaagcagagttcacggtggatgcgcctcaactttgatctgtgtaaagagacaaccttcgagccaaaaaaaatgattgagggggtggcctacgaggtacgcatctttgccgtaaacgctataggcatatctaagccgtccatgccatcaagaccctttgtaccactggcagtgaccagccccccgacactgctaacggttgactccgtgacagacacgaccgtgacgatgaggtggagacccccagaccacatcggcgccgcaggcctcgatggttatgtgctggagtattgcttcgagggcactgaagattggatagtggccaacaaggacctgattgataagaccaagttcacgatcacaggcttgcccaccgacgcgaaaatttttgtgcgtgtaaaggccgttaacgccgctggagctagcgagcctaaatattacagccaacctatactggtgaaagagataatcgagcccccaaagattcgtataccccgtcatctcaaacaaacttatatcaggcgcgttggcgaggctgtaaatttggttatcccctttcagggaaagcccagaccagagctgacctggaagaaggacggagcggaaatagacaaaaatcagatcaatatccgtaacagtgagaccgataccattatctttatccgcaaagctgaacgctcccacagcgggaaatacgacctccaggttaaagtggacaaattcgtggagacagctagcatagacattcagataatcgacagaccggggccaccccaaatcgtaaagattgaggacgtgtggggggagaacgtcgccctgacgtggactccacccaaggatgacggcaatgctgcgattaccggatataccatccagaaggccgacaagaaatcgatggagtggtttacagttattgaacattaccacaggacttccgcaaccatcacggaacttgtcatcggcaacgagtactactttagggtcttctcggagaatatgtgcggactgtccgaagacgcaacaatgacaaaagagtctgccgtaattgcaagggacggcaaaatttataagaaccccgtgtacgaggatttcgactttagcgaggcccccatgtttacgcagcctctggtgaacacttacgccatcgctggctacaacgctaccctgaactgcagcgttcgtggtaacccgaagcccaagatcacttggatgaagaataaagtggcaatcgtggacgatcctcggtataggatgttcagtaaccaaggagtgtgcaccctcgaaattcgaaagcccagtccctatgacggcggcacatactgttgcaaagccgttaatgatctgggaacggtcgaaatcgaatgtaagttggaggtgaaggtgatagcacaatag

SEQ ID NO: 125365 - DNA, 3495 bp, synthetic construct
  misc_feature 1..3495: note = Description of Artificial Sequence: Synthetic coding sequence
  source 1..3495: mol_type = other DNA
atgcctgagccaaccaagaaggaggagaatgaagtgccagcccctgccccaccccctgaggaacccagcaaggaaaaggaggcagggacgactcctgccaaggactggacattggtggaaacacctcccggtgaggaacaggccaaacaaaatgctaactcacaactctccattctgttcattgagaagccccagggcggaaccgtgaaggtgggcgaagacatcaccttcattgcgaaggtaaaagcggaagatctgttacggaaacccacaattaaatggttcaaggggaaatggatggatctcgcaagcaaagctggcaagcacctacagttgaaggagacctttgagcgccactcgagggtgtacacatttgagatgcaaattatcaaggcgaaggataactttgccggtaactaccgctgcgaggtgacctataaagacaaatttgacagttgctcctttgacctagaagtccacgagagcaccggtaccacacccaacatcgatattaggtctgcttttaagcggtcaggagagggacaagaggatgcgggcgagttagacttctcagggctcttgaaacgacgtgaggtgaagcagcaggaggaggaacctcaagtggatgtctgggagctgctcaagaatgccaaaccgtcagagtatgaaaaaatcgccttccaatacggaatcaccgatcttcggggcatgttaaaacgcctcaagaggatgcggcgggaagagaaaaagagtgcagccttcgctaagattcttgatcccgcgtaccaagtcgataaaggaggaagagtccgatttgtggtagaactggcggacccaaagctagaggtgaagtggtacaagaatggccaggagattagaccgagtaccaaatatatatttgagcataagggctgccaaagaattctgttcattaacaactgccagatgactgacgatagtgaatactacgtcacagcaggggacgaaaaatgttcaaccgaactctttgtgcgggagcccccaatcatggtgacaaagcagctggaggatactacggcctattgtggggaaagggtcgagctggagtgcgaggtgtccgaggatgacgcaaacgtcaagtggtttaagaacggcgaggagattatacctggccccaaaagcaggtatagaatccgggtggagggtaagaagcacatattgattatcgagggtgccacaaaagccgacgccgcagaatacagtgttatgaccaccggcggccagtccagtgcgaagctaagcgtcgatctcaaaccccttaagattctgacgcccctcactgaccagaccgtgaatcttggcaaggagatctgcctgaagtgtgagatatccgaaaacatccctgggaagtggaccaagaatgggctacccgtccaggagtccgacagattaaaggtcgtgcacaaaggccgcatccataagctggtaatcgcaaacgccttgacagaggatgagggggactatgtgtttgctcctgacgcctataacgttaccctcccagctaaagttcatgttatcgatcccccaaaaataatactcgatggcctggatgccgacaataccgtcaccgtcatcgccgggaataagctgcggcttgagatccctatttcgggcgagcccccaccaaaagccatgtggagcagaggagataaggcgatcatggaaggtagcggtcgaataagaactgagtcttaccctgacagttccacactagtgatcgacatagcggagcgagatgattccggcgtgtaccatatcaacctgaaaaacgaggccggggaagcacacgcttccatcaaggtcaaagtggtcgacttcccagacccgccagttgcacctacagtgactgaggtgggagacgattggtgcataatgaattgggagccacccgcttatgacgggggcagtccaatcttgggctacttcatcgagagaaagaagaagcagtcctcccgctggatgagacttaattttgacctgtgtaaagaaaccacatttgagccgaaaaaaatgatagaaggagtggcgtacgaggtgcgaatatttgctgtcaatgctatcggtatcagcaaaccaagtatgccctctaggccgttcgtcccactcgccgttacctccccccctactctgttgaccgtggacagcgtcacagataccaccgtcactatgaggtggcgtccgccagaccacatcggcgctgccgggctggatggctacgtcctcgagtactgtttcgagggctctacctctgcgaagcagagcgacgaaaatggggaagcggcctacgacctgccagcagaagactggatcgtggccaataaagacttaatcgacaagaccaagtttactatcacaggtctcccaacggatgcgaagatttttgttcgagtcaaagccgtcaatgcggctggggccagtgaacctaaatactattcgcagcctattctggttaaagaaatcatcgagcctcccaagatcaggattcctcggcacctgaagcagacctacataagaagagtgggggaggcagttaaccttgtcattcccttccaagggaagcccagacccgagctgacctggaagaaggacggggcagagatcgataagaaccagattaatattcggaactcagagacggacaccattatattcatacgtaaggccgagcgctcccacagtggtaaatatgatctacaagtgaaggtggataagtttgttgaaactgcttctattgatatccagatcatcgataggcccgggccacctcagatcgttaaaatagaggacgtgtggggtgagaatgttgccttgacttggacaccgccaaaggacgatgggaatgcagcgatcaccgggtatacaattcagaaggccgacaaaaaatctatggagtggtttacagttatcgaacattatcataggactagcgccacgatcactgaactggttatcggaaatgaatactacttccgggttttctcagagaacatgtgtggactatccgaagatgcaaccatgactaaggaatcagctgtcattgccagggacggcaagatttacaaaaaccccgtttatgaggactttgatttctcagaggcccctatgtttacccagcccctggttaacacctatgccatcgctgggtataacgccacgctcaattgctcggtccgggggaatcctaagcctaagattacatggatgaagaataaggttgctattgtggatgatccccgctacagaatgttttctaaccagggagtgtgtaccctggagattcggaagccaagcccgtatgacgggggaacatactgttgtaaagccgtcaacgatttgggcacagtagagatcgaatgtaagctggaagtgaaggtgatataccagggcgtgaatactccaggccagccagtgttcttggaaggacagcaacagagtctccacaacaaggacttttag

SEQ ID NO: 125366 - DNA, 2349 bp, synthetic construct
  misc_feature 1..2349: note = Description of Artificial Sequence: Synthetic coding sequence
  source 1..2349: mol_type = other DNA
atgccggagcccactaaaaaagaagaaaacgaggtccctgcccctgcgccccccccggaggaaccttccaaggagaaagaggctgggactacaccggccaaagatgaggaagaagtaagccctcccagcgcactgcccccgggcttgggcagcagggccttggaacgcaaggacagcgactggaccctagtggaaacccctcctggcgaggagcaagctaaacagaacgccaattcacagctcagtatcctgttcatcgaaaagccacaagggggtacagtgaaggttggggaagatatcactttcattgctaaggtcaaagccgaagaccttcttaggaagccgactatcaagtggttcaagggaaagtggatggacttagctagtaaggccggcaagcacttgcaactgaaggaaacctttgaacgacactccagagtgtacacctttgagatgcagataattaaagccaaagacaatttcgctggaaattaccgatgcgaggtgacatacaaggataagttcgattcttgctcattcgatttggaggtccacgaatctacaggaacaaccccgaatattgacattagatccgcatttaagaggagtggtgaaggtcaggaagacgctggtgagttagatttcagtgggctactcaaaagacgggaagtaaagcagcaggaggaggaaccacaagtggacgtttgggagctcctaaaaaacgcgaaaccgtctgaatatgagaaaatcgcttttcagtacgggatcacagacctgcgtggcatgctgaaaagactgaagagaatgagacgggaggaaaagaagtctgccgctttcgccaaaatactggacccggcataccaggttgataaaggtgggcgggtgaggttcgtcgtggagctagccgatccaaagttggaggtgaaatggtataagaatggtcaggagattaggccaagcaccaaatacatcttcgagcacaaaggctgccagagaattctgtttatcaataactgccagatgactgatgatagtgaatactatgtgaccgccggcgacgagaagtgtagcaccgaactgttcgtgcgagaaccacctataatggtcacaaagcagcttgaggacaccacagcctattgcggggagagggtagagctggagtgtgaggtgagcgaagacgacgcgaacgtcaagtggttcaagaacggtgaagagattatcccaggccccaagagcagatatagaatacgtgtggaggggaagaagcacatactgataatcgagggagcgacaaaggccgatgcagctgagtactctgtgatgaccactggcggccaatcatctgccaaactttcagtggacctgaagccacttaaaattctcacgccattgacagaccagaccgtaaatctgggcaaggaaatatgtctcaagtgcgagatctctgaaaatatccccgggaagtggaccaagaatggcctgcccgtgcaagagagcgatcggctcaaagtcgtccacaaaggcagaatccacaaactcgttatcgctaacgccctgacagaggatgagggcgattacgtctttgcccctgatgcctataatgtcactttgcctgccaaggttcatgtaatcgatcctcccaagatcattctcgatgggctcgatgccgacaacaccgtgacagtgatcgctgggaataagctgagactggagattcctatttcaggagagcctcctccaaaggcaatgtggagtcggggcgacaaggctattatggaggggagtggaagaatccggaccgagtcttacccagactcatctacactggtcatcgatatcgccgagcgggatgatagtggcgtgtaccacattaacctgaagaatgaagccggagaagcccacgcctctattaaagttaaggtcgtggattttcctgatcccccggtggccccgactgtgaccgaggttggcgacgattggtgcataatgaactgggagcccccagcctacgatggcggctcacccattctgggctacttcatcgagagaaagaagaagcagtccagtcgatggatgcgtctgaatttcgacctctgtaaggagacaacctttgaaccgaaaaagatgattgagggcgtggcctacgaggtgcgcatctttgctgtaaacgccatcggcattagcaaacctagcatgcccagtcggccttttgtgccacttgccgtgacctcccctcctacactgctcaccgttgattcggttaccgacaccacagtcactatgcggtggagacccagaccccattggtgctcacggttccggtggttgtgcgccagggtgctactctag

SEQ ID NO: 125367 - DNA, 3426 bp, synthetic construct
  misc_feature 1..3426: note = Description of Artificial Sequence: Synthetic coding sequence
  source 1..3426: mol_type = other DNA
atgcctgaacctacaaaaaaggaagagaacgaggtgcctgcacccgcgccgcccccggaggaacccagcaaagaaaaggaagctggcacaacccccgccaaagattggacactggtggagactccccccggagaagaacaggccaagcagaatgctaatagccagctttccatcctgtttattgagaagccgcagggtgggaccgtgaaggttggggaggacatcacttttatcgcaaaagtcaaggccgaagatttgcttaggaagcccactattaaatggttcaaagggaagtggatggatctagcgtcaaaagccgggaaacatttacagctcaaagagaccttcgaacgccacagtcgggtgtacacctttgagatgcaaattattaaagccaaggacaattttgcaggaaactacagatgcgaggttacctacaaggataagtttgattcgtgctcattcgatttggaggtgcacgagtccacggggacgacccctaacatcgacataaggtccgccttcaaaaggagtggggaaggtcaagaagacgctggggagctggacttctcaggtctgctgaagagacgggaggtgaagcagcaggaggaagagccacaggtggacgtctgggagctgctgaaaaacgccaagccttctgaatacgagaaaatcgcgttccagtacggtattacagacctgcggggaatgctaaagcgattgaaaaggatgcgaagagaagagaaaaagtcggccgcattcgcgaagatcctggacccagcttatcaggtggataagggcggcagggtaagattcgttgtggaactcgccgaccccaaactcgaagtgaagtggtataagaacggccaggaaattagaccgtccaccaagtatatattcgaacacaagggttgccaacgcatcctcttcatcaacaattgccagatgaccgatgactctgagtattacgtgactgccggcgatgagaaatgttcaacagaactgtttgtgcgagaaccccctatcatggtgaccaaacagcttgaagataccactgcctactgcggagaacgcgttgaacttgagtgcgaggttagcgaggacgatgctaatgtgaaatggtttaaaaacggcgaagagatcattccaggcccaaagtctcgatacagaattcgagtggagggcaaaaagcatatcctcataattgaaggagctaccaaagcagatgcagccgaatactctgtcatgactacaggaggccagtccagcgctaaattgtctgtggatttgaaacctttaaaaattctgacacctctcaccgaccagaccgtaaacctgggaaaagagatttgccttaaatgtgaaataagcgagaacatccccggcaagtggaccaagaatggactgcccgtccaggagtcggaccggttgaaggtcgtccacaaaggccgtatccacaagttggtaattgctaacgccctaaccgaggatgaaggtgactacgtgtttgcacccgatgcatataacgtgactctgccagccaaagtacatgtcattgatccaccaaaaataattctcgatggactggatgccgacaatacggtaacagttatcgcgggcaacaaactgcgcctggaaattcccatttccggcgagccaccgccaaaggcaatgtggagtcgcggtgacaaagccatcatggaaggaagtgggagaatccggaccgaaagttatccggactcctcaactttagtgattgatattgcagaaagagacgatagcggcgtgtaccacattaatcttaaaaatgaagctggcgaagctcatgcttccatcaaggtcaaagtggtggactttcctgacccacctgtggcgcccacagtgacggaggtaggggacgactggtgcatcatgaattgggagcccccagcttacgatggaggctcccccatcctgggatacttcatagaaaggaaaaagaagcagtccagccggtggatgagactgaatttcgacctctgcaaggaaacaaccttcgagcctaaaaagatgattgaaggagtggcttatgaggtgcgtatcttcgccgtcaatgctatcggaatatccaaaccaagcatgcccagccgccccttcgtgccactcgctgtgacatctccaccgactttgctgactgtcgacagcgtaaccgataccacagtgaccatgaggtggcgtccgcccgatcatatcggagccgccggactagacggttacgtattagaatattgtttcgagggatcaacatcagcaaagcaatctgatgaaaacggcgaggcagcctatgacttgccagcagaggactggatagtggctaacaaggacctgatcgataagaccaaattcacaataacggggcttccaaccgatgctaaaatctttgtgcgagtgaaggcagtgaacgccgccggtgcctcagagcctaaatactatagccaaccaatactggttaaagaaatcatcgagcctcccaaaatccggatcccaaggcatctcaaacaaacttatatacgacgtgtgggagaggctgtgaatcttgtgatcccgttccaaggtaagcctcggcctgagctgacatggaagaaagacggtgctgagatcgataaaaaccagattaatattaggaatagcgagacagataccatcatttttatcagaaaggccgagagatcccacagcggaaaatacgacttgcaggtgaaggtggacaaatttgtggagacagcgtctatcgacatccagataatagacaggcctggaccccctcagatcgtaaagatcgaggacgtctggggcgagaatgtggcgctgacctggacacccccaaaggatgatggaaatgctgctataaccggctataccattcagaaggcagataagaaatcaatggagtggtttaccgtgatagagcattatcatcggaccagtgccacgattacagaactggtcatcgggaatgagtactacttcagagtattttctgaaaacatgtgtggcttatctgaggacgcaacaatgactaaagagtcagccgtgattgcacgcgacggcaaaatttacaagaacccagtgtacgaggacttcgatttcagcgaagccccaatgtttactcaacctctggttaatacatatgctattgccgggtataatgcaacgctgaattgttcagttagggggaacccgaagccgaagattacctggatgaagaataaggtagccatcgtggatgatcccaggtatcgcatgttctcgaaccagggcgtgtgcacgctggaaatcagaaagccatctccgtacgatgggggcacttactgctgcaaagctgtgaatgatctaggcaccgtcgaaatcgagtgcaaactggaagtaaaagttatcgcccagtag

SEQ ID NO: 125368 - DNA, 3372 bp, synthetic construct
  misc_feature 1..3372: note = Description of Artificial Sequence: Synthetic coding sequence
  source 1..3372: mol_type = other DNA
atgcctgagccaacaaaaaaggaggagaacgaagtccctgccccagcgccgccccccgaagagccctccaaggaaaaggaggccggcacaacccccgctaaagattggaccctggtggaaacacccccaggcgaggaacaggccaaacaaaacgctaacagtcaactctcaattctgttcatagagaagccgcagggagggactgtgaaggtgggggaggacatcacatttattgctaaagtgaaagcagaagacctcttacgaaagccaaccatcaaatggttcaaagggaagtggatggatttagcgtccaaagccggtaagcacctgcaactgaaggaaaccttcgagagacactccagggtgtacacatttgaaatgcagatcatcaaagccaaggataatttcgccgggaactatcgatgtgaagtgacgtacaaagacaagttcgatagctgcagcttcgatttagaggtccatgaaagtaccggcactacacccaatattgacattaggagcgcatttaaacgctcaggggagggccaggaggacgcgggggaactggactttagtgggctactcaaaaggagggaagtgaaacagcaggaggaagaacctcaagttgatgtctgggagcttctgaagaacgccaagcctagcgagtatgaaaaaattgcttttcaatatggcattacagacctcaggggcatgcttaagcgtttaaaacgcatgcgccgggaggagaagaaaagcgcagcattcgccaagatcctggatccagcctaccaggtggataaaggtgggcgggtgcgctttgtggtggagctggccgatcctaaattggaagttaaatggtacaaaaacggtcaggaaatacgtccttccactaagtacatcttcgaacataaaggctgtcagcgcatcttgttcatcaataattgccaaatgacagacgatagcgaatattatgtcactgccggagatgagaagtgtagcaccgagctattcgtgagggaaccaccaattatggtcacgaagcagctcgaggacacgaccgcttattgtggggaacgcgtggaattggaatgtgaagtgagtgaagacgatgcaaacgtgaagtggttcaaaaacggcgaagagatcattcctggccctaaatccaggtatcgcatacgcgtggagggaaagaaacacattctgatcattgagggtgcaacaaaggccgatgctgccgagtattctgtcatgacgactggaggtcagtcctctgccaagttaagcgttgacctgaaacctttgaaaatactgactcccttgacagatcagacagtgaacctcggaaaagagatctgccttaaatgcgaaatctcagaaaacatccccggcaaatggacaaaaaatggattgcccgtgcaggagtccgaccgactgaaggttgtgcacaagggccgcatccacaaacttgtgattgctaatgctttaactgaggatgagggggactacgtgttcgcccctgatgcttataatgtcacactgcccgccaaagtgcatgtgatcgacccacctaagattatcctggatggcctggacgcggacaatactgttacagtcatcgctgggaacaaactgaggttggaaatacctatctcaggagagccaccacctaaggcaatgtggtccagaggagataaagccattatggagggctctgggagaattcgcactgagtcctaccctgattccagcacccttgtcatagacatcgcagagagggatgactccggtgtctaccatattaaccttaagaacgaggccggtgaagctcacgccagcatcaaagtcaaagtggtggatttccctgacccacctgtggcgcccactgtgactgaagttggcgatgattggtgcatcatgaattgggagcctcccgcctacgacggggggtctccaatcctcggctattttattgaaagaaaaaagaagcagtcatcacggtggatgcgccttaactttgacttgtgtaaggagactactttcgaacctaaaaagatgattgaaggagtggcttacgaagtgcgaatttttgcagttaacgccattggcatctctaagccaagcatgcctagccgacccttcgtgccactcgctgtcacaagcccccctaccctactgaccgtggattctgtgacagataccacggttaccatgagatggaggcctcccgatcacatcggcgccgccggtctggacgggtacgtgctggagtattgttttgagggcactgaggactggatcgtggccaataaggatctcatagataaaaccaagtttaccattactgggctgcctactgacgctaagatcttcgtgagagtaaaggcagtgaatgccgcaggggcaagtgagcccaaatactactctcagcctatcctcgtgaaggaaattattgagccccccaaaatccgaattccccgacatttgaagcagacgtacatccgaagagtaggcgaggctgtgaatctcgtaattcctttccagggcaagccccggcctgagttaacctggaagaaggacggagcagaaattgataagaaccagattaatatccgtaacagtgagaccgacaccatcatctttattcggaaggccgagcgcagccactcagggaagtacgacctccaagtgaaggtcgacaagttcgttgagacagcatcaatagacatacaaatcatcgatcgcccgggtccgcctcagatcgtgaaaatcgaagacgtttggggcgagaacgtggccttaacctggactccacctaaggatgatgggaatgccgccattactgggtacacaattcaaaaagcggacaagaagtcgatggagtggttcaccgtgatcgagcactaccacaggaccagcgcgacaatcacagagctagtgatcggtaacgaatactatttcagagtgtttagtgaaaacatgtgcgggttgagcgaggacgctacaatgacaaaggagtccgcggtgatagccagagacggaaaaatttacaagaatcctgtctatgaggacttcgacttctctgaggcaccaatgttcacacagcccctagtgaatacctacgctatagccgggtacaacgcaacactgaactgttctgtgcgtggaaatcctaagccaaaaataacttggatgaagaacaaggttgccatcgttgacgaccctaggtaccgaatgtttagtaaccagggagtttgcactctagagattcggaaaccctcaccctacgacggaggaacttactgctgtaaggccgtcaatgaccttggcacagtcgaaatagagtgcaaactcgaggtaaaagtgatcgctcagtag

SEQ ID NO: 125369 - DNA, 1434 bp, synthetic construct
  misc_feature 1..1434: note = Description of Artificial Sequence: Synthetic coding sequence
  source 1..1434: mol_type = other DNA
atgatggaaaaaaacacctctgagggtcccgcttgctcgcctgaggaaactgcaagcgagtcggccaaggtgccgactgcagagcctccaggcgaggtcgccgtgtctgagagcacacgcgaggaacaggtaccaaagcctcaggcacccgcccctcaggctcccacagcatctactgcaactaaaccggctccaccatcagaggatgttccctcagccccacttctgctcaccctggatgacgtatccagttccagcgttacggtgagttgggagcctcctgagagactcgggcgcttgggacttcaggggtacgtattggagttatgtagagaaggggccagcgagtgggtccccgtttcagccagacccatgatggtgacgcagcagaccgtgcggaatctcgctctgggcgacaagtttctcctgcgagtgagtgctgtgtcttccgccggtgccggaccacctgccatgctggaccagcccattcatatccgcgagaatatcgaggcacctaaaatcagagtcccacgacaccttaggcaaacctacatccgccaggtcggggagaccgtaaatctgcagatacctttccaaggcaagccgaaaccacaggcgacctggacacacaatgggcacgctctcgacagccaacgagtgtcaatgcgtaccggagatcaggacagcattctgtttattcgcagcgcccagaggtccgactccggacgctatgaactgacagtgagggtggaagatttggaagctaaagccgtgatcgacatactggtgatcgaaaaacccggaccaccttcttccattcgcttgctagatgtctggggctgcaacgccgcattacagtggacccctccccaggacaccgggaataccgagctgcttggctatatggtacagaaagcggacaagaaaaccgggcaatggtttactgtgctggagaggtatcatccgactacgtgtactatttccgatctgatcattggcaactcgtattcctttcgggttttctcagagaatctgtgcggtctctcaacatccgctacagtgacgaaggaactggctcacattcaaaaggcagacatcgcagctaaacctaagggcttcatcgaacgggatttctcagaggcaccctcctttacccagcccttagccgatcacacctctacacctgggtactcaacccagctgttctgctcagtccgagcctccccaaaaccgaaaatcatctggatgaagaacaagatggagatccagggcaaccctaaatatcgggcattgtccgaacagggagtatgtacactagaaatccgtaagcctagccctttcgattccggcgtgtacacctgtaaggctataaacgtcttgggcgaagcgtccgtagattgtcggctggaggtgaaggcctccgctgcacattag

SEQ ID NO: 125370 - DNA, 5817 bp, synthetic construct
  misc_feature 1..5817: note = Description of Artificial Sequence: Synthetic coding sequence
  source 1..5817: mol_type = other DNA
atgagcagtgatgctgagatggccatcttcggtgaagctgctccataccttcgcaagccagagaaagagaggatcgaggcacagaacaggcccttcgactcgaagaaagcttgctttgtagcagataacaaggaaatgtacgtgaaggggatgatccaaacccgcgaaaacgataaagtcattgtcaaaacactagacgaccgaatgctgacactgaacaatgaccaagtctttcccatgaaccctcccaagtttgacaagatagaggatatggcaatgatgacacatctgcacgaaccagctgtgctgtacaacctcaaagagcggtatgcagcttggatgatttatacctactctggtcttttctgcgtcactgtcaacccgtataaatggttgcccgtatataaacctgaagtggtcgccgcctatagagggaagaagcgtcaggaagcaccgccccacatcttcagcatttctgataacgcctatcaatttatgctgacagaccgggataatcagagcatcctcattaccggtgagagtggagctggaaaaacagtgaatacaaaaagggtcattcaatattttgcaacgattgctgtgacaggcgacaagaagaaggaaacgcagcctgggaaaatgcagggcaccctggaagatcaaatcattcaagccaaccctctactggaggccttcgggaacgcgaagaccgtccgtaacgacaacagctccagattcggcaagttcatcaggattcacttcggggccacgggtaaactggcctctgcagacatcgagacttatttgctcgagaagtctcgagtcacctttcagctgtcttccgagcgctcataccacatcttttaccagataatgagcaacaaaaagcccgagctaatcgatctgttgcttatatccactaatccttttgacttccctttcgtaagccaaggcgaggttaccgtggcctctattgacgattccgaagaactgctggccacagacaatgctatcgacattctcggatttagctctgaagaaaaagtcgggatttacaagctgacgggagcagttatgcactacggtaacatgaagttcaagcagaagcaaagggaagaacaagcagagccggacgggactgaagtcgctgataaggcagggtacttgatgggcctgaactccgccgaaatgctcaaagggctgtgttgtccccgagtgaaggtgggaaatgaatacgtcactaagggccagaatgtgcagcaggtgacaaactcggtcggagctctggcaaaggccgtctacgagaaaatgttcctttggatggtgacgcgcattaaccagcaactggatactaaacagccccggcagtatttcatcggcgtgttggatatcgctggttttgagattttcgacttcaactctctggagcagctctgtattaacttcacaaacgagaaacttcagcagtttttcaaccatcacatgtttgttcttgaacaggaagagtataagaaagagggcatagaatgggaattcatcgattttggtatggaccttgccgcctgcattgagctgatcgaaaaaccaatggggatcttttccatactggaggaagagtgtatgtttccaaaggccactgatacatccttcaaaaataaactgtatgaccaacacttaggaaaaagcaacaattttcagaaaccaaagcctgccaaaggaaaggccgaagctcattttagcctggttcactatgctggcacagttgattacaatattgcgggctggctcgacaaaaataaggaccccctgaatgagactgtcgttggactataccaaaagagctcgctgaaactcctcagctttctgttcagcaattatgccggcgccgagactggcgacagtgggggctccaagaagggcggcaagaagaagggaagtagttttcagaccgtgagtgctgtttttcgcgagaatctaaataagttaatgaccaacttacggtccacgcacccacactttgtgcggtgtctgataccaaatgagactaaaacgcccggagtgatggaccattatcttgtgatgcatcagttaaggtgtaatggagttctcgaagggattcgcatctgccgcaaaggatttccatcccgaattctctatgcagactttaaacagaggtataggatcctcaacgcaagtgcgattcctgagggacagttcattgatagcaagaacgctagcgaaaaactgttaaacagtattgatgtggacagggaacagtttcggtttggaaacaccaaggtgttctttaaggccggtctgctgggactgcttgaggagatgagggacgagaaattagtgacccttatgacgagtacacaggcggtgtgtagaggctacctaatgagggttgagttcaagaagatgatggaacgcagagattccatcttctgtattcagtataatattcgatcttttatgaatgtgaagcactggccttggatgaatctgttctttaaaatcaaaccacttctgaagtcggcagaagctgagaaggaaatggctaccatgaaagaagatttcgagcggactaaagaggagttggctagatcagaggcccggaggaaagagctggaggaaaagatggtcagtctgcttcaggaaaagaacgacctgcagttgcaggtccaatctgagaccgagaatctaatggacgctgaggaaaggtgcgaggggttgattaagagtaagatattgctggaagccaaggtaaaggagctgacggaaaggctggaggaggaggaggagatgaacagcgagctcgttgctaagaaacgaaacctcgaggacaagtgcagcagccttaagcgtgacattgatgacctggagcttactctgaccaaggttgagaaggaaaaacacgccacagaaaataaagtgaaaaacttgtctgaagagatgaccgcattggaggagaatatcagcaagctcactaaggagaagaaatcgctacaggaggctcatcagcagacattggatgatttgcaggtcgaggaagataaggttaatggcctgattaaaataaacgctaaattagagcagcagaccgacgatctcgagggcagtttagaacaggagaaaaaactcagggctgacctcgagcgcgccaagcggaaattggagggggatctaaaaatgtcccaggagagcatcatggatctcgaaaatgacaaacagcagatagaggaaaagctgaaaaagaaagagttcgagctcagccaactccaggcaaagatcgacgatgaacaggtgcatagcctccagttccagaagaagatcaaagaacttcaggcccggatcgaagagctagaggaagagatcgaagccgaacacacactccgcgctaagatcgagaaacaaaggagcgacctggctcgtgaactggaagaaattagcgaacgcctagaagaggctagcggagctacctctgcccaaatcgaaatgaacaaaaagcgtgaggctgaattccaaaagatgagaagagatctagaagaagctacactccaacacgaagctactgccgccactctgagaaagaaacaggccgactccgtcgcggaacttggtgagcagatagacaacttacagcgcgttaaacagaagttggagaaggagaagtctgaactgaagatggagattgacgatatggcatccaacattgaagccctgagcaagtcgaagtccaacatcgagcggacctgtaggactgtagaagatcagttcagcgaaataaaagccaaggacgaacagcagacacagctcatccacgatctgaatatgcagaaggcgcggctgcaaactcagaacggggagctctcccaccgggtggaagagaaagagtccctgatctcacagctcaccaagagcaaacaggctttgacccagcagctcgaggagctcaagcgacagatggaggaggaaacaaaagctaaaaacgccatggctcacgccttgcaatcctcgcgccacgattgtgacctgctcagggagcaatacgaggaggagcaagaagccaaggcggagctccagagggccttgtccaaagcaaattccgaggttgcccagtggcgaacaaagtatgagaccgatgctatccaaaggacagaggagctggaagaggcgaaaaagaagctagcccaacgcctgcaagaggcagaagagaacactgagacggctaatagcaagtgcgcatctctggaaaaaactaaacagaggctgcagggcgaggtcgaagatctgatgcgtgacctggaacgatcacataccgcctgtgcaaccctcgacaagaagcagcgaaactttgataaggtgctggcagagtggaagcagaagctcgacgagagccaggccgagctagaagctgcccagaaagagtcacgttctcttagcaccgagctcttcaagatgaggaacgcttatgaagaagttgttgatcaactggaaaccctgagaagagagaataaaaacctgcaggaagagatctccgatctcacagagcaaatagcagagaccggaaaaaacttgcaggaggccgaaaaaacaaagaagctggtggaacaagaaaaatcagatcttcaggttgccttggaagaagtcgaaggttccctggaacacgaggagtcgaagatcctgcgtgttcaacttgaactgagtcaggtaaaatcggagctggacaggaaagtgatcgagaaagatgaggagatcgaacaattgaagaggaacagccagcgcgccgccgaagcactgcaatccgtattggacgccgagatccggtcccgcaacgacgcccttaggctgaaaaagaagatggagggggatctcaacgagatggaaattcaactagggcattcaaaccgacagatggccgagacacaaaaacatttgaggaccgtgcagggccagctgaaagactcgcagctgcacttggatgacgctcttcgctctaacgaggatcttaaggaacagttagctatcgtcgaacgaagaaacggtctgctgctagaggagctggaggaaatgaaagtggccctggagcagaccgagcggacaagacgactttccgaacaggaattgctggacgctagcgatcgagtgcagctgttgcatagtcagaacacttccctcatcaacaccaaaaaaaagctcgaggcggatattgcccaatgtcaggcggaggtggaaaactccatccaggaatctcgcaacgccgaagagaaagccaagaaagcgatcacagacgcggcaatgatggcagaggagttgaaaaaagaacaggatacctccgctcatcttgagaggatgaagaagaacctggagcagactgtcaaggatttgcagcatagacttgacgaggcagaacaactggcgctgaaaggaggaaaaaagcagatccagaaacttgagaaccgcgtcagagaattggagaatgaactcgatgtggagcagaaacggggtgccgaggcgttgaaaggcgctcataaatacgagaggaaggtgaaggagatgacttaccaggccgaggaggaccacaaaaatatccttcgattgcaggatctggtggacaaactgcaggcaaaggtgaagtcctacaagaggcaggcagaggaggcagaggagcaggcaaacacgcagctttccagatgccgaagagtacagcacgaactggaggaagccgcagaacgggccgatatcgcggaaagccaggtcaacaaattgcgagccaagtcccgtgatgttggcagccaaaagatggaggagtag

SEQ ID NO: 125371 - DNA, 6111 bp, synthetic construct
  misc_feature 1..6111: note = Description of Artificial Sequence: Synthetic coding sequence
  source 1..6111: mol_type = other DNA
atggctgctgtcaccatgtctgtgccagggaggaaagctcccccgaggcctgggcctgtgccggaggcagcccagccttttctcttcacgccccgggggccctctgccggcgggggtcccggaagtggaaccagcccccaagtggagtggacagcccgacgtctagtatgggtgccgtccgagctgcacgggttcgaagccgctgccctacgagacgagggagaagaagaggccgaggttgagctcgctgagtccgggcgacgcctgcgtctgccccgggaccaaatccaacgcatgaatcctcctaagttcagtaaggcagaagacatggcagaactaacttgcttgaacgaagcaagtgtactccacaaccttcgggagcggtactacagcggactcatctacacatatagcggactgttttgtgtggtgatcaatccgtacaagcaactgcctatctacactgaggctatcgtggaaatgtaccgcggtaagaagcgccatgaggttccgccgcacgtgtacgccgtaactgagggggcatacaggagtatgttgcaggaccgagaagaccaatctattctgtgcacgggggagagtggggccggcaaaacagagaacaccaaaaaggtgatccagtatctagcacacgtcgcgagctcccctaaggggagaaaagagccaggcgtacccgcgtctgtgtcaaccgtctcctacggcgaactcgagagacaattactgcaggcaaacccgatccttgaggcttttggcaacgccaaaaccgtcaagaacgataactccagccggtttggtaagttcatccgcatcaacttcgacgtggcgggctatatcgtcggcgccaatatcgagacctacctcctcgagaaaagccgggccattagacaggccaaggacgaatgctcttttcacatcttctaccaactgctaggcggtgcgggagagcagctgaaggccgatttgctcctcgaaccctgctctcactataggtttctcaccaacggacccagttcaagccccggccaggaacgcgagctgttccaagaaactttagagagcctccgggtactcggcttttcccacgaagagatcatttccatgctgaggatggtgagtgcggtcttacagtttggaaatatagcgctgaaacgcgaacggaatactgaccaggcaacaatgcctgataacacagccgcccagaaactttgccggctgctcggcctgggagtcactgatttcagcagagcattgctgacgccaagaattaaggtggggagggactacgtgcagaaggcacagactaaagagcaggcagatttcgctctggaggcacttgctaaagctacttatgagcggctcttcaggtggctggttctccggcttaaccgcgcacttgaccgcagcccgcggcagggcgcgtcctttctgggaattctggacattgctggttttgagattttccaattaaactcctttgaacagttatgtatcaactatacgaacgagaagcttcagcagctctttaaccatacgatgttcgtgttagagcaggaggagtaccagagggaagggatcccttggacttttcttgattttggactagatttgcagccatgcatcgacctgatagagcgacctgccaaccccccaggtctattagccctgttagatgaggaatgttggttccctaaggccacagacaagtcattcgtagaaaaggtcgcgcaagaacagggcggacaccctaagtttcagcggccacgccacctgcgagatcaggccgactttagcgtactccactatgctggtaaagtggattacaaggctaacgagtggttgatgaaaaatatggatccactgaatgacaatgtggcagctttactccatcagagcacagacagattaacagccgagatttggaaagacgagcacggcggtttccagcaattttctttcctgggctcattccctccctccccgcctggttccgccgagagatgttcttcggccatctcacccccgggcgtggaaggcattgtgggcctggagcaggtgtcgtcactaggagacggacccccggggggcagaccccgccgcggaatgtttagaacagtcggacagctctacaaggaatctttgtctcggctgatggctacgctgagtaacaccaacccttcattcgtgagatgtatcgtacccaaccatgaaaagcgcgcaggtaagctcgaaccccggctagtgttagatcagctgagatgcaacggcgtgttggaaggcattcgtatatgcagacagggctttccaaatcgcattctcttccaagagttcagacagcggtacgaaatccttactccaaacgcaattcccaagggatttatggacgggaagcaggcatgcgaaaaaatgatccaagccctggaattagaccccaatctgtacagggtaggtcaaagcaaaattttcttcagggctggcgtgttggcacaactggaagaggagagagatctcaaagtcacagatatcatcgtatcatttcaggccgccgctcgagggtacctggccagacgagcttttcagaaaagacaacaacagcaatccgcattgagagttatgcagagaaactgcgctgcttacctcaagctgcgccactggcagtggtggcgattgtttaccaaggtcaagccactactgcaagtgactcgccaggatgaggtgttgcaagccagagcacaggaattacagaaagtgcaggagcttcagcagcaatctgctagggaggtcggcgaactgcaaggccgcgtggcccagcttgaagaagaacgggcacgccttgccgagcagttacgtgcggaagcagagctatgtgccgaggcagaggagacccgggggcggctggctgctcgcaagcaggaactggagcttgtcgtgtctgaactggaggcaagagtcggcgaagaggaggaatgttctcgccaaatgcaaaccgaaaagaaaagactgcagcagcacatccaagagctagaggctcatctggaggcagaagagggagcacgccagaaactgcagctggaaaaggtcactaccgaagccaaaatgaaaaaatttgaggaagacctgctgttgttagaggaccagaatagtaagctgagcaaggagaggaaactgctggaggaccgactggccgagttctcttctcaggcggccgaggaagaagagaaagtcaaatctcttaataagctccggctgaagtacgaggccactattgccgatatggaggacaggctccgaaaggaggagaagggcagacaggaactggagaagctaaaaagacgtctggatggcgagagctccgaactgcaggaacaaatggttgagcagcagcagcgcgcagaagagctgcgagcccagctgggtagaaaggaagaggaactccaggccgccctcgcgcgtgcggaggatgaaggcggggctcgcgcccaactgctgaaatcactcagagaggcacaagccgccctggccgaggcacaggaagacttagagagtgagagggtagcaaggacaaaggcagaaaaacagcgtcgtgacctgggcgaggagctggaagctctgagaggtgagctcgaagataccctggactccaccaatgcacaacaagagctccggtctaagcgggagcaagaggtgacagagctgaaaaagacactcgaggaggagacaaggattcatgaggctgccgtgcaagagttgaggcagcgccacggtcaagcactaggcgagctggccgagcagctcgagcaggcccggagaggaaagggggcctgggagaaaacccggctggcactggaggccgaggtttcagagctgagggccgagctttcaagcctacagactgcaaggcaggagggcgagcaaagaagacggaggctggagcttcagcttcaggaggtccaaggcagggccggtgatggcgaacgggcccgggccgaggctgctgaaaagcttcagcgggcccaggctgagctggagaacgtaagcggcgccctgaacgaggcagaatcaaagacaatccgcctgtcgaaggaactttctagcacagaggcccagctgcacgatgcgcaggagttacttcaggaagagacccgggctaagctggccctagggtctagagtaagagctatggaagccgaagccgccggtctgcgggaacagttggaggaggaggccgctgcccgggaaagggccggcagggagctccagactgctcaagcccaattatctgagtggagacgccgacaagaggaggaggcaggggcactagaagctggcgaggaggctcgccggcgcgctgctagggaagcagaggcgctgacccaaagattggctgaaaaaactgaaacagttgacagactcgaacgcggtcggaggcgattgcagcaagaattagacgatgctacaatggacctcgagcaacagcgccagctggtctccactttggaaaagaaacaacggaagttcgaccagctgctggccgaggaaaaggcggcagtgctgagggctgtagaggaacgagaaagggcggaagcggagggaagagaaagggaagcacgtgccctcagccttacccgggcactggaggaggagcaggaggcccgcgaggagttagagcgacagaacagagctctcagggcggaactcgaggcgttgctcagctctaaagatgacgtaggtaagtccgtgcatgagctggaaagagcatgtagggtcgccgaacaggctgccaacgatctgcgggcacaggtcaccgagctcgaagatgagctaacagccgccgaggacgcgaagcttaggctcgaggtgacggtccaggccctgaagacacagcatgagagagacctccagggcagggacgaagcaggggaggaacgtagaagacagttggccaagcaactgcgggacgcggaggtggagcgggatgaggaacggaagcagcggactcttgccgtggcagccaggaagaagctggagggggaacttgaggagttaaaagctcagatggcctctgctggccaaggcaaagaggaagcggtaaaacagctgcgtaaaatgcaagctcagatgaaagaactgtggcgtgaagtcgaggaaacaagaacttctcgtgaggagatcttctcacagaacagagaatctgagaaacgactcaaaggactggaagctgaggtgcttaggctgcaggaggagctggcggcctccgaccgggcccgaaggcaggcgcagcaagacagagacgaaatggccgacgaagttgctaatgggaacttaagcaaggctgctatcctcgaggaaaaacgccagctggagggacgcctaggacagctggaagaggaacttgaggaggagcagtccaactctgagctccttaacgaccgatacagaaaacttctgctacaggtcgagagccttactacagagctaagtgcagagcgttcattttccgctaaggctgaatctggtaggcagcagctagagagacaaatccaggaattgaggggacgcctgggtgaagaagatgccggggcacgggcacgacacaaaatgactattgctgcgctcgagagcaagttggctcaggctgaagagcagctcgaacaggaaactcgggaacggatcttatcaggtaagctggtacgcagggcagagaagcgactgaaggaagtagtgctgcaagtggaggaagaacggagagttgccgatcagctcagagatcaactggaaaaaggaaatctccgtgtaaagcagctaaagcgccaacttgaagaagccgaagaagaggcaagccgcgctcaggcagggagaagacgtctacagcgagagctggaggacgttactgaatctgctgagtctatgaatagagaagtgaccaccctgagaaacagactgcggcgcggtccactcacctttacaactcgcactgtccgccaggtttttcggctcgaagaaggtgtggcaagcgatgaagaggctgaggaggcgcagcccggttcggggcccagtcctgagcctgagggctctccccccgcgcatccccagtag

SEQ ID NO: 125372 - DNA, 5823 bp, synthetic construct
  misc_feature 1..5823: note = Description of Artificial Sequence: Synthetic coding sequence
  source 1..5823: mol_type = other DNA
atgtcttcagacacagaaatggaagtgttcggcatcgcagccccctttttgaggaagtctgagaaagaacgaatcgaggctcagaatcagccattcgacgcgaagacatattgcttcgtggtcgattccaaggaagaatatgccaagggcaaaataaagtcatcacaggacgggaaggtgacagtggagactgaggacaaccggacactggttgttaagccagaagatgtgtacgcaatgaatcctccaaagttcgatagaatcgaggacatggccatgctgacacatttaaatgaacctgcagttctctacaatctcaaagataggtacactagttggatgatatacacttattctgggcttttctgcgtcaccgtgaatccttataagtggttgccggtgtataaccctgaagtggttgaaggttatcggggaaagaaacgccaggaagcacccccacatatctttagcatttccgataacgcatatcagtttatgttgacggatcgcgaaaatcaaagcattctcataactggcgagtcgggtgccggcaagactgtcaacacaaaaagggtcattcaatatttcgctactattgctgccactggcgacctcgcaaaaaagaaggattcaaaaatgaagggtacgctggaggaccagatcatcagtgctaaccccctcttggaagccttcggtaatgccaaaaccgtgcggaatgataattctagcagattcgggaaatttatccggatccatttcgggactacagggaaattagctagcgctgacatagaaacttacctgctggaaaaatcaagagtgacttttcagcttaaagcggaacgcagctatcacattttttaccagatcctgtccaataaaaagcccgagttgattgagctcctcctaattactaccaatccttacgactacccattcattagccaaggcgagatattggtggcatctatcgacgacgccgaggaactgctggccactgactccgccatcgatatcttggggttcaccccggaagagaagtctgggctttataaattgaccggcgccgtgatgcactatggaaacatgaaatttaagcagaaacaacgggaagagcaggccgaaccagacgggacagaggtcgccgacaaaaccgcttatctcatgggcctaaactcatccgacctgctcaaagcactgtgtttcccacgcgtcaaagttggcaacgagtatgttactaaagggcagacagtcgaccaggtgcatcacgccgtgaacgccctgtccaaaagtgtttacgagaagctgttcctgtggatggttacccgcatcaatcagcagttagataccaaattgccacggcagcatttcatcggtgtacttgatattgcgggctttgagattttcgagtacaattcactggagcagctgtgcataaacttcaccaatgaaaaactccaacaatttttcaaccaccatatgtttgtgttggaacaggaagagtacaagaaggaggggatcgagtggactttcatcgactttggtatggatctcgcggcctgtattgagttgatagagaagcccatgggcattttctcaatacttgaggaagagtgtatgttccccaaggctactgacacctcctttaaaaataagttgtacgatcagcacctggggaaaagtaataatttccagaagcccaaagtcgtaaagggacgtgcggaggcccacttctccctgattcactacgccgggaccgtggattactccgtttccgggtggcttgagaagaacaaggatccactcaacgaaaccgtggtcggcctgtaccaaaagtcttcaaatcggcttctggcccacctctatgcaacttttgctaccgcagatgcggattctggaaagaagaaggtcgcaaaaaagaagggaagctcgttccagaccgtttctgcgctgtttagggaaaatctgaataagctcatgtccaacttacgcaccacgcatccccatttcgtcagatgcattatccctaatgaaacaaagactcctggagcaatggagcatagccttgtgctgcaccagctgcggtgtaacggtgtgctggagggcatcagaatatgtcgtaaaggtttccccaatagaatactgtatggcgacttcaagcagcggtaccgggtactaaacgcctctgccatcccagagggccaatttatcgacagtaaaaaggcttgtgagaaacttctcgctagtatcgacatcgatcacacacaatacaagttcgggcacaccaaggtgtttttcaaggctggccttcttggaactttagaagagatgagggatgaccggttagcgaagttaatcacaaggactcaagccgtctgtcggggattcttaatgagggtcgaatttcaaaaaatggttcaaagacgcgagagtatcttttgtattcagtataatattcgcagttttatgaacgttaagcattggccttggatgaaactgttcttcaaaattaagccactcctgaaatcagctgaaaccgaaaaagaaatggcgaccatgaaagaagagttccaaaagaccaaagatgagctggcgaaatcagaggctaagcgaaaggagctagaagaaaaactggtgactctggtgcaggaaaaaaacgacctgcagctccaggtgcaggcagagtctgaaaatttactagacgctgaagagcgctgtgaccagctcattaaagcaaagttccagctggaggcaaagataaaggaggtgactgagagggctgaggacgaagaagagattaatgctgaattgacggctaaaaaacgaaagctggaggatgagtgttctgagctgaagaaggatattgacgaccttgagctcacacttgctaaagtcgaaaaggaaaagcatgctaccgaaaacaaggtgaaaaacttaactgaagagctcagcggcctggacgagactatcgctaaattgactcgagagaagaaggctctccaagaagctcatcaacaggctctcgatgacctgcaggcagaggaagacaaagtgaattccttaaacaaaactaaatctaagcttgaacaacaagtggaggacctagagagctccctggaacaggagaagaagttaagagtggacttggaaagaaataagcgaaaactggagggagatctgaaactggcccaggaaagcattctggacctggagaatgacaagcaacagttagacgagcggctcaaaaaaaaggattttgagtattgtcagctgcagtcaaaggtggaggatgaacaaacgctgggcctgcagttccaaaagaaaattaaagagcttcaggcacgcattgaagagttggaggaggagatcgaagctgaacgggctactagagctaagactgaaaaacagaggagcgactatgccagggagcttgaggagctgagcgagagactcgaagaagctggcggcgttactagcacccagatcgagttgaacaagaagcgcgaggctgagttcctgaagcttaggcgcgaccttgaggaggccactctgcaacatgaggctatggttgccgctctgcgaaagaagcatgccgattcagtcgcggaactgggcgaacaaatcgacaaccttcagcgagtgaaacagaaactggagaaggagaagagtgagtttaaactcgaaattgatgacctctcgtcgtctatggaaagcgtgtctaagagcaaggctaacttagagaagatttgtcgcacactggaggatcaactatccgaagccagagggaagaatgaggaaattcagcgcagcctctcagaactgacaacccagaagagcaggctccagacagaggctggagagttgtcgagacaacttgaggagaaggagagcatcgtctcccagctcagtcgcagcaaacaggcatttacacagcaaaccgaagaattgaagcgccagttagaagaggaaaacaaggccaagaatgccctggcccatgcactgcagagtagccggcacgattgcgacttgttacgagaacagtatgaagaggagcaggaaggaaaagctgagctacagcgggctctctcaaaggccaactctgaggtggcccagtggcgcacaaaatatgaaacagatgcaattcagcgaaccgaagagctggaagaagccaagaagaagttagcccagagactgcaggattctgaggaacaggttgaagccgtcaacgcaaagtgtgcatctctggagaagactaaacagagactgcaaggggaggtggaggacctgatggtggacgtcgaaagggctaattcactggctgctgcccttgacaaaaaacagcgaaactttgataaagtactcgccgagtggaagaccaagtgtgaggagagtcaggccgagttggaagcctcattgaaagaaagtagatccttgagcacagaactgttcaaactgaagaatgcatatgaggaggctctggaccagctggaaacagtgaaaagagagaataaaaacctggagcaggaaatcgccgatctgaccgaacaaatcgcagagaacggcaaaacgatccacgagctggagaaatctcggaaacagatcgagttggaaaaagcagacattcagctggctctggaggaagcggaagcggccctagagcacgaagaagccaagatccttcgcatccagctggagctgactcaggttaagtcagaaatagatcggaagattgccgagaaggatgaagaaattgagcagctcaaacggaactatcagcggacggtggagactatgcagagcgcactggacgcagaagtgaggtcccgaaatgaggcgattcggctgaaaaaaaaaatggagggagatcttaatgagatcgaaatccagttgtcccatgctaacaggcaggcggcagagaccttaaagcacctccgcagcgtgcaagggcaactgaaggacacacagctccacttggacgacgcattacgggggcaggaagacttaaaggaacagttggcgattgtggagagaagagcgaatctcctgcaggcggaggtcgaagagctcagagctaccttggagcaaacagagcgcgcgaggaagctggctgagcaggagctcttagattccaatgagcgcgtccagctgctccacactcagaacacatccctgattcatacgaaaaagaagctggaaactgacttaatgcaactacaatccgaagtcgaagacgcctcccgggatgcccgtaatgctgaagagaaggccaagaaggcaattaccgatgccgctatgatggctgaagaactcaaaaaggagcaagataccagcgcacaccttgaacggatgaagaagaatctcgagcagactgttaaggacctccagcatcgcctggatgaggcagaacagctggccctgaagggggggaaaaaacagattcaaaaacttgaaacacggattcgggagttggaatttgaattagagggagagcagaagaaaaacaccgagtcagtgaaaggacttcgcaagtacgaaaggagggtgaaggagcttacctaccagtcagaagaggatagaaaaaatgtgctccggctgcaggatcttgtggataagctccaggtgaaagttaagtcatataagcgccaagctgaagaagcagacgagcaagccaacgcccatctgactaaattcaggaaggctcagcacgagctcgaggaggccgaggagagagccgatatcgccgagtcccaggtcaacaagctgagagcaaagacacgcgattttactagctcccgcatggtggtgcacgagtctgaggaatag

SEQ ID NO: 125373 - DNA, 3132 bp, synthetic construct
  misc_feature 1..3132: note = Description of Artificial Sequence: Synthetic coding sequence
  source 1..3132: mol_type = other DNA
atgccacttttggaggggtctgtgggggtcgaggatctagtgctgttggagccactggtggaagagtctctacttaagaatctgcaactccggtacgagaataaggagatttatacctatatcggaaacgtggtgatttcggtgaacccctatcaacagttgcccatctatggaccagagtttatagctaagtaccaggactacactttctacgaattgaagcctcatatctacgctctcgccaacgtagcctaccagagtcttcgggaccgggatagagaccagtgcattttaatcaccggggagagtgggagcggaaaaactgaggcctccaagctggtaatgagttacgtggcggccgtgtgcgggaaaggcgagcaggtgaattcagtcaaagaacagctgctccaatcaaaccctgtcctagaagctttcgggaatgccaaaaccatcagaaacaataattctagccgtttcgggaaatacatggatatagagtttgattttaaggggagtccgctgggaggggtgattactaattatttgctcgaaaaaagccgcttagtcaagcagctgaagggggaaaggaatttccacatattttaccagctcctcgcgggagccgatgaacaacttttaaaggccctgaaactcgaacgtgacacaacgggctatgcttacttgaatcacgaagtgtcaagggtggacggtatggatgatgcgtctagtttccgcgccgtgcaatccgcgatggctgttatcgggttttcagaggaggaaattagacaagtgttggaggtcacctcgatggttctgaaactggggaatgtgctggtcgcggatgagtttcaggcatctggtattcctgccagcggcattagggacggtaggggtgtgcgggagatcggagaaatggttggcctcaatagcgaagaggtagagcgtgccctatgctcccgaactatggagaccgccaaggagaaggtggtcacagccctgaacgtcatgcaggcacaatacgcccgtgacgcgctggccaagaatatatatagcagattgtttgactggatcgtgaacagaattaacgagtccatcaaggtgggtatcggggagaagaaaaaggtgatgggcgttctcgacatatacggatttgagatcttggaggacaatagcttcgagcagtttgtaattaattattgcaacgagaagctccagcaggtgtttatagagatgacactgaaagaggagcaggaagaatacaagcgagaagggataccatggacgaaagttgattacttcgataatggtatcatttgtaagttgatagagcacaatcagcggggcattctcgctatgctggatgaggaatgtctccgccccggcgtcgtgagcgacagcacatttctggcaaagctgaaccagttgttttccaagcatgggcactatgaatcaaaggtgactcagaacgcacagcggcaatacgaccacaccatgggtttgagctgtttccgcatatgccactatgccggaaaagtgacctataatgtcacctcgtttatagacaaaaacaatgatctgctcttccgggatctgctccaggccatgtggaaagcccagcacccactcctgaggagcctgttcccagaaggcaaccccaagcaggcttcgctgaaaagaccgcctacagccggtgcgcaattcaagtcaagcgttgcgatcctcatgaagaatctctattcgaaaagccccaattacatccggtgcatcaagcctaacgaacaccagcagcgggggcaattcagcagcgacctggtggcaactcaggcgaggtatctgggcctgctggagaacgtgagggtccggagagcaggatatgctcaccgccaagggtacggcccgtttctagaacgctatcggctactctctcgcagcacctggccccattggaatggaggcgatcgggagggtgtggagaaggtgttgggagagctttccatgtcctctggcgagctggcctttggcaagactaaaattttcattagaagccccaagaccttattttatctcgaggagcagcgacggctgaggttgcaacaattagccacactgatccaaaagatttataggggttggaggtgccggactcactaccagcttatgaggaagagccagatactaatttcgagttggttccgtgggaatatgcagaaaaaatgttacggaaagattaaagcctccgtgttgctgatccaggcctttgtcaggggatggaaagcacgcaaaaattacagaaaatactttagatctgaagccgccctcacactggctgacttcatctacaaatccatggtccaaaaattccttctggggcttaaaaacaacctgccctccactaatgtgctggacaagacgtggcctgcagctccctacaaatgcctgtccaccgctaatcaggagttacagcagttgttctatcagtggaagtgtaagagattccgagaccagttgtcccctaagcaggttgaaattttacgtgaaaagttatgtgcttctgagttgtttaaagggaagaaagcttcttacccacaatcagtgcccattccattttgcggcgactacattggcctccaaggtaaccctaagctgcagaagctcaagggtggcgaggagggccccgtgttgatggcggaagcggtaaaaaaagtcaaccgcggtaacggcaaaactagttcccgaatcctgttactcacgaaaggccacgtgatcctcactgacactaaaaaaagccaggccaagatcgtgattggactggataatgtggccggcgtgtccgtaaccagcctcaaagacggcttgtttagcctgcacttatccgaaatgagttctgtcggatctaaaggcgattttttgctcgtgtcggaacatgtgatcgagcttcttactaagatgtatagagccgtgctcgatgctacccaacggcagctgacggtcactgtaactgagaaattctcagtgcggtttaaagagaatagcgtggcggtcaaggtggtgcagggccccgccgggggggataacagcaagttacgctataagaagaagggctctcattgcttagaggtcactgtccagtag

SEQ ID NO: 125374 - DNA, 291 bp, synthetic construct
  misc_feature 1..291: note = Description of Artificial Sequence: Synthetic coding sequence
  source 1..291: mol_type = other DNA
atgccactgctggaagggagcgtgggtgttgaggacctggttctgctggaacctcttgtggaagagtcactgttgaagaacttgcagctccgatatgagaataaagagatctatacctacatagggaacgtagtgatttcagttaatccttatcagcagttgccaatctacggccctgagttcattgcgaagtaccaggattacacattctacgagctgaagccacatatttacgccttggccaacgtggcctaccagtcactccgtgaccgagatcgggatcagtgctag

SEQ ID NO: 125375 - DNA, 3132 bp, synthetic construct
  misc_feature 1..3132: note = Description of Artificial Sequence: Synthetic coding sequence
  source 1..3132: mol_type = other DNA
atgcctttactagaggggtccgtgggcgtggaagatcttgtcttattagaacctcttgtggaggaatccctgttaaaaaatctgcaacttcggtatgagaacaaagagatatatacgtatatcggtaacgtggtgatctcagtgaatccttatcagcagctgccgatatatggccctgaattcattgctaagtaccaggactatacgttttatgaactgaagcctcacatatacgctctggccaatgtcgcataccagagcttgcgtgatagggatcgcgatcaatgcatcctaatcaccggcgaatcaggaagtggaaaaactgaggcatccaagctggtgatgtcctatgtggctgcagtgtgcgggaaaggagagcaggtaaacagtgtcaaggagcaactcctgcagagcaaccctgtactagaggcattcggaaatgctaagactatccgcaacaacaattccagccggtttggaaagtatatggacattgagtttgattttaagggatcccccctaggaggagttatcaccaactatcttctcgagaagtccagattggtgaagcagcttaagggcgagcgtaacttccatatcttctatcagttgttggccggggctgacgagcagctgctgaaggcacttaagctggagcgtgacacaacaggatatgcctatttgaaccacgaagtttcccgcgtggatgggatggacgacgccagttcattcagagctgtccaatccgcaatggccgttataggcttctctgaggaggaaattcgtcaggtgctggaagtcacctccatggtgttaaaactgggaaacgtgctggtggctgacgagttccaagcctccggcatcccagcgtcgggaatacgtgatgggaggggcgtgagggagatcggcgagatggtcgggctaaatagtgaggaggtggaaagggcgctctgttcccgcaccatggaaacagccaaggagaaagtagtgactgccctaaacgtgatgcaggcccagtatgccagagacgcattggcaaagaacatttactcaagactcttcgattggatcgttaacagaataaacgaaagcataaaagtaggcatcggcgagaaaaaaaaagtcatgggggtcctggatatatatgggtttgagattctggaggataatagtttcgaacagtttgttattaattactgtaacgaaaaactgcaacaggtgtttattgaaatgacccttaaggaggaacaagaggagtataaaagggagggcattccttggacaaaagtggactactttgacaatggaattatctgcaagctcatcgagcacaaccaaaggggaatcctggccatgctggacgaggagtgcctccggcctggtgtggtatcagactctacatttctggccaaactcaaccaactgttttctaaacatgggcactatgaatccaaggtgactcaaaacgcacagcggcagtatgatcacactatggggctaagctgcttccgcatctgccactacgcgggaaaggtgacttacaacgtcacatcatttatcgacaaaaataatgacttgcttttcagagacttgctccaggccatgtggaaggcacaacaccccctattaaggagcttatttcctgaaggtaacccgaaacaggccagtttgaagcggccacctacagccggtgcacaatttaaaagctccgtggcaattctcatgaagaatctgtacagtaagtctcctaactatattaggtgcatcaaaccaaatgaacatcagcagagaggccagttttcttccgatttggtggccacccaggcccgctatctgggcctgctagaaaatgtcagggtgaggcgcgccggctacgcacaccggcaagggtatggcccatttctagaaaggtatagactattatcccggtccacttggcctcattggaacggtggcgatcgcgaaggagtggagaaagttctgggcgaattgtcaatgtcttctggcgagctagcatttggcaagacaaagatcttcatccgctccccaaaaacactgttttacctggaggagcagcgccggcttcgattgcagcaactggccacattgatccagaagatctaccgggggtggagatgcaggacccactatcagcttatgcggaagtctcagatcctgatctcctcctggtttcgggggaatatgcaaaagaagtgctacgggaaaataaaggcatccgtcctgcttattcaggcgttcgtgagaggctggaaggccagaaagaattaccgaaagtactttcggtcggaggctgcactgacactcgccgatttcatctacaagagcatggtccaaaaatttctgcttgggcttaagaataatcttccatccacaaatgtacttgacaagacctggcccgctgctccttataaatgtctctcaacagctaaccaggaacttcaacagctcttttatcagtggaagtgcaaacgttttcgagatcaactcagtcctaagcaggtggaaatactccgggagaagctgtgcgctagtgagctgttcaagggtaaaaaggcgtcgtacccacaatctgtccctatcccattctgtggtgattacattggacttcagggaaatcctaaattgcagaaattgaagggaggcgaggaaggtcctgtcttgatggcagaagcggttaagaaagtgaatagagggaacggtaagactagtagcagaatactgcttctcaccaaggggcacgtgattctgaccgataccaaaaaaagccaagccaagatcgtcatcgggcttgataatgtggcgggtgtatccgtgacctcactgaaagacggcctattttccctccacctgtcagagatgagtagcgtaggcagcaaaggcgatttccttcttgtctcggagcatgtgatagagctactaacaaagatgtatcgcgcggtactggatgctacccagcgccagctgacagtgaccgtgactgagaaattctctgttcgttttaaagagaatagcgtggctgtgaaggtcgtgcagggacccgccggaggggataacagcaaactccgatacaagaagaaggggtcacattgtctggaggtcaccgtccagtag

SEQ ID NO: 125376 - DNA, 2646 bp, synthetic construct
  misc_feature 1..2646: note = Description of Artificial Sequence: Synthetic coding sequence
  source 1..2646: mol_type = other DNA
atggatatcgagttcgatttcaaagggtcgcccctggggggagtgattaccaattacctcctggaaaagtccaggctggtcaagcagctgaaaggagagaggaatttccatattttctatcaactgctagcgggcgctgacgaacaattgctgaaggccctcaaactggagcgcgatacaacaggctacgcttacctaaaccacgaggtgtcaagggtggatggcatggacgatgccagctctttcagagccgtgcagagtgctatggcggttattggattttcagaagaagagatcagacaagtacttgaggttacatctatggttctgaagctgggcaacgttctggtggctgatgagtttcaggcctcaggcatcccagcaagtggaattcgggacggtcggggcgtgcgagaaatcggcgagatggtgggtttgaactcagaggaggtcgagagagccctgtgcagtagaacgatggagaccgcaaaagagaaagtagtcacggctctgaacgtgatgcaagctcagtacgccagggatgccctcgctaagaatatatactccaggctgtttgactggattgtcaatcggatcaacgagagtattaaagtgggcatcggagagaagaagaaggtcatgggtgtcctcgacatctatggctttgaaatcctagaagacaacagttttgaacaatttgtcataaactactgcaacgagaagctccagcaggtgttcatcgagatgacactcaaagaggagcaggaggagtacaaacgtgagggaatcccatggactaaagtggattattttgacaatggcattatatgtaaactcatcgaacacaatcagaggggaattttagctatgctcgacgaggagtgcctcaggccgggcgtggtgagcgatagtactttcctagccaagttgaaccagctgtttagcaagcacggccattatgagagcaaggtgacacagaatgcccagcgccaatacgaccacaccatggggttgagttgctttaggatctgtcactacgccggaaaggtgacttataacgtcacatccttcatcgataagaataacgatctgctttttagggacctcttgcaggcgatgtggaaagctcaacatcctcttctgagaagcttgtttccagagggcaaccctaaacaggccagtttaaaaaggcctcctaccgctggcgcgcagtttaaaagctccgtcgccatcttaatgaaaaacctgtactccaagtcaccaaactacatcaggtgcatcaaaccaaacgaacaccagcagagaggacaattctccagtgacctggtggccacccaggccaggtatctggggttgctcgagaatgtgcgggtccggcgggccggttacgcacaccgtcaggggtacggacctttcctggaaaggtacagactcctttctaggtctacgtggccccattggaatggcggcgaccgggagggagttgaaaaagttttaggggaactgtcaatgagctctggagaactggccttcggcaaaacgaagatcttcattcggtcccccaagaccctgttctacctggaagagcagcgccgacttagactgcagcagctcgctaccctaatccagaagatatatagagggtggagatgccggacccactaccaactgatgagaaaaagtcaaattctgatatccagctggttcagaggcaatatgcagaagaaatgctacggaaagatcaaggcttcagttctcctgatccaggcatttgtccgcggatggaaggcccgaaagaactacagaaagtacttcaggagcgaggcagctctcacgctagccgattttatttacaaatctatggtgcaaaagttcctgctggggctcaagaacaaccttccttccaccaatgttttggacaaaacgtggcccgctgcgccctataagtgcctctctactgcgaatcaggagctgcagcagcttttctaccagtggaagtgtaaaaggtttcgtgatcagttgtcgcctaaacaggtggagatcctgcgagagaagctgtgcgcctctgaactgttcaaagggaagaaggcaagttaccctcagtcagtacctatccccttttgcggagattacatcggtctccaagggaatcccaaattgcagaagctgaaaggcggagaagaaggtcccgtgctgatggctgaggccgtgaaaaaagtcaatagagggaatgggaagactagcagcaggatcctgctccttaccaaaggtcatgtgatcttaaccgatacaaaaaagagtcaggctaagattgtgatcggtctcgataacgtagcgggcgtgtcagtgaccagcctgaaagacggcctgttttcgcttcacctcagcgagatgtcaagtgtcggctccaaaggcgactttctgctggtatctgagcacgtcattgaacttttaaccaagatgtaccgcgctgtactggacgccacacaaaggcagctcactgttactgtaacggaaaagttttccgtccgattcaaggagaacagcgtcgcagttaaggtcgtgcaggggcccgccggtggtgataatagcaaactgcgttacaagaaaaagggaagccattgtttggaagtcacagtacaatag

SEQ ID NO: 125377 - DNA, 3411 bp, synthetic construct
  misc_feature 1..3411: note = Description of Artificial Sequence: Synthetic coding sequence
  source 1..3411: mol_type = other DNA
atggccaaaatggaggtgaagacatcgcttttggataacatgatcggcgtgggagacatggtcctgctggagcccctaaacgaggaaactttcataaacaacttgaagaaacgattcgatcactcggagatctatacatatattggtagtgttgtgatcagcgtcaacccataccggtcactacctatttatagtcctgagaaagtagaggaatacaggaatcgtaatttctatgaactctctccccacatcttcgctttgtccgatgaagcttacagatctttaagggatcaggataaagaccaatgcattttaatcaccggggaatctggagctggcaagaccgaagcctccaaactcgttatgagctatgtagctgcagtatgtggaaaaggggccgaagtcaatcaggtgaaggagcagcttcttcaatctaatcccgtcctggaggcatttgggaatgcgaagactgttaggaatgacaacagctccagattcgggaagtacatggatatagagttcgacttcaagggagaccccctgggaggggtcatttcaaattatctcctggaaaagagtagggtcgttaagcagccccggggcgaacgtaatttccacgttttctatcagctcctttccggggcctccgaggaactgctgaataaattgaaattggagagggacttcagccgctataattaccttagtctggattcagcaaaagtgaatggtgtggacgacgcggcaaacttccggaccgtccggaatgctatgcagatcgtcggattcatggatcatgaggctgaatctgtactggcagttgttgccgctgtcctgaagctgggaaatattgaattcaaaccggagtcccgggtgaacgggctcgatgaaagcaagatcaaggataaaaatgagctgaaagaaatctgcgagctcaccggcatcgatcagagcgtgctcgagcgagcatttagctttcgtactgtagaggctaagcaggaaaaagtctctactaccctgaatgtggcgcaggcctattacgctagagacgcactggcaaaaaatttatacagtcgcctctttagttggttggtgaatcggataaatgagtctattaaagcccaaaccaaagtacgcaagaaggttatgggagtgctggatatctacggcttcgaaatattcgaggataatagctttgagcaatttatcatcaattactgcaatgagaagctacagcagatttttatcgagctgacgctcaaggaagagcaggaagagtatatccgagaagatatcgaatggacacacattgactatttcaacaacgctattatctgtgatcttattgagaacaacacgaacgggatcctggccatgctggacgaagaatgtctgcggccgggcaccgtgactgacgaaacgttcctagagaagcttaatcaggtgtgtgccacccatcagcatttcgagagtcgaatgagcaaatgctctcggttccttaatgacacctctctgccccactcatgctttcgcatacaacactacgccggtaaagtcctgtaccaggtggaaggctttgttgataagaataacgacctgttgtatcgggacctttcacaagcaatgtggaaggcctcccatgcactgataaagtcattattccctgaggggaatcccgcgaaaattaacctgaagcggcccccaactgctggtagccagttcaaagctagcgtagccaccctcatgaagaatttacagacgaagaatccgaactatatcaggtgtatcaaaccgaatgataagaaagcagctcatatttttaacgaggcactcgtttgtcatcagattagatatctgggtctattggagaacgtgagggtccgcagagccggctatgcctttagacaggcgtatgaaccctgtttagaaagatacaagatgctttgcaagcagacctggccgcattggaaaggccctgctaggtctggagtcgaagtgcttttcaacgaattggagattcctgtcgaggaatattcttttggccggtcgaaaatttttatcagaaaccccagaacgctgttcaaactggaggacctgcgtaagcagcgccttgaggatctcgccactttgattcagaagatctaccgaggatggaagtgtcggacgcactttcttctcatgaagaaaagccagattgtgattgccgcctggtataggagatatgcccaacaaaaacgataccagcaaaccaaatcgtctgcacttgtgattcagagttatatccgtggctggaaagctagaaaaatactgcgagaattgaaacaccagaaacggtgtaaggaggcggtaacaaccattgccgcttactggcatggcacccaagctcgtcgggagttacgtcgcctaaaggaagaagcaaggaacaaacacgcgattgctgtgatctgggcgtactggttgggctctaaagcacggcgagaactgaaaaggttgaaagaggaggcgcggaggaagcatgccgtggccgtcatttgggcctattggctcggtctcaaagttaggagggaataccggaaatttttccgcgccaatgctggtaaaaagatatacgagtttacactgcagcgcatcgtccagaagtactttttggagatgaaaaataagatgccctcgctctctccgatcgacaagaactggccgtctcgcccctacctctttctagattccacccataaagagcttaaaagaattttccacctctggcgctgcaagaagtatagagatcagtttacagaccagcagaaattgatctatgaggagaagcttgaggctagtgaattatttaaggataagaaggccctctatcctagctccgtggggcaaccgttccagggcgcctatttagagatcaataagaatccaaagtacaagaaactcaaggacgcaatcgaggagaagattatcatagccgaagtagtcaataagattaatagagcaaatggcaagtccacaagcagaatatttctgttaaccaacaataatttactattggctgaccagaagtctggacagattaagagcgaggtccccctcgttgacgtcactaaagtcagtatgagctcccagaacgatggtttctttgctgtgcatctgaaggagggaagtgaagcagctagcaaaggcgactttttgttcagtagtgatcacttgattgaaatggctactaagctgtacagaactaccctgtcccagaccaagcagaaactgaacattgaaatttcagacgaattcctggtacagttcaggcaggataaggtttgcgtgaaatttatccaggggaatcagaagaacgggtctgtgccgacatgtaagagaaagaacaataggcttctcgaagttgcagtcccatag

SEQ ID NO: 125378 - DNA, 3237 bp, synthetic construct
  misc_feature 1..3237: note = Description of Artificial Sequence: Synthetic coding sequence
  source 1..3237: mol_type = other DNA
atggccaagatggaagtgaaaacatcgctgctggacaacatgataggcgttggggacatggtgctcttggagccactgaatgaagagacattcataaataatctgaagaagcggtttgatcattctgagatctacacttacatcggaagtgtagtcatctccgtaaatccctacagaagcctgccaatttacagtcccgagaaggtcgaggaatatcgtaatcgtaatttttacgagctgagcccgcatatcttcgcgctttctgacgaagcataccgaagcttgcgtgatcaagataaggatcagtgtatcttgatcacaggcgagagcggcgcaggcaagaccgaagccagtaagctagtgatgtcatacgtagctgccgtgtgcggtaagggagcagaagtgaaccaggtcaaagaacagcttctccagagtaaccccgttctcgaggctttcggaaatgcaaagactgtacgtaatgacaattcaagccgtttcgggaagtatatggacatagagttcgacttcaagggggatccattgggtggtgtcatcagtaactatctgctcgaaaagagtagagtggttaagcaaccccgcggggagaggaatttccacgtcttctatcagttgctgtccggggctagcgaagaactgttgaacaagttaaagctcgagcgcgatttttcacgctataactacctctcactggacagcgctaaggtgaacggggtagacgatgcagcaaacttcaggacagtgcgcaacgcaatgcagatcgtgggttttatggaccatgaggccgaaagcgtgctagctgtagtggcagctgtgttgaagctaggcaatattgagtttaaacctgaatccagagtgaacggactggacgagtccaagataaaggataaaaacgaattgaaggagatctgcgaactcactggtattgaccaaagcgttctggagagagccttttcttttagaactgttgaagccaagcaagagaaggtgtctactacgctgaatgtggctcaagcatactatgccagggacgcattggccaaaaatttatactctagattattttcctggctggtgaacaggataaacgagagcattaaagcccagacgaaagttcggaagaaagtgatgggcgttttggatatctatggttttgagatattcgaggacaactcctttgagcagtttattattaactactgcaatgagaaattgcaacagatctttatcgagctcacactcaaagaggaacaggaggaatatatccgtgaggacattgagtggactcacatagactatttcaataatgccattatctgcgacctgatagaaaacaacacgaacggcattctggctatgctggatgaggaatgtctccgcccgggcacagtgaccgacgagacattcttggaaaaactgaaccaagtgtgtgctacacaccagcattttgaaagcaggatgtcgaaatgctcccggttcctgaatgacacttcactcccccactcctgctttaggatccagcactatgctggcaaggtgttgtaccaggtggaaggtttcgtggataagaataacgatctcctgtatagagacctctcccaagccatgtggaaggcttctcacgccttgatcaagtccctgtttccggagggaaaccctgccaagattaatctgaaacggcccccaacagctggctctcagttcaaggcttcagtcgccacacttatgaaaaatttgcagactaagaaccccaattatatccggtgcattaaacccaacgacaaaaaggccgctcatattttcaacgaggcactcgtgtgccaccaaatccggtacttaggccttctcgagaacgtcagggtaaggcgagccgggtacgctttccgacaagcgtacgagccttgcctcgagcgttataaaatgctgtgcaagcaaacatggcctcattggaagggaccggcgagaagcggtgtagaagtcctgttcaatgaattggagatcccggtagaggaatactcatttggccgttcaaagatcttcattcggaatccgcgaaccctatttaaactcgaggacctgagaaaacagcgcttggaagacctcgccaccttgatacagaagatttaccgggggtggaaatgccggacccacttcctcctcatgaaaaagtcccagatcgtaatagccgcttggtacagacgctacgcccaacagaaaaggtaccagcaaactaagagttctgcactggtgattcagagttacatcaggggttggaaggctagaaagatactacgggagctgaagcatcagaagcggtgtaaggaggctgtgactactatcgctgcttattggcacgggacccaggtgaggcgcgaataccgcaagtttttcagagcaaacgctgggaagaagatttatgaatttactttgcagaggatcgtacagaaatactttcttgagatgaaaaacaagatgccaagtctgtcccctatcgacaaaaattggccctctcgaccgtatctttttctggactcaacgcataaagagctgaagagaattttccacctttggcgatgcaaaaaataccgcgaccagtttacagatcaacagaagctgatttacgaagagaagctcgaggctagtgagttattcaaggacaaaaaggctctgtacccatcctcagtgggtcagcccttccagggggcttacttggaaattaacaagaacccaaaatacaagaagttaaaagatgctatcgaagagaagatcatcattgcagaggtcgtcaacaagatcaaccgtgcaaacggtaaatctacgtctcggatcttcctgcttacgaataacaatctgttgcttgccgatcaaaaaagcgggcagataaaatccgaagtgcccctggtagatgttactaaggtctccatgtcatcgcagaatgatggattcttcgccgtacacctgaaggaagggagcgaagccgcgagcaaaggggattttctgttctcatcggatcaccttattgagatggcaacaaagctttaccgaacaacccttagccaaaccaaacagaagctgaacattgagatcagcgatgagtttctggtccagtttagacaagacaaagtgtgtgtcaaattcatacagggcaaccagaagaatggctccgtgcctacttgcaaaagaaagaacaatagactactggaagttgccgtgccttag

SEQ ID NO: 125379 - DNA, 3324 bp, synthetic construct
  misc_feature 1..3324: note = Description of Artificial Sequence: Synthetic coding sequence
  source 1..3324: mol_type = other DNA
atggctaagatggaagtgaagacgagcctgctggataacatgataggggtcggagacatggttctcctggaaccactgaatgaggaaacattcatcaacaacctcaaaaaaaggtttgatcatagcgagatttatacctacataggcagcgttgttatctcagtgaatccataccggtccctccccatctatagcccagaaaaggtcgaggaatatcgaaaccgcaacttttatgagctgtccccccatatctttgcactgtctgacgaagcatacagaagcctcagggatcaagataaggatcagtgtatcctcataacaggggagtccggggcgggcaaaactgaggctagtaagttggtcatgagttatgtcgccgccgtgtgtggcaaaggtgccgaagttaatcaagtcaaagagcaacttctgcagtcaaatccagttctggaggccttcgggaatgccaagaccgtgcgcaacgataatagttcccgatttggcaagtacatggatatcgagttcgacttcaaaggtgaccccctcgggggcgtaatcagtaattatctcctggagaaatcccgggtagtaaagcagccacgtggcgagcggaatttccatgtcttttaccagctgctgagtggggcctccgaggagttattgaataagttaaagctcgaaagggattttagcagatacaactacttaagtctagacagcgctaaggtgaatggtgtagatgacgctgccaactttcggaccgtcagaaacgctatgcagattgtggggttcatggaccatgaggcagaaagcgtactagccgtggttgcggctgtgctgaagttggggaatattgagttcaagcccgagagtcgcgtaaacggtttagacgaatccaagattaaggacaagaacgagcttaaggaaatctgcgaactcactgggatcgaccagagcgtcctcgagcgcgctttttctttccgcactgtggaggcgaagcaggaaaaggtgagtaccaccctcaatgtcgctcaggcttactacgctcgggacgcactcgcaaaaaatttgtactccaggctgttcagttggttggttaatcgcatcaatgaatccataaaggcccagactaaggtacgcaaaaaggtgatgggtgtgctggatatctacggattcgaaattttcgaggataactcattcgagcaatttattattaattactgtaacgaaaaactgcagcagattttcattgaactgactcttaaagaagaacaggaagagtacattcgagaggatatcgaatggacacacattgattattttaacaatgcaatcatttgtgacttgatcgaaaacaataccaatggcatcctcgcaatgcttgacgaagaatgcttgcgaccaggcactgtgactgacgagacatttctggaaaagctgaatcaggtgtgcgcaactcaccagcatttcgaatcaaggatgtccaagtgcagtaggttcctcaatgacacttccctgccacacagctgctttaggattcagcactatgcagggaaggtgctgtaccaagttgaaggattcgtagataagaataacgatctgctctaccgagatctgagccaggccatgtggaaagcaagtcatgcacttattaagtccctgtttcctgagggcaatcccgccaagattaatctgaagaggcctcccacggctgggtcccagtttaaggcctccgtggcgaccctgatgaaaaacctgcagaccaaaaaccctaactacatcagatgcatcaaaccaaatgacaaaaaagccgctcacatttttaatgaggctcttgtgtgccaccaaattaggtacctcgggcttctcgagaacgtacgggtcagacgggccggatacgcgttccgacaagcatacgagccatgccttgaacgatataaaatgctctgtaagcagacatggccacactggaaaggtccagcaaggtcaggagtagaggtgctgttcaacgagctggaaattcccgtggaggaatatagcttcggacggagtaagattttcattaggaatccaaggaccctgttcaagctggaagacctacgaaagcagcggctagaagacctagcaaccttgatacagaagatctacaggggatggaagtgtcgcacccatttcttgctcatgaaaaaatcccagattgtgattgctgcctggtaccggcgatacgcacagcaaaaaaggtaccaacagaccaagtccagcgccctcgttatccagtcttatatcaggggctggaaagcccgcaagatattaagggaacttaagcatcaaaaacgctgtaaggaagccgtcacaaccatagcagcgtactggcacgggacccaggctcgacgggagcttaagaggctgaaggaggaggctcgtcgtaagcacgccgttgctgtgatttgggcatactggttgggcctcaaagtgagacgggaatatagaaagtttttccgcgccaacgccggtaaaaagatctacgaatttactttgcagcggatcgtccagaagtactttttggagatgaagaacaagatgccgtctctgagcccaatcgataagaattggccgtctcgtccatatctttttctcgattcaacacataaagaattgaagcgtatcttccacctgtggaggtgcaaaaagtacagagaccagttcactgaccagcaaaagctaatctatgaggagaaacttgaggcttctgaactgtttaaagacaagaaagccctatatccatcaagcgtcggccagccatttcagggggcctatctggaaattaataagaatcccaagtataaaaaactgaaagacgccatcgaagagaagatcatcatcgcagaggtcgtgaacaagataaatcgagccaacggtaagagtactagtaggatatttttactgaccaacaacaacctcctcctcgccgatcaaaagagcgggcagattaagtccgaggtgcctctggttgacgttactaaggtgagcatgagctcgcagaacgatgggttttttgctgtgcacctgaaagaaggttcagaggcggcttccaagggcgacttcctgttttcatcggatcatctgattgagatggcaaccaagctttatcgcactacactgagccagacaaaacaaaaactcaatatcgagatctccgatgagttcctggtgcaatttagacaggataaagtgtgtgtgaagtttatccaaggcaatcaaaaaaacggctccgtgcctacgtgcaaacggaagaacaatcgcctgctagaagtcgccgtaccctag

SEQ ID NO: 125380 - DNA, 3411 bp, synthetic construct
  misc_feature 1..3411: note = Description of Artificial Sequence: Synthetic coding sequence
  source 1..3411: mol_type = other DNA
atggccaaaatggaagttaagacaagcctgcttgacaacatgatcggtgtcggagacatggttctcctggaacctctgaatgaggagacattcattaataacctgaagaaacgattcgatcacagcgaaatctatacatacattgggtcggttgtgatctccgtcaacccttatagaagcctgcctatatatagccccgaaaaggtagaggaatatcgcaaccggaacttttacgagttgagtccccatatctttgcactgagcgacgaagcctacaggtcactaagagatcaggataaggaccaatgcatcctgatcaccggggaatcaggagccgggaaaactgaggctagcaaactagtaatgagctacgtggccgctgtttgtggcaaaggggccgaagtgaatcaggtgaaggaacaattattgcagagtaatccagttctggaggctttcggtaacgctaagaccgtaagaaacgataatagcagtaggtttggcaagtacatggacatagaattcgatttcaagggagaccctctcggcggcgtgatatccaattatcttctggagaaaagtcgcgttgtgaaacaacctcgaggagaaagaaattttcatgtgttttaccagctgttgtccggcgcttctgaggaactcctgaataagcttaaattggagcgcgacttctctcggtacaactacctttcactggacagcgctaaagtgaatggtgtcgatgacgctgcaaattttcgtacagtgagaaatgctatgcagatagtgggcttcatggatcacgaagcggagtccgtactggcagtcgtcgccgctgtgctgaagctaggcaatatagagttcaagcccgagagtcgagtaaacggcctcgatgaaagcaagatcaaggataaaaatgagctgaaagagatctgtgaactcactggcattgaccaaagcgtcctggaacgggcctttagtttccgcacggttgaggcgaaacaggagaaggtatccactacactgaacgtcgcacaggcctattacgcacgtgatgcactcgcaaaaaacctgtatagccgcctctttagttggctcgtgaacaggatcaacgagtcaatcaaggcccaaactaaagtgcgcaagaaagtcatgggcgtactggacatatatggtttcgaaattttcgaagataatagcttcgagcagtttattattaactattgtaacgagaagctgcaacagattttcatcgaacttactctgaaagaggagcaggaggagtatatacgagaggacattgagtggacccacattgactatttcaacaacgctattatatgcgatttgatcgaaaataatacaaacggcattctggcaatgctggacgaagagtgcctgcgacccggtacagtaactgacgaaacatttcttgaaaagctgaaccaggtctgcgctactcatcagcactttgaaagcagaatgtccaagtgttctaggttcttgaatgatacaagtcttccccactcctgttttcggatccagcattatgccgggaaggtcttgtatcaggtggagggtttcgttgataaaaataatgatctgctttatcgggatttgtcccaggccatgtggaaggcctcacacgccctgatcaagtcattatttccagaaggaaatccggcgaaaattaacctgaagcggcctcctactgccggatcccagtttaaggcatccgtcgccacgctcatgaagaaccttcagacaaaaaatcctaactatattcgatgcatcaagcccaacgacaagaaagccgcccacatcttcaacgaagcccttgtttgccaccagattcggtacctgggcctgctggaaaacgtccgcgttcgaagggccggatatgccttccgacaggcttatgaaccctgcctggagcgctacaagatgctttgtaaacaaacctggccgcactggaaaggccccgcaaggagcggtgtggaagtgctgttcaatgagctggaaattcccgttgaagagtatagctttggtcgatctaagatatttatccggaacccaaggactctgtttaagcttgaagatttaagaaaacagcggctggaagacctggctaccctgattcaaaagatttatcggggttggaagtgtcgtactcactttctcctgatgaaaaagtcccagatagtgattgcagcatggtaccgaagatacgcacagcagaagcggtaccagcagacaaaatctagcgcactggtgattcaatcttatatcagaggatggaaggcaagaaagattctgcgggaattgaagcatcagaagcggtgtaaggaggcagtaactaccatcgccgcttactggcacgggacacaggccaggcgggaactacgccgtcttaaagaggaagccagaaataagcatgctattgctgttatctgggcctactggcttggaagcaaggcccgaagagagttgaaaaggctgaaggaagaggcccgacggaagcatgcagtggctgtcatttgggcatattggctcggtttgaaggtgcggcgggagtatcgcaaattttttagggctaatgccggaaagaagatctacgaattcacactccagcgcatcgtgcaaaagtattttctggaaatgaaaaataagatgccttccctaagccctatcgacaaaaactggcctagcagaccatacctgttcctggattcaacccataaggagctaaaacgtatcttccacctctggcggtgtaagaaatacagggaccagttcacagaccagcagaagctcatttacgaggagaaactcgaggctagcgaactgttcaaagacaaaaaggccctgtacccctcctctgtgggccagccattccaaggagcctatttagagatcaataagaaccctaagtacaaaaaactgaaggatgctattgaggagaagattataattgcggaggtggtcaataagatcaacagggctaacgggaagtctaccagccgaatcttcctcctgacaaataataacctgctactggctgatcaaaaaagcgggcagataaagtctgaagtgcctttagtggatgttactaaggtgagcatgagcagccagaatgacggatttttcgctgttcacctgaaagaaggctctgaagccgcgagcaagggtgacttcctgttttccagcgaccacctgatcgagatggctacaaaactgtatcgaaccaccctgagccagaccaagcagaaactgaacatcgaaatcagcgatgagttcttagtgcaattcaggcaggataaagtctgcgtgaagtttatccaagggaatcaaaaaaatggttctgtgcccacctgcaaacgaaagaacaaccggctcctggaagtcgccgtgccatag

SEQ ID NO: 125381 - DNA, 492 bp, synthetic construct
  misc_feature 1..492: note = Description of Artificial Sequence: Synthetic coding sequence
  source 1..492: mol_type = other DNA
atggctaagatggaagtgaagacttcactactagacaacatgataggcgttggggatatggtgctacttgagccattgaacgaggaaacttttatcaataatctaaaaaagaggtttgaccattctgagatatacacctacatcgggagcgtggtcatatccgtgaacccatatcgcagcctccccatctattctcccgagaaagtggaggaataccggaaccggaacttctacgagctgagcccacacattttcgcgctgtcagacgaagcatacagaagcctgcgagaccaggataaagaccaatgtatcctcatcaccggcgaatcaggcgcgggcaagaccgaggcatccaaattggtgatgtcatacgtcgccgctgtttgtgggaagggagcagaagtgaaccaggtaaaggagcagttacttcagagtaacccagtcttggaggccttcggcaatgcaaagacggtgcggaacgataactcttag

SEQ ID NO: 125382 - DNA, 252 bp, synthetic construct
  misc_feature 1..252: note = Description of Artificial Sequence: Synthetic coding sequence
  source 1..252: mol_type = other DNA
atggccaagatggaggtaaagactagtctgctagacaacatgatcggcgtcggtgacatggttctcctggagccccttaacgaggaaacttttatcaacaaccttaaaaaacgctttgatcatagcgagatctacacatacattggctcagtggtgataagcgtcaatccctacaggtctttacctatctactctcctgagaaagtcgaagaatacagaaatcgcaacttctacgaactctcccctcattag

SEQ ID NO: 125383 - DNA, 450 bp, synthetic construct
  misc_feature 1..450: note = Description of Artificial Sequence: Synthetic coding sequence
  source 1..450: mol_type = other DNA
atggccaaaatggaagtgaagacctccctccttgacaatatgattggcgttggcgacatggtgttactcgagccactcaacgaagaaacctttataaacaatcttaagaaacgatttgatcacagcgaaatatacacatatatcgggtccgttgtaatcagcgtgaatccgtacagatccctgccgatatactcccctgaaaaagtggaggaatatagaaacaggaacttctacgagctgagccctcacatattcgccttgagcgatgaggcgtatagatctctgagagaccaggataaggatcaatgcatcttgattacgggggagagtggggcagggaagactgaggcgtctaagctcgtgatgagctatgtggcggctgtgtgcggcaaaggggccgaagttaatcaggtgaaggagcagctgttgcagagtaaccccgtgctctag

SEQ ID NO: 125384 - DNA, 1146 bp, synthetic construct
  misc_feature 1..1146: note = Description of Artificial Sequence: Synthetic coding sequence
  source 1..1146: mol_type = other DNA
atgaaaaagtcccagatcgtcattgccgcctggtatagaaggtacgcccagcagaagcggtaccagcagaccaaaagttctgctctcgtcattcagagctacatcagggggtggaaggcccgtaagatcctgcgcgagttgaagcatcagaagaggtgtaaggaggcggtgacaacaatcgccgcgtactggcacgggacccaagcccgccgtgaactaaaacggttgaaagaagaggccaggagaaagcatgccgtggcagtgatttgggcttattggctgggtctcaaggtgcgaagggaatataggaagttttttcgggcgaatgcggggaaaaaaatatatgagtttacactgcagagaatagtgcaaaagtactttctggaaatgaaaaacaaaatgccttccctctcgccaattgacaagaattggcccagcagaccttaccttttcctcgattctacccataaggagctgaaacgcatttttcatctgtggcggtgcaagaaatatagagatcagtttactgaccagcaaaaactgatttacgaggagaagctggaagcctctgaactgttcaaagataaaaaagccctataccccagcagcgtagggcagccttttcagggtgcgtacctggaaatcaacaagaatcccaaatataagaagcttaaggacgcgatcgaggagaagatcattatagccgaagtcgtgaacaagatcaatcgagccaatggaaagtctaccagcagaattttcctgctgacaaacaacaatctcctgttggccgatcagaagagcgggcagattaaatcagaagtgcctctggttgatgtgactaaggtgtcaatgtccagccaaaatgacggttttttcgccgtccatctgaaggaaggatctgaagcagcttccaagggcgacttcctctttagttccgatcacttaatcgagatggccactaagttgtatagaaccacactgtcacagaccaagcaaaaactcaatattgagatctctgatgagttcctggttcagtttcggcaggataaagtctgcgttaagttcatccagggtaatcagaagaacggatcggtgccgacatgcaagcgcaagaataatcgactgttggaggtggccgtgccttag

SEQ ID NO: 125385 - DNA, 924 bp, synthetic construct
  misc_feature 1..924: note = Description of Artificial Sequence: Synthetic coding sequence
  source 1..924: mol_type = other DNA
atggctaagatggaagtgaaaacctccctgctggataacatgatcggcgtgggcgatatggttcttctggagccactgaacgaggagacttttatcaacaatctcaagaagagatttgaccattcagagatctacacgtatattggaagcgtcgtgatctccgtaaacccataccgctcactgccgatctattcaccagaaaaagtagaagaatacaggaaccggaacttttatgaactgtccccacacatatttgccctctccgatgaagcctaccggtcccttcgggaccaggacaaggaccaatgcatcttaatcacaggggaaagcggggctggcaagactgaggctagcaagctggtgatgtcatatgtcgccgctgtttgcggcaagggagcagaggttaatcaggttaaagaacagctccttcaatctaaccccgtcttagaagctttcggtaacgctaaaactgtccgtaacgacaattccagtaggtttggtaaatacatggatatcgaattcgatttcaagggcgacccactgggaggcgtaatatccaattatctgttagaaaaatcacgcgtggtaaagcagcctaggggcgaaagaaattttcacgtgttttatcagctgctaagcggggccagcgaggagctcttgaacaaactcaagctcgagcgggacttctctagatacaactatctaagcttagactccgcgaaagttaacggcgtggatgatgctgccaatttccggactgtacggaacgctatgcagatcgttggattcatggatcacgaagccgagagcgttttggcagtcgttgccgctgtactgaaattgggcaacatcgagttcaaaccggagtcccgagtgaacgggctcgatgagtccaagatcaaggacaagaatgagtccaagtag

SEQ ID NO: 125386 - DNA, 912 bp, synthetic construct
  misc_feature 1..912: note = Description of Artificial Sequence: Synthetic coding sequence
  source 1..912: mol_type = other DNA
atggctaagatggaagtgaaaaccagcctattggacaatatgataggagttggcgacatggtgctgctagaaccactgaatgaggaaacattcatcaataatctgaaaaagcgctttgatcactcagagatctacacttatattggtagcgtcgttatcagcgtcaatccatatcggagccttccaatttattccccagagaaggtggaggagtacagaaatcgcaatttctatgaactcagccctcatattttcgcactgtctgacgaggcctacagatctctgcgggaccaggacaaagatcagtgtatcctgatcaccggcgaaagcggagccggcaagactgaggccagcaaactggtgatgagctatgttgctgccgtatgtgggaagggagccgaggtaaaccaagttaaggaacagctgctgcagtctaatcctgtcttggaagcgttcggaaatgccaagaccgtgaggaatgataattcttcaaggtttggcaaatacatggatatcgaattcgatttcaaaggtgatcctctgggtggagtgatctcaaattatctacttgagaaaagccgggttgtcaaacaacccaggggcgagaggaactttcatgtcttctatcagctgctgtccggggcctctgaagaacttttaaacaagttgaaactcgagagggacttctctaggtataattacctgtccctggactctgcaaaggtcaacggggtggatgatgcagcaaactttcgtacagtgcgcaacgctatgcagattgtgggttttatggatcatgaggctgaatccgttttggcggtggttgctgcggtgttaaaactgggcaacattgagttcaaacctgagagccgtgtgaatgggctggatgagtcaaaaatcaaggataaatag

SEQ ID NO: 125387 - DNA, 3192 bp, synthetic construct
  misc_feature 1..3192: note = Description of Artificial Sequence: Synthetic coding sequence
  source 1..3192: mol_type = other DNA
atggctcttcaggtggagcttgtccctacaggagagattatccgggtcgttcacccacatagaccatgtaaactggcactggggtcggacggtgtgagggttacaatggaatcagcgcttactgctcgagaccgggtgggcgtgcaagatttcgtcctgctggagaacttcacgagcgaagcagctttcattgagaatctcaggcggcgctttcgcgagaacctgatctacacctacattggcccagtcctggtgagtgtaaacccataccgtgaccttcagatctacagtaggcagcacatggaacgctataggggtgtttccttttacgaagtgcctccacacttgttcgccgtggccgacaccgtttaccgggccttgcggaccgagagacgggaccaggccgtgatgatctccggggagagcggggctggtaaaacagaagcaacgaaaaggctccttcaattttacgctgagacctgccccgcccccgagcggggcggggcagtcagagataggctgttacagtccaatcctgtccttgaagccttcggaaatgcgaaaacactgcggaacgacaatagctcccgtttcggtaaatatatggatgtgcaatttgacttcaaaggggcccctgtgggtggtcacatactttcttacctgctcgagaagagccgggtggtgcaccagaatcacggcgagcggaactttcacattttttaccagctcttggagggaggagaagaggagacactccgcaggctcggcctggagcggaatccacagagttacctttacctggtaaaaggccagtgtgccaaggtgtcctccatcaacgataaatctgactggaaagtggtgaggaaggcgttaactgtcatcgattttacggaggacgaggtggaggatttactgtctattgtggcgagcgtcttgcatctaggaaacatacatttcgctgccaatgaagaatccaacgcgcaggtcaccaccgagaaccaattaaaatatctgacccgcttactgtctgtggaagggtctaccctacgagaggcacttacacaccgaaagattattgcgaagggagaggagttactgtcccctctgaatttggagcaggcagcttacgctagagatgctttggctaaggccgtctactcacgcaccttcacttggttagtgggcaagatcaatcgcagtctcgcctccaaagatgtcgaaagtccttcctggcggtcaactaccgtgctgggactcctggatatctacggattcgaagtgtttcagcataactcttttgagcagttctgcattaactattgcaacgaaaagctgcagcaactcttcatcgagctgacattgaagagtgaacaggaagagtacgaggccgaaggaatagcctgggaacccgtgcagtacttcaacaacaagattatctgtgacttagtggaagagaaatttaaaggcatcatcagcatcttggacgaggagtgcctgagaccgggggaagcaaccgaccttaccttcttggagaagcttgaggacaccgtgaaacaccacccacatttcctgacccacaaactggccgatcagcgcaccaggaaaagcctgggcaggggagagttccgacttctgcactatgctggcgaggtgacctatagcgtaactggcttcctcgacaagaataacgacctcttattcagaaacttaaaggagaccatgtgctcttccaagaatcctattatgtcccagtgcttcgataggtccgaactgtctgataagaaaaggccagaaactgtcgcaacgcagtttaagatgtcccttttgcagttggtggagatcctgcagagcaaggaacctgcctacgtgcgatgtataaagcctaatgatgccaaacagccggggcgttttgacgaggttctgattagacaccaggtaaagtatctgggcctgttggagaacctgcgcgtccgcagggccggctttgcataccgccgaaagtacgaagcattcctgcagaggtataaatcactatgtccagagacgtggccaacttgggcaggcaggccccaggatggcgtggcggtgttagtgaggcatctcggatacaaaccagaggagtacaaaatgggcagaacaaagatcttcatccggtttcccaaaactttgtttgccacagaagacgcgctggaagtgaggagacagtctctggctacaaaaatccaggccgcatggagaggatttcactggaggcagaagttcctgcgggtcaaaagaagcgctatctgtatacaatcctggtggagaggaacattaggtcgacggaaagccgctaaacgcaagtgggcagcccagacgattcggcggctgattagagggttcgtgcttagacatgcaccacgctgtccagaaaacgcattctttctggatcatgtgcggaccagttttctcttgaacctgcgtcgccagttgccgcagaatgtattggacacaagttggcccaccccgcctcccgccctcagggaagctagcgaactcctgcgggaactctgtatcaaaaacatggtgtggaaatattgtaggagtatttcccccgagtggaaacagcaactgcagcaaaaggccgtggccagtgagatctttaagggcaaaaaggataattatccccagtcagttccgaggttatttatcagcactaggctgggaactgacgagatctctcctagagtgctgcaggcgcttggaagtgaacccattcaatatgcggtgccggtggtaaagtatgacaggaagggatataaaccacggagccgccagcttttgctcacaccgaacgctgtagtgatcgtagaagacgcaaaggtcaaacagaggatcgattatgctaaccttactggcataagcgtttcgagtttatctgacagtctttttgtactgcacgtacagagagccgacaacaagcagaagggcgatgtggtgctacagagcgatcatgtgatagagactttgactaagactgccctgagcgccaaccgggtcaatagcatcaatattaatcagggttcaatcacgttcgccggaggacccggccgggacgggacaattgactttacaccgggatcagagctgctcataactaaagctaaaaatggccacttggccgtggtagcgccaaggctgaattctcgctag

SEQ ID NO: 125388 - DNA, 3087 bp, synthetic construct
  misc_feature 1..3087: note = Description of Artificial Sequence: Synthetic coding sequence
  source 1..3087: mol_type = other DNA
atggagagtgcgctcaccgctagagatcgggttggcgttcaggactttgtattgctggaaaacttcacaagcgaggctgcgttcatcgagaacctccgtaggcggttccgggagaatctcatctacacatacattggccccgtgcttgtctctgtcaacccatatcgggacctgcagatatactctagacagcatatggagcggtatcggggcgtctctttttacgaggtacctcctcatctgttcgcggttgccgatacagtgtatagagcactgcggactgagaggcgagatcaggccgtgatgatctcaggcgaatccggcgccgggaaaaccgaagctacaaaaaggctgttgcagttctacgccgaaacctgtcccgcccctgaaaggggcggggcagtcagagatagactcctccagagcaatcccgttctcgaagctttcggaaatgcgaaaactcttcggaatgacaactcttcccgttttggtaagtatatggatgttcagttcgacttcaaaggggcacctgtgggtggacatatcttgagttaccttctggagaagtcccgagtggtgcaccaaaaccacggcgaacgcaatttccacattttttaccaactgctggaggggggggaagaagagacactcaggcggttgggactggagagaaacccgcagtcttatctctatttggtgaaaggccaatgcgccaaggtcagttctatcaatgacaagtccgattggaaggttgtgcggaaggccctcactgtgattgattttaccgaagatgaagtggaggacctcctaagcattgtagccagtgttctccacctaggtaacattcattttgccgcaaatgaggaatcgaatgctcaggttaccactgaaaaccaactgaaatacctgactcggctgctatccgtcgagggcagcacactccgggaagctctcacccatcgaaagatcatcgcaaagggggaagagctgctctcaccccttaatcttgagcaggcagcctatgcccgcgatgccctggctaaggccgtgtattctcgtacctttacctggctcgtgggaaagattaatcggtcacttgcaagcaaagatgtcgaatctccgagctggcgctcaaccacagtcctcggtctgctggacatctacggtttcgaggtcttccagcacaatagctttgagcagttttgcattaattactgcaacgagaagctgcagcagctgtttatcgagttgactctgaagtcagagcaggaagagtacgaggcagaaggcattgcatgggaaccggtgcagtacttcaataataaaataatatgtgacttagtagaggagaagttcaaaggcatcatcagtatacttgatgaggagtgtctgagaccaggcgaagccacagatctaaccttccttgaaaagctggaagacaccgtgaagcatcaccctcatttcttgacccataagctggctgaccagagaacccggaaaagcctgggcagaggcgagttccgcctgctgcattatgctggcgaggttacgtattccgtcaccggtttcctagataaaaacaatgaccttttgtttagaaacttgaaggagacgatgtgttcatccaaaaatcccatcatgagccagtgctttgatcgatccgaactgtctgataaaaagagaccagagacagttgccacccagtttaagatgtctctgcttcagctagtggaaatcctgcaatctaaggaaccggcctacgtgcgttgtattaagcctaatgatgcaaagcagcccgggcgatttgatgaagtgttgatcaggcatcaggtgaaatacctgggattgctagagaaccttcgcgtgaggcgggctggtttcgcctacaggcggaagtatgaggcctttctgcaacggtacaagtccttatgccctgaaacgtggccaacctgggctggacggccacaagacggggtggccgtgcttgtgcgtcacctgggatataagccagaagagtataaaatgggcagaacgaagatcttcattagattccccaaaacactcttcgcgactgaggacgcactggaagtccggaggcaaagtcttgcgacaaaaattcaggccgcttggagaggattccattggcggcagaaatttttaagagtaaaaaggagcgcaatctgcattcagtcttggtggaggggaaccctcgggagacgaaaggccgcaaagcggaaatgggctgcacagacaattcggcggctaataagggggttcgtccttcggcacgccccccggtgtcccgaaaatgcatttttcttggaccatgtcaggactagcttcctcctaaatttgaggagacagctgccccagaacgttctagatacctcgtggcccacacctccccccgctcttagggaggcctccgaactgttgcgcgagctgtgcattaagaatatggtttggaagtattgcagaagcattagtcccgaatggaagcagcaactccagcaaaaggcagtggcctcagagatctttaaggggaaaaaggacaattatccccagtctgtgccaaggttattcatatccactcgcctggggacagatgagattagcccaagagtactgcaggccctcggctctgaacccatacaatatgcggtgccagtggtgaagtacgacagaaaaggatacaagcctaggtcccggcagttgctcctcacgcccaatgctgtcgtgatcgtcgaagatgccaaagtgaaacagcgaattgactatgctaatctgacaggaataagcgtttcctccttatccgattccttatttgttttgcacgttcagcgggccgataataagcagaaaggtgacgtagtgcttcaaagtgatcacgtaatcgagaccctgactaagacagcgttatccgcgaaccgcgtgaacagcattaacatcaatcagggcagcatcacattcgccggcgggccaggccgggatggcacgattgacttcactcccgggtccgagcttctgatcaccaaggccaaaaacggccatcttgctgtggtagcacctagattaaactccagatag

SEQ ID NO: 125389 - DNA, 3135 bp, synthetic construct
  misc_feature 1..3135: note = Description of Artificial Sequence: Synthetic coding sequence
  source 1..3135: mol_type = other DNA
atgcggtacagagcctccgcccttggctcagacggcgtgagggtgaccatggagagcgcactgaccgcgcgagacagggtgggggtgcaggactttgtgctgttggagaattttacctcagaagcggcttttattgagaatctcaggcggaggtttcgggagaacttgatctatacatacatcggcccagtgttagtcagcgtgaatccgtatcgggatctgcaaatatatagtcgtcagcatatggagaggtatagaggcgtgagtttctatgaagtgcccccacacctgttcgccgtcgccgataccgtctacagagcactccggacagagcgcagagaccaggctgtaatgatctcaggcgaatcaggcgcaggcaaaacagaggccactaagagactcctccagttttacgccgagacttgcccagcgccggaacggggcggcgcagtgcgggatcgtctgcttcagtccaacccggtgctcgaagcattcggaaacgccaaaaccctgcggaatgacaattcttcaagattcggaaaatatatggacgtccaattcgattttaagggcgccccagtgggcggacacattttgagctatcttctcgagaagtctagggtcgtgcaccagaaccatggcgagagaaactttcatatcttttatcagctcctggaagggggggaggaggagaccctgcggcggctcggactggagcggaatccacaaagctacctctacctggtaaaggggcagtgtgctaaggtctctagtataaacgacaaatccgactggaaggtggtgaggaaagccctgacagtcatcgatttcactgaggatgaagtggaagaccttcttagtattgtcgcaagcgtcttacacttaggtaatatccattttgccgcaaatgaggagtctaacgctcaggtgacaactgagaaccagcttaaatatcttaccaggttactgagcgtggagggttccacgctgagagaagctttgacccatagaaaaattatcgcaaaaggagaggagctacttagtcccttgaatctagaacaggcagcatacgccagagacgcgctggccaaggctgtctacagtcggacttttacttggcttgtgggaaaaattaatcgctcactagcctctaaagacgtggagtctccctcatggaggagcacaacagtgctcggcctgctggacatttatgggttcgaggtctttcagcacaattcattcgagcaattctgcataaactactgcaatgaaaagcttcaacagttgttcatagagttaaccctgaaatcagagcaggaagaatacgaagccgaggggatagcatgggagccagttcagtattttaataacaagatcatttgcgatttagtggaggagaagtttaagggtattatctccattctcgacgaagagtgcttgaggcctggagaagccaccgacctgaccttcctggagaagctggaagacactgtcaagcaccacccgcattttctgactcataaactggccgaccagcgaactcgcaagtctctcggccggggcgagttccggctgcttcattacgccggcgaggttacgtatagtgtgactggctttcttgataagaataatgatctgctgtttcgcaacctcaaggagaccatgtgctctagcaaaaatccaatcatgtcccagtgttttgacagaagcgagctgtccgacaagaagagaccagagactgttgctactcagtttaaaatgagccttttgcaattggtggagattctccagtctaaagaacccgcctacgtaaggtgcattaagccgaatgacgctaagcagcccgggaggtttgatgaagtactgattagacaccaggtgaaatacctgggactgctcgagaacttaagagtacgccgcgccgggtttgcatatagaaggaagtacgaagcatttctccaacgctataagtccctgtgccctgaaacgtggcctacgtgggctggaaggccacaagacggtgttgccgtcttggtacgacatttgggatataagccagaggagtataagatgggacgaaccaaaatcttcattaggttcccaaagacacttttcgccaccgaagatgccctagaggtaaggcgccagagcttagccacgaaaattcaggctgcctggaggggcttccattggcggcaaaagttcctccgggtgaaaagatctgcaatttgcatccagagttggtggagggggactttagggcggaggaaagccgcgaaacgaaaatgggctgctcagacgatcagacgtcttatccgcggttttgtactgcggcacgctccaagatgccctgagaacgctttttttctggaccatgttcggacaagtttcttactgaatcttaggcggcagctcccacagaatgtcctagacacgagctggcccacacctccgccagcactgagggaggcttccgaactcctcagagagctgtgcatcaaaaacatggtatggaagtattgtaggtctatctctcccgagtggaaacagcagctgcagcagaaggccgtcgcttcagaaattttcaaagggaagaaggacaactacccgcagtcagtcccaaggttgtttatctctactaggttgggcacagatgagataagtcctcgagtactccaggcgctcggaagcgagccaatccagtatgcagtgcccgtggtgaagtacgaccgaaagggctataagccgaggagtcggcagctgctgttgactccaaatgcagttgtgatcgtagaagacgcaaaagtgaagcagagaatcgactatgccaatctgaccgggattagcgtgagtagcttatctgactccctatttgtactgcacgttcagagggccgataacaaacaaaagggtgacgtcgtgctgcagagtgatcatgtgattgaaactctgactaaaaccgcgctaagcgccaatcgggtaaactctattaatatcaatcagggatctattaccttcgcgggcggacctggacgcgacggaactatcgattttacacctggcagcgagctgttgataacgaaagcaaagaacgggcacttagcggtcgttgcgccacggctaaattctcggtag

SEQ ID NO: 125390 - DNA, 2418 bp, synthetic construct
  misc_feature 1..2418: note = Description of Artificial Sequence: Synthetic coding sequence
  source 1..2418: mol_type = other DNA
atggaaagcgctctgaccgcacgtgatagggttggtgtgcaggacttcgttctcctggaaaactttacctcggaggctgcttttatcgaaaatctgcgcaggagatttcgagagaacctcatttatacttatatcggccccgtcttggtgagcgttaatccatatagggacctgcagatttactcccggcaacacatggagagataccgcggcgtgtctttctatgaggtgcctccgcacctatttgctgtcgcagatacggtgtacagagccctcaggactgaacgccgagaccaggctgtcatgattagcggggagtcgggcgctggcaaaacagaggccacaaaacgactactccagttctacgctgagacctgccctgctcctgaaaggggcggggcagtccgggaccgtctcctacagtcaaatcctgtcctggaagcctttggtaacgctaagacactgaggaacgataattcttctcgctttggcaagtacatggatgttcagttcgactttaaaggggcccccgtcggagggcacatcctctcatatctattggagaaatcaagggtggtacaccagaatcatggagaaaggaatttccatatcttttatcagctgctcgagggcggagaggaagagaccctccggagattgggactcgaaaggaaccctcagagctacctgtacctcgtgaaaggccaatgcgctaaggtgtcctccataaatgataagagcgactggaaagtcgttaggaaagctctgacggtgatagatttcacagaggatgaagttgaggacttgttgagtatagtagcttcagtcctgcacttaggaaacattcatttcgctgctaacgaggagagtaatgcccaggtgaccaccgagaaccaactgaagtacctcaccagactgctgtctgtggagggatccacactgcgcgaagcacttacccatcgcaaaatcattgccaaaggagaggagttgctttcccccttgaatttagaacaggctgcatacgcacgggatgcgctggcaaaggccgtgtactctagaacattcacttggctggttggcaaaattaacagaagccttgccagcaaggatgtggagagccctagctggaggtcaaccaccgtgctggggcttttggacatctatggatttgaggtgttccagcataactcatttgagcagttttgcattaactactgcaacgaaaagctgcagcagctttttatagaactgacattgaaaagcgaacaggaggagtacgaggccgaggggatcgcctgggaacccgtgcagtacttcaataacaaaatcatctgcgacctcgtggaggagaagttcaagggcattatctcgatcctggatgaagagtgtcttcggcccggggaggctacggacctgactttcctggagaaattagaagatactgtgaaacatcacccccacttcctgactcacaagctcgcagaccagcgcacacgcaagagcttgggcaggggcgaattccggttgctgcactatgctggagaggtgacttactctgttactggctttctcgataaaaataacgacttgttatttaggaacctaaaggagacaatgtgcagttcgaagaacccgataatgtcgcaatgctttgataggtcggaactgagcgataaaaagaggcccgaaacggtcgccacccaattcaagatgagccttctgcagctggtggaaatcctgcagtctaaagaaccagcttatgtgcggtgcattaaacccaatgatgctaagcagcccggccggttcgatgaagtcttgattaggcaccaggtgaagtacttggggctcctcgagaatttgcgggtgcgaagggcgggctttgcgtaccgacggaagtacgaggccttcctccagagatacaaatcgttgtgccccgagacttggcccacttgggccggacggccccaggatggagtagcggtcctggtccgtcacctgggctacaaacctgaagagtacaagatggggagaaccaaaatttttatcaggttccccaaaacactgttcgccaccgaggatgctctggaggtgagacggcaatcgctcgcgaccaaaatccaggcagcctggcgggggtttcactggaggcagaaatttctccgtgtaaagaggtccgcgatttgtatccagagctggtggcgcggaacgctgggacgaagaaaggccgccaaagaggtgggaggaacagaccatcccgcagcccatccacgcctgcggccggcacctcgccccccactgccacgggagagattactccccggaccctgtgcgcacttgtttttcgccaagcctgaggcagctgccgcgcccgagtgccctgggcatctggtggcacacgcccccacatgccctgcatag

SEQ ID NO: 125391 - DNA, 3135 bp, synthetic construct
  misc_feature 1..3135: note = Description of Artificial Sequence: Synthetic coding sequence
  source 1..3135: mol_type = other DNA
atgcgcggtcgcgctagcgcactcggctctgatggtgtgagagtgacgatggaatcagctttaactgcaagagatcgcgtgggggttcaggacttcgtcctgctggaaaactttactagtgaagccgcctttatcgaaaacctgcggcgcagatttcgcgagaatttgatttacacttacatcggtcccgtcctagtgagtgtcaacccttatcgggatctgcagatttattctcgccagcacatggagcgctataggggggttagtttttatgaggtcccaccacatctattcgccgtggctgatactgtttaccgggcgctgaggactgagcgcagggaccaagccgtaatgatttctggagaatcaggcgctggcaaaactgaagctaccaagcgtctgcttcaattttacgcagagacatgccctgctcctgagcgcggaggcgctgtccgagataggctacttcagtcgaatcccgtactggaggccttcggcaatgctaagaccctgcgcaatgataattcatctaggttcgggaaatacatggacgtgcaatttgactttaaaggtgcccctgtggggggacacatccttagctatcttctggaaaaatcccgcgtggtccatcaaaatcacggagagcgtaactttcatatcttttatcagcttctggaagggggtgaggaggagaccctgagacgactcggcttggaaaggaatccacaaagttacttgtatttggtaaaaggacagtgtgccaaagtcagctccattaatgataaatctgattggaaggtggtccgtaaggcccttaccgtgatagatttcactgaagatgaggtggaagacctcctgtcaatcgtcgctagcgtgctacatttgggaaatattcattttgcagccaacgaagagagtaacgctcaggttaccacagagaaccaattgaagtacctgactcgcctgctgagcgtggaaggttccactcttcgcgaagctctgacgcaccgaaagataattgcaaaaggagaagagcttctgagtccattgaatctggagcaagccgcttatgctcgggacgctctggcaaaggccgtctacagcagaaccttcacttggctggttggcaagattaatagatctcttgctagcaaagacgttgagtcaccctcttggaggagcacgacggtgctgggcttactcgacatctacggattcgaggtgtttcagcataatagcttcgagcagttctgcatcaactattgcaatgagaaactacagcagcttttcatcgaactgacactcaaaagcgaacaagaagagtacgaggccgaaggcatcgcatgggagccagtgcagtacttcaataataaaattatatgcgatctggtcgaagaaaagttcaaaggaattatatccatacttgatgaagagtgcttgaggccaggcgaggccacagacttaacctttctggaaaagctcgaagatacggttaagcatcaccctcattttctgacacataaactcgcggatcagagaactcggaaatctctggggcgaggcgaatttcggcttcttcactatgccggtgaggttacctattcagtgaccggcttcctggataaaaacaacgatctgttgtttaggaacctcaaagagacaatgtgtagttccaagaatcctattatgagccagtgctttgaccggagtgagctttcagataaaaagaggccagagacagtggccacacagttcaagatgtccctcctgcaactcgtcgaaattctgcagtctaaagaacctgcatacgttcggtgtattaagccaaacgacgccaagcagcctggaagattcgatgaagtgttgattcgccatcaagttaagtacttgggcttattggagaatctgcgcgtcaggcgagccggctttgcctatcggcggaaatacgaggcatttctgcagcgctacaaatccctgtgccccgaaacttggcctacctgggctggaagaccccaagacggagtcgcagtcttggtgagacatctgggctataaacctgaggaatataagatgggcagaactaagatctttatacggtttccaaaaaccttgttcgctacggaggacgccctcgaggtgcgaaggcagtccttggctacaaagatacaagccgcctggcggggtttccactggcgacaaaaattcttgcgcgtaaaaaggtccgctatatgcattcagagctggtggcgagggactctaggccgtcgaaaggcagcaaagaggaagtgggcagcgcagacaattagaagactgattagagggttcgtgcttcgacatgccccacgttgtcccgagaatgctttttttttagatcatgtgcgaacaagcttcctcctcaatctgcgccggcagttaccacaaaacgtgctggatacgagttggcccactcctcctccagctctgcgggaggctagtgagcttctgcgggaactgtgtataaagaatatggtttggaagtactgtcggagtattagccctgagtggaagcagcagttacaacagaaggctgtggcgtcagagatattcaaggggaagaaggataactaccctcagtccgtcccaaggttatttatctcaactcgtttagggacggacgagatatctcctagagtcctgcaggctttggggagtgagccgatccagtatgccgttcccgtggtaaaatacgatcgaaaagggtacaagccaaggagccgccagttactgctgacaccaaacgctgtagtgatagtagaagacgcaaaggtgaaacaacggatcgattatgcgaacctgaccgggatttctgtgagttccctgagcgattcccttttcgtgctgcatgtgcaaagggctgataacaaacagaagggggacgttgtgctgcagtcagaccatgtcatcgaaacgttgaccaagaccgccttatccgccaatagggtcaattccataaatattaatcaaggcagcattaccttcgctggcggtccgggccgggacggcacaatcgactttacacctggaagcgagctactaatcaccaaggcgaagaatggacacctggctgtcgtagcacctaggttaaatagccggtag

SEQ ID NO: 125392 - DNA, 3120 bp, synthetic construct
  misc_feature 1..3120: note = Description of Artificial Sequence: Synthetic coding sequence
  source 1..3120: mol_type = other DNA
atggccctgggatccgacggcgtgcgcgtcaccatggaatctgccctgacagctagggatcgtgttggggtccaagactttgtccttctcgaaaacttcacatctgaagcagcgttcatcgagaatctgagacgtcggtttcgcgaaaacctcatctacacatacatcggtcctgtgctggtcagtgttaatccttatagagatctacagatctactcacgacagcacatggaacgataccgaggcgtctctttctacgaggtcccgcctcatctctttgcggtggccgacacagtttatcgggcacttcgcactgaaaggcgcgaccaggccgtgatgatcagcggtgaatcgggtgccggcaagacggaagccaccaaaagactgctgcaattctatgcggagacttgtcctgctcccgagcgcggaggcgcggttcgagataggctgctgcaatctaacccagtgttagaagctttcgggaacgcgaaaacgctacgcaatgacaactcaagtaggttcgggaaatatatggacgtccaattcgatttcaaaggcgcacctgtgggaggacacatcctgtcctacctccttgagaaatccagggtcgttcatcagaaccacggggagaggaattttcatattttttaccagcttttggagggcggagaagaagaaacactcagacggttgggcctggagcgaaacccgcagtcatatctctacctcgttaaaggtcagtgcgcaaaagtcagtagcatcaacgacaagtccgattggaaggtggtgagaaaggccctcactgtcatcgactttactgaggacgaggtcgaggaccttctgtccatcgtggcatctgtgttgcatctcggtaacattcacttcgccgcaaatgaagagtccaacgcccaagtgacaactgagaaccagctgaagtatctgacgagactccttagcgttgagggctctaccttgcgtgaagccttaactcatcgcaaaatcattgccaaaggcgaggagctccttagccctctgaaccttgagcaagctgcctatgcccgggacgctctagcaaaggccgtatactctaggacctttacctggcttgtagggaaaatcaatcgctcgctcgctagtaaagacgtggaatccccaagttggaggtcgacaactgttctcgggctgcttgatatttatggctttgaggtttttcagcacaacagtttcgagcagttttgtatcaattattgtaacgaaaagcttcagcagttgtttatcgagctcaccctcaagtcagagcaggaggagtatgaggctgaagggatcgcgtgggagcctgtgcaatactttaataataaaataatttgtgacctggtcgaggagaaatttaaaggtatcatcagcatcttagacgaggagtgcctcaggcccggggaggccacggatctcaccttcctggaaaaactggaagacaccgtgaaacaccatccccattttctcacccacaagcttgctgatcagcggaccaggaagagcctaggtcgcggagagtttcggctgctccattatgctggagaggtaacctatagcgtaaccgggtttttggacaagaataatgatctgttatttcgcaatctgaaagaaacaatgtgtagttccaagaacccgatcatgtctcaatgctttgacaggtcagagctgagcgataaaaaacgcccggagacagtggctactcaatttaaaatgagcctcctgcagctggttgagatattgcagtccaaggaaccggcgtacgtccgctgtatcaaacctaacgacgccaagcaacctggcaggttcgacgaggtactcatacggcatcaagtaaagtatttgggcctcttagagaatctcagggtccgtcgcgccggattcgcctacaggagaaaatatgaggcctttctccaacggtataaatcactgtgtcctgaaacttggcctacctgggcgggaaggccacaggacggggtcgcagtgttagtgcgtcacctgggatataagcctgaggagtacaagatgggccgcacaaagatatttattcggttcccaaagacactctttgcgacggaagatgccctggaagtcagaaggcagtccctggccactaagattcaagcagcctggcggggctttcactggcgtcagaagtttctgagagtgaagcgaagcgccatctgtatccaatcttggtggcggggcaccctgggcagacggaaagccgctaagaggaaatgggctgcgcagaccatccgtaggttgataagagggttcgtcctgcgccatgcaccacgttgccctgagaacgctttctttctcgatcacgtccggacaagcttcctcctaaacctgcggcggcagttaccccagaacgtcctagacactagctggcctacaccgcctcccgcactgagggaagctagcgagctacttagggagctgtgcataaaaaatatggtgtggaaatattgccggtccatttctcctgagtggaaacagcaactacagcagaaggccgtggcgagtgagatcttcaaggggaaaaaggacaattacccacagtccgtgcctcgtctgttcatttcgacaaggctcggcaccgacgaaataagccctcgagtccttcaagcactgggctccgaacccatccagtatgcggtcccggtggtgaagtacgaccgcaaaggctataaaccacggtcaaggcagctgctcctgacccctaatgccgtggtgatcgtcgaggacgcgaaggtcaagcagcgaatcgactatgccaacctcaccggaatctctgtgagctcactgagcgactccctgttcgtcctccacgtgcaaagagccgacaacaagcagaaaggcgacgtggtgctgcaatctgaccacgtgattgaaaccctgacaaagaccgctcttagtgccaaccgcgtcaattcaatcaatatcaatcagggcagcattaccttcgccggcggtcccgggcgagacggaactatagatttcactcctggttctgagcttttaattacaaaggccaagaatggccaccttgccgtagtggcgccccggctgaactccagatag

SEQ ID NO: 125393 - DNA, 3021 bp, synthetic construct
  misc_feature 1..3021: note = Description of Artificial Sequence: Synthetic coding sequence
  source 1..3021: mol_type = other DNA
atggctgagcaggaatctctggagttcggaaaggctgatttcgtacttatggataccgtcagtatgccagagttcatggctaaccttcgactaaggtttgagaagggcaggatctacacatttatcggagaagtggtggtgtccgtgaatccctataagctgctaaacatctatgggagagacactatcgagcaatacaaggggagagaattgtacgaaagacccccacatctgttcgcgatagctgacgcagcatataaagcaatgaagcgacgctcaaaagacacctgcattgtcatcagcggcgaaagcggcgccggcaagactgaggctagcaagtacattatgcagtacatagccgccatcaccaacccttctcagcgggcagaggttgagcgggtaaaaaatatgttgctcaagagcaattgcgtgttggaggctttcggcaatgccaaaacaaacaggaacgacaatagctccaggtttggtaaatatatggatatcaacttcgattttaaaggcgatcctataggcggccacatcaacaactatttactggaaaagtcaagagtgattgtgcagcagcctggcgaacgcagctttcacagcttttaccaactgctacaagggggctccgagcaaatgctacggtcactgcatttacagaagtccctgtccagctacaattacatccacgttggagcccaactgaagagttctatcaatgacgccgctgaattcagagtagtggccgacgcaatgaaggttataggcttcaaaccagaagagattcagactgtatacaaaatacttgctgctatattgcacctgggaaatctcaaattcgttgtagacggagacacgcccttgattgaaaacgggaaggtggttagcattattgcggaactcctgtccacgaagactgacatggttgagaaggccctgctctaccggacggtagctaccgggcgggacatcattgacaaacaacatacagagcaggaagcatcttatggcagagacgcctttgctaaagcgatctatgagaggctcttctgctggatagtgactaggattaatgatatcatagaggtcaagaattatgataccactatccacgggaaaaatactgttatcggggtcttagacatatatggctttgagatctttgacaataacagcttcgaacagttttgtatcaattactgcaacgaaaagttgcagcagctgttcatccagttagtgctgaagcaagaacaggaggagtatcaacgtgagggcatcccctggaagcacatagattatttcaacaatcagatcatcgtcgatcttgtagagcagcaacataagggtattatagccatccttgacgatgcgtgtatgaacgtcggcaaggtcacggacgaaatgtttctggaagcactgaatagcaagctcggcaagcacgcccacttttcgagcagaaaactgtgcgcatccgataaaattttagagttcgatcgggatttccggatcaggcattatgccggggacgtcgtttatagtgtgatcgggtttatcgacaagaataaagacaccctgtttcaggattttaaacggctaatgtacaattcctcaaatccggtcttgaaaaacatgtggcccgaaggaaaactgtcaattaccgaggtcaccaaacgtcctctgacagctgctaccctcttcaaaaatagcatgatcgctcttgtcgacaacctagcaagcaaagagccttattatgtccggtgcatcaagcccaatgataagaaatctccccagatattcgacgacgagcgctgtcgtcatcaagtggagtatctcggactgctcgagaatgtgcgggtgagaagggccgggttcgccttccggcaaacatatgaaaagttcctccacagatacaagatgatctccgagttcacatggccaaaccacgatttaccatccgataaagaagcagttaaaaagctaatagagagatgtggattccaggacgatgtggcctacggcaagacaaagatctttatacggactcccagaaccctcttcacattggaggagttgcgggcccagatgcttattaggattgtgctttttctgcagaaggtttggagaggcacacttgctcggatgcgatataagcgcacaaaagcggccctcaccatcattcgatattaccgacgctataaagtgaaatcatacattcatgaggttgctagacgcttccacggcgtgaaaaccatgagagactacggaaagcacgtgaagtggccctctccgccaaaagtgctcagacgctttgaagaggccttacagactatatttaatagatggagggcctcacagctcatcaaatcaatcccagcatcggatctgccccaagtcagggcaaaagtagcggccgtggaaatgctaaaaggacagagagctgatctgggtttgcaaagggcttgggaaggcaactacttggcctctaagccagatacccctcagaccagcggtacttttgtgccagtggccaatgaactgaaacgtaaggataaatacatgaatgtgctgttctcatgtcacgtgcgtaaagtgaaccggttcagcaaagtcgaggaccgcgccatcttcgtgacagaccgacacctgtataagatggatccaaccaaacaatataaagttatgaagactatcccactttataacctgaccgggctgtccgtaagcaacggcaaagaccagcttgtagtgttccatactaaggacaacaaagatctgattgtctgcctgttttcgaaacagcctacccacgagtcgcggatcggcgaattggtgggtgttttggtgaaccattttaagagtgagaaacggcatcttcaggtaaacgttactaaccccgtccaatgttctctccacgggaaaaaatgtacagtaagtgtggagacgcggctgaaccagccacagccggatttcaccaagaatcggtctggttttatcctgagcgtgccaggaaattag

SEQ ID NO: 125394 - DNA, 597 bp, synthetic construct
  misc_feature 1..597: note = Description of Artificial Sequence: Synthetic coding sequence
  source 1..597: mol_type = other DNA
atgctgaaaggccaaagggctgatttgggcctccagcgcgcctgggaggggaattacttagcctcaaagcccgacaccccgcaaacatctggaaccttcgtgcctgtggccaatgagcttaaaaggaaggataaatacatgaacgtgctgttttcgtgccatgtaaggaaggttaaccggtttagtaaggtggaagatcgagcgatattcgtcaccgaccgacatctgtataaaatggatcccactaaacaatacaaggtgatgaaaaccattccgctctacaacctgacggggctgtccgtatccaacggcaaggaccaactggtggtctttcataccaaagataacaaagacctaatcgtatgtctgttttccaaacagccaacccatgagagcaggataggcgagctcgttggtgtgttagttaaccactttaagtcagaaaagaggcacttgcaagtcaacgtgaccaacccggttcagtgtagcctgcacggtaagaaatgcacagtgagcgtggaaactaggctgaaccagcctcagcccgacttcacaaagaatcgcagtggctttatcctatcagtcccaggtaactag

SEQ ID NO: 125395 - DNA, 3327 bp, synthetic construct
  misc_feature 1..3327: note = Description of Artificial Sequence: Synthetic coding sequence
  source 1..3327: mol_type = other DNA
atgggctctaagggcgtgtaccagtatcactggcagagccacaacgtgaagcactctggagtggacgacatggtgttgctgagtaagattacagagaatagcatcgtggagaacctgaagaagcgctacatggacgactacatttttacatatatcggtagcgtcctgattagcgtgaatcctttcaaacagatgccatatttcggggaaaaggagatagaaatgtaccagggcgctgcgcagtatgaaaatcctccacacatttacgccttagcagacaacatgtatcggaatatgatcatagatagagagaatcagtgcgtgatcatctctggcgagtctggcgcaggcaagacggtggctgcaaaatatattatgagctacatttcccgcgtgagcggcggcggaaccaaggtccagcatgtgaaggacattatcttgcagtctaaccctcttctcgaggccttcgggaatgctaagacggttcggaacaacaacagctccagattcggcaaatatttcgagatccagtttagccctggcggcgagcctgatggcggaaagatttcaaacttcctgctggagaagtcccgagtggtcatgagaaaccccggtgagagatcttttcacatattctatcagcttattgagggggccagcgccgagcaaaagcactccctgggaatcacctcaatggactattactattacctcagcctatccgggtcttacaaagttgatgacattgacgaccgccgcgaattccaggagacccttcatgcaatgaacgtaattggcatcttcgccgaagagcagactttggtgctgcaaatcgttgctggaatactacacctggggaacatcagcttcaaggaggtgggtaactacgctgcagtagagagcgaggaatttctcgccttcccggcctacctcctcggtataaatcaggataggttgaaagagaaattaaccagtcgacagatggactccaaatggggaggcaaatccgaatccattcacgtgactctgaatgtcgaacaggcctgttatactcgggacgcccttgccaaagctttgcatgcgcgcgtgttcgatttcctcgtggacagcatcaataaggccatggagaaagatcatgaagagtacaatatcggtgtgctagatatttatggctttgagatattccaaaaaaatggatttgaacagttctgtatcaacttcgttaatgaaaaattgcagcagatctttatcgaactgaccctcaaggccgagcaagaggagtacgtgcaagaaggaatacgctggacccccatcgaatatttcaataataagattgtctgcgacctgattgagaataaggtgaatcccccaggaattatgtccatcctggatgacgtgtgtgctaccatgcacgccgtaggggagggcgcagaccaaacactactgcaaaaactgcaaatgcaaatcggaagccacgaacacttcaactcatggaatcagggcttcatcatccaccactatgccggaaaagtgagctacgacatggatggtttttgcgagaggaatagggatgtgttgtttatggacttgatcgagctcatgcaatcttccgagttacccttcatcaagtcattgtttcccgagaacctacaggccgacaaaaagggcagaccaacaactgccgggtctaaaatcaaaaaacaagctaacgacctcgtctccacactaatgaagtgcaccccacactacattagatgtatcaagcccaacgagactaagaaacccagggattgggaggaaagtagggttaagcaccaagtggagtacttggggctgaaggaaaatatacgggtgcggcgggcaggctatgcctatcgccgaatttttcagaaatttttgcagagatacgccatcctcaccaaggcaacctggccctcctggcaaggcgaagaaaagcagggtgtcctgcacttgttacagtccgtcaatatggactctgatcagtttcagttaggccgctctaaggtctttataaaggcccccgaatcactgtttctactggaagaaatgcgcgaaaggaaatatgacgggtatgcccgcgttatccagaaaagctggaggaagtttgtggctcggaagaagtacgttcagatgcgcgaagaggcatccgatctcctcttgaataaaaaggagcgccggcgaaattcgatcaatcgcaactttatcggggactacattggcatggaggagcacccagagctccagcaattcgtgggcaagcgcgaaaagatcgatttcgcagatactgtgactaagtacgaccgcagatttaaaggggtcaagcgggatctgctgttgacaccgaaatgtctttatctaataggccgtgaaaaggtcaagcaggggccggacaaaggactggtgaaagaggtgctgaagcgcaaaatagagatcgagcgcattctctccgtctccctaagcacaatgcaggacgatatattcatactgcacgagcaagaatacgatagccttctcgagagtgtcttcaaaactgaatttctttctcttctagccaagcgctatgaagaaaagacccagaagcagctgccactgaagttcagtaacactctcgagttgaagctgaaaaaggaaaactggggcccatggtcggccggaggatcccgacaggtgcagttccatcaggggtttggggacctggccgtgttgaagccgtcgaataaggtcttacaagtatctataggacccggcctgccaaagaatagccgcccgaccaggaggaacaccacccaaaacactggctactcatcgggaacacagaatgctaattatcctgtacgggctgcgcctccgccccccgggtaccaccagaatggcgtgattagaaatcaatatgtcccctatccccacgctccgggcagtcagcggagcaatcaaaagagcttgtacacttccatggcccgcccacctctgcctcgacagcagtctacgtctagtgacagagtttctcagacccccgaatctttggactttctcaaggtccccgaccaaggtgccgcaggcgtgagacgccagaccacctcacggcctcccccggcaggaggacggcctaagccacagcccaagccgaagcctcaggtacctcagtgtaaagctctctacgcctacgacgcccaggacaccgacgagctctcctttaacgctaacgacattatcgatataatcaaggaggatcccagcgggtggtggacagggcggttacgtgggaagcagggcctgttccctaataattacgtgactaagatatag

SEQ ID NO: 125396 - DNA, 3312 bp, synthetic construct
  misc_feature 1..3312: note = Description of Artificial Sequence: Synthetic coding sequence
  source 1..3312: mol_type = other DNA
ggcacaaaagccgggtctcccgtcaatggccagaagcagggccacgctcaggccacccccaaaatccccctaaacctgcatctccaccacgaccccttccgtagtctacaggaacccagacatcagcctccgaccatgggatccaaggagagatttcattggcagagccacaatgtgaagcagtctggggtggatgacatggtgcttctcccccagattaccgaagacgccattgcggccaaccttaggaagcgctttatggacgactatatttttacttatatcgggtcagtcctgatcagcgtgaatcccttcaagcaaatgccatacttcactgatcgagaaatagacctgtaccagggggccgcccaatacgagaatccgccccatatttatgcactgacagataacatgtacagaaacatgctgatagattgtgagaaccagtgcgtaatcataagtggcgagtcaggcgctggaaagacagtcgcagccaagtacatcatggggtacatcagcaaggtaagtggtggcggtgagaaagttcaacatgtgaaggatatcatcctgcagtctaatccattgctcgaagcgttcgggaacgcaaaaactgtcaggaataacaacagctcccgcttcggcaaatacttcgaaatccagtttagcagaggaggagaacctgacggagggaaaatttcaaacttcctattggaaaagtcaagagtggtgatgcaaaacgagaatgagcggaactttcacatttactatcaactgctggaaggggcatcgcaagaacagcgccaaaacctgggacttatgacgcccgactactattattatctcaaccagagcgacacatatcaggttgacggcaccgacgacagatccgacttcggggagacgctgtccgctatgcaggtgataggaatccccccaagcatccagcagctggtactgcaacttgtggctggtatactacatttaggcaacatttcattctgtgaggacggcaattatgctcgggtcgaatccgtagacctgctcgccttcccagcctaccttttgggcattgactctggacgattacaggagaaacttactagcaggaagatggactccagatggggcgggaggtcagagtcaataaacgtgaccctgaatgtcgagcaggcggcctatacgagagatgcactggctaaagggctgtatgcccgccttttcgatttcctggtcgaagcgatcaatagagccatgcagaaaccacaggaagaatattccataggtgtcctagatatatacgggtttgagatctttcagaaaaatggatttgagcaattttgtatcaacttcgtcaatgaaaagcttcagcagatcttcatcgagctgacacttaaggccgaacaagaggagtacgttcaggaaggaataaggtggaccccgatccagtatttcaataacaaggtagtttgtgatctgattgagaataaactgagtcccccaggcatcatgtccgttttggatgatgtgtgtgccaccatgcacgctacaggcggaggggcagatcagaccttgttgcaaaaactgcaggcagcagtgggcacccatgaacactttaattcatggagtgcaggattcgtcatccaccactacgctggtaaggtgtcctacgatgtttctggcttctgtgagagaaacagagacgtgctcttcagcgacttgatagagctgatgcaaacaagtgaacaggcattcctccggatgctgttccctgaaaagctcgacggggataagaaaggaaggccgtccacggcgggctccaagattaaaaaacaggctaacgacctcgtggccaccttgatgcggtgtacacctcattacattcggtgcattaaaccaaatgaaactaagagacccagggactgggaggagaacagggtcaagcatcaggtagagtacctgggtttgaaagagaatatccgcgtgaggagagcaggcttcgcttatcggcggcagtttgccaagttcctgcagaggtacgcgatactgaccccggagacatggcctaggtggagaggcgatgagaggcagggcgtccaacacctgctgagggctgtgaatatggagccagatcaatatcagatggggagtacaaaggtgttcgtgaaaaaccctgagtctctgtttctactcgaagaggtccgcgagcggaaattcgatgggttcgccagaacaatccagaaggcctggcggaggcatgtagcggtgcggaagtatgaggagatgagggaagaggcttcgaacatccttctgaacaaaaaggaaaggcgccgaaactcaatcaataggaactttgtaggagattacctgggattggaagagcgccccgaactccgacaatttctggggaaacgagaaagagtcgattttgcagacagtgtcacgaaatacgaccgtagattcaagccgatcaagagggatctaattctcacacctaagtgtgtttacgtgatcggccgcgagaaggttaaaaaggggccagaaaagggtcaggtgtgcgaagtactgaagaagaaagtcgacatccaggctttgcgtggcgtgtcactcagtacacggcaggacgactttttcatactgcaggaagatgcagccgacagcttcctggagtctgttttcaagaccgaatttgtgtccctgctatgcaaacgattcgaagaggccacccgaaggcccctgccactgacattcagcgacacactccagttccgagttaaaaaggaagggtgggggggcggcggaactcggtctgtgactttttcaaggggcttcggtgacttagccgtcctcaaagtgggaggaagaaccctgacagttagcgtcggcgacgggctgcctaagagcagtaaacctacccggaaaggaatggcgaaggggaagcccagacgctcaagccaggctccgacgagagccgctccagcgcctccgcgcgggatggaccggaacggtgtgcccccgtctgctaggggtggtcctctaccaggcgaccacgtgtggcgtggccatccacaggctagccctggattaaggcctcatccctgggagccagctgacgacccaggtcacgtgaggccacagagtacaacccaaaattcctctacctgtctgacacgtgcttggcccgcctgcaggggatcagcagcatggggaaacggtcaatgtcttgtgtgggccgatcccagtccctctttaggccacatggtccccggggccggcccttacacaagcacctgggcaaaaatgtggacgagctag

SEQ ID NO: 125397 - DNA, 3297 bp, synthetic construct
  misc_feature 1..3297: note = Description of Artificial Sequence: Synthetic coding sequence
  source 1..3297: mol_type = other DNA
atgggcagcaaggaacgtttccactggcaaagccataacgttaaacaaagcggcgtggatgacatggtactcttaccacaaatcactgaggatgctattgccgcaaatttgagaaagagattcatggacgattacatttttacctatatcggcagcgtgcttatttccgtcaatccgttcaagcaaatgccatattttacagatagggaaattgatctctaccagggggccgcccaatacgaaaacccaccacacatctacgcattaaccgataacatgtaccgcaacatgctcatagattgtgagaatcaatgtgtcattatctccggcgagtcaggggctgggaaaacagttgccgcaaagtatatcatgggatatattagtaaggtgtcaggaggcggggaaaaagtccagcacgtgaaggatataattctacagtctaatcctctattagaagcctttgggaacgccaaaacagtgagaaacaataactcaagcaggttcggaaaatatttcgaaatccaatttagccgaggaggcgagcctgatggtggcaagataagtaattttctcctcgaaaagtcgcgcgtggtgatgcagaacgagaacgagaggaactttcatatctattaccagctcctggagggagcgagccaggagcaacggcagaacctaggtctcatgactcctgattattactattacctgaaccagagtgatacctaccaggtggatgggactgacgatcggagcgatttcggagagactctttccgctatgcaggttattgggatcccgccatctatccaacagttggtgctgcagctggttgccggaattttacatttgggcaatataagcttctgtgaggatgggaattacgcaagagtggagtctgtcgacctcctagccttcccagcatatttactgggcatcgactccggaaggttgcaagagaaacttacctcgcgcaagatggatagcaggtggggcgggcgttcggagagcattaacgttacccttaacgtagagcaggccgcttacacacgggacgctctcgctaaagggttgtatgcccgactcttcgatttcctagtggaggctatcaatcgagcaatgcagaaaccccaggaggagtattccattggagttttggacatctacggtttcgagatttttcagaagaacggattcgaacaattttgtatcaattttgtcaatgaaaaactccagcagattttcatcgagctcacacttaaagccgaacaggaggaatatgtgcaagagggaatcagatggacaccaatccagtattttaataataaagtagtttgtgacttgatcgaaaataaattatctcctcctggcataatgtcagtactggacgatgtgtgtgcaacaatgcatgccaccgggggcggagccgatcagaccctccttcaaaaactgcaggccgcggtgggcacacatgagcatttcaatagctggtctgccggctttgtgatccaccattacgctggtaaagtgtcgtatgatgtgagcggcttctgcgagagaaatcgcgatgtattgttctctgacctcatagaacttatgcagactagcgagcaggcgtttctgcggatgctctttccagagaagctagacggggataaaaaggggcgcccttctactgcgggcagtaaaattaagaaacaggccaatgacttggtcgcgacactgatgagatgcacaccccattacattagatgcattaagccaaatgaaaccaagaggccacgtgattgggaggagaacagagtgaagcaccaggtggagtacctgggcctaaaggaaaatatccgtgttcggcgggctggtttcgcctacaggcgacagttcgctaaatttctgcagaggtatgcaattctcacgcccgagacgtggccaagatggcggggcgacgaacgccagggtgtccaacacctgctcagggccgtgaacatggagcctgaccagtaccagatggggagcactaaggtcttcgtgaaaaacccagaaagccttttcctgctcgaggaagtgcgagagcgaaaattcgatgggttcgccaggactatccagaaggcatggcgccggcacgtggcggtgaggaaatacgaggaaatgagggaggaggcatctaacattttactgaacaagaaagagcggaggcgaaattcaatcaacagaaacttcgtgggggattacctgggcttggaggaacgcccagaactacgtcagtttttgggaaaacgcgagagagtagactttgcagacagcgtaaccaaatatgatcggcggtttaaaccaatcaagagggatctcatcctaacgccgaagtgtgtttacgtgataggtcgggagaaagttaaaaaggggcccgagaaggggcaggtgtgtgaggtgttaaagaagaaggtggacatccaggcgctgcgcggggtgagtctcagtacacgtcaggacgactttttcattttacaggaggatgccgcagactctttcctggagtccgtgttcaagaccgagttcgtatctttactctgtaagcgatttgaggaggccactcggagaccattaccactcacattctccgacacactgcaattcagagtgaagaaagagggatgggggggaggaggtacacggtctgtaacattcagcagaggcttcggcgatcttgccgttctaaaggtgggcggtaggactctgacagttagcgttggagacggtttaccgaagagttccaaacccactagaaagggcatggccaagggcaagccccggcgcagctcacaagctcctacccgcgcagcccctgcacccccaaggggcatggaccgcaacggcgtgccacctagcgctcgtggggggccgctcccgctagagatcatgtctggcggtggcacgcaccggcccccgaggggccctcccagcacctcccttggcgcatctcggcgcccccgcgctcggcccccgagcgagcacaatacggagtttcttaatgtcccagaccaggggatggccggaatgcaacgtaagaggagcgtgggacagcggccggtcccaggagtgggccggccaaagccacaaccccgaacacacggaccacgatgtcgagctctgtatcagtacgtcggacaggacgtggatgaacttagcttcaatgtcaatgaggttatagagattctgatggaagatccttccggatggtggaaaggccgactgcacggccaggaggggcttttccccggaaattacgttgaaaaaatctag

SEQ ID NO: 125398 - DNA, 3057 bp, synthetic construct
  misc_feature 1..3057: note = Description of Artificial Sequence: Synthetic coding sequence
  source 1..3057: mol_type = other DNA
atggaggacgaagaagggcctgaatacggcaagcctgacttcgtgttgctcgaccaggtgacgatggaggatttcatgcgaaacctgcagctgaggttcgaaaaggggcgcatctatacctatattggagaggttctcgtgagcgtcaacccgtaccaggagctgcccctgtacggtcctgaggcaatcgctcggtaccaggggcgcgaattatatgagcgtcctccccatttgtacgccgtggcgaacgcagcttataaagctatgaaacacagatctagggacacttgcatagtcatctcaggagaatctggagcagggaagaccgaagctagtaagcatataatgcagtacattgcagcggtcacaaatccatcccagagggccgaggtggagagagtcaaggacgttctgctcaaatctacctgtgtactggaggcctttggcaacgcccgtacaaatcggaaccacaattcctctcggttcggaaagtatatggacataaatttcgatttcaagggggatccaataggagggcatatccattcttatctgttggaaaaaagtagggtgctgaagcagcacgtgggggaacgtaactttcacgctttttatcagcttctgcggggctccgaggacaagcaactccacgaattgcaccttgagcgaaacccagctgtgtataactttacgcatcaaggcgccggattgaatatgacggtgcactcagctctcgacagcgatgaacagtcccaccaagcagtaactgaagccatgcgcgtgatcggattttctcccgaggaagttgagtctgtgcacaggatactggctgctatcctccatctcggcaacatcgagttcgtggagactgaagagggcggcctccagaaggaggggctggccgtggccgaggaggcgctggtagatcacgtggcagagcttacggctacccctagggatcttgtgctgcggagtttgcttgccaggaccgttgcatctggtggcagggaactcatagagaaggggcataccgcggctgaagcatcctatgctagggacgcctgcgccaaagccgtgtaccagaggctgttcgaatgggtcgttaacaggattaactctgtcatggagccccggggaagagacccacgccgggatggaaaggacactgtcattggcgttcttgacatatatggtttcgaggtgttccctgtgaatagttttgaacagttctgcattaactattgcaatgagaaactccagcagctttttatccaactcatactcaagcaggagcaagaagagtacgagagggaaggtatcacctggcagtctgtggagtacttcaataatgcaacaattgtcgacctggtagagcggccacaccggggcatattggcagtcttagacgaagcttgctcttcggccggcacgataaccgacaggatctttctgcagactttggacatgcatcacagacatcatctacactacacaagcagacagctgtgccctacagataagactatggaatttggacgggacttcagaataaaacattatgcaggggacgtgacgtacagcgtcgaaggattcatagacaaaaatcgcgatttcctattccaggatttcaagcgactgctttacaattctacagaccccactttaagagctatgtggccggatggtcaacaggatatcacagaggtgacaaagagaccgctcaccgccgggacactttttaaaaacagtatggtggccctcgtcgaaaatttagccagcaaggaacctttctatgtgaggtgcatcaaaccgaatgaagataaggtcgcagggaagttagatgagaaccactgtcgccatcaggttgcctacttaggcctcctggagaacgtcagagtccggcgcgctggctttgcgagtaggcagccctacagtaggtttctcctgagatacaagatgacctgcgagtatacttggcctaatcatctccttgggtctgacaaggcagctgttagcgccctgcttgagcagcacggacttcagggggacgtagcattcggccattccaaactgttcatccggagccccaggaccttagtaaccttggagcagagccgtgcacggctaatcccaatcatcgtgctactcctccaaaaggcttggcgcggtacgctggctcgttggagatgcagacggctgcgggctatctacacaatcatgcggtggtttcggaggcacaaggtgcgagctcacctggctgaattgcaacgaaggtttcaggccgccagacaaccgccgttgtacgggcgcgatctcgtgtggcccctccctcccgctgtcttgcagccatttcaggatacctgccatgccctgttctgtcggtggcgcgctcgccagctggtcaaaaacattcctccatccgatatgccgcaaatcaaggcaaaagtagccgcaatgggtgccttacaagggctgcgccaggattggggatgcagacgggcttgggctcgcgactacctgtctagcgccactgataacccgacggcctcatccctgtttgcccagaggctgaagaccctgcaggacaaggacggcttcggcgcagtgctattttcgagccacgtccgcaaagtgaaccgcttccacaagattcgaaatcgggccctcctccttacagatcagcatctttacaagctcgaccctgaccgccaatatcgggtgatgcgagcagtgccattagaggctgtgacaggactgtcagtaacttccggcggcgaccagctggtggtgctgcacgctcggggtcaagatgacctagtggtatgtcttcacagaagcagaccaccgctcgacaatagagttggggaactggtaggcgtcttagcggctcattgccagggggaggggcgaaccctggaggtgcgcgtgtctgattgtatccctctgagtcaccgcggcgtgaggcggcttatctcagtagaacctaggcccgaacagcccgagccagacttcaggtgtgcaaggggcagctttacgctactgtggcccagtaggtag

SEQ ID NO: 125399 - DNA, 4851 bp, synthetic construct
  misc_feature 1..4851: note = Description of Artificial Sequence: Synthetic coding sequence
  source 1..4851: mol_type = other DNA
atgttccccttaattggaaaaactatcatttttgataatttccctgatccttcagacacgtgggaaattaccgaaacgatcggaaaagggacttatggaaaagtatttaaggtgcttaacaaaaagaacgggcagaaagctgccgtgaagattctcgacccaattcacgacattgatgaggagattgaagctgagtacaacattctgaaggctttatccgatcacccaaacgtagtcagattctatggtatctatttcaaaaaggacaaggtgaacggcgataagctctggttggtgctggaactgtgtagtggcggatcagttactgacttagtcaaaggtttcttaaagcggggcgagcgtatgagtgaacccctcattgcttacatcctgcacgaagccctgatgggacttcagcacctgcacaacaacaaaactattcatagagacgttaaaggcaataacatccttttgactactgaagggggtgtgaaactggttgatttcggggtgtctgctcagctcacaagcacacggcacagaaggaacacctcagtggggaccccattctggatggccccagaagtcatcgcttgtgagcagcagctggacacaacttatgacgcgcggtgtgacacatggtctttaggcatcacagccatcgaactgggtgatggagatccaccacttgctgacctgcacccgatgagggccctgttcaaaatccccagaaatccccctccgaagctgaggcagcccgagctgtggtccgccgagttcaacgatttcataagcaaatgcctcacgaaagattacgagaagcgcccgaccgtcagtgagttgctgcagcataagtttattacgcagattgagggcaaagacgtcatgctgcagaaacagctgaccgaattcatcggaatccatcaatgtatggggggaacagaaaaagctcgccgagaacgcatacatacgaagaagggcaattttaaccgccctttgatttctaacctgaaggacgtggacgacttggcgacactagagattctcgatgaaaacaccgtttcagaacaactggaaaaatgttacagccgcgaccaaatctacgtctatgtgggagacattctgatcgcccttaatccattccaaagtctcggcctctactcaacgaaacattctaagctgtacatcggaagcaaacgaacagcatctccgccacacattttcgctatggcggacctgggctaccagagcatgatcacttacaattctgatcagtgcattgtgatttcaggagagtcaggagccgggaaaacagaaaacgctcatctgctggtacagcagctgaccgtgctgggcaaagcaaataaccgcacactgcaagagaaaatcctgcaagtgaataacttagtggaggcatttggaaacgcctgcacgattatcaacgacaactctagcaggtttggaaaatacctcgaaatgaagtttacttcttcgggtgctgttgtgggggctcagatatcagaatatctcctggagaaatctagggtcatacatcaagcaattggcgaaaaaaactttcatattttttattacatctatgcaggtctcgcggaaaaaaaaaagctcgctcactataaactcccagagaataagccaccccgctatctgcagaacgaccatctgcgtactgttcaggacataatgaacaactctttctataaaagccagtacgagctgattgagcagtgctttaaggtaatcggtttcaccatggagcagctgggatctatttatagcatactggccgcaattttaaatgttgggaacatcgaattttcaagtgtcgccactgagcaccaaatcgacaagtctcatatcagcaaccataccgcgctcgaaaattgcgcctcactgctgtgcataagggctgatgagctccaagaggccctcacctcacattgtgtcgttactcgaggcgagaccatcattaggcctaatacagttgagaaggccactgacgtcagggatgcgatggctaagacactctatggccgactcttctcgtggattgttaactgcattaacagcttgttgaaacatgattcatcgccatctgggaacggggacgagctgtccattggaatcctcgacatctttgggtttgagaacttcaaaaagaatagctttgagcagctgtgcattaacatcgcaaatgaacagattcagtattattacaaccagcatgtcttcgcttgggagcagaatgagtaccttaatgaagacgtggacgccagggttatcgaatacgaggacaactggcctctcctcgacatgtttctgcagaagccaatgggcttgttgtcactgttggacgaagagtctcgatttcccaaggcaaccgatcaaacactcgtcgaaaaatttgaagggaacttaaagagtcagtatttctggcgccctaaaaggatggagctctccttcgggattcatcattacgccgggaaggtgctctataatgcctcgggcttcctcgctaagaatcgggacactttaccaacagatatcgtgctgttgcttaggtcatcagataactccgttatacggcagctggtgaatcaccccctgaccaagaccggaaacctgccccacagcaagacaaagaatgtcataaactatcagatgcggacctctgagaagctgattaacctggccaaaggggacaccggcgaggccacacgccatgccagagagactactaatatgaaaacccagactgtggcatcctatttccgatattcactgatggacctactgagcaagatggttgtcggccaacctcattttgttcggtgcatcaagcccaatagtgaaagacaggcccgtaaatacgacaaagagaaggtgctcttgcagctgcgctacacagggatattagagactgcccgcattagacgcctgggtttctcacacaggatcctcttcgccaatttcattaagaggtactatctcttgtgttataagtcgtcggaggagccccgcatgtctccggacacttgcgctacgatattagagaaagcaggtttagataactgggcactcggcaagacaaaggtttttctcaagtactaccacgtggagcagctgaatctcatgagaaaagaagcaatagacaagctgatcctgattcaggcctgcgttcgggcgtttctttgctctaggaggtaccagaagatacaagaaaaaaggaaagagtctgccattataattcagagcgccgcacggggacatcttgtgcgaaaacagcgcaaggagattgtggacatgaagaacaccgctgttacaacaattcaaaccagtgatcaagagtttgattacaagaagaacttcgagaacaccagggagagcttcgtgaaaaaacaagccgagaacgccatcagcgcaaatgagcggtttatcagcgcaccaaataacaaggggtcagtgtcagtcgtcaaaacatccacattcaagcccgaagaagagacaacgaatgctgtcgaaagcaataatcgcgtctaccagaccccgaagaaaatgaacaatgtgtacgaagaagaagtaaagcaggagttctacttagtcggtccagaggtgtctcctaagcagaaatctgtgaaggatctagaagaaaattccaacctccgcaaggtagagaaggaggaggctatgattcagagctattaccagcgatacaccgaggaaaggaactgcgaggagtcaaaggccgcttacctggagagaaaggcaatcagcgagaggccttcctatcccgtgccctggctggcagagaatgaaacctctttcaagaagacactggaacccactctgtcccagcgatccatttaccagaatgcgaattctatggaaaaagagaagaagacatccgtggtgactcaacgagctccaatctgtagccaggaagagggtcggggtagactgaggcacgaaaccgttaaagagaggcaagtggaacctgtgactcaagcacaagaggaagaagataaggcagccgtctttattcagtctaagtaccgggggtacaagcggcgccagcagttgagaaaggataagatgtcatctttcaagcatcaacggattgtcacaacccccaccgaagttgccagaaatacgcataacctgtactcttacccaaccaagcacgaagaaattaataacataaaaaagaaggacaacaaggactcaaaagccacaagcgagagagaagcttgcggcctggccatatttagtaagcaaataagcaaactttctgaagagtatttcatcctccagaagaaactcaacgaaatgatacttagccagcagctgaagtctctgtacctcggtgtgagccatcataaaccgatcaacagaagagtctcttcccagcagtgccttagcggggtttgtaagggtgaagagccgaaaattttgaggcctccacgtagacctcgtaagccgaaaaccctgaacaaccccgaagattccacctactattatttgctgcataagagcattcaagaagaaaagcgcagacctagaaaggatagccaggggaaattactcgacctagaggacttttactacaaggaattcctgccaagtagatccggccctaaggaacacagcccctctttgagggagagaaggccgcaacaggaattacagaatcagtgcattaaggccaatgagcgttgctgggccgccgaaagccccgagaaagaggaagagcgggagccagccgcgaatccctacgatttccgtaggctattaaggaaaactagccaacggagacgactagtgcaacagtcatag

SEQ ID NO: 125400 - DNA, 594 bp, synthetic construct
  misc_feature 1..594: note = Description of Artificial Sequence: Synthetic coding sequence
  source 1..594: mol_type = other DNA
atgtttcccctcattggcaagactatcatctttgataactttcccgatccatccgacacatgggaaattaccgagaccatcggtaaaggaacttacggaaaggtgtttaaggtcctcaataagaagaacggccagaaggctgcggtcaagattctggacccaatccacgacatagatgaggagatcgaggctgagtacaatatactcaaagccttgagcgaccatcctaacgtggttcgcttttacggcatttactttaagaaggacaaagtgaacggagacaaactgtggctggtgcttgaactatgtagtggggggagtgtaactgatctcgtgaaaggtttcctcaaaagaggggaacgtatgagcgagcccctcatagcctatatccttcacgaagccctaatgggacttcagcatttacataacaacaaaactatccacagagacgtcaagggcaataatatcctgttgactaccgaaggaggagtcaaactcgttgattttggcgtttctgcccagttgacatctacacgccaccggaggaatacatcagttggcaccccattctggatggctcccgaggtgcgatag

SEQ ID NO: 125401 - DNA, 744 bp, synthetic construct
  misc_feature 1..744: note = Description of Artificial Sequence: Synthetic coding sequence
  source 1..744: mol_type = other DNA
atgttcccactcatcggcaagacaattatctttgacaacttcccagacccttcagacacgtgggagataactgagaccatcggaaaggggacctacggcaaagttttcaaggtgctgaacaaaaagaatgggcagaaggcagctgttaaaatcctggaccctattcatgacatagatgaggagatcgaggctgagtataacatcctgaaagcattgagtgaccaccctaacgttgtgagattctatggcatctacttcaaaaaagataaagtgaatggtgataagctttggttggtactggagctctgcagtggtgggagcgtgacagatcttgtcaagggtttcctgaagaggggcgaaaggatgtcagagcccctgatcgcttacattctgcatgaagcactgatgggcttacagcatctccataacaataaaaccatacacagagatgtgaaaggtaacaacatcctccttaccacagagggcggggtgaagctggttgactttggcgtttctgcccagctcactagcacccgtcaccgcagaaatacatctgtggggactcccttctggatggccccggaggtgatcgcctgtgagcagcaactggacaccacctacgatgcccggtgcgacacctggagtctcgggattaccgccattgagctcggcgatggagatcccccgctcgctgatctgcatccaatgagggcccttttcaaaatccccaggtccgatgattag

SEQ ID NO: 125402 - DNA, 1995 bp, synthetic construct
  misc_feature 1..1995: note = Description of Artificial Sequence: Synthetic coding sequence
  source 1..1995: mol_type = other DNA
atgttcccactcatcggcaaaaccatcatctttgacaattttcctgatccttcagacacatgggagataaccgaaaccattgggaagggcacatatggtaaggtcttcaaggttctcaacaaaaagaacggtcaaaaagcggctgtgaagatcctggatccgatacacgatatcgatgaggagatcgaagccgagtacaatatcctgaaagccctctccgatcaccctaacgtcgttagattttatggaatatacttcaaaaaagacaaagtgaacggcgacaagctttggcttgtcctggagctttgcagtggaggctcagtgaccgacctggtcaaaggattcctgaagagaggagaacgcatgtcggagcccttgatcgcttacatcctgcatgaagcccttatgggcctgcagcacctgcacaacaacaaaacaattcacagagacgttaaaggcaacaacatattgctcacaaccgaggggggtgtcaagcttgttgatttcggcgtgtccgcccagctcacatctacacgccaccggagaaatacttccgtcggcacaccattttggatggcacctgaggtgatcgcttgtgaacagcagttagataccacttatgatgctcgctgtgatacgtggtccctcgggataactgcaattgagctgggtgacggtgatcccccgctggctgaccttcaccctatgagagcactgttcaaaattccgcgcaatcctcctccaaagttgcggcagcccgaattatggtctgccgaatttaatgattttatcagcaaatgcctgaccaaggattacgagaagcgacccaccgtcagcgagctgctgcagcacaaatttatcactcagatagaaggtaaggatgtgatgctccagaagcagctgactgaattcatcgggattcaccagtgtatgggcggtacagagaaagcccggagagagcgcattcacactaagaaagggaattttaatcgccctttgatatctaatttgaaggacgtggatgatttggcaactttagagatcctggacgaaaacaccgtgagcgagcagcttgaaaagtgttacagccgggatcaaatttacgtgtatgttggggacatcctgatcgccctcaatcccttccagtccctcggcctttatagcactaaacatagtaagctatacatcggttccaagcggaccgcgtcaccacctcacatttttgccatggccgatctcgggtaccagtccatgatcacatataacagcgatcagtgcatcgtcatttccggcgaatcaggagctggcaagacagagaacgctcatctattggtccagcagcttacagtgcttgggaaggccaataataggacgcttcaggaaaagattctgcaggtgaacaacttagtcgaggcttttggtaatgcttgcactattatcaatgataattcttctagattcggcaaatacctggagatgaagttcaccagttctggcgccgtcgtcggtgctcaaatctcagagtaccttctcgagaagtcgagagttatccaccaagcaatcggcgagaagaacttccacattttctactacatctatgcagggttggccgagaagaagaagctagcgcactataaattaccagaaaataagccccctaggtacctccagaacgatcacctgaggactgtccaggacattatgaataacagtttctacaagagtcagtatgagctgatcgagcaatgtttcaaggtgatcgggttcacaatggaagtcctcgggggaggcgagccccgagagggggggggcgaacgtgccagcagccagcccctcaggctgcaggaggctcccgcccagaatctgccagcccctgccccacgcccagctgttctgacagtccagcgaggatcccacaggcgtagaaaagcgctggagccagcgggccagcagggaccaagccgccattcaggcgctggtactagtcgtcactag

SEQ ID NO: 125403 - DNA, 3834 bp, synthetic construct
  misc_feature 1..3834: note = Description of Artificial Sequence: Synthetic coding sequence
  source 1..3834: mol_type = other DNA
aaacacttatacggcttattccattacaatcctatgatgttgggtctggaatccctgcctgatcccaccgacacatgggagatcatcgagactattgggaaaggaacctacgggaaagtatataaggtgacgaacaagagagacggcagcctcgctgccgtgaagattctagacccagtgtctgatatggacgaagagatcgaagccgagtataacatcctgcagtttctcccgaatcatcccaacgttgtgaagttctatgggatgttttataaggctgaccattgtgtaggtggtcagctgtggcttgtactcgaactgtgcaatggagggtctgtaaccgagcttgtgaaggggctgctgcgctgcggacagcgactggacgaggcaatgatctcctacattttatacggtgctctcctgggactgcagcacctacacaacaataggattatccatcgtgacgtcaagggcaataacatcctgctgaccacagagggaggagtgaaactcgtcgatttcggagtgtctgcacaactgacatccacacgcttgcggagaaatacttccgtcgggactcccttttggatggccccggaagtcatcgcctgcgagcagcagtatgactcatcctatgatgccagatgtgatgtgtggtctcttggtatcaccgctattgagttgggtgatggtgacccgcctctcttcgatatgcatccagtcaaaaccctgttcaagattccccgcaatccaccccccacgctccttcacccggagaagtggtgtgaagagtttaatcactttatctcgcagtgcctaataaaagactttgaacgacggccatctgtgacacatcttctggatcaccccttcataaagggagtccatggcaaagtcctgttcctacagaagcaactggcaaaagtgctgcaggaccaaaaacaccagaaccctgtggcgaagactagacacgagaggatgcatacgcggaggccatatcacgtggaagacgctgagaaatactgtctcgaagacgacctggtgaatctagaggtattggacgaggataccattattcaccagcttcagaaaagatatgcagaccttttgatctacacatacgtgggcgacattctgatagcgctgaacccatttcagaatctttctatctatagtccccaattctcgcgcctctaccatggggtgaaaagggcctcgaatccacctcatatctttgctagtgccgacgcggcttaccagtgtatggtgactttgtctaaggaccagtgcattgtgattagcggcgaatcaggtagtggcaaaacggagtcagcccacttgatcgttcagcatcttacgttcctgggaaaggccaataatcagactctccgggaaaaaatcctgcaggtcaactcacttgtagaggccttcggcaatagctgtacagccattaacgataatagtagccgatttggcaagtatcttgagatgatgtttacccccaccggagtggttatgggggcaaggatctcagaatacttgctcgagaagtctcgggtgatcaagcaggccgcgcgagaaaagaacttccacatcttttattatatatatgctgggcttcatcaccaaaaaaagttgtcagatttccggctgccggaagagaaaccaccaaggtacatcgcagatgagaccggcagagtcatgcacgacatcactagtaaagagagctaccggagacaattcgaagccattcagcattgcttccgaatcatcggcttcacagacaaagaggtgcatagtgtctatagaattttggccggaattcttaatataggcaacattgagtttgctgccatcagcagccaacaccagacagataagagcgaggtccctaatgctgaagcgcttcaaaatgctgcaagtgttctctgcatatcccccgaggagctgcaagaagcccttacatctcactgtgtcgtaacccgtggcgaaaccatcatccgcgcaaatacagtggaccgagcggccgacgttagggacgccatgtccaaggctttatacggacggcttttctcttggatcgtgaaccgcatcaacacactcctgcaacccgatgagaatatttgctcagccggggggggaatgaatgtgggcattcttgatattttcggatttgaaaacttccaacgcaactctttcgaacagctttgcatcaatattgccaacgaacagattcaatactatttcaaccagcatgtgtttgctctggagcagatggagtaccaaaatgagggcatagatgcggtgcctgtcgaatatgaagataatcgtcctcttctggacatgttcctgcaaaaacctttgggactgttagcgctgttagatgaggagtcaaggttcccccaggctacggaccagacattagttgataagtttgaggacaatctgcgctgcaaatatttctggcggcctaagggagttgaattgtgcttcggaattcagcactatgccgggaaagtgctctacgacgcttccggcgtgcttgagaaaaaccgcgacacgctgccggccgatgtggttgtcgtgctacgcacttctgagaataagctcttacagcagctatttagcattcctttgactaaaacgggaaatctggcccagactcgcgctcggataacggtggctagcagcagtctgcctccgcacttttctgccggtaaggccaaagtggacacattagaggttatccggcatcctgaagagaccacgaacatgaagagacaaacggttgcttcttatttccgatactcactcatggacctgctcagcaaaatggtggtgggacaaccgcattttgtgcgctgcatcaagcccaatgacgacagggaggctcttcagttcagccgagagcgcgttttagcccagcttcggagtaccggcattctggaaacagtgtcaattaggaggcaaggttacagccaccggatcctgttcgaggaattcgtcaagaggtactattatttggctttcactgcccaccagactcccctcgcgagcaaggagtcttgtgttgccatcttggagaagagccggctggaccactgggtgctgggtaagaccaaagtctttctgaaatactatcatgtggagcagctgaatctgctgctgcgggaagtgatagggagagtcgtggtcctgcaggcttacaccaagggctggctgggggcccgacggtataagcgggtgcgcgaaaagcgcgagaaaggcgcgattgccattcaaagtgcctggagggggtatgacgcccgacgtaaatttaagaaaatcagtaataggcgtaacgagagtgccgcccacaaccaggctggagacacatcaaatcaatcttcagggccacattctccagtggcagcaggcactcgcggctcagcagaggttcaggactgcagcgaacccggcgaccacaaggttctccgcggaagcgtccacagacgctcacactctcaggcagagtctaacaacgggcggacccagacatcctctaactctcccgctgtcacagagaagaatggccattctcaggcgcagagtagcccaaaaggctgtgatattttcgcaggtcatgccaataaacactctgtctcaggcaccgacttgctgagtagccgcatttgccacccagcccccgaccagcaggggctctccctgtggggcgcgccccagaaacctgccttccctcattatggttgcaacttttatggatttcggaaatggtcatgtaccgaagcgagcaatacctctcctaccatgtccgccgctcagaacgccgagtag

SEQ ID NO: 125404 - DNA, 4053 bp, synthetic construct
  misc_feature 1..4053: note = Description of Artificial Sequence: Synthetic coding sequence
  source 1..4053: mol_type = other DNA
atgctccagtcagcactgctctctacacgtaaacacctatacggcttatttcactataaccctatgatgctgggacttgaatccctgcctgatccaacagacacatgggagatcatagagactatcggcaaaggaacgtacgggaaggtgtacaaagtcacaaacaagagggacggaagtctggccgccgtgaaaattttagaccccgtgagtgacatggacgaagaaatcgaagccgaatataatattctgcagtttctgcctaaccatccaaacgtggtgaagttttatggaatgttttacaaggcagaccattgtgtggggggccagctgtggctggtgttagagttatgcaatggagggtctgtcactgagctagtaaaaggactgctccgatgcggacagaggctggatgaagctatgattagctacatcttatatggcgccctgctggggctgcagcatttacataacaatcggatcattcatcgcgacgtgaagggcaataacattttactgacgactgaaggcggggtaaaactagtggatttcggcgtcagcgctcagctgaccagtacgcgcctgcgacgtaacacctcggtcggcacgcctttctggatggctccggaggttatcgcttgcgaacaacagtacgattcctcatatgacgcgaggtgcgacgtgtggagcctgggcatcaccgcgatcgagcttggagacggggatcctcccctgttcgatatgcaccccgtgaagactctgtttaagatccccaggaaccccccaccgacgctgctgcacccagagaaatggtgcgaggaattcaaccacttcatttctcagtgtctgattaaagactttgagcgccggccgtctgtcacgcatctcctggatcacccttttattaagggcgtgcatggtaaagttctgtttctgcagaagcaactggccaaggtgttgcaagaccagaagcaccagaatcctgttgcaaaaacccgtcatgagaggatgcatactcgacgtccttaccatgtggaagatgccgaaaagtactgcctcgaagacgacttggtgaacctggaggtattagatgaagacaccatcattcatcagcttcaaaagaggtacgctgatctacttatctatacgtacgtgggggacatcctcatcgcccttaacccatttcagaacctttccatttacagcccgcaattttcacgcctataccacggggtcaagcgcgcatcaaatccaccccacatatttgcctctgcagacgctgcctatcagtgcatggtgaccctaagtaaagatcagtgcattgtcataagcggagagagcggaagcggcaagaccgagtctgcccatctgattgtacagcatctgacatttctggggaaggctaacaaccagacactgcgagaaaagatactgcaagtgaatagcctcgtagaggcattcggcaactcctgtaccgcaataaatgacaactcgagcagattcgggaagtacctcgagatgatgtttacacccactggcgtagtcatgggtgccagaatcagtgagtatctcctggagaagtcacgcgtaatcaaacaggcggccagggagaaaaactttcacattttctattatatttacgctggccttcaccaccaaaagaagctctccgatttcaggctgcccgaagagaaacctcctagatacatcgccgacgaaaccgggcgagtgatgcatgatataacctcgaaagaatcatatcggcggcagtttgaggcaattcagcactgtttccggataatcggctttaccgataaagaagtccacagcgtttaccggatcctcgcaggtatcctgaacattggaaatattgagttcgcagccatttcttcacagcatcagacggacaaatccgaggtccccaacgcggaagccctgcagaatgcagcttccgtcctgtgcatcagtcccgaggagctacaagaggccctgacctcccactgtgtggtgacccgaggggagactataattcgggccaataccgtggaccgggccgcggacgtaagggatgccatgagtaaagcattgtatggacgcttattctcctggattgtgaataggattaatactctcctgcaaccagacgaaaacatctgctcagccggcggaggcatgaacgttggcatcctggacatatttggatttgaaaactttcagaggaactccttcgagcaactctgtatcaacattgctaatgaacagatccagtactacttcaatcaacacgtcttcgcactggagcaaatggagtaccagaacgaaggtatcgacgcagtaccagtcgagtacgaagacaaccgccctctcctcgatatgtttctgcagaaaccgctcggtctgctcgcactattagacgaggagtccaggtttcctcaggccaccgatcaaactttggtcgacaaatttgaggataatcttcgctgtaagtatttctggagacccaagggtgtcgagctctgttttgggatccagcattatgctggcaaggtgttgtatgacgctagcggcgtgctggagaagaaccgggacacactgccagccgatgtggtggttgtcctgaggacgtctgagaacaagctgcttcagcaactgttcagcattccactgaccaagaccggaaatctcgcacaaacacgtgccagaattacggtggctagctcttctctgccccctcacttttcggcaggcaaggcaaaagttgatacccttgaggtgattcgacaccctgaagagaccactaacatgaagagacagaccgttgcaagttattttcggtacagcctcatggatttgctgagcaaaatggtggttgggcaaccacattttgtccgatgcatcaaacccaacgatgacagggaggctctgcagttctcacgggaacgcgtgctggcacagctcaggtctacgggaattctggagacagtctcaatacggcggcagggctactctcaccggatcttgtttgaggaattcgtgaaaaggtattactacctggcgtttacggctcaccagaccccacttgcctctaaagaaagttgcgtggccattctggaaaagagcaggctcgaccactgggtactcggcaagactaaggtctttttaaagtactaccacgtagaacagctgaatttgttactgagggaagtcatcgggagggtggtcgtgctgcaggcgtacactaaaggttggttgggagccagacgctacaagagagtgcgggagaagagggagaagggcgcaatcgcgatccagtcagcttggcgcggttatgatgcgcgtcgaaaatttaaaaagattagtaaccggaggaacgaatccgccgcccacaaccaagccggggatacatcgaatcagagtagcggcccacactccccggtggctgcgggtacaagagggtctgctgaggtacaagactgtagtgagcctggggatcataaggtcctgagaggatcggttcatagacggtctcattcccaggccgagtcaaataacggaagaacccagacctcgtccaacagccccgctgtcactgagaagaatggtcacagccaggcacagagctcacctaaaggctgcgatatcttcgccggtcacgctaataagcatagcgtctcaggcacagatctgttaagttcacggatctgccaccccgcacctgaccagcagggcctttccctatggggtgccccccagaagccagggtccgagaacggcctggctcaaaaacacagaaccccccgcaggaggtgccagcaacccaagatgctgtcatctcctgaggacacaatgtattataaccagttaaacggtacgctagagtaccaggggtccaagaggaagccccgtaagctcggtcagatcaaggtattggacggcgaagatgagtattacaagtccctctcccctgttgactgtataccagaggagaacaattctgcacatccctcattttttagctcctcctccaaaggcgacagctttgcccagcactag

SEQ ID NO: 125405 - DNA, 4026 bp, synthetic construct
  misc_feature 1..4026: note = Description of Artificial Sequence: Synthetic coding sequence
  source 1..4026: mol_type = other DNA
atgaaacacctttacggcctattccattacaacccaatgatgttggggcttgaaagccttccagaccccactgatacctgggaaattattgagactattggtaaggggacatatgggaaggtgtacaaggtgaccaacaaaagagacgggagcctggccgctgtcaagatcctggatccagtgtcagacatggacgaagagatcgaggccgaatataacattcttcagttcctgccaaaccatccaaatgtcgtgaagttctatggcatgttttataaagccgaccactgtgtggggggtcagctatggttggtcctcgagctgtgcaatgggggtagtgtcacggaattagtgaaaggactcctgcggtgtgggcaacgcctggacgaagccatgatttcttacatactatatggagctctgctcggccttcagcatctccataataatcggatcatccatcgggatgtgaagggcaataacatcctcttgaccaccgaaggtggcgttaaactcgttgattttggagtgtcagcccagttaacttcaacccgactgagacggaacacaagcgtgggtacaccgttctggatggctccggaggttatcgcctgtgagcagcagtatgattcaagctacgacgcaaggtgtgatgtctggtctctgggtattactgcaatcgaactaggcgatggagatccccccttgttcgacatgcatccagtgaagacgttgttcaagatcccccggaatccacccccaacactgctgcatccggagaagtggtgcgaggaatttaatcactttatttcccagtgtttgatcaaagacttcgagaggaggccatcagtcacgcatctgctggaccacccctttattaagggagtgcacggaaaagtactgtttttgcaaaagcagttagccaaagtcctccaagaccagaaacatcagaacccggtggcgaaaacaagacatgaaagaatgcacactcggcggccttatcacgtcgaggatgcggagaagtactgtctcgaggacgatctggtgaacttggaagtgttagacgaggatacaattatccaccagctgcaaaaaaggtatgccgacttgcttatctacacctatgtcggtgatatcctgattgccttaaatccctttcagaatctgtctatttattcacctcagttctctcgcctgtatcatggcgtcaagcgggcttctaacccaccgcatatttttgcaagtgcagacgcagcctaccaatgcatggtgaccctgtcaaaagatcagtgcattgtcatatcaggtgaaagcggtagtggaaaaacagagagcgcccatttgatcgtgcagcatcttacatttttaggaaaggccaacaaccagactctcagggagaagatactgcaggtgaatagcctggtggaggccttcggtaactcttgtacggcgattaacgataattcctctaggtttgggaagtacctggagatgatgttcaccccaactggtgttgtgatgggcgctcgcatatcagaatacttactggagaaatccagggtgataaaacaggccgcaagggaaaaaaatttccatattttctactatatttatgctggactccatcatcagaagaaattgagcgacttcagactgccggaggaaaagccccccagatacatcgcagacgaaacaggccgcgtaatgcatgacataacaagcaaggagtcttatagacgtcagttcgaggccatacagcattgctttcggataataggattcacagataaggaggtccactctgtgtataggattctggcaggaattcttaatattgggaatatcgagtttgccgctatctcatctcagcatcaaactgataagtctgaagtgccaaatgctgaggccctccagaacgccgcatccgttctgtgcatttctcccgaagaactgcaggaggccctcaccagtcattgtgtagttactagaggagaaaccattattcgcgccaatactgtggatcgtgcagccgacgtgcgggatgccatgagtaaagctttgtacggccggcttttctcttggattgtgaaccggatcaacacgctcctgcagcctgatgagaacatttgttcagctggcggtggaatgaacgtggggatccttgatatttttggcttcgagaacttccagcgcaatagtttcgaacagctgtgcataaatatcgcgaatgagcagatccagtactactttaaccagcatgtctttgcactggaacagatggaatatcaaaacgagggtatcgacgcagtgcccgtcgaatacgaagacaacaggccactattggatatgttcttgcagaagcccctcggtctgctcgctttattagatgaggagagtaggtttccacaggctactgatcagacattagttgacaagttcgaggacaatctgcgatgcaagtatttctggcgccccaaaggggtcgagttgtgctttgggatccagcactatgctggcaaggtcttgtacgatgccagcggagttctggagaaaaaccgggacacgctccctgcggatgtagtggtggtacttcggacctccgagaacaagctcttacagcagttgttctcgattcctttgacgaagaccggaaacctggcgcagacccgggcgagaattaccgtggcgtcaagtagcttaccgcctcactttagcgctgggaaggcaaaggttgatactttggaagtgatacggcacccagaagaaacaactaacatgaagagacagacagtggcctcctatttcaggtattcgctcatggatctcctgagcaagatggtggtcggacagccgcatttcgtccgctgtataaaaccaaacgacgatcgcgaggccttacagttcagccgcgagagagtgctggcccagctcagatcaaccggcattttggagaccgtttccattagacggcaggggtattctcaccgaatcttgttcgaagaattcgtgaaacgctattactaccttgcttttacggcacatcagacaccgcttgcatccaaggagagctgtgtggcgattcttgagaaatcccggctagaccactgggtactgggaaaaaccaaagtctttcttaagtactatcacgttgaacagcttaatctgctcttgagggaggttatcggtcgagtggtggtactgcaagcttacaccaagggctggctgggtgcaagacgttataaacgggtgagagagaagcgggaaaaaggggcgatcgccatccagagcgcatggcggggttacgatgcacgaaggaaattcaagaaaatcagcaacaggaggaacgagagtgctgcccataaccaggccggtgatacctccaatcagtcttccggcccccacagcccagtggccgccggcaccagaggttcagctgaggttcaggattgcagtgaacccggagatcataaagtgctgcgcggctctgtccatcgccgatcccactcacaggccgagtcgaacaacggtaggacacagacctcatctaatagccccgctgtgacagaaaaaaatggtcatagtcaggctcaaagtagccccaaaggttgcgatatttttgcgggccacgctaataagcattccgtttccggaacggacttgttatcctctaggatttgccacccggcccccgatcaacaggggctgagtctttggggggcaccacagaaacctggctcggagaatgggttagcgcaaaagcaccgtaccccacggcggcggtgccagcaaccaaagatgctctcctcccctgaagatactatgtactacaatcaattaaatggaaccctggaataccaggggagcaaacggaagccccggaagctggggcagattaaggtgctcgatggagaggacgaatactataaatcactttcccctgtcgattgcattccggaagagaacaattctgcccatcctagcttctttagttcttcatcaaagggagatagcttcgcccagcactag

SEQ ID NO: 125406 - DNA, 3945 bp, synthetic construct
  misc_feature 1..3945: note = Description of Artificial Sequence: Synthetic coding sequence
  source 1..3945: mol_type = other DNA
atgaagcatctctacggtctatttcattacaatccgatgatgctggggcttgagtccttgcccgatcccaccgacacttgggagattatcgaaactatcgggaaagggacttatggcaaggtctataaggtgaccaacaagagggacgggagcctcgctgccgtgaaaatcctggaccctgtctctgatatggatgaggaaattgaggctgaatacaatatcttacaatttctgccaaaccaccctaacgtagtcaaattctatggaatgttttacaaagcagatcactgcgtcgggggacagttatggctggtactggagctgtgtaacggtggttctgtgacagagctcgtgaaaggcctgctccgctgcgggcagcgcctggacgaggccatgatcagctatattttgtacggcgctcttctcggattacagcatttgcacaacaacagaattatccaccgggacgtcaagggaaacaacattctgctgacaacagagggaggagtcaagctggtggatttcggagtgtctgcacagttgacatcaacacggctgaggcgaaatacatcagtgggtaccccattctggatggccccggaggtgattgcatgtgaacagcagtacgacagttcatacgatgcccggtgcgatgtatggagtctgggaattactgccattgagctcggagacggcgacccacccttattcgacatgcatccagtgaagactttgttcaagattccccggaaccctcctcctacactcctgcaccctgaaaaatggtgcgaggaatttaaccattttattagtcagtgtttgatcaaggattttgaacgacgaccatccgtcacccacctccttgaccatccttttatcaaaggcgtacatggtaaggtactgttcctgcaaaagcagcttgcgaaggtgcttcaagaccagaagcatcagaacccggtggcaaagaccaggcatgaacggatgcacaccagaaggccataccacgtggaagatgccgaaaagtactgcttagaggacgatctggtaaatttggaggtgttagatgaggacaccatcatacatcagttacagaagcgttacgcagacctgctaatttacacctacgtgggagacatcctgatagccctgaaccccttccagaacctctcaatctattcccctcaattcagcaggctgtaccatggggtgaagagggcctccaatcccccacacatattcgcgagtgcagatgccgcctaccagtgcatggttacgctctctaaggaccagtgtatcgttatctccggcgagtcaggttcagggaagaccgaatctgcgcatctaatcgttcagcacctcacctttctcggcaaagctaataaccagactctacgagagaagattctccaggttaactcgctcgtggaggccttcggcaactcctgtacagcaattaacgataactcttcccggtttggcaagtacctggaaatgatgttcactccaaccggcgtcgtcatgggagcacgaatcagcgaataccttctggagaagtccagggttataaagcaagctgcccgggaaaagaacttccacatcttctactacatttatgcaggcttgcatcaccagaagaaattgagcgactttcgtctgccggaggaaaagccgccacgttacattgccgacgaaaccggcagggtaatgcacgacatcacatccaaagaatcctatcggcgtcagttcgaggcaattcaacactgctttagaattatcggatttaccgacaaggaggtgcactcggtttatcgaatcctcgctggaatattaaacatagggaacattgaatttgccgccatctcaagccagcaccagacggacaagtccgaggtcccaaacgccgaggcccttcaaaacgctgcctcagtgctgtgtatctcgccggaggaactgcaggaggccctgactagtcattgtgtagtgactcggggggaaacaattattagagccaacacggtcgatagggctgcagacgtacgcgacgctatgagcaaagccctgtatgggcggctgttctcctggatcgtcaatcgtatcaataccctgttgcaaccagatgagaatatctgcagtgccggtggtggcatgaatgtgggcatcctcgacatctttgggttcgaaaactttcagaggaacagctttgagcagctgtgtatcaacatagcaaatgagcagatccagtattattttaatcagcacgtttttgcactggaacagatggagtatcagaacgaaggaattgacgcagtgcctgtcgaatatgaggacaaccgacctttgttggacatgttcttgcagaaaccacttggactgctggcattactagacgaggagagtcgcttcccacaggccaccgaccaaaccctggtggataaatttgaggataacttaagatgtaagtatttttggcgccccaaaggcgtggaactgtgcttcggaatccagcattatgcagggaaggttctgtacgatgccagcggcgttctcgagaaaaatcgggatacactgcccgcagacgtggtggtggtcttgagaacctccgagaataaactgctccagcagctgttctcaatccctcttaccaagacaggaaacctggcccagacccgtgcacgcatcacagttgcttcaagcagcctccccccccacttcagcgcagggaaagccaaggtggataccctcgaggtgattagacatccagaggaaacaaccaatatgaagagacaaacagtagctagttacttcaggtactctctcatggacctgctctcaaagatggtggttggacaacctcactttgtccgatgcatcaagcctaatgacgatcgggaggcgcttcaattttcaagagaacgggtgctggcacaattacgcagtacaggaatcttagagacagtgagtatccgacggcagggttactcccaccggatcctgtttgaagaattcgtcaaaagatactattatctggcgtttacagctcatcaaactccactcgccagcaaggagtcctgcgtggccattctagagaagtcaaggttggaccactgggtcctcggcaagacaaaggtgtttctgaaatattatcatgtggagcagctcaatctgctgttgcgtgaagtcataggccgggttgttgtgctgcaggcctacaccaaaggctggcttggagcacggcgctacaaacgggttcgcgagaaaagagagaagggtgccattgctatccagtctggcgataccagcaaccagtcaagcggacctcattcgcctgtggctgctggcacaagagggagcgctgaagtgcaggattgctccgagcctggagatcacaaagtgcttcggggatctgtgcaccggcggtcccacagccaggcggaaagcaataacggaagaacccagacctccagcaattcgccagccgtgactgagaaaaacgggcactcacaggcgcagagctctcccaaggggtgcgacattttcgccggacatgcaaataagcatagtgtatctggcaccgatctgctgtcctcgcggatttgccacccagcacctgatcagcagggtctaagtctgtggggggctccccaaaagcccggctccgagaatgggctggcccagaaacaccggacccccaggaggaggtgtcagcagcctaagatgctgagctcacccgaggatacgatgtactacaatcaacttaacggcaccctggagtatcagggtagtaagagaaaaccgagaaaactgggacagataaaagtattagacggtgaggatgaatactataagtccctgagccccgtggactgcataccggaggagaacaactcagcgcatccttccttcttctcatccagttccaagggcgatagctttgcacagcactag

SEQ ID NO: 125407 - DNA, 3390 bp, synthetic construct
  misc_feature 1..3390: note = Description of Artificial Sequence: Synthetic coding sequence
  source 1..3390: mol_type = other DNA
atgaacataaacgacggagggcgcagaagattcgaagacaacgagcataccctccggatctatccaggagccattagtgaaggcactatctattgccctatcccagcccggaaaaacagcactgctgcggaggtgatcgagagcctgatcaacaaattgcacctggacaaaaccaagtgttatgttctcgccgaagtgaaggagttcggtggagaggagtggatattgaatccaactgactgcccagttcagcgcatgatgctatggccgaggatggctctggaaaaccggctgagtggcgaagactacagattcttactgagagagaaaaatcttgacggctcgattcattacgggtccctccagtcctggctgagggtgactgaggaacgccgtagaatgatggagcgaggcttcctgccacagccccagcagaaggactttgacgacctgtgctcactgcctgacctgaatgaaaagactcttttggagaaccttcgaaaccggttcaaacatgagaaaatatacacgtatgtgggcagtatcctgattgtgataaacccgttcaaattccttccaatatataaccctaaatacgtgaagatgtacgacaatcaccagttagggaagctcgagccccacatctacgctgtggctgacgttgcctaccacgctatgctgcagcggaaaaagaatcagtgcattgtgatctccggagaaagcgggtcgggcaaaacccagagtaccaatttcctgatacaccatctcacggctctgtcacagaagggttttgctagcggcgtcgagcagatcatcttaggggctggtccggttctcgaagcttttggaaacgccaagactgcacataacaataattccagccgttttggtaagtttatccaggtgaactaccaggaaaccgggaccgtgctgggggcctacgtggaaaagtacctgctggagaagtccagactcgtctatcaggagcataatgaacgaaattaccatgtattctactatctcctagccggagcgtccgaggacgagcggagcgccttccatcttaagcaacctgaggagtaccactacttaaatcaggattgctttacagtggaaggagaggatctcagacacgatttcgaacggctccagctcgctatggagatggtgggcttcctccccaagacccgtagacagatttttagcttgctgtccgctattctgcacctggggaatatttgctataaaaaaaagacttacagggacgactctatcgatatctgcaatccggaggtcctgcctatagtctcagaactgctcgaggtgaaagaggaaatgctgtttgaggcccttgtgacacgaaagaccgtgaccgtgggcgaaaagctcatcctgccgtataaactggccgaagcagtgaccgtgcggaacagcatggcgaagtcactgtatagcgccctttttgactggatagtcttcagaataaaccacgctcttctgaacagtaaagatttagaacacaataccaagaccctttctatcggcgtcctcgacatcttcggctttgaggactatgaaaataatagttttgaacaattctgcattaattttgccaacgagaggttacaacactacttcaatcagcatatcttcaagcttgaacaagaagagtaccgaaccgaaggaatctcttggcataatattgattacatagataacacatgctgcattaatttgatttccaagaagcctacggggctactgcacctgcttgatgaggagtctaactttccacaggccaccaatcagacgctgcttgataaattcaaacatcaacacgaagataactcttacatcgagttccctgccgtgatggagcccgccttcattattaagcattatgctgggaaggtcaagtatggagtcaaagattttcgagaaaaaaacacagaccacatgcgccctgacatcgtcgccctcttgagatcctctaagaatgccttcattagcgggatgatcggaatagaccctgtggccgtgttcaggtgggcgatcctgcgggcattttttcgcgcaatggtcgcttttcgtgaagccggtaagcgcaacatccacaggaaaactggccatgatgatacagctccttgtgctatattgaagtctatggactctttttctttcctacagcaccccgtccatcaaaggtctttggaaatcctgcagagatgcaaagaggaaaagtactcgattactcgaaaaaatcctcgcacccccctctctgacttacaaggaatgaatgccctgaatgagaagaatcagcatgacacgtttgacatcgcctggaatggtcgcaccggcatcaggcagtcccgcctgtcttcaggaacaagcctccttgacaaagatggcatttttgccaactctacaagtagtaaattgcttgaacgggcacacgggatcttgactcgcaacaagaattttaaaagcaaacctgccttgcccaaacacttgctggaagtgaactccttaaaacacctgaccaggctgaccctacaggataggatcacgaaatctctcttacatctgcataaaaaaaagaaacccccatctatatcagctcaattccaggcttccttatctaagctaatggagactctgggccaggccgagccgtacttcgtgaagtgtattaggtccaatgccgagaagttacctctcagattcagcgatgtgttggtgctcaggcaacttcggtatacaggtatgttagaaaccgtgaggatcagacagtcgggctacagctccaaatacagttttcaggactttgtgtctcactttcatgtgttgctcccccgcaatataatccccagcaaatttaatatacaagactttttccggaaaatcaatttgaatcctgacaactatcaggtcggcaaaacaatggtattcctcaaagaacaggagcggcaacatttgcaggatttactccatcaggaggtcctgaggcggattattctgcttcaacgctggtttcgggttttgttatgcagacagcattttctgcaccttcgacaggcttctgtcatcatccagaggttttggagaaactatctgaaccaaaaacaggtgcgcgatgctgcagtgcagaaggatgccttcgtaatggccagtgctgcggcgcttcttcaggcttcttggagggcacaccttgaacgccaaaggtatcttgagctgcgggccgcggccatagtcatccagcaaaagtggagagactattacagacggcgtcacatggcagccatctgcatacaggccaggtggaaggcttatcgtgagtcaaaacgttaccaggaacagagaaagaattatccctttgctattaatatgtag

SEQ ID NO: 125408 - DNA, 7647 bp, synthetic construct
  misc_feature 1..7647: note = Description of Artificial Sequence: Synthetic coding sequence
  source 1..7647: mol_type = other DNA
atgaacatcaatgatggcggccgacgccggttcgaagataacgagcatacactgcgcatctaccctggggcgatttctgaggggacaatatactgtcccatccctgctcggaagaactcaacggcagcagaagtgattgaaagcctcatcaacaagctgcatttggacaagaccaaatgttacgtgctggctgaagttaaagagtttggaggtgaagagtggatactcaacccaacagattgcccggtccagcgcatgatgctgtggcctcgtatggcacttgaaaatcggctgagcggagaggattacagatttctgctgcgggaaaagaatcttgacggctctatccattatggcagcctgcagagctggttgcgggtgactgaagagcgcaggcggatgatggagcgtgggttcctgccacagccacagcagaaagacttcgatgatctgtgtagcttgcctgatttgaacgaaaaaaccctactggagaatctcaggaaccggttcaagcatgagaagatctatacgtatgtaggttccatcctcatcgtcataaatccattcaaattcttgcctatctacaaccccaaatatgtcaaaatgtatgataaccaccagttgggaaagctggagccccacatatatgcagtcgctgacgtcgcttatcacgctatgctgcagcggaagaaaaaccagtgcatcgtgatatctggtgagtcaggcagcggtaaaacgcaatccactaacttcctgatacaccacctcaccgcgctaagccagaaaggattcgcgagcggggtggaacagattatcctgggggctggacccgttctggaggcctttggcaatgctaaaactgcccataataataactcatctaggtttgggaagttcattcaggttaactaccaggagacaggaactgtgctgggggcttacgtggaaaagtatctgttggaaaagagtcgcctggtgtatcaggaacataatgaacggaactaccatgtattctattacttattagcaggcgccagcgaggatgagcggagtgctttccatctgaaacagcctgaggagtatcattatctaaaccagataacaaagaaaccactcagacagtcctgggacgactattgttacgactcggagccggactgctttacggttgagggagaggatttgcgccatgactttgaacgtctgcagctggccatggagatggtgggattcctcccaaagacacgaaggcagattttctccctcttgtccgccattttgcacctagggaatatctgttataaaaagaagacctacagagatgacagcattgatatttgtaatcccgaggtgctgcctatcgtgtccgagctcctggaggtgaaggaagagatgctgttcgaggccctcgttacaagaaagacagtcactgttggtgagaagctgatactaccctacaagctggcagaagcagtaacggtgagaaactctatggctaagagcctttactccgctttatttgattggatcgtgtttcgaattaatcatgctctgctgaactctaaagacttggaacacaataccaagacattgagtatcggagtgctcgacatcttcggttttgaagactatgagaacaacagctttgagcaattttgcataaattttgccaatgaaagattgcaacattacttcaaccagcatatcttcaagctcgaacaggaagaataccggaccgagggaatttcctggcacaatatagactatatcgataacacctgctgcatcaacctgatatccaaaaagcctactgggctgttgcacctgctagatgaagagtccaacttccctcaggcgactaaccagacactcctggacaagttcaaacaccagcacgaagataattcctacattgaattccccgctgttatggaacctgccttcataattaaacattatgccggcaaagtgaaatacggcgtaaaggactttagagagaagaatactgatcatatgcggcctgatatcgtagccctactgaggtcttcaaagaatgccttcatctccgggatgattggaatcgatccggtcgctgtctttcgttgggccattctccgcgcctttttcagggctatggtcgccttccgagaagcgggtaagcgcaacattcacaggaaaactggccacgatgacaccgccccttgcgccattttaaagtcaatggactcattctcctttcttcagcacccggtgcatcagcggtcattggaaatcctacagaggtgtaaggaagagaaatacagtataacccgcaaaaatcctaggaccccattgtcagacctgcaggggatgaatgccctgaacgagaaaaaccagcacgatactttcgatattgcgtggaacggacggacaggcatcagacagtcaagactaagcagcggcacctcgctgctggataaggatggcatcttcgccaactccacttcaagcaagctgctggaacgtgcccacggcatcctcacccggaacaagaattttaagtccaaaccagctcttccaaaacacctcctggaagtgaatagtctaaagcaccttacccgcctcactcttcaggatagaatcactaaatctctgctgcacctgcataaaaagaagaaacccccgagtatttcagcccagttccaagcatctctaagtaagttgatggagacgcttggccaagcagaaccatactttgttaaatgtatcaggagcaacgcggagaaactgccgctgaggttctcggatgtgcttgtcctcagacagctcaggtatactggcatgctggagacagttaggatccgccagagcggatactcctctaaatactcgttccaagattttgtgagtcatttccatgtattactgcctagaaatataattccttcgaagtttaatatacaggatttcttccgcaagataaacctcaatcccgataactaccaggttgggaagaccatggtgtttctgaaggagcaggaaagacaacatttgcaggacctgctgcatcaggaggtgctcagaaggatcatactgctccagagatggttccgcgtcctgttatgtaggcagcatttcttacacttgcgccaggcaagcgtgatcattcagcgattttggagaaactatctcaaccagaaacaggtgcgtgatgccgcagtccagaaagatgcctttgtgatggcatctgcagctgcactcctgcaggcaagttggcgggcccatctcgaaagacaaaggtacctcgaattgcgcgcagctgcaatcgtgatacagcaaaaatggcgagactactaccggcgaagacacatggcagcgatatgcatccaggccagatggaaagcataccgggaatccaaaaggtatcaggaacagcggaaaaagatcatactgctgcagtcaacatgtagagggttccgggctagacaacgcttcaaggcgctgaaggagcaacggctgagagagactaaaccagaggtaggcctggttaatattaaaggctatgggtccttagaaattcagggctctgaccctagcgggtgggaggactgctcgttcgataatcgcatcaaagccatcgaagaatgcaaatcagttattgaatcaaacaggatctcccgtgaatcttctgtcgactgcctgaaagaaagtcccaacaaacaacaggaaagagctcaatcgcaaagcggtgtcgacctgcaggaggacgtactcgtgcgagagcggcctaggagcctggaagacctccaccagaagaaggtcggacgcgccaaacgggaaagcagaaggatgagggaactcgagcaagccatcttttcactagagctcttaaaggttcgatccttaggagggatctccccgtctgaagacagacggtggagcacagagctggtgccggaaggtctgcagagccctaggggaactcccgactcagagtcaagtcaaggctcactcgagctcttgtcttatgaggaaagtcagaagtccaagctcgagtctgtgatctctgatgagggcgacctccagtttcctagcccaaaaatttcttcatcacccaagtttgatagtagggacaatgccctgtccgcaagtaacgaaactagttccgcagaacatcttaaggacggaaccatgaaggaaatggtcgtctgtagcagcgaatccataacctgcaaacctcagctgaaggactcctttatctctaatagtttaccaacgtttttttacattcctcagcaggaccctctcaagactaatagccagctcgatactagcatacagaggaacaaactgctggaaaacgaagatacggctggggaggctctcacgctggacataaatcgggaaaccaggaggtatcattgttctggtaaagatcaaatcgtaccctcactgaacaccgaaagttccaatcccgtcctcaaaaaactggaaaaattaaataccgaaaaggaagaacgacaaaaacaactgcagcagcagaatgagaaagaaatgatggagcaaatcaggcagcaaacagacattctcgagaaagagaggaaggcctttaagaccattgagaagccgcgaatcggtgagtgcttggtagctcctagctcctaccagagcaagcagagggtggaacgcccaagctcactgttatccttgaacacctccaacaagggagaacttaatgtcctgggaagcctctctcttaaggatgcggccctcgcccagaaagatagcagctccgcgcatctgccccctaaagacaggcccgtgaccgtgtttttcgagcgcaaaggctccccatgccagagttccacagttaaggagctaagtaaaactgatcgcatgggaacccaactgaatgtcgcctgtaaactgagcaataaccgaatctccaagcgcgagcacttccgcccaacccagtcatatagccataattctgacgacttaagcagagaaggcaatgctcgcccaatctttttcacaccgaaagataacatgtctatccccctggtgagtaaagaggcactcaactcaaaaaatcctcagcttcacaaggaagacgagcccgcgtggaagcctgtcaagctcgcaggacctgggcaacgggagacatctcaacgtttctcttctgtagatgaacaggcaaaactgcacaaaactatgtctcagggtgaaattacgaagcttgcagtgaggcagaaagccagcgattcagatatccgtccccagagggcaaagatgcgcttctgggccaaagggaagcagggcgagaagaaaactacacgggtcaaaccgaccacacaatcagaggtttctcctctctttgccggcacagacgttattcccgcacatcagttccccgacgaattggcggcctatcatcctaccccaccactgagtcccgagttacccggctcgtgcagaaaggaattcaaggaaaacaaagagcctagtcccaaggcgaaacggaaaagatctgttaaaataagtaatgtcgcactagactctatgcactggcagaatgactctgtccagatcatcgcctccgtatccgacttgaaatctatggatgagttcctgttgaaaaaagtcaatgacctggataacgaggattccaaaaaagatactcttgtggacgttgtgttcaaaaaagcactgaaggaattccgacaaaacatcttttccttttacagtagcgccctcgccatggacgacggcaagtctatccggtacaaggacctctatgcacttttcgaacagatccttgagaagactatgaggctcgaacagcgagattctctgggagagagtcccgttagggtctgggtgaataccttcaaggttttcctagatgagtatatgaacgagttcaagacttccgactgcaccgccactaaggtccccaagacagagcggaaaaagaggcgcaaaaaggagaccgacctggtagaagaacataacggccacattttcaaagctacacagtacagtatacccacatactgtgaatattgtagctccttgatttggatcatggaccgagcatctgtctgtaaactgtgcaagtacgcctgccacaagaagtgctgtctaaaaactaccgcgaagtgtagcaagaaatacgaccccgagctgagtagcaggcagttcggggtcgagctgagcagactgacaagcgaagaccgaacagtgcctttggtggtcgagaaactgatcaattatattgaaatgcatggcttgtatacagaaggcatctaccgcaaatccggctctaccaataaaattaaagagctcagacagggacttgacactgatgccgagtctgtgaacctagatgactacaacatacatgtcatagcgtctgtgttcaaacagtggctgcgcgatctccccaaccctttaatgactttcgagctttacgaggagttcttgcgggctatgggtttgcaagagcgaaaggagaccatccgcggagtttattccgtgatagaccagctgtcccggacacatctgaacaccttggagagattaatcttccatctggtgcggattgcactccaagaagacaccaacaggatgtctgctaatgcgctggccattgtatttgctccttgtatactgagatgtccagataccaccgacccactgcagagtgtacaggatattagcaagactactacctgcgtagaactgattgtggtggagcaaatgaacaagtacaaggcccggctgaaagatatatcctctcttgagttcgcagaaaacaaggctaaaacacggttgtcgctcatcagacgctccatggggaagggaagaatacgacgcgggaactacccgggcccttcatctccggtggtagtacggcttccgagcgtgagcgacgtcagcgaggagacgctaacgagtgaggctgcaatggaaacagatattaccgaacagcagcaagctgctatgcagcaggaggaaagagtcctcactgaacaaatcgaaaacctccagaaagaaaaggaagaactgaccttcgagatgctggtgctggaaccgcgcgcttctgatgacgagactctggagtccgaagcgtctatagggaccgctgacagctctgagaacctcaacatggagtcggaatatgctatcagtgaaaagtccgagcgcagtctggcactgtctagtttaaagacagctggtaagtctgagccctccagtaaactgaggaagcaactgaagaagcagcaggattctcttgacgtggtggacagctcggtcagctccctctgcctttcaaacactgccagttctcacggcaccaggaagcttttccagatttactccaagtctccgttctatagagcagcttcaggcaacgaggccctgggcatggaaggacccctcgggcagaccaagttccttgaggacaagccccaattcatcagtcggggaacgttcaatcctgaaaaaggaaaacaaaaactgaagaacgttaaaaacagtccgcagaagaccaaggagacgcccgaggggactgtgatgtctggcaggagaaagacagtggacccagattgcacctccaatcagcaactagccctgttcgggaacaatgaatttatggtgtag

SEQ ID NO: 125409 - DNA, 7860 bp, synthetic construct
  misc_feature 1..7860: note = Description of Artificial Sequence: Synthetic coding sequence
  source 1..7860: mol_type = other DNA
atgaatatcaatgacgggggccggagacggtttgaggataacgagcacactttgcggatttaccccggagccatctccgaagggacgatctattgtcccattccagcccgtaaaaacagcacagctgccgaggttattgagagcctcatcaataaactgcacttggacaagacaaagtgttacgtgctcgccgaagtcaaggagtttggcggggaggagtggatcctgaatcccacggactgccccgtccaacgtatgatgctgtggcctaggatggctctagagaatcgtctgtccggggaagactaccgattcctccttagggagaaaaatctggatggatccatccattatggctccctccagtcttggctccgtgtgaccgaggagcggcgcagaatgatggagcgtggtttcttaccccaacctcagcaaaaagattttgacgacctttgctcactgcccgacctgaacgagaagacgttgcttgagaacctcaggaatcggtttaagcatgagaagatctatacatacgtgggttcaatcctcatcgtcatcaacccttttaagtttttgcctatctataaccccaagtatgtcaagatgtatgacaatcaccaacttggaaagttagagccccacatttacgcagtcgcggatgtggcctaccatgccatgctgcagaggaagaaaaatcagtgtattgtgatctcaggagaatcaggcagcgggaagactcagtccacaaattttttaatccaccacctgaccgcactctctcaaaagggatttgcctccggtgtagagcagatcatattgggagctggccctgtgcttgaggcatttggcaatgcaaaaacagcccacaacaataattcctcgcgctttggcaagtttattcaagtgaattatcaagaaaccggaacagtccttggagcttatgtagagaaataccttctcgagaaatccaggctggtgtatcaagaacataatgagcgcaattatcacgtcttttattatctactggcaggtgcctctgaggacgaacggtctgccttccacctgaaacaaccggaagaatatcactatctgaaccagattacaaagaaacctttgcgccagagctgggatgattattgctatgactcagagccggattgtttcaccgtcgaaggtgaggacctgagacatgatttcgaaagactccagcttgcaatggaaatggtgggctttctacctaagactcgccgacaaattttttctctgttgtcagcaatcctacatctggggaacatttgttacaagaaaaaaacatatcgggacgattcaattgacatctgcaacccggaggtgcttccaatcgtttctgagctgctggaggtgaaagaagagatgctattcgaagcgctggtcactcgaaagaccgtaactgtgggggagaaactcatcttgccctacaaacttgcagaagctgtgacagtccgtaactcaatggccaaatcactctattcagccttattcgactggatcgtattccgcataaaccatgctttactcaatagcaaggatctggagcacaacaccaagaccctgtccatcggagtgctcgatatcttcggatttgaagattacgagaacaatagcttcgaacagttctgtattaatttcgctaacgaacgcctccagcactacttcaaccagcacattttcaagctcgagcaagaagaatataggacagaaggcatctcttggcataatattgactacatcgataacacttgttgcattaaccttatctctaaaaagccaactggccttcttcatcttctggatgaggaaagcaatttcccgcaggcgaccaaccagacccttttggataaattcaaacaccaacacgaggacaattcctatatcgaattccccgctgtgatggaaccagcctttatcatcaagcattacgcgggtaaggtgaaatacggagtcaaggatttccgagagaaaaacactgatcacatgcgacccgacatcgtagcactcctgcggtcgtctaagaacgcattcatttctgggatgattggtatagaccccgtcgccgttttcaggtgggctattctgagagcgttcttcagggccatggtggcattccgggaggcgggaaagcgcaacatccaccgaaagacggggcacgatgacacagcaccctgtgcaatcctaaagagcatggacagcttttcgtttctgcagcacccagttcaccagcgctcacttgaaattctccagcggtgcaaggaggaaaagtatagcattactaggaagaaccccaggactcctttgagcgacctgcaaggcatgaatgctttgaatgagaaaaatcagcatgatacgttcgacattgcgtggaacggcaggacaggtatacgccagagtcgcctctcgagcggaactagtctcctggacaaagatggtatctttgcgaatagtacctcttcgaaactactggagcgagctcatgggatcctgacgaggaataaaaactttaagagcaagcccgcgcttcccaagcatctgttagaggttaattctctgaaacatctgacacgccttaccctccaagataggattactaaaagccttttacatttgcacaaaaagaagaagcctccatccatatcagctcaattccaggccagcttgagcaagctaatggaaactttgggacaagcagaaccttacttcgtgaaatgcatacgttctaatgccgagaaactccccctcagatttagcgatgtcctcgttcttaggcagctacgatatactggaatgctcgagaccgtcagaattcggcagtccgggtattcttctaaatatagctttcaagacttcgtgagtcatttccacgtgctgctgccaaggaacattataccatctaaatttaacattcaggatttttttcgcaagattaacctgaaccctgacaactatcaagtcggcaaaaccatggtctttctcaaggagcaggagcgccaacacttgcaagacttacttcaccaggaagtgctccggcgcatcatcttgctgcagcgctggttccgggttttgttatgccgtcagcactttctccacctgaggcaggccagtgtgatcattcagaggttctggaggaactacctgaatcagaaacaggtgcgcgacgccgcagtccagaaggacgcatttgtaatggcttccgcggccgcactgctacaggcatcctggcgagcacacctcgagagacagagatacctcgaactgagggctgcggccatcgtcatccagcaaaagtggcgagactactatcgtcggcgccatatggccgctatttgcatccaggctcgctggaaggcatacagggagtcaaagcgctaccaggagcagaggaaaaaaataattctcttacagtccacatgtcgcggattcagggccagacaacgattcaaggccttgaaggaacagagactccgggaaacaaaaccagaggtggggctggtaaacatcaaggggtacggcagcctggagatccaaggaagtgacccttctggctgggaggactgctcatttgataatcgcataaaagccattgaggagtgtaaaagtgtcatcgaatccaatagaataagtagagaatcttccgtcgattgtctgaaggaatcacccaataaacaacaagagagggcccagtcacaaagcggcgtggacctccaagaggacgtgctggtgcgcgaacgacctaggtccctggaggatctccaccagaaaaaagtgggtagggctaagcgcgagtcaagaaggatgcgagagctggagcaggctatcttcagccttgagttactgaaggttaggtccttgggcgggatctcgccctctgaggaccgcagatggagtacagaactggtgccagaaggtctgcagtcaccacgcggaacccccgattccgaaagcagccagggttctttggagctgcttagctacgaggaatctcagaagtcaaagttggagtctgttatcagcgacgagggcgacctgcaatttccatctcccaaaatcagtagttcaccaaaattcgattcccgagataacgccctgtcagcttctaacgagaccagttccgccgagcatctcaaagatggcaccatgaaggagatggtggtatgctcctccgaatccattacatgtaagccgcagctgaaagactcctttataagcaatagtctacctacgttcttttacatacctcagcaggaccctttaaaaaccaacagtcaactggacaccagcatccaacggaacaagctcttagagaacgaggatactgcgggggaagccctcacactggatataaacagagagactcggcgatatcactgtagtggcaaggatcagatcgttccatcactcaacaccgaatcctctaatcctgtgttaaaaaaactggaaaagctgaacacagaaaaggaagaacgccagaagcagctgcagcaacagaatgaaaaggaaatgatggagcagatcaggcaacagacagatattctagagaaggaacgaaaggctttcaagaccatagagaaacctcgcattggagagtgcctggtcgcccctagctcataccagtcaaaacagcgcgtcgagcgcccctcatcgctgctcagtttaaataccagcaataagggtgagctcaatgtgctcgggagtctgtccctgaaagacgctgcactcgcccagaaagattcctcatccgcccaccttcccccaaaggataggccagtgacagtgttcttcgagcgcaagggttctccttgccagtcgagcacagtgaaggaacttagcaaaacagacagaatggggacacaactaaatgtggcttgcaagttgagcaataatagaatctctaagcgcgaacactttcgtccaactcagtcctactctcacaacagcgatgatctgtcgagggagggtaacgcacgacccatcttctttactccaaaggacaatatgagcattcccctcgtctcaaaagaggctctgaactccaaaaatcctcagctgcacaaggaagatgaacccgcttggaaaccagtgaagctggcgggtccaggtcaaagggaagtggcaagacccgcccataaaaagaaagcccgtatggcccggacaagatccgactttcttacacgcggcacctttgcagacggggaaggagacactgaggaagacgattacgatgacattatcgaacccctgctgagccttgatcaggctagccactgtgagttgggacccgctccaagtctgggtcaggcctcacattccgatagtgagatgacctctcaacgattttccagcgtggatgagcaggctaagttacacaagacaatgtcccagggagagatcactaaactggccgtacgccagaaggccagcgatagcgacatccggccccaacgggccaaaatgagattttgggcaaaaggtaagcagggggagaagaaaacaacccgcgttaagccgactacgcagtccgaagtgtcccccttatttgcgggaactgatgtgatccctgctcaccagttcccagatgaattagcggcatatcatcctacgcccccacttagtcctgaattgccaggttcatgtagaaaagagttcaaggagaataaggagccatcacccaaggccaaacggaagcggtcagtgaagatctccaatgtggctctggattctatgcactggcagaacgattcagtccaaattatagcatcagtgtctgacctcaagtcaatggatgagtttcttctgaaaaaagtgaacgacctggataacgaagattccaagaaggacaccttggtggacgtggtgttcaagaaagccctcaaggaatttcggcagaacatcttctctttctactcttctgctctggccatggacgatgggaagagcattcgctataaagacctgtatgctttgttcgagcaaattctggagaaaacaatgcgcctcgagcagcgggatagcttaggcgaatctcctgtccgagtgtgggttaacacatttaaagtcttcctcgacgagtatatgaatgagtttaagaccagtgattgcaccgcgacaaaggttcctaagaccgagaggaaaaaaagaagaaagaaggaaacagatcttgtcgaggagcacaatgggcacatcttcaaggcgacacagtattccatcccaacatattgcgaatactgtagttcactgatctggatcatggaccgcgcttccgtctgcaaactgtgcaagtacgcttgccataaaaagtgctgcctgaaaaccacggctaagtgttccaaaaagtacgacccagagctgtcatcacggcaattcggggtagaactgagcaggctcaccagcgaggacaggactgtcccactcgttgtggaaaaactgatcaattatattgaaatgcacggactctacactgaagggatttaccgtaagtcaggtagcactaacaaaatcaaagagctccgtcaaggtcttgataccgatgctgagtcagttaacctggacgactacaatatacacgtgatagcttctgttttcaagcagtggctcagggatctgccaaaccctctcatgacctttgagttatacgaagaatttctgagggctatgggactccaggaaagaaaagaaactatccgaggtgtgtattctgtgatagaccagctgagtagaactcacctcaacactctggaaaggttgatcttccacctggtgcgcatagctctgcaggaggatactaacaggatgagcgctaacgctcttgcgatcgtgtttgccccatgtattctgcggtgccccgatactacagatccactgcagagcgtgcaggatatctccaagactaccacttgtgtcgaattgatagtggttgagcagatgaacaaatataaagctaggctgaaagatatcagctcactggagtttgccgagaataaggctaagacaaggctgagtctgattcggcggagtatgggcaaagggcgtattcggcgaggaaactatccagggccgagcagcccagtcgtggtgcggctgccttccgtgtcagacgtgtcggaagagacattgacaagtgaggcagctatggaaaccgacattactgaacagcagcaggcagcgatgcaacaggaggagagggtgctgacagagcagatagaaaatctccagaaagaaaaggaagagttgaccttcgagatgttagtgctggagccccgggcctccgatgacgagacattggagtcagaggcgtcaattggaaccgcggactcttcggaaaacctgaacatggaatccgagtacgccatctccgagaaaagtgaaaggtcacttgctctgagctctctcaagacagcaggcaagagcgaaccatccagcaagcttcggaaacagctgaagaaacaacaggacagtctggatgttgtggattctagcgtgagttccctttgtctcagcaataccgctagtagccacggtactagaaaactgttccaaatctattctaagagtccattctatcgggccgctagtggtaacgaagctcttggcatggagggtcctttgggtcaaactaaatttttggaagacaagccacagttcatctcgcgcgggacctttaatcctgagaaggggaagcagaagctgaaaaacgtgaaaaattcaccccaaaagacaaaagaaacacccgaggggactgtcatgtctggcagacggaagactgtcgatcctgactgcacctctaatcaacagctcgcactattcggaaacaacgagtttatggtctag

SEQ ID NO: 125410 - DNA, 7590 bp, synthetic construct
  misc_feature 1..7590: note = Description of Artificial Sequence: Synthetic coding sequence
  source 1..7590: mol_type = other DNA
atgaatatcaatgacggtggacgccgcaggtttgaagataatgaacataccctcaggatttaccctggcgccatcagcgagggaaccatttactgtcccatccccgcccgcaagaattctacagcggcagaagtaattgaatccctcatcaacaagctccatctcgacaagactaagtgctacgtactcgccgaggtaaaagagttcggcggcgaagagtggattctcaatccaactgactgccccgtgcagcgaatgatgctgtggccccgaatggccctcgaaaacaggctgtcaggagaagattacagattcctgcttagagagaagaatttggacggctctatccattacgggagccttcaaagctggcttcgggtaaccgaagagcgacgtcggatgatggagagaggctttttaccccagccacagcagaaagactttgacgatctgtgctccctgccagatttaaacgagaaaaccttgcttgaaaatttaagaaaccgtttcaaacatgaaaaaatttacacgtacgtgggttccattttgattgtcattaatccttttaaattcctccccatttataatccaaagtatgtgaaaatgtatgacaaccaccagctcggtaaattggagcctcatatttatgctgtggcagacgtcgcctatcacgctatgctgcagcgcaaaaagaatcagtgcatcgttatatccggggagagcggttcgggaaagacacaatcaaccaacttcctgatccatcacttgactgccctgtctcaaaaggggttcgcttccggagttgagcagattatccttggagcaggccctgtgttggaagcctttggtaacgccaagactgctcataataataattccagccgcttcggtaagttcatccaggtgaactatcaagagacagggaccgtgctgggcgcttatgtcgaaaaatatctccttgagaaaagccgcttagtgtatcaagaacacaacgaaaggaactaccatgtcttctattatctcttggcaggagctagcgaggatgagcgaagcgcctttcatttaaaacagcccgaggagtaccactacctcaatcaagactgctttaccgttgagggtgaagacttgaggcacgactttgagagactccagctggccatggaaatggtgggctttttacctaaaacacgacgccagatcttcagcttgctgtcggccatcctccatcttggcaatatatgctacaaaaagaagacataccgagacgattctatcgacatatgtaaccctgaggtccttcctatcgtgtcggaattactcgaagtcaaggaggagatgctgtttgaagcgctggttactcgaaagactgttactgtcggcgaaaaattgatcctgccatacaagctcgccgaagctgtaacggttagaaactcaatggccaagtccctgtattcagcgctcttcgactggattgttttcaggatcaaccatgccctgctaaactctaaggatcttgaacacaacactaaaaccctgtccataggcgtgctggacatattcggttttgaagattacgaaaacaactctttcgagcagttctgtatcaatttcgccaacgagcggctgcagcattactttaatcaacacatttttaagcttgaacaggaagaatacaggacagagggcataagttggcataacattgactacatcgacaacacctgctgtataaacctgattagtaagaaacccacagggctattgcacctgctcgatgaggagtccaattttccccaagccacaaaccagacactattggataaatttaagcatcagcacgaagataactcgtacatcgagttccccgccgtgatggaacccgcctttatcataaagcactacgctgggaaagtgaagtacggtgttaaagattttcgagagaaaaacactgatcatatgcggcctgacattgtggccctcctgcgaagcagcaaaaacgcattcatctctggcatgattggtatcgaccccgtagctgtctttcgctgggccatcctgagggcttttttcagggccatggtggcttttcgggaggctgggaagcgcaatatccatcgaaaaaccggacatgatgataccgctccctgcgctattctcaagagcatggactctttcagtttcctgcagcatcctgttcaccagagaagcctcgagatacttcagagatgcaaggaggagaaatactctattacacggaaaaatcctcgcaccccgctgagtgacctgcagggtatgaacgccctgaatgagaaaaatcaacatgacacgtttgacatagcctggaatggccgtacgggaattcggcagtcacggctttccagcggcacctcactgctggacaaggacggtatcttcgccaattcgacatctagcaaactcctggagcgggcccacggcatcctcaccaggaataagaattttaagagtaagccggcgctcccaaaacacctgcttgaagttaactcactgaagcatcttacacggctgacactgcaggaccgaatcacaaaatcgctcctccatttgcataagaaaaaaaaaccgccttccatcagcgctcagttccaggcgtccctcagtaagctgatggagactctcgggcaggccgagccttactttgtgaagtgtattagatccaatgcggaaaagctgcccctgcggttctccgatgttttggtgctgagacaactccggtatactgggatgctcgagacggtccggatcaggcaatctgggtattcctctaaatactctttccaggacttcgtgagccattttcacgtattattgccccggaatataatcccctcaaaatttaacatccaggacttctttaggaaaatcaacctgaacccagataattatcaggtggggaaaactatggtatttcttaaggagcaggagcggcagcacctgcaggacctacttcaccaggaagttcttagacgcattattctgctacagaggtggttcagggtcctcctttgccgccagcattttctccatttgcgtcaggctagcgttatcatccagcgcttctggcgtaactatctcaaccaaaaacaggtccgcgatgctgccgtacagaaagatgcttttgtgatggcatccgcggccgcactgctccaagctagctggcgagcacacctggagaggcagcggtatctggagttgcgtgccgcagcaattgtcatacagcagaagtggagagattactatcgccgacgccacatggctgccatctgtattcaagcacgatggaaggcttatagggagtcaaagcggtaccaggaacaacgtaagaagatcattctactgcagtccacctgccgggggttcagagcaagacagaggtttaaagcattgaaggagcagcggctaagagaaaccaagcccgaggttggtctggtcaacatcaagggctatggatctctcgagattcaggggtctgatccatcagggtgggaagactgctcttttgacaacagaatcaaggcaatcgaagaatgtaaatctgtcattgagtcaaataggattagcagagagagttccgtcgactgcctgaaggagtcacctaataaacagcaagagagggcgcagagtcaatcaggcgtagacttacaggaggacgttcttgtcagagagaggccccgatctttggaagacctgcaccagaaaaaagtcggacgggcaaaaagggagtcccggagaatgagagaactcgagcaagctattttcagcctcgaactgctgaaggtccgaagtcttggtggcattagcccatccgaagaccgccgatggtcgactgaactggtgcccgagggtttgcagtctccccgaggaacaccggatagtgaatctagccagggatctttagaattactgagttatgaggagtcgcagaagtcgaaactggaaagcgtgatcagtgatgagggcgacttacaattcccgtcacctaaaatcagtagctcccccaagtttgattccagggataatgcattatcagccagcaacgaaactagtagcgccgagcacctcaaagatggcacaatgaaggagatggtcgtctgttcctccgaaagcatcacatgcaaaccccagctcaaagattcttttatctccaatagcctacctacattcttctatatcccccaacaggacccccttaaaactaactcacaactcgacacttccatccagcggaataagctcctggagaacgaggataccgccggcgaagccctaactctggacattaatcgggagacgcgacgttaccattgcagcggaaaggatcagattgtgccatcactgaacacagaatccagtaacccagtcctgaagaagctcgaaaaactcaacacagagaaggaggagaggcagaaacaactccagcagcagaatgaaaaagaaatgatggaacagattcgacagcagaccgacatactggaaaaagagaggaaggccttcaaaactattgagaaaccacgcatcggagagtgtcttgtcgcaccaagcagctatcaatccaagcagagggtggaaagacctagttccctgctttccctcaatacatccaacaaaggggagctaaatgtcttgggcagcctgtccctgaaagatgccgctctggctcaaaaggattctagcagcgctcacctgcccccaaaagacagaccagtgactgtgttctttgagcgaaagggttccccttgccaatctagcaccgttaaagagttgtccaagaccgacagaatgggtacccagctaaacgtggcctgtaagctgagtaacaatcgaatctccaagcgagagcactttagaccaacccaaagctattctcataattctgatgacctgtctcgagagggtaatgcgcgtcctattttttttacaccgaaggataacatgtctattcctttagtttccaaggaggccttgaactccaagaatccccagcttcataaagaggacgagcccgcttggaagccagtgaagctagccggcccgggacagagagagacttcacaaaggttcagttcagtcgatgaacaggcgaaacttcacaaaaccatgagtcagggagaaatcacaaaactggcagttcgacaaaaggcctccgactccgacatccggcctcagagggccaagatgcgcttttgggccaaaggaaaacagggggagaagaagacgacacgtgtaaagcccacaacacaatctgaggttagcccccttttcgccggtaccgatgtcattcctgcccaccagttcccagacgagctggcagcctaccacccaacccctcctctgtctccagaactacctggtagctgtagaaaagagtttaaggaaaataaggaacctagccccaaagccaagcggaaacgaagcgttaagatcagcaatgtggcccttgatagcatgcattggcagaatgattcagtgcagattatagcatctgtctctgacctcaagagtatggacgaattcctcctcaaaaaggtgaatgatctggacaatgaggatagcaagaaagataccctagtggatgttgtgttcaagaaagcactcaaggaattccgccagaatattttctccttctattcctccgcgctcgccatggatgacgggaaaagtattagatacaaggacctgtatgccctgttcgaacagatcttggaaaaaaccatgcgtttagagcagagagattccctcggtgaatcaccagtgcgggtatgggtcaatacctttaaggtttttctggatgaatatatgaatgagtttaaaacatctgattgcaccgcaaccaaagtgccaaaaacggagaggaaaaaaagacgcaaaaaggaaaccgatctcgtagaggagcacaatggacacatctttaaggccacccaatatagcatccctacatactgtgagtactgtagtagcttgatttggattatggaccgggctagtgtgtgcaaactctgcaagtatgcctgccacaagaagtgttgcctgaagactaccgccaaatgctctaaaaagtacgaccccgaacttagtagcaggcaatttggagttgaactaagcagactgacctcagaagatcgcaccgtgcccctcgtcgtggagaaactaatcaactacatcgagatgcatgggctttacaccgaggggatttataggaagtccgggagcactaacaaaatcaaggaactgcggcaaggtctagacaccgacgccgagtcggtgaatctcgacgactacaacattcacgtcatcgcgtctgtttttaagcaatggctgagagatctccccaaccctctgatgacctttgagttgtacgaggagttcctgcgggccatgggcctccaggaaagaaaagagaccatccgtggggtctacagcgtgatcgaccaactttccagaacgcacctgaacaccctggaaaggctaattttccacttggtgaggatcgcactgcaggaagacactaataggatgtcagctaatgctttagcaatcgtgtttgccccctgtatcctcaggtgccccgatactaccgacccccttcagtccgtgcaggatatctccaaaacaaccacttgtgttgagctcattgtggtagagcagatgaacaagtataaggcccgacttaaagacatttcaagcctagagttcgcagagaataaagccaaaactcggctgtcgctcatcagaagaagcatgggaaagggacgaatccgaagaggtaactatcctggaccttccagcccagtggtggtgcggctcccgtcggtcagtgatgtttcagaagaaacccttacctcagaggctgcaatggagacggacattactgagcagcagcaggcagccatgcagcaagaagagagagtccttactgagcaaatcgagaacctccaaaaggagaaggaggagctgaccttcgaaatgctcgtcctggagcctagggccagcgatgacgagactttagaaagtgaagcttccatcggaactgctgattccagtgaaaaccttaacatggaaagcgaatatgcgatttctgaaaagtccgagagatcgttggccttaagttctctgaaaaccgccgggaagtccgaaccgtcaagtaagctgagaaagcagctcaaaaaacagcaggatagtttggatgtagtcgatagcagcgtatcatctctctgcctgagtaacaccgcctcgagtcacgggacgcggaagttatttcaaatctattctaagtcacctttttaccgagcggcttctggtaacgaagctctcggcatggaagggcctctgggtcagactaagttcttggaggacaagcctcagttcatctcacgagggacgtttaaccccgagaagggtaagcagaagctcaagaatgtgaagaattcacctcagaaaactaaagaaacaccggagggaaccgtgatgtctggtcgccgcaaaactgtggatcctgattgcacctccaaccagcagctggctttgtttggaaacaatgagttcatggtgtag

SEQ ID NO: 125411 - DNA, 2190 bp, synthetic construct
  misc_feature 1..2190: note = Description of Artificial Sequence: Synthetic coding sequence
  source 1..2190: mol_type = other DNA
atgaatatcaacgacggcggacggcgtcgttttgaagacaacgaacatacactgcggatctatcctggagcaatcagtgagggaaccatttactgtccgatcccagcacgtaagaactctaccgctgccgaggttattgaaagtttaattaacaagctgcatctcgataaaaccaagtgctacgtcctggctgaagttaaagagttcggaggggaagaatggattttaaacccgaccgactgccccgtccagagaatgatgctatggcctcggatggcgcttgaaaaccgcctcagcggcgaggattatcgttttttactgcgagagaagaatctggacgggtcgattcactacgggagcctgcaatcttggctacgtgtgacggaagagcgacggaggatgatggaacgaggctttcttccccagccccaacaaaaggacttcgatgacctctgcagcctaccagatctcaacgaaaagacccttttggaaaatctcaggaacaggttcaagcatgaaaagatttacacttatgtcgggtccattctgatagttatcaaccctttcaagtttctcccaatttacaatccaaaatatgttaagatgtacgataatcaccaactgggcaaactagagccccatatttacgccgtagctgatgtggcataccatgcaatgctgcagcgcaaaaaaaaccagtgcatcgtgataagcggcgaatctggttcaggcaaaacccagtccacaaatttcttgattcaccatctcacggcactgtcccagaagggctttgcaagcggcgttgagcagatcatcctcggggccggtcctgtattggaggcttttggaaatgccaagaccgcacacaacaacaactcttcccgcttcgggaagtttatccaagttaattaccaagagacaggaaccgtgcttggcgcctacgtagaaaagtacctgttagaaaaaagccgcttagtgtatcaggaacataatgaaaggaattaccacgtcttctattacctgcttgcaggcgcctctgaagatgaacgctccgcattccacctaaagcaacctgaggagtaccattatctgaaccagatcacaaaaaagccattgcggcagagctgggatgactattgctacgactccgagccagattgctttaccgtggagggcgaagacctgaggcacgattttgaacggctgcaactcgctatggaaatggtgggcttccttccaaaaacgagacgccagattttctccctcctgtcagccatcttgcatctgggaaacatctgttataaaaagaaaacatatcgggacgattcaatcgacatctgtaatcctgaggtccttcccatagttagcgaactcttagaagtgaaggaggagatgctatttgaagcactcgttaccaggaaaacagtgacagttggtgagaagctgattctgccatataaattggctgaggccgtcacagtacggaatagtatggccaaatctctctacagcgctcttttcgattggattgtttttagaatcaaccacgccctgctaaactctaaggacctagaacataataccaagactctgtcaatcggggtcctggatatcttcgggttcgaagactatgaaaataatagctttgagcaattctgtattaatttcgccaatgagcggctccagcattattttaatcaacacatcttcaagttggagcaggaagagtacagaacggaggggatttcttggcacaacatcgactatattgacaacacctgttgcatcaatttaatctccaagaagccgactggattgttacatctgttagatgaagagtctaattttccccaagctacaaaccagactctgctggataagttcaaacatcagcacgaggacaacagctacatagagtttcctgctgtgatggagcctgcctttattatcaagcactatgcaggtaaagtgaaatacggggtgaaggattttagagagaagaataccgaccatatgaggcctgatatcgttgctcttttgcgcagctccaagaacgcctttatctctgggatgatcggaatcgaccctgtcgcagtatttcgatgggccattttgcgtgcattttttagagccatggtcgcattcagagaggcaggaaagcgcaacattcacaggaaaacaggcaagtag

SEQ ID NO: 125412 - DNA, 1509 bp, synthetic construct
  misc_feature 1..1509: note = Description of Artificial Sequence: Synthetic coding sequence
  source 1..1509: mol_type = other DNA
atggataaggctctgttatgctccgtttgtaaaatgacatgccataaaaagtgcgtgcacaaaattcaaagtcactgcagttacacctacggacggaagggagagccaggagtagagcctggccactttggagtgtgtgtcgactccctgacttctgacaaggcttcagttcccattgtcctcgaaaaactgctcgagcacgtggagatgcacgggctctacaccgagggtctgtaccgcaaatctggcgccgccaacaggactagagagctgcggcaggctctccagacggaccctgctgcagtgaagctcgaaaacttccctatccatgccatcacaggagtcctaaagcagtggctgcgagaacttccggaacccctgatgacgtttgctcagtacggggactttttacgagctgtggaattacctgagaaacaggagcagctcgcagctatctacgccgtcttagagcacttgccagaggccaatcacaactctcttgaacgactgattttccatctgctcgctgtcgctctcctcgaagatgtgaatcgcatgtcccccggcgcgctggccattatttttgccccatgtcttcttaggtgtcccgacaattctgatcccctcaccagcatgaaagacgtgctcaaaattacaacttgtgtagaaatgctgatcaaggagcagatgcgtaagtacaaggtcaaaatggaagagatttcccagctggaggctgccgagtcgattgcgtttcggagactgagcctcctgcgtcagaacgcaccgtggccactaaagctggggtttagctccccatacgagggcgtcctaaataaaagtccgaagaccagggacatccaggaagaagaactcgaggttttactggaggaggaggctgcaggaggcgatgaggatcgggaaaaagaaatcctgattgagcgaatccagtcaattaaagaggagaagcaagatataacttataggctgcccgagctcgacccaagaggcagtgatgaggagaatctggattctgagacaagcgctagtaccgagtcactcttagaagaaagggccggccggggggcctccgaaggccccccagcccccgctttaccctgccctggagccccaactccatcccctctgcccaccgtagccgcgccccctaggcgtcgccctagcagttttgtgactgtgcgcgtcaagacacccaggaggaccccaataatgcccactgctaacataaagctgcctccgggtctgccaagccatctgcctcgctgggctcctggagcccgagaggccgccgctcctgttcggcgtcgcgagcccccagcccggagacccgatcagatccactcagtctacattaccccaggcgcagaccttcctgtgcagggggcccttgagcctttagaagaagacggtcagccaccaggagccaagcgcagatacagcgatccgccaacctattgcctcccgccagcctctggacagacaaatgggtag

SEQ ID NO: 125413 - DNA, 6069 bp, synthetic construct
  misc_feature 1..6069: note = Description of Artificial Sequence: Synthetic coding sequence
  source 1..6069: mol_type = other DNA
atgtcagtcaaggaggctggctctagcgggagacgggaacaggctgcctatcacctccatatttatccacaactgtcaactactgagagccaggcgagttgcagggtcacagccaccaaagacagtactacatcggacgtgattaaggacgcgattgccagtttgcgcttagacgggacgaaatgttacgtcctggtggaagtaaaggagagcgggggcgaggaatgggtcctggatgcaaatgactcccccgttcacagggtcttactatggcccaggagagctcaagacgagcacccacaggaggatggctattacttcctcctccaggaacggaacgcagacggcacaattaagtacgtccacatgcagctagtagctcaggccacagccacccggaggctcgtggaacgagggcttctgcccaggcagcaagccgactttgacgatttgtgcaacctacctgaacttactgaaggaaacttgctgaaaaacctgaaacacagattcttacagcagaaaatctatacgtacgccggctcgatcttggtggccatcaatcctttcaaattcttgcctatatacaatccgaagtacgtgaagatgtacgaaaatcaacagctggggaaactggagccccatgtgtttgcgctcgccgatgtagcttactataccatgcttagaaaaagggtgaaccagtgtatcgtcattagcggcgaatccggttccggaaagacgcaatccaccaatttcttaatccattgtttgaccgcacttagtcaaaaaggatatgctagtggggtggaaaggactatccttggtgcaggcccggtattagaagcatttggaaacgccaaaacagctcataataataacagcagtcgttttggcaagtttatccaggtgtcttacctggagtctgggatcgttaggggcgctgtggtggaaaaatatttacttgagaagtcgaggttggtttctcaggagaaagacgaacggaactaccatgtcttttattacctgctgctcggggtttctgaagaggaacgacaagagtttcagcttaaacagccagaggactatttctatctcaaccagcataaccttaaaattgaagatggagaagacttgaaacacgattttgagaggttaaagcaggcaatggagatggtaggcttcctgcctgccaccaaaaaacagatctttgccgtactgtcagccattctgtacttaggaaatgttacctacaaaaagagagctactggaagggaggagggattagaggttggcccaccagaggtgctggacacattgagtcagcttctcaaggttaaacgcgaaatccttgtggaggtgctcaccaaacgaaagaccgtcactgtgaatgataagctcatccttccttacagcctgagtgaggcaatcaccgctagagactcgatggccaagagtctctatagtgctctgtttgattggattgtgctcagaataaaccacgctctgcttaacaaaaaggatgttgaggaagcggtgtcttgtcttagtatcggagttctggacatattcgggttcgaagactttgagcggaattcctttgagcagttttgcatcaactacgcaaatgagcagctccagtattacttcaaccaacatatctttaaactggagcaggaagagtaccagggagagggcatcacctggcacaacatcgggtatacggataacgtaggctgtattcatctgatatctaaaaaacctacaggcctgttctatttgcttgacgaagagagtaatttcccgcacgcgacgtcgcagactctcctggctaagttcaaacagcagcatgaagataataaatacttcctcggaactccagtaatggaacctgcattcatcatccagcacttcgctggaaaagtgaagtaccagattaaagactttcgagagaaaaacatggactacatgcgaccggacatcgtggcactattaaggggatcggactcttcctacgtgagggagctgatcggaatggatcctgtggccgtttttcgatgggctgttctgagggcagccatccgcgctatggccgtgctgagggaggcgggcaggctgcgggctgagagggcggagaaagccgccggcatgtctagtcccggagctcaatctcacccagaagaactcccccgcggagcctccacaccctctgaaaagctttaccgagatctgcacaatcagatgattaaaagcatcaaggggctgccctggcagggggaggacccccgatcccttctgcagtccctgtcaagattacagaagcctcgcgcctttattctcaaatcaaaaggcatcaagcagaaacagataatcccgaagaatcttcttgatagtaagagtctcaagttaattatctccatgactctgcatgatagaaccacaaagtctttactgcacctccacaaaaagaagaaacctcccagtatcagcgctcagttccagaccagccttaacaaactgttagaggccctcggtaaagctgagccatttttcattagatgtattcgcagcaatgccgaaaagaaagagctgtgtttcgatgacgaacttgttctccaacagttgcgctacaccgggatgttggagacagtcagaattaggcggtctggatacagtgcgaagtatacctttcaggactttacagagcaattccaggttttgctgccaaaagacgcccagccctgtagagaagtgattagtacactcctggaaaaaatgaagatagacaagaggaattaccagattggcaaaaccaaagtgttccttaaagagaccgagaggcaggcacttcaagagactttgcaccgggaagtcgtacggaaaattcttctgctgcagtcttggttccgaatggtcctggagcggaggcactttttacagatgaaaagggcggccgtgacaattcaggcgtgttggcggagctatagagtgcgacgtgcgctggagagaacccaagctgcggtatacctgcaggctagctggcgtggatattggcagaggaaactctacaggcaccaaaagcagagcatcattcggttgcaatccctttgcaggggacacttgcagaggaaatctttctcccagatgataagcgagaagcagaaggccgaagagaaggagagagaggcgctcgaagcagctcgtgctggtgcagaggaaggggggcagggtcaggccgctggaggtcaacaggttgccgaacaggggccagaacctgcagaggacggcgggcacttggcatccgaacccgaggtacagccgagcgacaggtctcccctcgagcatagctccccggagaaggaagctccaagccccgagaaaactctgccaccacagaagactgtagcagctgagagtcatgaaaaagttccatcaagtagggaaaagagggaatcccggagacaacgcgggctggagcatgtgaaattccagaacaaacacattcaatcctgtaaagaggaaagcgctctgagggaaccttcccgcagagtaacacaggagcagggagtgagtttactcgaagacaaaaaagagtccagggaggacgaaactctcctggtggtcgaaactgaggctgaaaatacttctcagaagcaacctaccgaacaaccccaggccatggcagtcggcaaagtgagtgaagaaaccgaaaagaccctcccaagcggctcccccaggcccggacagctcgagaggccaacctcattggccctggattcacgcgtcagcccacccgccccaggcagtgcacccgagactcctgaagataagtctaaaccttgtgggtcccccagagtgcaggaaaagccagactcgccagggggctccacccaaattcagaggtatctagacgcagaacggctggcctctgccgtggagctgtggaggggcaaaaaactggtggccgctgcgtctccgagcgctatgctgagtcagtccctggatttgtcagacagacaccgtgcaaccggcgctgccttgacccccacagaggagagacggaccagcttttcgacttcggatgtttccaaattgctgccgagcttggctaaagcccagcccgctgcggagaccactgacggagaacggtctgctaagaaacccgctgtgcagaaaaaaaagccaggcgatgccagctctctcccagacgctggattgtcacctgggagccaggttgatagtaaatcaactttcaagcgcctcttcctgcacaagacaaaagataagaagtactccctcgagggggcagaggaacttgaaaatgccgtgtccggccacgtcgtcctggaggccacaacaatgaaaaagggtctcgaagcccccagtggacagcagcatcgccacgccgccggagagaaaagaacaaaggagccgggggggaagggaaaaaagaatcggaatgtgaagatcggtaaaattacagtgtccgagaaatggcgggaatcagttttcaggcagataaccaatgcaaacgagctgaagtatttggacgagtttctcctaaataaaattaatgatctgagatctcagaagacacccattgaaagcttgttcatcgaggcgactgagaaatttaggagcaacatcaagacgatgtacagtgttcctaatgggaaaatccacgtcggatacaaagatctaatggagaactaccagattgtggttagcaatctggctactgagcgaggccaaaaagatactaaccttgtgctaaatctgtttcaatctctcctggatgaattcacgcggggatacacaaagaacgactttgagcctgtgaagcagagcaaagcacaaaaaaagaaaaggaaacaagaaagggcggtccaggaacacaatgggcatgtgtttgcctcataccaagtaagcataccacaatcttgcgaacagtgcctgagctatatctggctgatggacaaggctttgctctgcagcgtctgcaaaatgacgtgccacaaaaaatgcgtgcataagattcagtctcattgttcttatacttatgggcggaaaggtgagcctggggtggagcccgggcactttggggtctgcgtggacagcttgacttcagataaagccagtgtaccaattgtgctcgagaaactactagaacatgtggagatgcacggattatacaccgaaggtctgtataggaagagcggcgcagcaaaccgcactcgggaactcagacaggctttgcagaccgatccagccgcggtcaagctggaaaatttcccaatccacgcgattaccggagttttgaagcagtggttacgcgagctgcccgagccgttaatgactttcgctcagtacggtgatttcctgagggctgtggaactcccagaaaagcaagaacagctggcggctatttacgccgtgctggagcatctaccagaggccaatcacaactcgcttgagcggctcattttccacttggtaaaagtcgccctgttagaagacgttaacagaatgtctcctggcgctcttgccatcatcttcgcaccgtgtctcctgcgttgtccagataatagtgacccactgacttcgatgaaagatgtgctgaaaataaccacctgtgtggagatgcttataaaggaacaaatgcgaaagtacaaggtcaaaatggaagaaatcagccaactcgaagccgctgagagtatcgcgttccggcgactgtcgctattgcggcaaaacgcaccatggcccctgaagttgggattttccagcccatacgagggcgtgttaaacaagtccccaaagaccagggacatccaggaagaagagctggaagttctactggaagaggaggccgctggtggtgatgaagatcgcgaaaaagagatcctcatcgagcgcatccagtccatcaaagaagagaaagaggacatcacctacaggttgccagagcttgaccctagaggctcagatgaggagaacctggactccgagacctccgccagcacagaaagcctgttggaggaacgagcaggcagaggagcttcagaagggcagtactag

SEQ ID NO: 125414 - DNA, 6069 bp, synthetic construct
  misc_feature 1..6069: note = Description of Artificial Sequence: Synthetic coding sequence
  source 1..6069: mol_type = other DNA
atgagcgtcaaggaggctggaagcagcggccggagagaacaggcagcttatcacctccatatatatcctcaactttccacaacagaaagtcaggcaagctgcagggtgaccgccactaaagattctacgacaagtgatgttataaaggacgctatcgcttctctgagactggatgggaccaaatgttatgtcttggtggaagtcaaagagtccgggggcgaagaatgggtcctggacgcaaacgattcacctgttcaccgggttctcctgtggccgaggcgtgctcaggacgaacatccacaagaggatggttactatttcctgctacaggaacgaaatgctgacggaactatcaagtatgtgcacatgcagctggtcgcccaagcaaccgccactcgtcgcctggttgaaaggggtctgctacccaggcaacaggctgatttcgacgacctgtgcaatctgcctgaactgaccgagggcaatctgctgaaaaatctgaagcaccggtttctgcagcagaagatctatacctatgcagggagcattctcgtcgccattaaccccttcaaattcctaccaatatacaaccctaagtatgttaaaatgtacgaaaatcagcagctgggtaagctggagccacacgtgtttgccttggcggatgtggcctattatactatgcttagaaagagggtcaatcaatgcatcgttatatccggggagtctggcagtgggaagacacagagtacaaactttctgatacattgtctgacagccctgtcgcagaaggggtatgcaagtggtgtagagcgaacaatcctgggggccggccccgtgctagaggccttcggaaacgcgaagaccgcacacaacaacaactcttctcgatttggcaagttcatccaggtgagttacctggagagcggcatagtgagaggcgcggtggttgagaagtatctgctggaaaaatccagattagtttctcaggagaaggatgaaaggaattaccacgtcttttattatctcctgctgggggtttccgaagaggagcgccaggaatttcagctcaaacagccagaagactatttctatctcaatcagcacaacttgaagattgaagacggcgaagaccttaaacacgactttgagcgattgaaacaggctatggaaatggtggggttcctgcctgccactaagaaacagatcttcgcggtgttgtccgcaattctctacctgggaaatgtaacgtacaagaaacgtgctacagggcgggaggaaggactggaggtcggacctcctgaagtgctggacaccctctcccagttgctcaaggtcaagagagaaatcttggtggaggtgttaacaaagagaaagaccgttacagtgaatgacaaactaatactgccgtacagcctttccgaagccataacggcccgagactccatggccaagagtctgtatagcgcactctttgactggatcgtgctgcggatcaaccacgctctactcaataaaaaggatgtggaagaggccgtaagctgcttaagtatcggggtgttggacatttttggattcgaggatttcgagagaaacagctttgaacagttctgcatcaactatgccaatgagcaactccagtattactttaaccagcatatctttaagctcgagcaggaggagtatcagggcgagggtattacatggcataacatcggctacacggataatgtgggatgtatccacttgatctctaagaagcccaccggactgttttacctcctggacgaagagtcaaacttcccccacgcaacctcccaaacccttcttgccaagttcaagcaacaacacgaggataacaagtacttcctggggacacccgtgatggaacctgcctttattatccagcacttcgccggtaaagtgaaatatcagatcaaggactttagagaaaagaatatggactacatgcgccccgacattgtggctctgcttcgcgggagtgactcctcctacgtaagggagcttataggtatggaccccgtcgcagtatttagatgggccgtgctcagagctgctattcgagccatggctgtgcttagagaggctggcagattaagggcagaacgagccgagaaagcagccggcatgtcctcacccggggcccaatctcacccagaagagctgccgagaggggcctcaacaccaagcgagaagttatacagagacttgcataaccaaatgataaagtccataaagggcttaccttggcaaggtgaggacccgcggtccctactacaatccctttcccggcttcagaagcctcgagcgtttattctcaaatccaaaggcattaaacagaagcagatcatccccaagaatcttttagattcgaagtcccttaagctgatcatctcaatgacacttcacgatcgtaccactaagtctctgctccatctgcacaaaaaaaagaagccaccgagtattagtgctcaattccagaccagcctgaataagcttctcgaagctcttggaaaggcagagccgttcttcatcagatgtattcgctccaacgccgagaaaaaagagctgtgcttcgacgatgagctggtgcttcagcaactgcgatacactggtatgttggagacagtgcgcattagacgcagcggctattcggcgaaatatactttccaagactttaccgaacagtttcaggtactgcttccgaaagatgcccagccttgccgggaggtcatttctactctgttggagaagatgaagatcgacaagcggaattaccagattgggaagactaaggtgttccttaaggagacggagaggcaagctctccaagaaaccctccatcgcgaggtcgttcgtaagatactgctgctgcagtcttggttccgtatggtcctcgagcgaagacacttcctgcaaatgaaaagagcagccgtgacaatccaggcgtgctggcggagctatcgggtcagacgagctctggagaggacccaggctgctgtgtaccttcaggcttcgtggagaggctactggcagaggaagctgtaccgccaccagaaacagtcaataattcgtctccagagtctttgccgggggcacctgcaacgcaagtcgttcagtcagatgatctctgagaagcagaaggctgaggagaaagaacgcgaagccctcgaggccgcccgcgccggggcggaagaggggggccagggccaggctgccggcggccagcaggtcgctgagcagggcccggaaccagcggaagatgggggacacctcgccagtgaaccggaggttcaaccctccgacaggagcccactcgaacattcctctcccgaaaaagaggcacctagcccggaaaagacacttccacctcagaaaacggtggccgctgaaagtcatgagaaggtgccctcctccagggaaaaaagggaatccaggcgccagcgggggctggaacacgtcaaatttcagaacaagcacattcagagctgtaaggaggagtccgctttgagagagccctcaaggcgagttacccaggagcagggcgtcagcctgctggaagataaaaaagagtcccgggaagatgagaccctgctggtggtcgaaaccgaggcagaaaacaccagtcagaagcagccaacagaacaaccccaggccatggctgtgggtaaggtgtcggaagagactgagaagacactgccatctggcagtccccgcccaggccaactggaacggccgacctcactcgccctcgacagccgagtgtcacctccagctccaggctcggctccagagacccccgaggacaaaagcaaaccctgcgggtcccctagggtccaggaaaagcccgacagtcccggcggctcaacccaaattcagagatacctggacgccgagcggctggcctccgctgttgaactttggagggggaagaaactggtagctgcagcaagcccgtcagcaatgctcagtcaaagcctggatctgtcagatagacatcgagccactggagctgccctgacacccacggaagaaaggcggacgagtttctccactagtgacgtttccaagctgctcccctccttagcaaaagcccagcccgcggccgagaccacagacggagagcggtcagccaagaaaccagccgttcagaagaaaaaaccgggtgatgccagctccctgccggatgccgggctgtcccctggatcacaggttgatagcaagagcaccttcaaaaggctcttcttacataaaaccaaggacaaaaagtactccctggaaggggcagaggaactggaaaacgctgtcagcggtcacgtggtcctggaggctactacgatgaagaaagggctggaggctccctccggccagcaacacaggcatgctgcaggcgaaaagcggacgaaagaacctggtggcaagggtaagaagaacagaaacgttaaaattggaaaaattaccgtgagcgagaaatggcgtgaatcagtctttcgacagattaccaacgcaaatgagctcaagtatttggacgagttcctgctcaataagattaatgatcttcgatcacagaagacgcccatcgagagtttattcatcgaggccacagagaaatttaggtccaatataaaaaccatgtattcggtgcccaatggcaagatccatgtcgggtacaaggatctgatggagaattaccagattgtggttagcaacctcgcaaccgagcggggccagaaggatacaaacctcgtgctaaatctttttcagtctctgctagatgagttcactcgggggtatactaagaatgattttgaaccggtgaagcaatctaaagcccaaaagaagaagcgtaagcaggaaagagcagtgcaggagcataatggacacgtgtttgctagctatcaggtgtctattccccagtcatgcgagcagtgtctcagctacatctggttaatggacaaagccctgttatgttccgtttgcaagatgacatgtcacaaaaagtgcgtccacaaaattcagtcccactgttcatatacttatggcagaaaaggggaaccaggcgtggaaccagggcacttcggtgtgtgtgtggattccctcacatcagataaggcctctgtacccatcgtgctggagaaactgctcgagcacgtagaaatgcatggtctgtacaccgaaggcctttaccgcaaatctggtgccgcaaatagaacaagagagctgaggcaggccctgcagaccgatccggcggccgtgaaactggagaactttcccattcacgccataacaggagttctgaaacagtggctcagagagctgcctgaaccccttatgacattcgcccagtatggggactttctgcgcgcggtcgagctgccggagaagcaggagcagctggcagccatctacgcagtcctggagcatttgcctgaggccaatcacaatagcctcgagagactcatctttcaccttgtgaaggtcgccctactggaggacgtcaataggatgtcacccggggctttggcgatcatttttgcgccatgcctgctacgatgcccagacaactcagatcctctgacctccatgaaggatgtcctgaagatcacaacctgtgtggagatgctcataaaagagcagatgcgtaaatacaaggttaaaatggaagagatcagccagctggaggccgcagagtcaattgcatttcgtcgcctgtccctgttaagacagaacgctccctggcctctcaagttaggcttctccagcccatacgagggcgtgcttaacaagagcccaaagactcgcgacatacaggaggaggagctggaggtattgcttgaggaggaagccgctggaggagacgaggaccgggagaaagagattttgatcgaacgaattcagagcatcaaggaggaaaaggaagacatcacctacagattgcctgagctggatccacgagggtctgacgaggaaaatctggatagtgaaactagcgcttctactgaatctcttcttgaagagcgagcaggacggggggccagcgaggggcaatattag

SEQ ID NO: 125415 - DNA, 519 bp, synthetic construct
  misc_feature 1..519: note = Description of Artificial Sequence: Synthetic coding sequence
  source 1..519: mol_type = other DNA
atgagcagtaaaaaagcaaaaactaagaccacgaaaaagcgcccacagcgcgcaacatcaaacgtgtttgcaatgttcgaccagagccaaatccaagagttcaaagaggcctttaacatgatcgatcagaaccgagatgggttcatcgacaaggaggatttgcatgacatgttggcttcactgggtaaaaatcctaccgatgcatacctggacgccatgatgaacgaagccccaggacccatcaatttcacgatgttcctcaccatgttcggggaaaagctgaatggcacagatcctgaagacgtcatccggaacgcatttgcttgcttcgatgaagaggcgacggggacaattcaggaagactacttacgggagctgctcactactatgggagatcggtttacggacgaggaagtggatgaactgtacagagaggctcctatcgacaaaaaggggaatttcaactacattgaatttactaggatcttgaaacatggtgctaaagacaaggatgattag

SEQ ID NO: 125416 - DNA, 1791 bp, synthetic construct
  misc_feature 1..1791: note = Description of Artificial Sequence: Synthetic coding sequence
  source 1..1791: mol_type = other DNA
atggctacagaaaacggcgccgttgaattgggcatccaaaaccctagtaccgacaaggcccctaagggaccaacaggtgaacgccccctcgccgctggcaaggaccctgggccccccgatccgaaaaaagcaccagaccctccaacgcttaagaaggatgcgaaagcccccgcttccgaaaaaggggatgggaccctggcacaaccaagcacgtcgtctcagggccccaaaggtgagggggacaggggaggaggaccagcggaggggtccgctggaccacctgccgccctgcctcagcaaaccgctactccagagaccagcgtgaagaaaccgaaggcggaacagggcgcctcaggctctcaggacccaggcaaacctcgggtaggtaagaaggccgctgaggggcaggccgccgccagaaggggctcgccagcattcctgcacagtccctcatgtcctgctatcataagttctagcgagaaactgctcgccaagaaaccccccagtgaagcaagcgaactaactttcgaaggcgttcctatgactcacagcccgaccgatccgaggccagctaaggcagaagagggcaagaacatcttagccgagtcacagaaagaggtgggcgagaagacacccggtcaagcaggacaggccaagatgcaaggagatacaagcagagggatcgaatttcaggccgtgcctagcgaaaaatccgaggtagggcaggcactgtgcctcacagcacgggaagaggactgctttcaaatcttggatgattgtccacctcctcctgctccctttccccatagaatggtggaactccgtacagggaatgtaagctccgaattttccatgaatagtaaggaggcccttggaggaggcaagttcggggcagtgtgcacttgtatggagaaagcgaccgggctaaagctagccgctaaggtgatcaagaaacagacccccaaggataaagaaatggttttgctggagattgaggtgatgaatcagcttaatcaccgcaatctgatccagctctatgcagctatagaaaccccacacgaaatcgttctttttatggagtatatcgaaggcggggagttattcgagaggattgttgacgaagactaccacctgaccgaagtcgatacaatggtgtttgtgcgccaaatctgtgacggaattttgtttatgcacaaaatgcgagtgctgcacctggatctcaagccagagaatattctgtgtgtcaacacaacgggacacctcgtcaaaattatcgactttggtctggcccggcggtacaacccaaatgagaagctaaaggtgaacttcggtacacctgagtttctgagcccagaagtggtgaattatgatcagattagtgataaaactgatatgtggtctatgggcgtaatcacatatatgctcttgagcggtctctctcccttcttgggtgacgatgacacggagacactgaataacgttttatctgggaactggtattttgatgaggagacattcgaggctgtctcagacgaagccaaggattttgtttccaacttaatcgttaaggaccaaagagcacgcatgaatgccgctcagtgtctggcccatccgtggcttaacaatctcgcagagaaagctaaacgttgtaaccgacgcctaaagtcacaaatcctgcttaaaaagtacctcatgaagcggcgttggaaaaaaaatttcattgctgtgtcagctgctaacagatttaaaaaaattagtagttctggtgccctgatggcgcttggggtgtag

SEQ ID NO: 125417 - DNA, 1791 bp, synthetic construct
  misc_feature 1..1791: note = Description of Artificial Sequence: Synthetic coding sequence
  source 1..1791: mol_type = other DNA
atggcgactgagaatggtgcagtggaactgggtattcagaatcctagtacagacaaagctcccaagggtcctactggcgagcgtcccctggcggcagggaaagaccccggtccaccggaccctaagaaggcgccagatcctccgactctgaaaaaagatgctaaagcgcctgcgagtgagaagggagatgggacactagcccagccatctacatcaagccaaggccccaaaggggagggagacagaggcggcggtcccgccgaaggcagtgctggccctccggctgccttgcctcagcagactgctacaccggaaaccagcgtgaagaagccaaaggccgagcagggagcctccggttcccaggacccaggaaagccccgggtcggcaagaaagccgcggaaggtcaggcagccgcccggcgtgggtcacccgcctttcttcacagtcccagctgtccagcgatcatcagctcttctgagaaactcctggctaaaaagccgcctagcgaagcctctgaactgaccttcgaaggggtgcccatgacccactctcccactgacccaaggcccgcgaaagccgaggagggtaagaacatactcgcagagtctcaaaaagaggtaggtgaaaagacgcctgggcaggccggccaggcaaagatgcagggcgatactagcagagggatcgagtttcaggcagttcctagcgagaagtccgaggtcggacaggcactctgcctgaccgccagagaggaagattgctttcaaattctcgatgattgccctccaccccccgccccgttccctcataggatggtggaactgaggaccggcaacgtgtcctcagagtttagcatgaattcaaaagaggctcttggcggtggcaaatttggcgcagtttgtacttgcatggaaaaggccactggcctgaaactggcagccaaagtgattaaaaagcagacacctaaggacaaagagatggtgctgctcgaaatagaggtgatgaatcaattgaaccatcgcaaccttatccagctgtacgccgccatagaaaccccccatgagattgttttatttatggaatatatcgaggggggcgaactgttcgagcggatcgtggacgaggactaccacctgactgaagttgacaccatggtatttgtgcgacaaatttgtgacggaatcttgttcatgcacaagatgcgcgttctgcacctcgacctgaaacctgagaatattctctgcgtaaatactaccggacatctggtgaagatcatagactttggactggctcggagatataatcccaacgagaaactcaaggtcaacttcggaactcctgaattcctctctccagaagtggtgaactacgatcagatttccgacaaaaccgacatgtggagcatgggggtgatcacctacatgctgctgtccggcctgtcccccttcctgggagatgacgacacagagacactaaacaacgtgctctcgggcaattggtactttgatgaagagacttttgaggcagtttcagatgaggccaaggattttgtatccaacctaatcgtgaaagaccagagggcccgtatgaacgccgcacagtgtttggctcacccatggttgaataacctcgccgaaaaggctaaaaggtgcaatagaagacttaaatcccagatcctactgaagaaatacctgatgaagaggcgctggaagaagaattttatagccgtgtcagcagcaaataggtttaaaaaaatctcatcatctggcgctctgatggctctgggggtgtag

SEQ ID NO: 125418 - DNA, 2460 bp, synthetic construct
  misc_feature 1..2460: note = Description of Artificial Sequence: Synthetic coding sequence
  source 1..2460: mol_type = other DNA
atgagcgggacttcaaaagagtctctgggtcacggaggactccccggacttggcaagacatgtctgacaactatggacactaaactcaacatgctcaatgaaaaggtagaccagctattgcatttccaggaagatgtcacagaaaaactacaaagcatgtgtcgcgatatgggccacttggagcggggcctccaccggttagaagcttcgcgtgcaccaggccccggaggagccgatggcgtgcctcacatcgacacccaggcaggatggcctgaggtgctcgaactcgtgagagccatgcaacaggatgccgcacagcatggagcacggctggaggcactgtttaggatggttgcggccgtggatcgtgctatcgcactggtaggcgctaccttccagaagtccaaagttgccgacttcctgatgcaaggccgagtgccctggagaagagggtccccaggagacagtccagaggaaaacaaagagcgagtcgaggaggaaggtgggaagcctaaacacgtccttagcacctccggcgtgcaatccgatgctcgcgagcccggggaagagagccaaaaggcagatgtacttgaaggtacagccgagcggctcccccccatccgcgcttccggactcggggccgatccggcccaagctgtggtgtcacctggtcagggtgatggtgtcccagggcccgcccaagccttccctggccatctgcccttgcctaccaaagttgaagcaaaggcacccgagacaccaagtgaaaacttgcggaccggtttggagctggccccagctcccggaagggtaaatgtcgtttcgccctcactggaggtggcccccggagcaggtcagggcgcaagctcatcccgtcccgatcccgagccactggaggagggtacgaggctcactccaggtcctggtcctcagtgccctggcccccctggactgccagcccaagctagggcaacccatagcggaggggaaaccccccccagaatctccatccatatccaggagatggatacacctggcgagatgttaatgacgggtagaggctcccttggtcctacgttgacgacggaggccccagccgcggcccagccaggaaaacagggtcctccgggaacaggtcgatgcctgcaggcacccggcacagagcccggcgagcagaccccggagggggctcgggaactgtcccccctgcaggagtcctccagtccaggtggggtgaaggccgaggaagaacagagggcgggcgccgagcccggcacccgccctagtctcgcccgcagcgacgacaacgaccacgaagtaggagctctcggacttcagcaaggaaagtccccaggagcagggaatcctgagccagagcaggactgcgccgccagagctccggttcgcgccgaggctgtacgtagaatgccaccaggcgcggaggctggaagcgttgttctggacgattcgcctgcacccccagcaccatttgagcacagagttgtgagcgtgaaggagacaagcattagcgctggctatgaagtctgtcaacacgaggtgctggggggcggacgcttcgggcaggtgcaccggtgcaccgaaaagtccaccggactccctctggctgcaaagatcatcaaggtcaaaagtgcaaaagacagggaggacgtgaaaaatgagatcaacattatgaatcaattaagtcacgtgaatctgattcaactgtacgacgcatttgagagtaagcactcctgtaccctcgtcatggaatatgtcgatggaggtgaactgtttgaccgaataacggatgagaaatatcatctgactgagctggacgtggtattgtttacaagacagatttgcgagggcgttcactacctgcatcaacattacatactgcacctggatttgaaaccggagaacattctctgtgtcaaccagacaggtcaccagatcaagatcatcgattttggattagctagacgctataaaccaagagagaagctcaaggtgaatttcggtacgccggagttcctggctccagaagtggtcaactatgagttcgtttcattccccaccgacatgtggagcgttggggtgattacttacatgcttttgagtggcctgtcccccttcctaggggaaaccgatgccgaaaccatgaactttatcgtcaactgctcctgggactttgatgcagatactttcgaagggttgtccgaggaagccaaggatttcgtaagtcgcctcctggttaaagagaaatcctgtcgtatgagcgccactcagtgcttgaagcatgagtggttaaacaatctgcctgctaaagctagcaggtcaaagactagactgaagtctcagctcctgctgcagaaatacattgcacaaagaaagtggaagaaacacttctatgtggtgacggctgctaacaggcttagaaagttccccacgagcccgtag

SEQ ID NO: 125419 - DNA, 1437 bp, synthetic construct
  misc_feature 1..1437: note = Description of Artificial Sequence: Synthetic coding sequence
  source 1..1437: mol_type = other DNA
atggatacacctggagagatgctgatgacaggccgaggatcccttggacccaccctgactacagaggctccagcagccgctcaaccaggcaaacaaggccctccaggcacaggcagatgcctgcaagccccgggtactgagcccggagaacagacgcccgagggcgccagggaattgagtcccttgcaggaatcctccagcccagggggggttaaggccgaagaggagcaacgagccggtgccgaaccagggacgcgacccagtctggcacggtcggacgacaatgatcatgaggtaggcgctctgggcctgcagcagggtaaatcccccggggccggcaatcctgagcctgagcaagactgcgccgcgagggctccagtgagggccgaagctgtacgcagaatgccgcctggtgccgaggccggcagcgtcgtactcgacgattccccagccccccccgctcctttcgagcacagggtggtgtcagtcaaagagacctcaatctccgccggatacgaggtctgtcagcatgaagtcctagggggtggacgatttggacaggtgcaccggtgtacagagaaaagcactgggctgcccctggccgcgaagataatcaaagtcaaatctgccaaagaccgggaagacgtcaaaaacgaaatcaatataatgaaccagctgagccacgtgaatcttatccaactgtacgatgcttttgaatccaaacactcttgcacactcgtcatggaatatgtagacgggggcgagctgtttgataggatcacggacgaaaagtaccacctgaccgaacttgacgttgtcctatttacaaggcagatctgtgagggggtccactacctgcaccaacattacattctgcacctggacctcaagcctgagaatattctgtgcgtaaaccagacaggccatcaaattaaaattattgattttgggctggctcgtcgatacaaaccaagggaaaaactgaaggtcaatttcgggacgccagagttcctggcacctgaagtggttaattacgaattcgtgtctttccccacggatatgtggtctgttggggtgataacctatatgcttttgagcggactaagtcctttcttaggggaaaccgatgcggagactatgaatttcatcgtgaattgctcatgggattttgacgcagataccttcgagggattatcagaggaggcgaaagactttgtgtcgcgcctcctggtaaaggagaagagctgccgaatgtccgccactcagtgcctcaaacacgagtggctaaataatttgcctgccaaagccagtaggtccaaaacccgcctgaagagtcagctccttcttcagaagtacattgctcagcgcaagtggaaaaaacacttttacgtcgtaaccgccgccaatcgtctgcgtaagtttccaaccagcccatag

SEQ ID NO: 125420 - DNA, 4212 bp, synthetic construct
  misc_feature 1..4212: note = Description of Artificial Sequence: Synthetic coding sequence
  source 1..4212: mol_type = other DNA
tgactcctgctggaaagttgcgagaaggaaaaacaagcactactccaaaacctgaaagaggtggaggacaaggcatctgcatacgaggatcagttgcagggccaagcgcaacaggttgaaactctgcagaaagagaagctgtcagccacatttgaggggtctgaacaggtgcaccagctcgaagagcagctggaagccagagaggcctccgtgagacggttggcagagcacgttcagagtctatgcgatgagagggacctgcttcggcaacgatttcaggagctgaccgagagggtcgccaccagcgacgaagatgtggccgaattaagagagaaactaaggcgtcgcgaagcagataatcagagcctagaacattcctaccagagggtctctagccagctgcagtccatgcacaccctcctccgtgaaaaggaagaggaactggagcgcatcaaggaagcccatgagaaggtattagaaaagaaagagcaggacctgaatgaagctttggtgaaaatggtggcccttgggtccagcctcgaagagacggagatcaaactgcaggctaaggaggagatcctcagaaagttcgcaagtgagtcacccaaagacatggaagaacccagaagcacaccggaggagaccgagagggatggaactcttctgccaggtcaacccgttcaggctacgagagctcccctcggccttccccacacgcgattggaggatgaggacgaggacttgggtgccccacctggggaagagtacggtgatggaagtccttctcgtgaggattccatggtgcccccaaagtccgttgaagtattggatcgcgaagggcaccaacagggcaccgcaaaattggaccagggcgcccctggcgtgaaacgccagaggattaggtttagtacaatccagtgtcagcgttatatccatcccgaaggttcagagaaaacttggacatcgtcaacctcctcagacacaagccaggaccgctccccatctgaggagagcatgtcttctgagcctgccccctccgtgttaccagctaccggagactcagacacatatttatcaatcatccattcgctcgagacaaagctgtacgtgactgaagaaaagttaaaggacgtgacagtgcgactcgagtctcagcagggccagtcccgggaggctctgctagctctgcatcaccagtgggctggcaccgaagcccaactgagagagcagctgagagcgtccttgttgcaggttggtgctctggcaagccaactggagcaggagcgccaggagcgcgccaggagagttgaaggccacgtgggcgagctcggggactttcaggtgaaaaattcacaggcgctgatgtgcttggagaactgccgtgagcagttgcgttcactgccccgggcgtctcaggaagatgagcaggacgctcgtgccgcctctctggccagcgtcgaaagtgctctggtttctgccatccaggcattacagcactggcctgcccctgcccatggcggggcacgggcacagctggagaccggcgggaccgaggagaacgggaaaccagcctcattacaacagtgcagccagtctgagctgaccgaacaagaacaggtgaggttattgtcggaccagattgctctcgaggcttccctcatctcacagatcgcagattccctgaagaataccacatctgatgtaagcagaatgcttcacgagattagttggagcggccagccgcctatggaatccgccggggcccctgttgatacctgggctcgaaaagtactggtagacggcgaattttggtcacaagttgagagtttgcggaaacaccttggtacactcggtggagaggctgtaggcgcctctggcgatggacagcagagcatcccccagggcctggctcctatactggccaatgctacatgggtgcgcgccgagctgagctttgccacacaaagtgtgagggaatcattccatcggagactgcagtccatccaggaaaccctgagaggaacgcagaccgccctccggcagcacaagtgtctgctccgggaaatcctcggcgcttaccagacaccggacttcgagcgcgtgatgcagcaggtcttggaggctctgcgactgcccgcgggacatgaggacggtgtccagctgagctgggacctgagcccccttggagaggtgctaggcagggactccgattcatcccaggagccctttgatgtttcagaccagtctccaggagcttttgtggctatccaggaagaacttgcccagcagctgaaagaaaaggcttccctactggaggagatagctgcagctcttccttccctccctcctgtggaatccctgagagattgccagaaactcttacaggttagccagtccctctcttataatacttgcctgggcggattgggccagtattcatcccttttggtgcaggacgctattattcaggctcaggtgtgctacgctagttgccgcattagactggaatacgagaaagagcttcaactgtgcaaggagtcctggcagacccgtgagccatcgtgcagtgagcaggctcaggcagcccgtgcactgagagaggaatatgaagaattgctcaggaagcagaagtcagagtacttggacgttatcgctatagtggagagggagaacgccgagctgaaggccaaggcagcacagctggaccatcagcaacaatgtttggaggacgcagagtccaagcacagcatgtccatgttcacactgcgcgggcgctatgaggaggagatcagatgtgtggtggaacagttgaccagaacagaatcaaccctgcaagccgaacgatcccgcgtgctgagtcagttagacgctagcgtgcgcgacaggcaggatatggagcgccaccatggagaacagattcagaccctcgaagataggttccagttgaaagtgagagaactccagacgatacacgaagaagagctgaggacccttcaggaacactattctcaatcgctacggtgtcttcaggacactttatgcctgcatcaagggccccatccgaaggccctcccagcccccgccccaaattggcaagccacccagggggaggcagacagcatgaccggcttgcgtgagaggatccaggaattggaagcccagatggacgttatgcgggaggagctcggacataaggacttagaaggtgacgcagccacactcagagagaagtaccagcgagaccttgagagcctaaaagccacctgcgagcgtgggttcgccgccatggaagagacccaccagaagaagattgaagatctccaacggcagcatcagcgtgagcttgagaaactgagggaggaaaaagatagactgctggccgaggagaccgcagctaccatctcagccattgaagccatgaagaacgcacaccgagaggagatggagagagagctggaaaagtcacagagatctcagatttcctccgtgaactctgacgtggaggcactgcggaggcagtacctggaggaacttcagagcgtccagcgggaactggaagttctctccgaacaatacagtcagaagtgcctcgagaatgcgcatttggcacaggcattggaggccgagcgccaggccttgagacagtgccagcgagagaatcaggaacttaatgctcacaaccaggagctcaacaatcgcctggctgcggaaattacaaggctgagaacactgctcactggagatggcgggggagaagccaccgggtctcccctggcacagggtaaagacgcctacgagctcgaagtactcctgagggtgaaagagtctgagattcaatatctgaagcaggagatttctagcttaaaagatgagctgcagacggctttgcgcgacaaaaaatacgcttctgataagtacaaggatatctatacagagctgagcattgccaaagctaaagcagattgtgacatcagcaggctcaaagagcagctgaaggccgcaactgaagctctgggagaaaagagtcctgattccgctacagtgtcaggctatgacatcatgaagagcaaaagcaacccagacttcctgaaaaaagaccggtcttgcgtgacacggcagctgcgcaacatcaggtctaagtccctcaaagagggcctgactgtacaagagagactaaagttgtttgagagcagggacctgaaaaaggactag

SEQ ID NO: 125421 - DNA, 3078 bp, synthetic construct
  misc_feature 1..3078: note = Description of Artificial Sequence: Synthetic coding sequence
  source 1..3078: mol_type = other DNA
atgtcagccgcgaaagaaaacccttgccgtaagtttcaggctaatatctttaacaaatcaaaatgtcaaaattgcttcaaaccacgcgagtcgcatctgctgaatgacgaggacctaacacaggccaagccaatctatggtggatggctcctcttagccccggacggtactgattttgacaaccctgtgcatcgttctagaaaatggcagcggcgcttcttcattctgtatgaacatgggctgctgcgttacgcgttggatgaaatgccgacaacactgccacagggtacaattaatatgaaccagtgcaccgacgtggttgacggcgaagggaggaccggccagaagttttccctgtgcattctgacacccgagaaagagcatttcattcgtgccgagacgaaagagattgttagtggatggctagagatgctgatggtgtatccacgaactaataaacagaatcagaaaaaaaagcgaaaggtcgaacctcctacaccccaggaacctggccctgccaaggtggccgtgacttctagtagctctagttctagcagttcgtcaagtataccatcagcagagaaagttcctacaactaagagcactctgtggcaggaagaaatgcgcactaaggatcaacctgacggaagcagcttgagtccggctcagagtccttctcagtcacagccccctgccgcatcctccctcagagaaccaggccttgaatcgaaggaggaagagtctgccatgtcctcggaccggatggactgcggtaggaaagtcagggtggaaagcggctacttctcacttgagaagacaaagcaggatctcaaggccgaagaacagcagttaccgccacccctatccccccctagcccttctactcccaaccataggaggtcacaagtcatagaaaaattcgaagccttagacatcgagaaggccgagcacatggaaaccaatgctgtcgggcctagcccatctagcgacacacgacagggcaggtccgagaagcgtgcgttcccccggaaacgtgatttcaccaacgaggcccccccggccccactcccagatgccagcgcatcgccactttcaccacacagaagagctaagagcctggataggcggtcaacagagccaagcgtgacacctgatctactgaatttcaaaaaggggtggcttaccaaacaatatgaagatgggcaatggaagaaacattggtttgtgctggcagaccagtcgctgagatactatagggacagtgtagctgaggaggccgcggacctggacggagaaattgatcttagcgcatgctatgacgtgactgagtaccctgtgcagagaaactatggattccaaatccacacgaaggagggtgaattcactctgtcagccatgacatctggtatccggagaaactggatccaaacaatcatgaagcatgtgcacccaacaactgcccctgacgtgacttccagcctaccagaggagaaaaataagtccagctgttcgtttgaaacctgtccaagacctaccgaaaaacaggaagcagagctgggggagccggaccctgaacagaaaagatcccgcgctcgggagaggagacgggaagggcgaagtaaaactttcgattgggcagaattcagaccgatccagcaagcattggctcaggagcgggttggcggcgtgggacccgcggacacacacgagccacttcggcccgaggctgagccgggggagcttgagagagaacgcgcaagacgcagggaggagcggaggaaacgctttgggatgttagatgccactgacggcccaggtacggaggacgccgcactgcgaatggaggtggacaggtcacccggacttccaatgtccgacctaaagacccataatgtacacgtcgagatcgaacaaagatggcaccaagtggaaacgacgccactgagggaagagaaacaggtcccgatcgctcctgttcacctgagcagcgaagatggcggggaccgattatcgactcatgagctgacaagcctgctggagaaagaactggaacagtctcagaaagaggcttctgaccttctggagcagaataggctgctgcaggaccaactgcgggtggccctgggccgcgagcagagcgcaagagaggggtatgttctgcaagccacatgcgaaaggggatttgccgcgatggaggagacccaccagaaaaagatagaggatctgcagcggcagcaccagcgggaactggagaaactccgagaggagaaggacaggctgctggccgaagaaaccgcggcaacaatctccgcaatcgaagccatgaagaatgcccacagggaagagatggagagggagcttgaaaaatcgcagcgcagccagatcagtagcgtgaactcagacgtggaagctctacgaagacagtatcttgaagaattgcagtcggttcagcgcgaattggaggtcctgtctgaacagtactctcagaagtgcctggaaaatgcccacctggcacaggcccttgaggccgagcggcaggctttgcggcagtgtcagagggagaatcaggagttgaatgctcacaaccaggagttgaacaacagactcgctgctgaaattactagactgagaaccttgttgacgggagatgggggtggagaagcgaccggatctccactggcccagggcaaggatgcttatgaactggaggttttgcttagagtaaaggagtccgaaattcagtatctcaaacaagagatcagtagcctgaaggacgagctgcagaccgctttacgagacaaaaagtatgccagcgacaaatataaagatatttacactgaactgtctattgccaaggccaaagctgattgcgacatcagtagactgaaggaacagttgaaggcagccacggaggcactgggcgaaaaatcacctgactctgcaactgtaagcggttatgacattatgaaatcgaaatccaatcccgacttcctgaaaaaagatcgaagttgtgtgacacggcagttgcgtaacattcggtcaaaatctgttatcgagcaagtgtcttgggacacttag

SEQ ID NO: 125422 - DNA, 3078 bp, synthetic construct
  misc_feature 1..3078: note = Description of Artificial Sequence: Synthetic coding sequence
  source 1..3078: mol_type = other DNA
atgagcgccgctaaggaaaatccatgcagaaagtttcaagctaacattttcaataagagcaaatgtcagaattgtttcaagccccgagagagtcaccttctcaacgacgaagacctcactcaggccaaacctatctatgggggctggctcctgctggctccagatggaaccgacttcgacaatccagtgcatcgaagccgcaaatggcagcgccggttttttatcctgtacgagcatggcctgctaaggtacgcccttgacgagatgcctacgacactgccccagggcacaattaacatgaatcagtgcaccgatgtcgtcgacggggaggggagaaccggtcagaagttttctctctgtatcctcactcccgagaaggagcatttcattcgggcagagactaaggagatcgtctcaggctggctggaaatgttgatggtctacccccgaacaaacaagcagaatcagaaaaaaaagcgtaaagtggagcctcccacgccccaggaacccgggcccgccaaggtagccgtcaccagctcatcttctagcagctcctcttccagcagcattcctagtgccgagaaggtgcctacaacgaagtctactctctggcaggaggaaatgcggacaaaagaccaacccgacggaagctccctgtcgcccgcccagtcccctagccaatcccagcctcctgccgcctccagcctcagggagccaggtcttgagagcaaagaagaggagtcggccatgtcatctgatcgcatggactgcgggcggaaggtgagggttgagagcggatatttttcactggaaaagacaaaacaggacctgaaggctgaggaacagcagctgcctccaccactctcccctccatccccttctacacccaatcatcggcgcagccaggtgatcgagaagttcgaggccctggatatcgagaaagcggaacatatggagactaacgctgtcggaccctctccatccagtgataccagacaaggaaggtcagagaagagagccttccctcgcaagagggacttcactaacgaggctccccctgctccactgccagatgccagtgcaagtccactctcgccccaccggagagcgaagagcctggatcgacggtctactgaaccttccgtgactcctgacctgttgaatttcaagaaaggttggctgactaaacagtatgaggacggacagtggaagaagcactggttcgtgctggccgaccaatctttacgttattacagggacagtgtcgccgaagaagccgccgaccttgatggggagatcgacctttccgcctgctacgacgtcactgaatacccagtccagaggaactatggattccagatacacactaaagagggcgagttcaccctgtctgccatgacaagcggcatacgacggaactggatccagacgattatgaagcacgtgcatcctactacggctcccgatgtgacgtccagtctacccgaggagaaaaacaagtcatcatgcagctttgagacttgcccaaggcccaccgagaagcaggaggcggagttgggtgaacctgatccggaacagaaacgttcaagagcacgcgagcgcaggcgggagggccggtcaaagacctttgactgggcagagtttcgcccaatacagcaagcactggcccaagagcgagtgggaggggtgggacccgcagacacacacgaacctctgagacctgaggctgagccaggcgagctggagcgggagcgtgcacgtaggagggaagagcgacgcaagaggttcggaatgttggacgcgacagacggccccgggacagaagatgccgctttgcgcatggaagttgaccggtcacccggcctgccaatgtccgacctcaaaacccataacgttcacgtcgagatcgaacagcggtggcatcaggttgaaactacaccccttcgggaggagaagcaggtgccaatcgccccggttcacctctcttcagaagatggaggagaccgtctttcaacacatgaactaacctctctgcttgagaaggaactggaacagtcccagaaagaagccagcgatctccttgaacagaaccgactgctgcaggaccagctgcgcgtggctttgggtagggaacagagtgctagggagggttatgtgcttcaggctacctgtgagagggggttcgccgccatggaggagactcaccaaaagaagatcgaagatctgcaaagacagcatcagagggagctggagaaattgagagaggaaaaggatcgcctgttggcagaagagaccgcagccaccatttccgccattgaggctatgaagaatgcccacagggaagaaatggagagggagctcgaaaaatcacagcggagccagattagcagcgtgaattcagatgtggaggcgttgagacgccagtacctggaagagctgcagtcagttcagcgcgagctggaagtactatcagaacagtatagtcaaaaatgtctggagaacgcacacctggctcaggcactagaagccgaaaggcaggccctgcgccagtgccaacgtgagaatcaggaactgaacgcacacaatcaggagcttaacaatcgactggcagccgaaataacgaggttgcgcaccctgctaactggcgatggaggtggggaggctaccggatcccctctggctcagggaaaggatgcatacgagttagaggtgctgctacgtgtgaaagagtcagagattcagtatttgaagcaagaaatttcctctctgaaggacgagctacagactgccctacgcgataagaaatacgccagtgataagtacaaagatatctacaccgaactttcaatagcgaaagctaaggcagactgtgatatatccagacttaaagagcagttgaaggcagcaactgaagccctcggggaaaagagtcctgacagcgccactgtttcaggttatgatatcatgaaaagcaaatctaaccccgactttctcaaaaaggacaggtcatgcgtaacacgccagctaagaaacattcgcagcaagagtgttatcgaacaggtaagctgggacacctag

SEQ ID NO: 125423 - DNA, 192 bp, synthetic construct
  misc_feature 1..192: note = Description of Artificial Sequence: Synthetic coding sequence
  source 1..192: mol_type = other DNA
atgtccgcagcaaaggaaaatccctgtcggaaatttcaggccaacatttttaacaaatccaaatgtcaaaattgctttaaaccgagagaaagccacctcctcaacgacgaagatttgacacagcagaatacgcacccattggaaatgaagagaggtgcccacatttatgacgcccgcatgttcagttgttag

SEQ ID NO: 125424 - DNA, 282 bp, synthetic construct
  misc_feature 1..282: note = Description of Artificial Sequence: Synthetic coding sequence
  source 1..282: mol_type = other DNA
atgtcggcggccaaggaaaacccatgtcgtaaatttcaagccaacatcttcaataagagcaagtgtcagaactgttttaaacctcgcgagtcacatctgctaaatgatgaggatctcacacaggccaagccaatctacggagggtggctcctgcttgctcccgatggaaccgacttcgataatcctgtgcacaggagcagaaaatggcagagacggttttttatcttgtacgagcacggccttctcaggtatgcattggatgagatgatgtcatcccagtag

SEQ ID NO: 125425 - DNA, 3117 bp, synthetic construct
  misc_feature 1..3117: note = Description of Artificial Sequence: Synthetic coding sequence
  source 1..3117: mol_type = other DNA
atgagtgccgcaaaagaaaacccttgtcgtaaatttcaagctaacatctttaacaagagcaagtgtcaaaattgctttaaacccagggaaagccacctcctgaatgatgaggacctgacacaggcaaagccaatttatggtggatggctactgctggccccggatggaacagatttcgataatcccgtccacaggtcccgcaagtggcagcgcagattctttatactttatgaacacgggcttcttcgatatgctcttgacgagatgcctaccactttaccccagggaacaattaacatgaaccagtgcacggacgtggtggacggcgaagggagaacaggacagaaattttcactgtgcatcctaacccccgaaaaagagcactttataagggctgaaacaaaggaaattgtttctggatggttggaaatgctcatggtttacccaagaacaaacaaacaaaaccagaagaaaaagcgcaaggtggagccacctactccacaagaacccggcccagcgaaagtggctgtgacatcaagtagttcaagttcgtcctcatctagcagtataccaagcgccgagaaagttcctaccactaaaagcaccctgtggcaagaggaaatgcgcacaaaggaccagcccgatgggtcttcactttccccagctcagagtccctcgcagtcccaaccacccgccgcatcatcgcttagagaacccggactggaatccaaagaggaagagagtgccatgtctagcgatcgcatggattgcggaagaaaggtgagggttgaaagcggctacttcagtctggagaagaccaagcaggacctaaaggctgaagaacagcaacttccacctcctctgtctccgcctagtcctagtacacctaaccacagaagaagccaagtcattgaaaaatttgaggctctggatatcgaaaaggcagagcatatggaaaccaacgcggtgggccctagcccttccagtgacacaaggcagggcaggtccgaaaagagagccttcccaaggaagcgggacttcactaacgaagcaccgcctgcaccactaccagacgcatctgcatcccctcttagtccacaccggagagccaagagcctggacagaagatctaccgaaccctcagtaacgcctgatctactcaattttaaaaaaggatggctgaccaaacagtacgaagacggacagtggaagaagcactggtttgtgctggctgaccagagtctgcgctactacagagacagtgtggcagaagaagcggccgatcttgacggggagatagacctcagtgcatgttatgatgtgacagaataccctgtgcagaggaactacggatttcagattcacaccaaagagggtgagttcacattatcagccatgactagtggaattcgcaggaattggattcaaaccatcatgaaacacgtgcaccctacaactgcaccagacgtaacttctagtctccccgaagagaagaacaagtcttcttgttctttcgaaacttgcccaagacccactgaaaaacaggaagcggagttaggagagccagatcctgagcagaagcgatctcgcgcaagggagagacgtagagaaggtagaagcaaaacattcgattgggcagagtttcggccaattcagcaggccctggcccaggagagggtcggtggtgtggggcctgccgacacccatgagcctttgaggcccgaagccgaaccaggtgagctggagagggagagggccaggcggagagaggagcgtagaaaacggtttggtatgctggacgccaccgacggtcccggaacagaagacgccgcactgcgaatggaggtagacaggagtcccgggctaccaatgtccgatctgaagactcataacgtgcacgtggagatcgagcagaggtggcaccaagtagaaaccacccctctccgggaggaaaagcaagtgcccatcgcaccagttcacctgtctagtgaggatggaggtgatcggctctcgacacacgaactgacctccctgcttgagaaggagctggagcaatcacagaaggaggcatctgacctgcttgaacagaaccggctcctgcaggatcaactaagagtggcgctcgggcgcgagcagagtgcacgagaggggtacgtgcttcaggctacatgcgagcgcgggttcgcagctatggaagagacgcatcagaagaaaatagaggacctccagaggcagcaccagcgggaactcgagaagctgcgtgaagagaaggatcgactcctcgcagaagaaacagcagcaactatcagtgctatcgaggctatgaagaacgcccatcgcgaggaaatggagcgcgaacttgaaaagagccaaaggtctcagataagctctgtaaactcggatgttgaggccctccgcaggcagtacctggaggagctgcagtccgtgcaacgcgagctggaggttttaagcgagcagtacagccagaagtgtctcgagaacgctcaccttgcccaagctctggaggctgaaaggcaagcacttcgccaatgccagcgcgaaaaccaggagctgaatgcgcataatcaggaactcaacaaccgattagccgctgaaattacacggctccgaaccctgctgacgggcgatggaggtggggaagccactggaagtccccttgcccagggaaaggacgcctacgagctggaggtgctcctgagggtgaaggagtcggagatccaatatttgaagcaggaaatttcatccttgaaggatgaacttcagaccgctttaagggacaagaagtatgcctctgacaagtataaagatatttacacggagctttccatcgcaaaggccaaggcggattgtgatatctcgagactgaaggaacaattgaaagccgctaccgaggccctgggggaaaaatctccagactcagccactgtgagcgggtacgacattatgaaaagtaagagcaatccagactttctgaagaaggatcggagctgtgtcaccaggcagttacgtaacatacgcagtaagtccctcaaggaaggcttaacggtgcaggaacgcctcaagctgtttgagtcccgggaccttaagaaggattag

SEQ ID NO: 125426 - DNA, 3276 bp, synthetic construct
  misc_feature 1..3276: note = Description of Artificial Sequence: Synthetic coding sequence
  source 1..3276: mol_type = other DNA
tagcgattctcgactatccagtgccaacggtatatccaccccgaggggtccgagaaaacatggacttctagtacaagttcggatacaagtcaagacaggagcccttctgaggaaagcatgagtagtgagcccgccccatccgttctgccagcaactggggactccgatacatatctaagcatcattcactccctcgagacgaaattgtatgtgacggaggagaaactgaaggacgtaaccgtacgcctggaaagccagcagggccagtccagggaggcactgctagcgctacaccatcagtgggccggcaccgaggcccagctgagagagcagctgagagcctctcttcttcaggtgggggccctggcctctcaactggaacaagaacggcaggaaagagcccgcagagtagagggtcatgtgggtgaacttggagattttcaggtgaagaattcgcaagcattaatgtgcctggagaactgtcgtgagcagctcagatcactgccacgcgcatctcaggaagatgagcaggacgcacgggcagcgagtctggccagcgtggagtcagcgttggtttcagctatccaggccctgcagcactggccagccccagcccatggtggagctcgtgcccagttagaaacgggcggtaccgaggagaacggcaagcccgccagcctgcagcagtgtagccagtccgagctgacagaacaggagcaggtgcgccttctgtccgaccagatcgcactagaagcatctctgatttcgcaaattgctgattccctgaaaaataccacttctgatgtgagccgaatgctgcatgaaatctcttggagtgggcaaccaccaatggaatctgccggagcaccagtggacacatgggccagaaaagtactcgtcgatggtgaattctggagccaagtggaaagcctgcggaagcaccttggtactctggggggcgaagcggtaggagcaagtggcgacggacagcagtcaatcccacagggattggctcctattcttgcgaacgctacctgggtacgcgctgagttgagcttcgctacccagagtgtgcgggagtcttttcatagacgcctgcagagcattcaggagaccctaagggggacacagactgctctgaggcaacacaaatgccttttgcgcgaaatcctgggcgcctaccagactccagattttgagagagttatgcagcaagttctggaagccctgaggctgccagcaggccacgaggatggcgtgcaactttcatgggatctgtccccactgggagaggtccttgggcgagacagcgatagcagccaggaaccctttgatgtgtccgaccagtcccctggtgccttcgtggccatccaggaggaactggcgcagcaactaaaagaaaaagcttccttgcttgaggagattgcagcagcactgccaagtcttccacccgtcgaatcattacgtgactgccaaaagttgctgcaggtgtctcagtctctatcatacaatacttgtctcggaggactgggccaatacagcagcctccttgttcaggacgctattattcaagcccaggtatgctacgccagctgcaggataaggctggagtatgaaaaagagctgcagctctgcaaggaaagctggcagacacgggaaccctcttgctccgaacaagcccaggcagcaagagcactgcgcgaggagtatgaggagctgctgaggaagcaaaagtcagagtatctcgacgtgattgccatcgttgaacgggaaaatgccgagctgaaagcaaaagctgcccagctggatcatcagcagcagtgccttgaagatgccgagtctaaacacagcatgagcatgttcaccctccgaggccgctatgaggaagagatccgctgcgtcgtcgagcagctgacaaggacggagtcaacgctacaggccgaacgttcgagggtcttgagtcagctggacgcttcagtgcgcgatcgacaggacatggaacgccaccatggagaacagattcaaacactagaggatcgcttccagcttaaagtacgagagctgcaaacgatccacgaagaggaactgcggacattgcaagaacactatagtcagtcccttcgctgtctgcaggacacgctttgccttcaccaaggccctcatccaaaggcactgcccgctccagcccctaactggcaggccacacagggggaagctgactcaatgacggggctgagagagaggatacaggaactggaggcacagatggacgtcatgagggaagagctcggacacaaagacttggagggcgacgccgctaccctgagggagaagtatcaaagggatctggaaagccttaaggcgacctgtgaacgggggttcgctgccatggaggagacacaccagaagaagatagaagacctgcagagacagcaccagcgggaactcgaaaagctgcgggaggagaaagacagattacttgccgaagaaacggctgctactattagcgccatagaagctatgaagaacgctcacagggaggagatggagcgcgagctagagaaaagtcagcgttctcagatttcctctgtgaactcagatgttgaggcacttcggaggcagtacttggaggagctgcagtccgtgcagcgcgagcttgaggtcctatctgagcaatactcccagaagtgtttggagaatgcccacctggctcaagcactcgaggctgagaggcaggccctcagacagtgccagcgcgagaaccaggaattgaacgcccacaaccaagagttgaataaccggctggccgccgagatcacgcggctgaggacgctgcttacaggcgatggaggtggtgaagctaccggctctcctctagctcaggggaaggacgcctatgaacttgaagtcttactaagggtgaaggaatccgagattcagtacctgaagcaggaaatcagctccttaaaagacgagctgcaaaccgccctgcgcgataaaaagtacgcttctgataaatacaaagacatctacacagagctgtccattgcaaaggccaaggccgattgcgacatctcgagattaaaggagcaactcaaggcagccactgaggccctcggcgagaagagccctgattcagcgacagtcagtggctacgatatcatgaaatcaaagtccaatcctgactttcttaaaaaggatagatcttgcgttacgcgccagctgcggaacatcaggagtaaatctgtaatcgaacaagtgtcgtgggacacctag

SEQ ID NO: 125427 - DNA, 840 bp, synthetic construct
  misc_feature 1..840: note = Description of Artificial Sequence: Synthetic coding sequence
  source 1..840: mol_type = other DNA
taacaagaagccgagctgggtgagcccgatccagagcaaaaacgttcgcgtgcccgggagcgtcgacgtgaggggcgttccaaaacgttcgattgggctgagttcagacccattcagcaggccctggctcaggagagggtcggcggggtgggtcctgccgacacacatgaacctctacggccagaagcagagcctggtgaactggaaagagaacgagccagaaggagggaggaacgacggaaacggttcggaatgcttgatgcaaccgacgggccaggaactgaggatgccgctttaaggatggaggttgatcgcagcccagggctgcccatgtccgatctgaagacccacaatgtccatgtggagatagaacaaaggtggcaccaggtcgagacaactccattgagagaagagaaacaggtgccgattgcgccagtgcatctatcctcagaggacgggggagataggttatccacccacgagcttactagtcttcttgagaaggaattggaacagtcccaaaaggaggcaagcgatctgctggaacagaatcgcctgttgcaggatcagctcagagtggccctaggtagggagcaatctgcacgcgagggttacgtgctccagaccgaggtggcagcttctccatcgggcgcttggcagcgcctgcacagggtgaatcaagatctgcagtccgagttggaagcgcagtgtcagcgacaggaacttattacacaccagatccagactctcaaacgatcctatggagaggctaaggataccattcgccaccatgaggcagagatacgaagtctgcaggcacgcctctccaatgcagcctag

SEQ ID NO: 125428 - DNA, 585 bp, synthetic construct
  misc_feature 1..585: note = Description of Artificial Sequence: Synthetic coding sequence
  source 1..585: mol_type = other DNA
ctgagacaacagactgtggaagaattacaatcagtgcaacgggaactggaggttctgtccgagcagtactcacagaaatgcctcgagaatgctcacctcgcccaggcactcgaagccgaacgccaggcactcaggcagtgccagagagagaatcaagagttgaatgctcataatcaggtgttactacgggtaaaggaaagcgaaatccagtacttgaagcaggagatcagctctctaaaggacgagctgcaaaccgcattgcgtgataaaaaatatgcgtccgataagtacaaggacatttataccgaactgtcaatagcaaaggcaaaggccgattgtgacatctctcgattaaaagagcagctgaaggcagcgacagaagcgcttggcgaaaaaagcccagatagtgccacagtcagtggctacgatattatgaaatcaaagtcaaaccctgatttcctgaagaaggacagaagttgcgtcactcgtcaactgagaaatataaggagcaagtccctgaaggaaggtttaacagtacaggaacgcttgaagctgttcgaaagcagggacctgaaaaaggattag

SEQ ID NO: 125429 - DNA, 3003 bp, synthetic construct
  misc_feature 1..3003: note = Description of Artificial Sequence: Synthetic coding sequence
  source 1..3003: mol_type = other DNA
atgtccgctgcgaaagagaatccgtgccgaaagtttcaggctaatatattcaataagtctaagtgtcagaattgttttaagccccgcgaaagccatttgctgaatgatgaagacctcacacaagctaaaccaatttatggcggatggctgctgctggcgcccgacggcacagattttgacaatccagtgcaccgttcgcggaagtggcagcgccgcttttttatcctgtacgagcacggactgttgcgctacgctttagatgagatgcccacaactttaccccaggggaccatcaacatgaaccagtgcacggatgtcgtggatggggaaggaaggaccggtcagaagttctcgctttgtatcctcacgcctgaaaaagagcattttatacgggctgagacgaaagagatcgtttctggctggctggaaatgcttatggtctatcccaggactaacaaacagaatcaaaaaaaaaaaagaaaggtggagccaccaactccacaggagccgggtccggctaaggtggcagtcaccagctcttctagctcgagttccagctcttcttctattcccagcgctgagaaggtgccaacgacgaaatccaccctgtggcaggaggagatgcgcaccaaggaccaacccgatggctcatcgctgtcacctgcccaatcaccttctcaatctcagccccctgctgcaagcagcctgagggaacccggattggaatctaaagaagaggagagcgctatgtcgagcgatagaatggattgtgggcgtaaagtaagggtagagtctggctatttctcccttgaaaagactaagcaggatctcaaggctgaagagcagcaacttccaccaccactcagtcctccttcgccttccacacccaatcaccggcgctcgcaggttatcgaaaaattcgaagcactggatattgagaaggctgaacacatggagactaacgctgtcggcccttctccttccagtgacaccaggcagggccggagcgaaaagagggctttccctagaaagcgccctgatcttctcaactttaagaaaggctggctcacgaaacaatatgaggatggacagtggaagaaacattggtttgtccttgctgatcagagcctgcggtactacagggattcagttgccgaggaggcagctgatctggatggcgagatcgatttgtcagcctgctatgatgtcaccgagtatcctgttcagcgcaattacgggtttcagatccatacgaaagagggcgaatttaccttgagcgctatgacatccgggatccgtagaaattggatacagacaatcatgaaacacgttcacccaactacagcccctgacgtcacatcatccctgccagaagaaaagaataagtcaagttgcagctttgaaacttgcccgagacccaccgagaagcaagaagccgagttaggggagcccgatcccgaacagaagagatctagagcccgcgaacgaagacgggaagggcgttccaaaacattcgactgggcagaattcaggcctattcagcaggctttagcacaggagagagttggtggagtcggacccgccgatacccacgagcccttgcgccctgaggcggagccgggtgaattggagagagagcgagccaggagacgcgaagagcggcgaaagagatttggaatgttggatgcaactgatggtcctggtaccgaggatgcagccctccggatggaagttgaccgatctccaggcctgcctatgagcgacctaaagacacataatgtgcacgtggaaatagaacagagatggcaccaggtggagactacaccactacgcgaagagaagcaggtgcccatcgcccctgtgcacctaagtagcgaggatggtggggaccgtctgtccactcacgagctgacatctctgctcgagaaagagttagaacagtcacagaaggaagcaagcgaccttttggagcagaatcgtcttctccaagaccagctgagagtggcgctgggaagagagcaatctgctcgcgaaggctatgttctccaggctacatgcgaacgtgggttcgccgcaatggaggagactcaccagaaaaagattgaagatctccagcgacagcaccaacgggagctggaaaagctccgcgaggagaaagatagattattggcggaggagacagccgccactataagcgctattgaggctatgaagaacgcccacagggaagagatggaaagagagttagaaaagagtcagagaagccagatcagctctgtcaatagcgacgtcgaagctttaaggagacagtatttggaggagctacaatccgtccagagagagctcgaagtactgagtgaacaatatagccagaaatgtttagagaatgctcatcttgcccaggctctcgaagctgagcggcaggcgctgcgccaatgccagcgggaaaatcaagagttgaacgcgcacaatcaggagctgaataacagactcgccgctgaaatcacgagattgaggaccctcctgaccggggacggtgggggcgaggccacaggctccccactggctcagggaaaggatgcctacgaactcgaagtcttattaagagtgaaagagtccgaaattcaatacctgaaacaggagatctcctcacttaaggacgagcttcagacagcactaagagacaaaaagtatgccagtgataagtataaagacatatataccgagctgagcattgcaaaggccaaagctgactgtgacatatcaagactaaaggagcaactgaaggcggccactgaggctctaggcgaaaaaagccccgattccgccacagtctcaggctatgacataatgaagtcaaagagcaacccggactttctgaaaaaagatcggtcatgcgtgacaagacagcttcggaatatcagatccaagagcctgaaggaggggctcaccgtgcaagagcgcttaaagctgttcgaatcccgggacctgaagaaggattag

SEQ ID NO: 125430 - DNA, 795 bp, synthetic construct
  misc_feature 1..795: note = Description of Artificial Sequence: Synthetic coding sequence
  source 1..795: mol_type = other DNA
atggagaactatggaatagagtggcacagcgtgcgtgatagcgagggccaaaaactactaatcggcgtgggaccagaagggatctctatttgcaaggatgacttttctccaatcaatagaattgcgtatcccgttgtgcagatggccacacagagtgggaaaaacgtgtatctcactgttactaaggagtcaggaaattctattgttttgctgttcaaaatgatctcgactcgggccgccagtggactgtaccgggccattaccgagactcatgcgttctatcgatgtgacactgtaacgagcgctgtcatgatgcagtatagcagagatcttaagggccatctggccagtctattccttaacgaaaacattaatctgggcaaaaagtacgtctttgacattaagcgaacctccaaagaagtctacgaccacgcgagaagggccctgtacaatgcaggagtggtggaccttgtgagtaggaacaatcagagtccaagccattccccgctcaagtcctcggaatcctccatgaactgctcctcctgcgaaggcttatcctgccagcagacccgcgttctccaggaaaagctgcgcaagttgaaagaggcaatgttgtgtatggtatgctgtgaggaggaaatcaactctacattctgtccttgcggtcataccgtgtgctgcgagtcttgtgccgcccaactacagtcatgccccgtgtgccgcagtcgggtagagcacgtgcagcacgtgtaccttccgactcatacttccttgcttaatctcacggtgatctag

SEQ ID NO: 125431 - DNA, 1338 bp, synthetic construct
  misc_feature 1..1338: note = Description of Artificial Sequence: Synthetic coding sequence
  source 1..1338: mol_type = other DNA
atgctgtgctatgtgacacgacccgacgctgtcctcatggaggtggaggtggaggctaaagccaatggtgaggactgcctgaatcaggtgtgccggaggctgggaattatcgaagtggactacttcggactgcagttcaccgggtctaaaggagagagtctgtggctgaacttacgtaatagaattagccaacaaatggacgggcttgccccttacaggctgaaactgcgggtaaaatttttcgtagaaccacacttgatcctccaggaacaaactcgacatatctttttcctccacattaaagaggcgctccttgctggtcacttgctatgcagtcctgagcaagcagtcgagctgagcgcgttgttagcccagactaaattcggcgattataatcagaataccgctaaatacaattatgaggaactttgcgccaaagaactgagctccgctactctaaatagcatagtggccaagcacaaagaactagagggtactagccaggcatctgctgagtatcaggtcctgcagatcgtatccgccatggaaaactacggcatagagtggcattccgtccgagattcagaggggcagaagttattaattggagttggacctgagggcatttccatttgcaaggatgacttttcccccattaatcgcattgcataccccgtagttcagatggcaactcagtcaggcaaaaacgtgtatttgaccgttacgaaagagtcgggtaacagcattgtgctgttgtttaaaatgatcagtacaagagccgcgagcgggctctaccgagctataactgaaactcacgccttctataggtgcgacacagtgaccagcgcggtgatgatgcaatatagtcgagatttaaaaggccacttggcgagcctgttcctcaacgagaacattaatctcggtaaaaaatacgtctttgacattaagcgcaccagcaaggaggtatatgaccatgctagaagggcactctacaacgccggtgtggtggatctcgtgtccaggaacaaccaaagtcccagtcactctccactgaagagcagcgagagcagcatgaactgcagctcttgtgagggactgtcatgccagcaaacgcgcgtattacaagaaaagctgagaaagctgaaggaggcgatgttgtgtatggtgtgttgcgaagaggagataaactcaaccttttgtccatgtggccacactgtttgttgtgagagctgcgctgcccaactgcaatcctgcccggtatgccgctcccgggtcgagcacgtacagcatgtatacttgccaactcacacaagtcttttgaacctgacagttatttag

SEQ ID NO: 125432 - DNA, 5487 bp, synthetic construct
  misc_feature 1..5487: note = Description of Artificial Sequence: Synthetic coding sequence
  source 1..5487: mol_type = other DNA
atggcggcatctgaactgtacacaaagtttgcccgcgtctggatccccgatcccgaggaggtgtggaagtccgccgaactcctcaaggactataagcccggggacaaagttttgctcctgcacctggaggaggggaaggatctggaatatcacttggatccaaaaactaaggaactgccccatcttagaaacccggatatcttggtgggcgaaaatgaccttaccgctttatcttacctgcatgaaccggcggtgctgcataatcttcgggtgaggtttatcgacagtaagttaatttacacctattgcggcatagtccttgtggctatcaacccatacgagcagctgcccatatacggggaggatattatcaacgcatattcaggccagaacatgggagacatggacccgcatatctttgccgtggctgaggaggcctacaaacagatggctagagatgagcggaatcagtccattatagtgtcaggcgaatctggcgccggcaaaacagtgtccgcaaaatatgctatgcgttattttgccactgtgtctggtagtgctagcgaggctaatgtcgaagagaaggttcttgccagcaaccctatcatggagagtatcgggaatgcgaagacaaccagaaacgataattcctcccgatttgggaagtacatcgagataggctttgataagcggtaccgaattataggcgccaatatgcgcacctatttgctcgagaagtctcgcgtggtttttcaggcagaagaggagcggaattaccatatcttctatcagctctgtgcatctgctaagctgcccgaatttaagatgctgaggcttggtaacgctgacaattttaactacacgaagcagggaggtagcccggtcattgagggcgtggacgacgccaaagaaatggcccacactaggcaagcctgcacgcttctgggaatctcagagtcacaccagatggggattttcaggatactggcagggatcctgcatcttggaaatgtgggttttaccagcagggacgcggactcctgcaccatcccacccaaacatgagcctctgtgtatcttttgtgagctcatgggggtggactacgaagagatgtgtcattggctgtgccatcggaaactggccactgccacagaaacgtacatcaaacctatcagtaaactgcaggccacaaatgcccgcgatgctctcgccaagcacatatacgcaaaattgtttaattggatcgtggacaatgtcaatcaagccctgcacagcgcagtaaagcagcattcttttataggcgtcctcgatatctatggtttcgaaactttcgaaattaacagctttgagcagttctgcatcaattatgcaaatgaaaagcttcagcagcagttcaatatgcacgtgtttaaactggagcaagaggaatacatgaaggagcaaatcccctggaccttgatcgacttctacgacaaccagccatgcattaatcttatagaatccaaactgggtattctggacctattggacgaggagtgtaagatgcccaaaggcacagatgatacatgggcccagaagctttacaacactcatttaaataaatgcgcattatttgagaagcccagattaagcaacaaggcattcatcatacagcacttcgcagacaaggtcgaataccaatgcgagggcttcctggagaagaacaaagatacagtcttcgaggagcagattaaggtgctaaaaagctcaaaattcaagatgctaccggaactcttccaagacgatgagaaggctattagccccacatctgcgacctcatcaggccggaccccattgacacgcacccccgctaaaccaacaaaggggagacctggacagatggccaaggagcacaagaagaccgtggggcaccagttccggaactctctgcacctactgatggagacgctcaacgcaacaactccgcactatgtgagatgtattaagccaaatgattttaaatttccttttacgtttgacgagaagagggccgttcagcaacttagggcctgtggcgtgctggagaccatcagaatttcagcagcaggatttcctagccgctggacctaccaagaatttttctcacgatacagagtgctaatgaagcagaaggatgtgttgagtgatcgcaagcagacctgcaagaatgtattagagaagctgatcttagataaggataagtaccagttcgggaaaaccaagatttttttcagagcaggacaagtggcatacttggaaaagctgagagccgacaagttgagagctgcctgtatcagaatccaaaaaaccatcagaggctggctgctgcgcaaaaagtatttgcgcatgcggaaggctgcaatcaccatgcaacggtacgtccgcgggtaccaggcacgctgttacgcaaagttcctgcggcgcaccaaggctgcgaccatcatccaaaagtactggcgcatgtacgttgtccgacgacggtacaagatccgccgcgccgccaccatcgtgctgcagtcttacctgagagggttcctggctcggaaccggtaccgcaagattctgcgcgaacataaagcagtaatcatccaaaagcgggtccgtgggtggctagcaagaacccattataagcgatccatgcatgctataatctacctccaatgctgctttcggcgtatgatggctaagcgggaattgaagaaactaaagattgaggcccgcagcgtcgaacgctacaagaaactccatatagggatggagaataaaatcatgcaacttcagcggaaggtcgacgagcaaaataaggactataagtgtttggtagaaaaactaactaacctagagggcatctacaatagcgaaacggagaagcttagatccgatctcgagaggctgcagctatctgaggaagaggccaaagtggcaacaggacgggtgctgtcccttcaggaagagattgcaaaactcaggaaagacctcgagcagacccgcagcgagaagaagtgcatcgaggaacatgccgaccgatacaaacaggagaccgagcagcttgtcagtaatctgaaagaagaaaacaccctactgaagcaagaaaaggaggccctgaatcatcggatcgttcagcaagccaaggaaatgacagagacaatggagaagaagcttgtggaagaaaccaaacagctggagcttgacctgaacgatgaaagattgaggtaccagaatctgttaaatgagttcagtcggctggaggagcgctatgacgatctcaaagaggagatgactctcatggtgcatgtgcccaagcctgggcacaagcgtacagactcaacgcatagctccaacgaaagcgagtatatctttagtagtgaaattgcagagatggaagatattccttccaggacagaggagcctagcgaaaagaaagtgcctttggatatgagtctcttcctgaagctccaaaaaagagtgactgagctggagcaggaaaaacaagtgatgcaagatgaattggacagaaaggaggaacaggtgctacgaagcaaggctaaagaggaggagcgaccccagatacgcggggcagaacttgaatatgagtccttaaagagacaggagctggagtccgaaaacaagaaacttaagaacgagctcaacgaactccggaaggccctgtccgaaaagtcggctccagaggtgacggcacccggggcaccagcttaccgtgtgcttatggagcaactcaccagcgtgtcagaggaactggatgtgcgaaaggaagaggtcttgatcctgcgcagtcaactggtgtctcagaaagaggctatacagcccaaagatgataagaatactatgaccgactctacaatcctgctggaagatgtgcagaaaatgaaagataaaggcgagatagctcaggcctatataggcctaaaggagacaaatcgcctgctcgagagtcagctacagagtcagaaacgatcacatgagaatgaggctgaagcactgaggggcgagattcagagcttaaaagaggagaacaataggcaacaacagctcctggcccagaacctacagttacctccagaagctcgaattgaagcttccctccaacacgagatcacaagacttacaaacgagaacctcgatctgatggagcagttggaaaaacaggacaagaccgtccgcaagctgaagaagcaacttaaagtatttgcaaagaaaattggggagcttgaggtagggcagatggagaatatcagtcctggccagatcatagacgagccaatcaggccagttaatatccctaggaaggagaaggatttccaaggaatgctcgagtacaaaaaggaggacgagcagaagctggtcaagaatctgatattggaactaaagccccgcggcgttgctgtcaatctgatcccaggattgcctgcgtacatcctgtttatgtgtgttaggcatgccgactatttgaacgatgatcagaaagtgagatcgctgttgacttccaccattaatagcattaaaaaggtgttaaagaagagaggcgacgatttcgagactgtttccttctggctgtcaaacacgtgtaggtttttgcactgcctcaaacagtactcgggcgaagaagggttcatgaagcacaatacttcccgccagaatgagcactgcctgactaacttcgacctcgctgaatatcggcaagtgctgtcagacctggccatccaaatataccaacagctcgtgcgggtgcttgagaacatactccaacccatgattgtgtctggtatgctggagcatgaaacaatccagggcgtgagtggcgttaagccaactggcctccggaaacgaacaagctctatcgcagatgaggggacttacaccctggatagtatactaagacagctgaattcttttcactcagtcatgtgccagcacgggatggacccggagctcattaagcaagtggtcaaacagatgttctatatcatcggagccattactctgaacaatctcctgttgagaaaagatatgtgttcatggagcaagggcatgcagatccgctacaatgtcagccaactggaggagtggcttagggacaaaaacttaatgaacagcggcgccaaagaaaccctcgaacccctcatccaggccgcccagctgctgcaggtcaagaagaagactgatgatgacgcagaagccatctgttccatgtgtaatgcactcaccaccgcccagatcgtgaaggtcctcaatctttataccccagtaaatgagttcgaggagcgggtcagcgtgtccttcatccggacaatacagatgcggcttcgggatagaaaggattcccctcaactgttgatggatgccaagcatattttccccgtgacctttccatttaacccctcgagcctggcgctagaaactatccagatacctgcgagtttaggactgggctttatctctcgtgtgtag

SEQ ID NO: 125433 - DNA, 5643 bp, synthetic construct
  misc_feature 1..5643: note = Description of Artificial Sequence: Synthetic coding sequence
  source 1..5643: mol_type = other DNA
atgaagtcctccagcctcgaaaccatgttcgcaagagtgtggatcccagatcccgaagaagtttggaagagcgcagagctgctgaaggattacaaacctggggacaaagtgctcctgttgcacctcgaggaaggaaaggatctggaataccacttggaccctaaaaccaaggaattgccccacctgaggaaccccgacattctggtgggggaaaatgacctgaccgcactgtcatatctgcacgagccagccgttctccataatctgagagttcgcttcattgattcaaaactgatttatacctactgtggtatcgttctggtggcaattaacccttacgaacagttgccaatctatggcgaagacatcattaacgcttactcgggtcagaacatgggggacatggatcctcatattttcgccgtggccgaggaggcgtataagcaaatggcccgggatgaacgaaaccaaagtatcatcgtcagcggggaaagcggggctgggaagaccgtctccgcaaagtacgccatgagatattttgcaactgtgtccggctccgcctccgaggccaacgttgaggaaaaggtcctggccagtaatccaatcatggagtcaattggcaacgctaaaacaacccgcaacgacaattcgtctagattcgggaaatacatcgaaatcggtttcgataagcgatatcggatcattggagccaacatgagaacatatctactcgagaaatcacgagtcgtgtttcaggctgaggaagaaagaaactatcacatcttctatcaattatgtgcgtcagctaagttgccagaatttaagatgctgaggttagggaatgccgacaatttcaattatactaaacagggggggtcccccgtgatagaaggcgttgatgacgccaaggaaatggcccacacgcgccaagcctgtaccctcctcggcatttcagagtcgcaccagatggggatttttagaattctcgctggtatcctgcatctcggcaatgtcgggtttacgtcccgcgatgctgattcttgtactattccgccgaagcatgagcctctgtgcatcttttgtgagctgatgggcgtggactacgaggaaatgtgccactggctatgccaccgtaaactcgccacagcgaccgaaacctacatcaagccaattagtaaactgcaagccacgaatgcacgggacgctctggcaaaacatatctatgcaaagttgttcaattggattgtggacaatgttaaccaggctctgcatagcgctgtgaaacaacacagcttcattggcgtgctggacatctatggcttcgagacctttgaaattaatagcttcgagcagttttgtataaattatgctaacgaaaagcttcaacagcagttcaatatgcatgtttttaagctcgaacaggaggagtacatgaaggaacagataccctggacattgattgatttctacgataaccagccatgtataaatcttatcgagtccaagctgggaattctggatctgctcgatgaagagtgtaagatgcccaaagggactgacgatacttgggcccaaaaactctataacacccatttaaacaaatgcgctctgttcgaaaagccccggctgagcaacaaggcattcattattcaacacttcgctgataaggttgaatatcaatgtgaaggattcctggaaaaaaataaagatactgtttttgaagaacagatcaaagtgttgaaatctagtaagtttaagatgcttccagagttgttccaggatgacgagaaagccatcagtcccacctctgcaacaagcagcggccgcacgcccctgacacggacccccgccaaacctaccaagggcagaccaggtcagatggctaaggaacacaaaaagactgttggccatcagttcaggaatagcctgcatctcctgatggagacgctgaacgccacaaccccacactatgtacgatgcataaagcccaacgacttcaagttccctttcacatttgacgagaagagagcagtccaacagctcagggcctgcggagttttggagaccattcggatttccgccgcaggattccctagccgatggacctatcaggagtttttctcacggtatcgtgtgctaatgaagcagaaggatgtgttgtctgaccgcaagcagacttgcaaaaacgtcctggagaagttaatcttggataaagacaaatatcagtttgggaagaccaagatattcttccgggctgggcaggtggcctacttagagaaactgagagccgataagcttcgggccgcttgtattagaattcaaaagaccatccgaggctggctgttgcgcaagaagtacctgaggatgcgtaaggctgcaattacaatgcagcggtacgtgaggggataccaggctcgatgctatgccaaattcttacggcggaccaaggccgccacaatcatccagaagtattggcggatgtatgtcgtccgaaggcggtataagattcgccgcgctgccacaatcgtgctccagtcatatctgcgggggttcctggcccgcaacaggtaccggaaaatccttcgcgagcacaaagccgttataatccagaagagggtcagaggctggctagccagaacccactacaaacggtcaatgcatgcaattatttacctacagtgctgtttcagacgaatgatggcgaagcgcgagctgaaaaagctgaagattgaggcccgctcagtggaacgctacaagaagttgcacatcggaatggagaacaagatcatgcagcttcagcgaaaggtcgatgaacagaacaaagattacaaatgtctggtggagaaactaacaaatctggaaggcatctataattccgaaactgagaaactaaggtccgacttggaacggctccagctttcagaagaagaagcaaaggtggctacagggagggtcctgagcctccaggaggaaattgccaagctacggaaggacctggaacagacgcgctccgagaaaaagtgcattgaggaacatgcagaccgttataagcaggagaccgaacagctcgtcagtaaccttaaggaggagaatactcttctgaaacaagagaaagaggctctcaaccaccgcatagtgcagcaagcaaaagagatgaccgagactatggaaaagaagcttgtcgaggaaactaagcaattagaactggacctgaacgatgagcgtctgaggtatcagaacctgctgaacgaatttagtagactggaggagagatacgatgaccttaaagaggaaatgactttgatggtgcacgtgccgaagcccggccacaaacggaccgactcgacacatagtagcaatgaaagtgaatatattttttcctcagagatcgcagagatggaagatattccgagccgtactgaagaaccgtccgagaagaaagtacccctggacatgtccctttttctgaagctgcagaagcgcgtgacggaattagagcaggaaaagcaagtgatgcaagacgaactggaccgaaaagaagagcaggtgctgcggagcaaggcaaaggaggaagaacgaccacagatccgaggtgcagaactcgagtacgagtcacttaaaaggcaggagctggagtctgagaataagaaattaaagaatgagttaaacgagctgagaaaagctttatcagagaaaagtgcacccgaagtaacagccccaggcgcacctgcataccgggtgctaatggagcagctgacctcagtgtctgaggaattggatgttagaaaagaagaggtgctcatccttcggtctcaactggtgagccagaaagaggccattcaacccaaactccacgaaaataccatgactgactccacaattctcctggaagatgtacagaagatgaaggacaaaggcgaaattgcacaggcatacatcggccttaaggaaactaatcggtcatcggcactagattaccacgagttgaatgaagacggcgagctgtggctagtttatgaaggacttaaacaggcaaatcgcttattggagagccagctccaatcccaaaagcgcagtcacgaaaacgaagcagaggctctcagaggcgaaattcagtccttgaaggaggaaaacaaccggcagcagcagcttctcgcccaaaacctgcagctcccaccagaagcgagaatcgaagcgtctcttcagcacgaaatcactcgcttaactaatgagaatctgtattttgaggagttgtacgcagatgaccccaaaaagtaccaatcttaccgtatctccctgtataagaggatgatcgatctgatggaacagctcgaaaagcaggacaaaacagtgcgcaaattaaaaaagcagctcaaggtgtttgccaaaaagatcggcgaactcgaggtggggcagatggagaatatctcccctgggcagataattgacgagcccataagacccgttaatattccacgaaaggaaaaagacttccaaggtatgctcgagtacaaaaaggaagatgaacagaagctagtaaaaaatcttatactggagctgaagccacggggggtggcagtgaaccttattccaggcctacccgcctatattttattcatgtgtgtgcggcacgccgactacctgaatgacgatcaaaaagtacgcagtctattgacatctactattaacagcataaagaaggtgcttaagaaacggggggacgactttgaaacagtgagcttctggctgagcaatacatgccggttcctgcattgtctgaagcaatacagcggcgaggagggcttcatgaaacacaacacatcccggcagaatgagcattgtctcactaacttcgatctggcagagtaccgccaggtattgtctgatctagccatacagatttaccagcagctggtcagggtgttggagaatatccttcagccgatgatagtgtcggggatgctggaacacgaaacaatacaaggcgtgtctggcgtgaaacccaccggtctcaggaaaagaacctccagcatcgcagatgaggggacctacaccctggacagcatcttgcgccaactgaactcctttcattccgttatgtgccagcacggcatggatcctgaactgatcaagcaagtggtgaagcaaatgttctatatcatcggcgccatcactctcaataacctgttgctgagaaaggatatgtgctcatggtccaagggcatgcaaatcagatacaacgtatctcagcttgaggagtggctgagggataagaatctgatgaattcaggcgccaaagagactctagaacctctgattcaggctgcccagttgttgcaggttaaaaagaaaacagatgacgacgcagaggccatctgctcaatgtgcaacgcactcacaaccgcacaaatcgtcaaagtgttgaacttgtacacaccagtcaatgagtttgaggaaagggtctctgtaagtttcatccgcacgatccaaatgcgacttagggatcggaaggattctccccaattgctgatggacgccaaacatatcttccccgtgacattcccatttaacccatcatctctcgcccttgaaaccatccagattccggccagtcttggattagggtttatcagcagggtctag

SEQ ID NO: 125434 - DNA, 4089 bp, synthetic construct
  misc_feature 1..4089: note = Description of Artificial Sequence: Synthetic coding sequence
  source 1..4089: mol_type = other DNA
atgcatgtgttcaagttggagcaggaagagtatatgaaagagcaaatcccctggaccttgatcgacttctacgataatcagccatgtattaatctaatcgagtctaagctgggcatcttggacctgctggacgaagagtgcaagatgccaaaggggacagacgacacctgggctcagaaactgtacaacacacacctgaacaaatgcgcactttttgagaaaccccggctttctaataaggcctttatcatccagcacttcgccgataaagttgagtatcagtgcgagggcttcctagaaaaaaacaaggatactgtgtttgaggaacaaatcaaggttctgaagtcttctaaatttaagatgctgcccgaactcttccaggacgacgagaaagcgatctcccccacttcagctacatcctctggacgcaccccactaacacgaaccccagccaaacccaccaagggccgacctggtcaaatggccaaggagcataagaagacagttggtcaccagttcagaaacagcctgcacttgctgatggaaactctcaatgccactacgccacactacgtgcgatgtattaaaccaaatgacttcaaattcccttttactttcgatgaaaaacgagcagtccagcagctgcgcgcttgcggtgtgctggagacgattcggatctccgctgctgggttcccaagcaggtggacatatcaagagttcttttcacgctatagagtgctgatgaaacagaaggatgtgcttagcgaccgtaaacaaacatgtaagaacgtgctggaaaaactgatcctagataaggacaagtaccagtttggaaaaacaaagatttttttcagagctgggcaggttgcgtatttagagaaactacgggccgataaactgcgagccgcctgtattcgcattcaaaagaccatcagagggtggttacttaggaaaaagtacctacgtatgaggaaggcagcaatcacaatgcagagatatgtccgcggctatcaggctaggtgctacgccaagtttctgagaagaactaaagcagctacaataatacagaagtactggagaatgtatgtggtgagacgccgttataaaattaggcgcgcagccactatcgtacttcagtcatacctccgggggttcctggcaagaaacaggtatcggaagatactgagggagcacaaggctgtgatcatccaaaaaagggtccgcggatggcttgcaaggacacattacaaacggagcatgcatgccattatttatctgcagtgttgtttccgaagaatgatggcaaagcgtgagctgaagaagcttaaaatagaggcacgcagcgtcgagaggtacaagaagctccacatcgggatggagaataaaattatgcagctgcagcgtaaggtggacgagcaaaataaggactacaaatgcctggtggagaaattgacaaatctggagggtatttataatagtgagactgagaagctgcgtagtgatttggaaagactgcagctgtccgaagaagaagctaaagtggccacagggcgcgtgctctctttgcaggaggaaattgcgaagctccgaaaggacctggagcagacccggtcggagaagaagtgtatcgaggaacacgcggatcgatacaaacaggaaactgagcagctggtcagcaatctcaaagaagagaacacactcctgaagcaggagaaagaggccctcaaccatcgcattgtacagcaggccaaggagatgacagagacaatggaaaagaaacttgtagaagagacaaagcagttagagctcgaccttaacgatgaaagattgcgctaccagaacctgctgaacgagttcagcagattggaagagagatacgatgacctgaaggaagagatgactctgatggtccacgtgcccaaacccggccacaagcggaccgatagcactcactcatccaacgaaagtgagtacatcttttcaagtgaaatcgccgagatggaggacatcccatcacgcacagaggagccaagcgagaagaaggtccccttggatatgtcactgtttctgaagttgcagaagcgggtgactgagctggagcaggagaagcaggttatgcaggatgaactcgatcgcaaagaggaacaggtgctgcggtcaaaggccaaggaagaagagaggccacagattagaggggcagagctggagtatgagtctttaaagagacaggagttagagtccgagaataaaaaattgaaaaatgagctgaacgagctgagaaaggccctgtccgaaaaatctgctcctgaagttactgctccaggtgcacctgcctacagagtactcatggaacaattaacctccgtctccgaggagctcgatgtgaggaaggaggaagttctgatcctgcgcagccagctcgtgagccaaaaagaggccatccagccaaaagatgataagaacactatgacggactccacgatccttcttgaagatgtgcagaagatgaaggacaagggggaaatcgctcaagcctacatcgggctgaaggaaaccaaccgactccttgagtcccagctgcagagccagaagcgcagccacgagaatgaggcagaggctttgcggggcgagatccagagtctgaaagaggaaaacaaccgtcaacaacagttgttagcccagaatctgcagctgccgcctgaggccagaatcgaggcatccctccagcatgagatcacgcgcctcaccaacgaaaacctggatctgatggaacagctcgaaaaacaggacaaaaccgttagaaaactgaaaaagcagttgaaggtattcgctaaaaagatcggtgagctggaggttgggcaaatggaaaacatcagccccgggcagattattgacgagcccatcaggcccgtgaatatccctagaaaagaaaaggactttcagggaatgttggagtataaaaaggaggatgaacagaaactcgtcaaaaacctcattcttgagttgaaacccagaggcgtggccgtgaatctaatacctggcctgccagcctatattctttttatgtgcgtgcgtcacgccgactacttaaacgacgaccaaaaggtgaggagcttgctcaccagcacaatcaacagcattaagaaagtgctaaagaaaagaggtgatgacttcgaaactgtgtcattctggctcagcaatacttgcagatttctgcattgccttaaacaatacagcggtgaagagggctttatgaagcataatacttctcgacagaatgagcactgcctaactaatttcgacctagcagaatatagacaggtcctgtctgacctggctatccagatctatcagcagttggtaagagtcctagagaatattctgcaaccgatgatcgtaagcggaatgttggagcacgagactattcagggagttagcggtgtaaagcccacaggcctgagaaaacgcacaagtagcattgccgacgaaggtacttacacactggatagcatactgcgacagctgaattccttccatagcgtaatgtgccagcacggcatggacccagaactgataaagcaggttgtgaaacagatgttttatatcattggagccatcaccctgaataacctcctcctgcggaaagacatgtgctcatggagcaaaggcatgcaaatacgctacaacgtgtctcagttggaggaatggctgcgagacaagaatttaatgaattcgggcgccaaggaaaccctggagcctctgatccaggcggcgcagctgctacaagttaagaaaaagaccgatgacgacgctgaagccatctgcagtatgtgtaatgctcttacgacggctcagatcgtaaaagtgcttaatttgtatacaccagtgaacgaattcgaggaacgggtgagtgtaagtttcatcaggacgatacagatgagactgagagatcgtaaagactcccctcagctgctcatggacgccaaacacatcttccccgtcacctttccgttcaacccatcttctttggcacttgaaacaattcaaatccctgcatctctaggtctcggatttatttcccgagtctag

SEQ ID NO: 125435 - DNA, 5568 bp, synthetic construct
  misc_feature 1..5568: note = Description of Artificial Sequence: Synthetic coding sequence
  source 1..5568: mol_type = other DNA
atggccgcgagcgaactctacaccaagtttgcaagagtgtggattcctgatccagaagaagtgtggaaatccgccgagcttttaaaggattacaaacctggtgataaagtacttctgctccatctcgaggaggggaaagatctggagtaccacctcgaccccaagaccaaggagcttccgcacctgcgaaaccctgatatcctggtgggagaaaatgatcttaccgcactatcttatctgcacgagcctgccgtgctccacaacctgcgcgtgcggttcattgactcaaaacttatttacacatattgcgggattgtccttgttgctataaacccctatgagcagctacctatctacggggaagatataattaatgcctactctgggcagaacatgggagacatggatccccatatcttcgccgtagccgaggaggcgtacaaacagatggcccgcgacgaaaggaatcagagcataattgtctcgggggagtcgggagccggcaagactgtgtccgccaagtacgccatgcgttacttcgcgactgtttccgggtccgccagcgaggctaacgtggaggaaaaagtcttggcctccaatcccatcatggagtcgattggaaacgcgaagaccactcgcaatgacaattctagccgcttcggaaagtacatagaaattggattcgacaagagatacagaattatcggtgcaaacatgcgcacttatttgttggagaaatcgcgcgtggtctttcaggcagaagaggagcggaactatcatatattctatcagttgtgtgcctcggccaaactgccagagtttaaaatgcttaggctgggcaatgccgataactttaactacaccaagcagggagggtccccggtcattgagggggtggacgacgcaaaggaaatggcccatactagacaagcttgcacactgttgggaatctccgaatcacaccagatgggcatctttcgcattctcgccggcattctccacttaggtaatgtgggcttcacctctagagacgctgactcttgtaccatcccgcccaaacacgagccactgtgcattttctgtgagctcatgggcgtggactatgaggagatgtgtcactggctgtgtcacaggaaactagccacagccacagagacctatataaagcctatttctaaactgcaggcgacaaatgctcgagatgcattggcaaagcatatttacgcaaagctgttcaattggatcgtggataatgtgaatcaagctctacacagtgccgtgaagcagcattcctttatcggggtcctggatatttatgggtttgagaccttcgaaatcaacagttttgagcaattttgcatcaattatgccaacgagaagctacagcagcaatttaatatgcacgtgttcaaactggaacaagaagagtatatgaaggagcagatcccttggactctgatcgacttttacgacaaccagccttgtatcaatcttatcgaatccaaacttggcatcctagacctcttagacgaggaatgcaagatgcccaagggtacagatgatacatgggcccaaaagctgtataatacacacctcaacaagtgtgccctgtttgaaaagccccgcctgtccaacaaagcattcatcatacagcattttgccgacaaagtcgagtatcagtgtgaggggtttctggaaaagaacaaggatacggtcttcgaagagcaaatcaaagtgttgaaaagcagtaagttcaaaatgttacccgagctgttccaagacgacgagaaggctatctcccctacaagcgccacttcttccgggaggacacccttgacaaggacccccgctaagccaaccaaaggtcgaccggggcagatggccaaggagcacaagaagaccgtggggcaccagttcagaaacagtctccacctcctgatggaaaccctgaacgcgactaccccccattatgtgcggtgcattaagcctaacgacttcaagttcccctttacgtttgacgagaagcgagccgtgcagcagttgcgggcctgtggagtactcgagacaattagaattagcgctgccggctttccctctcgatggacttatcaggagttcttttctcgctatagggtcttgatgaagcagaaggacgttctgtccgataggaagcagacctgcaagaacgtattggagaaacttattctggacaaggataaatatcaattcggcaagacaaagatattcttcagagctggtcaggtggcctatctggaaaagctccgggcagataaactgagagccgcttgtattcgcatccaaaagacgatcaggggatggttgctcagaaaaaagtacctccgtatgcggaaagcagctattactatgcagcggtacgtccgagggtaccaggctagatgttatgccaaattcctgaggagaacgaaggctgcaacaatcattcaaaaatattggcggatgtacgtcgtgcggcgtaggtataagattcggcgcgccgccaccatagtgctacaatcttatctgcggggtttcttggcaagaaacaggtatcgtaaaattttacgagaacataaggctgtgattattcagaagagagtgagggggtggctagcaagaactcactataagagatctatgcatgccataatctacctgcaatgctgctttcgacgcatgatggccaagagagaactgaagaaactaaaaattgaagcaagaagcgtcgaaagatacaaaaagctccacattggcatggagaacaagattatgcagttacaacggaaagtggacgaacagaacaaggactataaatgcctggtggagaagcttaccaacttggaaggaatctataactcagaaactgaaaaactgcgatccgatcttgagaggctgcaactcagcgaagaagaagcaaaggtcgctactggtagggttctgtcactgcaagaggaaattgccaagctgaggaaggatctggagcagacccgttccgagaaaaaatgtatagaggagcacgccgaccgatataaacaggagaccgagcaattagtctccaatcttaaggaggaaaacacactgctaaagcaggaaaaagaggcactaaaccatagaattgtgcaacaggcgaaggagatgaccgaaacaatggagaaaaagctggtagaagagaccaagcaactcgaactggatttgaatgatgagagactgcgttaccagaatctcttaaatgagttcagccgccttgaggagcgctacgacgacctgaaggaggagatgactctgatggtgcatgttcccaagccagggcacaagcgtaccgactccacccacagctctaacgaatcagagtatattttttctagcgaaattgcggagatggaggatataccgtctcggactgaggagcctagcgagaagaaagtgccgcttgatatgtctctcttcttgaaattacaaaaacgggttaccgagctggaacaggaaaagcaggtgatgcaggatgaacttgacaggaaagaagaacaggttctgcgttccaaggcgaaggaggaggagcggccacagatccgaggcgctgagctcgagtatgagtccctaaaacgacaggagctggagtccgagaacaagaagctaaagaacgagctcaatgagctcaggaaggcactgagtgagaagtcagcccccgaagtgaccgctccaggggcaccagcgtacagggtccttatggaacagctgacatccgtctcagaagagcttgatgtgcgaaaggaggaggtgttgatactgcggtcacagctagtgagccagaaggaagccattcagccaaaggacgacaaaaacacaatgactgatagcacaatattattagaggatgtccagaagatgaaggacaagggtgagatagcacaagcctatataggcctgaaggagactaataggtcctccgcccttgattaccatgagctgaacgaagacggagagctgtggctcgtgtatgagggtctcaaacaggctaatcggcttctcgagagccaactgcaaagtcaaaaaagaagtcatgagaacgaggctgaggcattgcgaggggagatccagagcctcaaagaagaaaacaacaggcagcagcagttgctggctcagaaccttcagctccctcccgaagctcgcatcgaagcctctctgcagcatgaaatcactcgactaacaaatgagaacctcgatctgatggaacagctggagaaacaggataagaccgtgcgaaaactgaagaaacaacttaaagtgtttgcaaagaagatcggagagctggaagtcggccagatggagaacatctcccccggccagatcatcgatgagcccattagaccagtcaacatccctaggaaagagaaagactttcaagggatgctagagtacaagaaggaagatgaacaaaaactggtgaaaaaccttatactggagctcaagccgcggggcgtggccgtaaaccttatccccggtctccccgcttatatactctttatgtgtgtgcgacacgccgattacctgaacgacgaccagaaggtcagatccctgctgacttctaccataaattcaatcaagaaggtgctaaagaaaagaggcgacgattttgagaccgtaagcttttggctgtctaatacttgcagattcctgcactgtcttaaacaatattcgggagaagaaggctttatgaagcacaatacgtccaggcaaaatgagcactgtttgaccaactttgacctggctgaatacaggcaggttttgtctgatcttgctatccaaatctatcaacagcttgtgcgggttctggaaaacattctccagcctatgatcgtgtccggcatgctggaacacgagacgattcaaggagtgagcggagttaagccaacaggcctaagaaaaaggactagcagcatcgccgatgaggggacatatacgctggactcaatcctgaggcagctgaactcctttcatagtgtgatgtgccagcacggcatggacccagaactgataaagcaggtggtgaaacagatgttctacattattggggctatcaccctgaacaatctgttactgagaaaagatatgtgtagctggagcaaaggcatgcaaatcagatataatgtgagccagttggaggaatggctccgagataagaacttgatgaattctggagccaaggagacccttgaaccactgattcaagccgcccagctgttgcaagtgaagaaaaaaacagatgacgatgccgaggccatctgtagcatgtgtaatgctctgactacagcccaaattgtgaaagtgctcaatctctacactcccgtcaacgaatttgaggagcgtgtgagtgtgtcctttatacggacaattcagatgaggctgagggacagaaaggacagtccccagctactcatggatgccaagcatatattccccgtaaccttcccattcaatcccagctccctggccctcgagactatccaaatccccgcctccctcggacttggctttatctcacgcgtgtag

SEQ ID NO: 125436 - DNA, 5559 bp, synthetic construct
  misc_feature 1..5559: note = Description of Artificial Sequence: Synthetic coding sequence
  source 1..5559: mol_type = other DNA
atggctgccagcgagctatacactaaattcgcacgagtctggatccctgaccctgaagaggtatggaagtccgccgaattgctgaaggactataagcctggagacaaggtcctgctcctccatttagaggagggtaaggatttggagtaccatctggatcccaagaccaaggaactgcctcatctgagaaacccagatattctcgttggcgagaacgatttgaccgctctgagctatctgcatgagcccgccgtactgcataacttgagggtaaggtttatagactcaaagctgatttacacatactgtggcattgtgctggtcgcaattaatccgtatgaacagctaccaatctatggcgaggatataatcaacgcctactcgggacagaacatgggagatatggacccacatatattcgcggtggcagaggaagcctataaacaaatggcacgggatgaaagaaatcagtctattatcgtatccggagagagcggggcggggaaaaccgtgagtgcaaaatacgctatgagatacttcgctacagtctctggtagcgctagcgaagccaacgtcgaggagaaggtgcttgcttccaacccaatcatggagagcattggcaacgccaaaacaacgcgcaacgataacagttcacggtttggcaaatatatcgaaattggctttgataaacgatacaggattatcggcgccaacatgcggacctaccttctcgagaagtcccgcgttgtgtttcaggccgaggaggaacggaattaccacatcttttaccagctgtgcgcttccgccaagctccctgaatttaagatgctgcgcctcggaaacgccgacaattttaattacacaaaacagggtggatctccagtgatagaaggagtagatgatgcgaaggaaatggcacatacgaggcaggcctgtacgcttctgggcatctcagagtcgcatcagatgggaatttttcgcatcctcgctggcattcttcacctgggcaatgtggggttcacatccagggacgcagactcgtgcacaatcccacctaaacatgagcctctgtgcattttttgtgagctaatgggcgtcgactacgaagaaatgtgtcactggctttgccaccggaaactggcaacagcaactgagacctacattaagccaatatcgaagctgcaggccactaacgcccgcgatgctctcgccaaacacatctatgccaaactgttcaattggattgtcgacaatgttaaccaagcactgcattctgcggtaaagcaacattctttcatcggagtcctggacatctatggcttcgaaactttcgagatcaatagctttgagcagttttgcatcaactacgcgaacgagaaactgcagcagcagttcaacatgcatgtgttcaaactggaacaggaggagtacatgaaggagcaaattccttggacactgatcgatttttatgataatcagccatgtatcaatctgatcgagtcgaagctcggtattttagaccttctggatgaagagtgcaagatgccgaagggcacagacgacacgtgggcccagaagctttacaacactcacctgaacaagtgtgcgttattcgaaaagcctcgcctttctaacaaagcattcatcattcaacacttcgccgataaggtcgagtaccagtgcgagggattcctcgagaagaataaggataccgtgttcgaggagcagattaaggtgctgaaatcctctaagttcaaaatgctgcctgaactgttccaagacgacgaaaaagccatcagtccaactagcgcaacaagctcaggccgcacaccattaaccaggacaccagctaaacccaccaagggtcggccagggcaaatggctaaggagcataagaaaactgtcggtcatcagtttagaaattctctccatctgctgatggaaacactgaacgctactactccgcactacgtgaggtgtatcaaaccgaacgattttaagtttcctttcacatttgacgagaagcgtgctgtgcagcaactgcgagcttgcggtgtgttagagacaattagaatttccgctgcgggcttccccagcagatggacctatcaggagttctttagtcgctatagggttctcatgaaacagaaggacgtcctatctgaccgcaagcagacctgcaagaatgttctggaaaaactgattctggataaggataagtatcaatttggaaaaactaaaatcttctttcgagccggccaggtggcctaccttgagaagttgcgggcagacaagctgcgggccgcctgtatcagaatccaaaaaactataagaggttggctgttgcggaaaaaatatttacggatgcgtaaggccgccataactatgcagcgttacgttagaggttatcaggctcgctgctatgccaaatttctgagacggacaaaagcggccacgataatccagaagtattggcgcatgtacgtagtgcgccgccgttacaagataaggagggcagctaccatagttctgcagtcttatcttagaggcttcctggcccgcaacagataccgcaagatcctgagggagcacaaggccgtcattatacaaaaacgcgtccgaggatggctggcaagaacacattacaaaagatcaatgcacgccattatttacctgcaatgctgtttccgcaggatgatggccaagcgcgaacttaaaaaactgaaaattgaggctcggagcgtagagcgctataagaaactgcacatcgggatggaaaataagatcatgcagctacagcggaaagtcgacgaacaaaataaagactataaatgcctagtcgaaaagctcactaatctggaaggtatttacaattcagaaacagagaaactacgctccgatttagagcgtctacagcttagcgaggaggaggccaaggttgccacgggaagagtgctgtcgctccaggaggagatcgctaagctcaggaaggacctggaacaaactcgttccgaaaaaaagtgtattgaggaacacgctgatcgatacaagcaggaaaccgagcagctagtgagcaatctgaaagaagagaacacactgctgaagcaagagaaggaagcactgaatcataggattgtacagcaggcaaaggagatgacagagactatggagaagaagctggtggaagaaacaaagcagttggagctcgatctcaacgacgaaaggcttcggtaccagaatctgttgaatgagtttagcagacttgaggaacgctatgacgatttgaaagaggagatgactctgatggtgcatgtgcctaagccaggccacaaacggaccgacagtacgcactcgtccaatgaatcagaatatatcttcagttctgagatcgccgagatggaagacattccatcccggactgaagagcccagcgaaaagaaggtgcctttggacatgagtctgttccttaagttgcaaaagcgtgtgacagagctggagcaagagaagcaagtaatgcaggacgagcttgataggaaagaggaacaggtcctgcggagcaaggccaaggaagaagaacgcccccaaattaggggtgccgagctggagtatgaaagtctgaaacgccaagaattagagagcgagaataaaaaactgaaaaatgagctgaatgagctgaggaaagctctgagcgaaaaatcagcacccgaggtcacggcgcccggcgctcctgcttaccgggtgctgatggaacagctcacgtcagtttcagaggagttggacgtgaggaaggaagaggtcctgattctgcgaagccaattggttagtcaaaaggaggcgatacagccaaagaataccatgaccgactccaccatcctgttggaggatgtgcagaagatgaaggacaagggcgagatcgctcaagcatatatcggactgaaagaaacaaaccggagttctgcgctggactaccacgagcttaacgaggatggcgagttgtggctggtgtatgagggcctgaagcaggccaaccgcctgctggagagccagctccaaagccagaagcgaagtcacgaaaatgaagcagaggccttaagaggagaaatacaaagcctgaaggaggaaaataatagacaacagcagctgctggcccagaacctccaactaccgccagaagcgcgtatcgaggccagcctgcagcatgagataaccagactgaccaatgagaacctagacctcatggagcagctcgagaagcaagacaagactgtcagaaaactgaaaaagcagctcaaagtgttcgccaagaagattggcgaactcgaggtgggacagatggaaaatatttcacctgggcagataatcgacgagcccattcggcccgtaaacatcccgagaaaagagaaggactttcagggaatgctcgaatataagaaggaggatgaacagaaactggtgaaaaatttaattctcgagcttaagcccaggggcgtggccgttaacctgatcccaggcctcccagcttacatcttgttcatgtgtgtacgtcacgcagactacctaaatgatgatcagaaagttagatctttgctaacctcaacaattaacagcatcaagaaagtcctgaagaaacgaggcgacgattttgaaacagtcagtttttggctgagcaacacctgtaggtttcttcactgcttgaagcaatattcaggagaggagggatttatgaaacacaacacaagtcggcagaacgagcactgcctcaccaacttcgatctggccgagtataggcaggttttaagtgacctggcaattcagatctatcagcaattagtccgagtgctcgaaaatattcttcagcccatgatagtatcaggcatgcttgaacacgaaaccattcagggcgtctccggggtgaagcctacaggactgaggaagaggacctcaagcatagccgatgaggggacttatacactggattccatcctgcgccagctaaattcctttcattctgtcatgtgccagcatggaatggatccggagctgattaagcaagtggtcaagcagatgttttatatcattggcgctatcaccctcaacaatctgttactgcggaaagacatgtgctcctggtcgaagggcatgcagatccggtacaacgtgtcgcagttagaggaatggctgagggataagaacctgatgaattctggcgctaaggaaaccctcgagccgctcatccaagcagcgcaactccttcaagtgaagaagaagacagacgacgatgccgaggcgatttgcagcatgtgcaacgccctgaccacagctcagatcgtgaaagtcttaaatctctacactcctgtaaacgaatttgaggagcgggtcagcgtgtctttcatacggacgatccaaatgcggctccgggaccgcaaggatagtccccaattgttgatggatgctaagcacatcttccccgtcacctttccattcaatccctctagcctggccctggagaccatccagattcctgcaagtctgggactgggctttatctccagggtttag

SEQ ID NO: 125437 - DNA, 4377 bp, synthetic construct
  misc_feature 1..4377: note = Description of Artificial Sequence: Synthetic coding sequence
  source 1..4377: mol_type = other DNA
atgtgtcattggttatgccataggaagctggcaacagctaccgaaacgtacattaagccaatctccaagttacaggccacgaacgctagggatgcgttggctaaacacatttatgctaagcttttcaactggattgtcgacaatgtaaatcaagcgctccacagcgccgtgaagcagcactcgtttatcggagtcctagacatctacggttttgaaacttttgagattaactcttttgaacagttctgtatcaactatgcgaatgaaaaattacagcagcagttcaatatgcatgttttcaaactggaacaggaagagtacatgaaagaacaaatcccgtggaccctgatcgacttctacgacaatcagccgtgcattaacctgattgagtccaagttaggcattttagacctccttgacgaggagtgcaaaatgccgaagggtaccgatgatacatgggcacagaagttgtacaacacccacctaaataagtgtgccctgttcgaaaaaccaagactgtccaataaggcttttatcattcaacattttgccgataaagtggaataccaatgtgaaggattccttgagaaaaacaaggatacggtctttgaggaacagatcaaagtgctgaaaagctccaaatttaagatgctgcccgaactcttccaggacgatgagaaggccatcagtcccactagtgccacatcttctggtcgcactccactcaccagaacaccagctaaacccactaaggggcggcccgggcagatggccaaagagcacaaaaagaccgttggtcatcagttcagaaacagcctgcatcttctgatggagaccttgaacgcgaccaccccccactacgtccgctgtataaaacccaacgacttcaaatttccattcacgtttgacgaaaagcgggccgttcagcagctacgcgcctgtggcgtgctagagacaattcggattagcgccgcaggatttccttcccgctggacatatcaggagtttttttcccgctatcgtgtcctaatgaaacagaaagatgtgctcagcgacagaaagcagacctgtaagaatgtgctggaaaagctgatcctggataaggacaagtatcagttcgggaaaaccaaaatctttttcagagcaggccaggtcgcctatctggagaaattgagagcggataaacttcgtgctgcgtgcattcgcatccagaagacaatccggggttggctactgcggaagaaatatcttcgcatgaggaaagcagccatcaccatgcagagatatgtgcgcggctaccaggcaagatgttacgccaagtttctgagacgtacaaaagcagcgaccataatccagaagtattggagaatgtacgttgtgagacgcagatataaaataagaagggccgcaacaattgtcctacagagctacttgcggggcttcttggcaaggaaccgctatcgaaaaattctgcgagagcataaggctgttattatccagaaacgagtgaggggatggctggcccgcactcactacaagaggtcaatgcatgccataatttatctgcagtgctgtttccgccggatgatggccaagagagagctgaaaaaattgaagattgaggctagaagtgtcgagcgctataagaagttgcacattgggatggagaacaagatcatgcaacttcaacggaaggtggatgagcagaacaaagactacaagtgcctggtcgagaagctcacaaatttagaggggatttataatagcgagaccgagaagcttaggagcgatttagagaggctgcagctgtcagaggaagaagcaaaagtggcgaccgggagagtgctgtctctgcaagaagaaatagccaagctgcgtaaggaccttgagcagacccgatcagagaaaaagtgcattgaggagcatgcagacaggtacaaacaagagaccgagcagctggttagcaatctcaaagaggagaataccttgctcaagcaagaaaaagaggctcttaatcaccgaattgtacaacaggcaaaagagatgacagagacaatggagaagaaactggtcgaagaaactaaacagctcgagcttgatttaaatgatgaacggctcaggtatcaaaatctgctgaacgagttctcaagactggaagaaaggtatgacgacttaaaggaagaaatgacacttatggtccatgtacctaagccaggccacaaaagaaccgacagcactcatagttccaacgaatctgagtatatttttagcagcgaaatcgccgaaatggaggacatcccaagtaggactgaggagccaagcgagaagaaggtccctctcgacatgtcgctcttcctgaaactccagaaaagagtgaccgaactcgagcaggaaaaacaggtaatgcaagacgaattagacagaaaggaggaacaggtgctgagatctaaggccaaggaagaagagcgcccacagatccggggagccgaacttgagtacgagtcactgaaacggcaggagttggagagtgaaaataagaagctgaaaaacgagctgaatgagctgcgaaaagcactttctgaaaaaagtgccccggaggtgaccgcaccaggcgctcctgcctatcgtgtccttatggagcagctaaccagcgtcagcgaagagttggatgtgagaaaggaggaggtccttattttgaggtcccagctggtgtctcagaaagaggccattcagcctaagctccatgagaacacaatgactgacagcactatcctgctcgaagatgttcagaagatgaaagacaagggcgagattgcccaggcatacattgggctcaaagaaactaaccgcctgctggagtcccagttgcagtcacagaaacgatctcatgagaacgaagccgaagccttgcgaggggagattcagagtctgaaggaggagaacaatcggcagcagcaactcctggcccagaacctccagctccccccagaggcccgtatagaagcaagcctgcagcatgagatcaccagactcaccaatgaaaatctagatcttatggaacagctagaaaagcaggacaagactgtccgtaaactgaaaaaacaactcaaagtcttcgctaaaaaaataggggagttagaggtgggacagatggagaatatttcaccagggcaaattatagacgagccgatcaggccagtgaacatccccagaaaagaaaaggatttccagggtatgctggaatataagaaagaggacgaacagaaactagtcaaaaacctcattctggaactcaaaccaagaggcgtggccgtgaacctgatccccggccttccggcttatatcctgtttatgtgcgtgagacacgcggactacttgaatgatgaccagaaagtcagaagtctactcacaagcacaattaatagtataaagaaggtgcttaaaaagaggggagacgatttcgaaacagtctcgttctggctgtcaaacacctgtcgctttctgcactgtctcaagcagtattctggtgaagaagggttcatgaaacacaataccagccgacagaacgagcactgtttaactaactttgacctggccgaatataggcaggtcttgagtgacctggctatccagatctatcagcagctggtgagagtcctggaaaatatcctgcagccgatgatcgtctctggtatgctggaacatgaaaccatccaaggagtgtccggagtgaaacctactggtcttcgaaaaagaacctccagcatagcagatgagggcacctacacgctcgactccatcctgagacagctgaactcattccattcagtgatgtgccagcacgggatggacccagaacttatcaaacaggttgtgaaacaaatgttctacataatcggtgcgattaccttgaataatctgttactgaggaaagatatgtgctcgtggtccaaggggatgcagattcgatataacgtgtcacagctggaagaatggttaagggataagaatctgatgaacagtggggccaaggagacattggagcccttgattcaggcggcgcaactcctgcaggtgaaaaagaaaactgacgatgacgcggaggcaatctgtagcatgtgtaacgcgctgacgacagcccaaatcgtgaaggtcctgaacctctacaccccagtgaatgagtttgaggagcgcgttagcgtatcatttatcagaacaattcagatgagactccgggatcgcaaggatagccctcagctgctcatggacgctaaacatatatttccggtgacctttcccttcaatccctcttccttggcattggagaccatccaaattccagcatcgctgggactcggattcatatcgcgcgtttag

SEQ ID NO: 125438 - DNA, 5562 bp, synthetic construct
  misc_feature 1..5562: note = Description of Artificial Sequence: Synthetic coding sequence
  source 1..5562: mol_type = other DNA
atggccgcctccgagttatatacaaagtttgctcgcgtgtggatccctgatccagaggaagtctggaaatctgcggagctgctcaaagattacaaacctggcgacaaggtgctgcttctgcatctggaagagggtaaagatctggagtaccacttagaccccaaaaccaaagaactgccacacttgaggaacccagatatcctggtgggggagaacgatttgactgcgctaagttacctccacgaacccgcagtgctacataatttgagggtaagattcatcgacagtaagctcatttacacgtactgtgggattgtgctggtggcaatcaatccatatgagcagcttccgatttacggtgaggacataatcaacgcatattccggtcagaacatgggagacatggatccacacatctttgccgtggctgaagaagcctataaacagatggcccgcgatgagcgcaatcagtcgatcatcgtcagcggtgaatccggcgccggcaagaccgtgtcggccaagtatgctatgagatactttgctactgtttccggctcagctagcgaggccaatgtggaggagaaagttctggcctccaaccccatcatggagtctatcggaaatgcaaaaaccaccagaaacgacaattcttcaagattcggtaagtatatcgagataggattcgacaaaaggtacagaatcattggcgccaacatgagaacatacctgcttgaaaaatcccgagtcgtttttcaggccgaagaagagcgcaactaccacatcttttatcagctctgcgcgtcagcaaagctgcctgagttcaaaatgctcagattgggaaatgccgataactttaactacacaaagcagggcggctctccagtgattgaaggggtggatgacgctaaagaaatggcccacacacggcaggcttgcaccctgctgggcatctctgaaagtcatcagatgggtattttcaggattctggccggaatcctccatctgggcaatgttggattcacgtcacgcgatgcagatagctgtaccatacccccaaaacatgaacctctgtgcattttttgcgagctcatgggcgtggattacgaggaaatgtgtcattggctctgccacaggaaattggcgacagctaccgagacttatatcaaacctatctcaaaactgcaggccacgaatgcccgtgacgcgctcgctaagcatatttacgccaagttatttaactggattgtggataatgtgaatcaggcattacactccgccgttaaacagcactccttcatcggagtgcttgacatttatggtttcgaaacatttgaaattaacagctttgagcagttctgtattaattacgcgaacgagaaactccagcagcagtttaacatgcacgtttttaaactggaacaggaagaatacatgaaagagcagataccttggactctgatagacttttacgacaatcagccctgcattaacctgatagagagcaagctggggatcctggacctgctggacgaagaatgcaagatgcccaaaggaacagatgatacctgggctcaaaagttgtataatacacacctcaacaaatgtgctctgtttgaaaaacctaggttgagtaacaaagccttcattattcaacacttcgccgacaaggtggaataccaatgtgagggtttcctggagaagaataaggacaccgtgtttgaagagcagattaaagtgctgaaatctagcaagttcaagatgttaccagagctgttccaagacgatgaaaaggcgatcagcccaacaagtgctacgtccagcggaaggactcctttgaccagaacgcccgccaagcctacgaagggacgcccaggccaaatggctaaggagcacaaaaagaccgtgggccatcagtttcggaactcattgcatctgttgatggagacattgaacgccacgacaccccactacgttagatgcatcaaaccaaatgacttcaagttcccgttcacattcgacgagaaacgcgccgtgcagcaactgcgggcatgtggggtgctggagaccatccgaatcagcgctgccggatttccctccaggtggacctaccaagaattcttctcccggtatagggtgctgatgaaacagaaagatgtgctgagcgaccgaaaacagacctgcaagaacgtgttagagaagctgattctggacaaggataagtaccagtttggaaaaactaaaatatttttccgcgccggccaggtcgcctatctggagaagcttagagccgacaaactccgagctgcgtgtattcgtatccagaagaccattcgtgggtggctacttagaaagaagtacctgcgcatgcggaaggcagcgatcacaatgcaaaggtacgtgcgaggctaccaggcccgttgctacgctaaatttctgagacgcactaaggcagcaacaatcatacagaaatattggagaatgtatgttgttcgcagaaggtacaaaattcgccgcgctgcaacaatcgtcctgcagtcatatcttcgcgggtttctggcccggaatagatatcggaaaatactcagagagcacaaagcagtcataattcaaaagcgggtgaggggttggctcgcacgaacacattacaaaagatcaatgcacgctattatctacctccagtgttgctttcgacggatgatggctaagagagaattgaaaaagctgaagattgaggcacggagcgtggaacggtacaaaaagcttcatattggcatggaaaacaagatcatgcagctgcagcgcaaagtggacgagcaaaacaaagattataaatgcctcgtagagaaactcaccaacctggaaggtatctataactcagaaactgagaaattacgtagcgatctggaacggctgcagctctctgaggaagaagcgaaggtggccactggccgcgtcctatctctacaggaagaaatcgcgaaactccgtaaagacctagagcagacgagatctgagaagaagtgcatcgaggaacatgccgacagatacaaacaggagacagaacagctggtctccaacctcaaagaagaaaatacattgctcaaacaggaaaaggaagcactcaatcaccggatagttcagcaggccaaagagatgactgaaacaatggaaaaaaagctggtcgaggaaaccaaacagctggagctcgatctgaatgacgagcgtttaaggtaccagaatttgcttaacgagttctctaggttagaagagcgttatgacgatcttaaggaggagatgactctgatggttcatgtgcctaagccggggcacaaacgcaccgatagcacacacagttctaacgaatccgaatatattttctcgtctgagatcgcggaaatggaagatattccaagccggaccgaggagcccagtgagaaaaaggtaccactggacatgagtctctttctgaagctgcagaagcgggtgactgagctggaacaggagaagcaggtcatgcaagacgaactggatagaaaagaggagcaggtccttagatccaaggcaaaagaggaagaaaggcctcaaatccgcggggccgagctggaatatgaatcgcttaaaagacaggagctggagtctgaaaataagaaattgaagaacgagcttaatgagttaaggaaagcattgtccgaaaagagcgcacctgaagttacggccccaggcgcacctgcctacagagtcttgatggaacaactgacctcggtctcggaagagttagatgtgcggaaggaggaggtactcatcctgaggtcccaactggtgagccagaaggaagctattcaaccgaaggatgacaagaacactatgaccgattctaccatactgcttgaggatgtgcaaaagatgaaggacaaaggagagattgctcaggcttacatcggcctgaaagagacgaacaggctactggagagccaattgcagtcacagaaaagaagtcatgaaaatgaagcggaggcactgagaggagaaattcagtctctaaaggaagagaacaatcggcaacagcaattgctggctcagaacttacagctccctccggaagctcgtattgaagcttcactgcaacacgagattactcggttgactaacgaaaacttgtattttgaagagctgtacgctgatgatcctaaaaagtatcaaagctacagaatctccctgtacaaacgcatgatcgatctaatggagcagcttgagaagcaagataaaaccgtgcgaaagctgaaaaagcagcttaaggtttttgcaaaaaagatcggcgagctggaagtgggacagatggagaacatctcaccgggccagattatcgacgagcccatcagacctgtaaacattccaaggaaggaaaaagacttccagggaatgttagagtataaaaaagaggatgagcaaaaattagtgaagaacttgatcctggaattaaagcctcggggagtggcagtaaacctgattcctggtctgcccgcctatattttatttatgtgcgtgcgccacgcagactatctcaatgatgatcagaaagtgagaagtctgctcacctctacgataaactccattaaaaaggtactgaagaaaaggggtgatgatttcgaaacagtctcgttctggctttccaacacctgtagattcctgcattgcctcaaacagtacagtggcgaggaagggttcatgaagcacaacaccagtcgtcagaatgagcactgcctcacaaacttcgacctggctgaatacagacaggtccttagtgacttagccatacagatctaccagcagctcgtgagggtgcttgagaacatccttcaacctatgattgtatctggtatgctcgagcacgaaactatccagggcgtctccggcgtcaagccaacaggattacgcaaacggactagctcaatagcagacgagggaacctatactctcgattctatcctgcggcagcttaatagctttcattccgtgatgtgtcaacacggcatggatcctgagctgatcaagcaggtggttaagcagatgttttacatcattggcgctattactcttaataatctgctgctccggaaggatatgtgcagttggtctaagggaatgcagattcgctacaacgtgtcacaactggaagagtggctgagggataagaaccttatgaactctggcgccaaggagactttagaacctctaatccaagctgctcagctcctccaagtgaaaaagaagacggacgatgacgcagaggcaatctgcagcatgtgtaacgcgctaactacagctcagatagtgaaggtgttgaatttgtacacaccagtcaatgaatttgaggagcgggtcagcgtgtccttcatacgcaccattcagatgcgactgcgcgatcgtaaagatagccctcagctacttatggatgctaagcacattttccctgtcacttttccgttcaatccatccagtctcgcacttgagacaattcagatccccgcttctctcggcctgggttttatcagtcgggtctag

SEQ ID NO: 125439 - DNA, 5547 bp, synthetic construct
  misc_feature 1..5547: note = Description of Artificial Sequence: Synthetic coding sequence
  source 1..5547: mol_type = other DNA
atgtctgtcggggagctttactcccaatgcacccgtgtctggattcctgatccggacgaagtctggaggtcagcagagctgaccaaagactataaagaaggcgataagagcctgcagctgaggttggaggatgagaccatcctggaatatcctattgacgtgcagcgtaaccagctgccgtttctgcgaaatccagacatcctagtgggcgagaacgatttgaccgccctatcatatcttcacgagccagcggtgttgcataacctcaaggtgagattcctcgaatcaaaccacatctacacctactgcggaattgtgttggtggccatcaacccttatgagcagctgcccatatacggccaggacgtgatctatacgtattcaggtcagaatatgggtgatatggatccccatatatttgccgtggccgaggaagcatacaagcagatggcccgggacgagaagaaccagtccatcatcgtctctggagaatctggtgctggcaaaacagtatctgccaaatatgctatgcggtatttcgccaccgtcgggggatcggcatccgagactaatattgaagaaaaagtgctcgctagttcgccaattatggaggctatcggaaatgctaaaaccacccgtaacgacaatagcagccggttcggaaaatacattcagatcgggttcgacaagcggtatcacattatcggggccaatatgagaacctacctccttgagaagtcccgcgtagtctttcaggcagacgacgaacggaattatcatattttctaccagttatgcgctgccgctggactgccggagttcaaggaactcgcacttacttctgccgaggatttcttctacacatcccaaggaggcgatacctctatagagggggtcgatgacgccgaggattttgagaaaacaaggcaggccttcactctgttaggagtcaaggaatctcatcagatgtctatatttaagatcatcgcaagcattttacacctgggaagcgttgcaatacaggctgagcgagatggggacagctgttcaatcagcccacaggatgtctatctctccaacttctgcaggctgctgggcgtcgaacactcgcagatggagcactggctgtgtcacaggaagctcgtcaccacatccgaaacttacgttaagactatgtctctgcaacaggtgattaatgcccgaaacgcgctggcgaagcacatatatgcacaactattcggatggatcgtcgaacatattaacaaggcactgcatactagcctaaagcagcactcatttatcggcgtgctggacatttacggattcgaaacatttgaggttaatagctttgagcagttttgtattaactacgctaatgaaaaactgcagcagcaatttaatagtcacgtgtttaagctggagcaggaagagtacatgaaggagcagataccctggactctaattgatttctatgataaccagccttgcatcgatcttatcgaagctaaactgggaatattggatctcctcgacgaggagtgcaaggtgcccaagggtaccgaccagaactgggcccaaaagctctacgataggcattctagcagccaacactttcagaagcctcgcatgtccaacaccgcctttattatcgtgcatttcgccgacaaggtggaatacttaagcgatgggtttctagagaagaatcgcgatacagtgtacgaggagcagattaatattttaaaggcctcaaagtttcctctagtagcagacctctttcatgacgataaggatcctgtgcccgccaccactcctgggaaaggcagcagcagcaagatctctgtcagaagcgctcggccacctatgaaggtcagtaacaaggagcacaaaaagaccgttggtcaccagttccggacctctttgcatcttttgatggagactctcaacgccactacaccccattatgtgagatgcatcaagccaaatgacgagaagttaccttttcactttgaccctaaacgtgcagtgcagcagttgcgcgcatgcggagtgctagagaccatccgtatatccgccgccggctatcccagccggtgggcttaccatgacttttttaaccggtaccgcgtgcttgtgaagaagcgtgaactcgccaacacagataagaaagccatctgtagatctgtcctggagaacttaatcaaagacccggataaatttcagttcgggcggacaaagatcttttttcgagcagggcaggtggcctatcttgagaaactgcgggctgacaaatttcgcacagccactattatgattcaaaagacggtccgaggctggcttcaaaaagtgaagtaccatcggctcaagggagctactctcaccctgcagcgatactgccgtgggcacttggccaggcgattagccgaacacttgaggcggatccgcgccgccgtagttctgcagaagcattaccggatgcagagggcccggcaggcctaccagcgcgtgcgaagggccgccgtggttatccaggcatttactagggccatgttcgtcaggcgaacataccggcaagtcctcatggaacacaaggccacgacgatccagaaacacgtgcgcgggtggatggctcgccgccatttccagcggctgagggacgccgccatcgtcattcagtgtgccttccgcatgctgaaagccaggcgggagctgaaggcgctaaggattgaagctagatcggccgagcacctcaagcgccttaatgtgggaatggagaacaaggtggtccagctccagcgaaagattgatgaacagaacaaggaatttaagactctctcagagcaattgagtgttaccactagtacatacacgatggaagttgagcgactgaagaaggaattggttcactatcaacagtcccctggagaagacacctccctgaggctccaggaggaggtcgaatctttgcgcacggagctccaacgagctcactctgaacgtaagattctggaagacgcccattcgcgcgagaaagacgagctaaggaaacgcgtggccgatctggaacaagagaatgccctgctgaaggacgagaaagagcaactgaacaaccagatactgtgccagtccaaggatgaattcgcccagaacagcgtgaaagaaaatctcatgaaaaaagagctggaagaagagcgaagcaggtaccagaatctggtgaaagaatattcccagctcgagcagagatatgacaatcttcgggacgagatgacaattataaagcagaccccaggacatagaagaaaccccagtaaccaaagctcgctggagagcgacagcaattacccaagcattagcacatccgaaataggtgacacagaagacgccctgcagcaggtcgaggagatcgggctggagaaagcagccatggacatgaccgtgtttctgaagttgcagaagcgggtccgcgaattagagcaagaacgcaaaaaactgcaggtgcagctcgagaaacgtgaacaacaagactccaaaaaagtgcaggcagagccgccccagaccgacatagatctagaccccaatgccgatctagcctacaacagtctgaagaggcaggagcttgagtcagagaataagaagctgaaaaacgatttaaacgagctccggaaagccgtggcagaccaggctacccagaacaacagtagccacggctcacccgatagttacagcctgcttctcaatcagttaaagttagctcacgaggagctggaagttcgtaaagaagaagtgctcattctgagaacacagatcgtgtctgctgaccagcggaggcttgccggtcggaacgccgagccgaatattaacgctcgatcctcttggcctaattctgaaaagcacgtcgaccaggaggacgctatcgaggcttatcacggtgtgtgccaaacaaactccaagacggaggactgggggtatctcaatgaagatggagagctgggcctcgcttatcaaggtcttaagcaagttgcaaggctgctggaggcacaactgcaggcacaaagccttgagcacgaggaggaggtcgaacatctgaaggctcagctcgaggctttgaaagaagagatggacaagcaacaacaaactttctgtcagacactgctgctcagtcccgaggcccaggtagagtttggagtccagcaggagatcagcagactgactaatgagaatctcgacctcaaggaactggtcgaaaagttggagaaaaatgagaggaaattaaagaaacaacttaagatctatatgaagaaagcccaggacctggaggctgcccaggcattggcccaaagtgagcgcaagcggcatgaactgaatagacaggtgacggtgcagagaaaagaaaaagactttcaaggcatgctggagtaccataaagaagatgaagcccttctgatacgtaacctcgttaccgatctcaagccacagatgctgtctggcaccgttccatgcttgcccgcatatatcctctatatgtgtattaggcacgctgattatactaacgatgacttaaaggtacactcgcttctgacatcaacaattaacgggattaagaaggtactgaagaagcataatgacgacttcgagatgacctcattctggttgagcaatacctgcagactgctccactgcttgaagcagtacagtggcgacgaaggctttatgactcagaacacagccaagcagaacgaacactgtcttaaaaacttcgatctcacggaataccggcaggtgctgtcagatctgagcatccagatctatcagcaattgattaagatcgctgaaggtgtgctccagcccatgattgtctcagccatgctagaaaacgaaagcatccaggggttgtctggtgtgaagcctacagggtatcggaaaagatcttcaagcatggctgacggtgacaattcttattgtttggaagcaattattaggcagatgaacgctttccataccgtgatgtgcgaccagggattagaccctgaaataattctacaggtgtttaaacagctgttctatatgattaacgctgtgacactcaataacctcctgctgagaaaggatgtgtgctcttggtcaacgggaatgcagctaaggtataatatctcacagctggaagagtggttaagggggagaaacctccaccagtctggtgccgtgcagactatggagcctcttatccaggccgctcagcttctacagctcaagaaaaagactcaagaggacgctgaggcgatctgctcactgtgtacctcattaagtacccagcaaattgtgaagattctcaacctgtacaccccgctcaacgaattcgaggagagggttaccgtcgcatttatccgaacaatccaggctcagctccaggaaaggaacgaccctcagcagctgcttctcgatgcaaagcatatgttccctgttttgtttcccttcaacccttccagcctgaccatggactccatccacatccctgcatgcttgaacctcgaatttctgaacgaagtctag

SEQ ID NO: 125440 - DNA, 2892 bp, synthetic construct
  misc_feature 1..2892: note = Description of Artificial Sequence: Synthetic coding sequence
  source 1..2892: mol_type = other DNA
atggaacacaaggcaaccaccattcagaagcacgtgcgcggatggatggccagacggcatttccaacggctcagggacgcagcaatagtcattcagtgtgcgtttaggatgttgaaagctcgacgggagctcaaagccttgagaatcgaagccagaagcgcagagcacctaaagcggttgaacgtaggcatggagaacaaggtggtgcagctgcaacgaaagatcgacgagcagaacaaagagttcaaaactctctctgagcagctgagtgtgacaacatcaacctataccatggaggtggagagactaaaaaaggagctcgtgcactaccaacagtctcccggggaagataccagcctgaggcttcaagaggaggttgaatccctaagaacagagctgcagcgcgcccatagcgaacggaagattctggaagacgcccacagtagggagaaagatgaattgcggaaacgcgtggccgaccttgaacaagaaaacgctctactgaaggatgaaaaagagcagctgaacaaccagatactttgccagagcaaagacgaatttgcgcagaattcagtgaaagagaacctcatgaagaaggaattggaggaagagaggagccgataccagaatctggtgaaagagtacagtcagctggagcaaaggtacgacaacctacgtgacgaaatgaccatcatcaaacagactcccggccatcgccgtaacccctcaaatcagtctagtttggagagcgactccaactatccttctattagcacaagcgaaattggagatacagaggacgccctgcagcaggtcgaggagatcgggcttgagaaggcagccatggacatgaccgtgttcttaaagttgcaaaagcgagtacgggagcttgagcaggagcgcaagaagcttcaggtccagctcgagaagcgagaacagcaagattcaaagaaagtgcaggcagagccaccccagactgacatcgatctggatccaaatgcagatctcgcttacaacagcttaaagcgacaggagctagagagtgagaacaaaaagctgaagaacgatcttaacgaactgaggaaggcggtagccgatcaggcaacccaaaacaactcaagccacgggtcacctgactcgtacagtttgttactgaaccagctcaaactagcgcacgaggagcttgaagtgcggaaggaggaggtgctgatcctgcgtacacagattgtatccgccgaccaacgtcgactcgccggccgcaatgccgaacccaatatcaatgcccggtcttcttggcccaactccgaaaaacacgttgaccaggaggacgcgattgaggcttaccatggagtgtgccaaacaaacagactccttgaagcgcagctgcaggctcagtctctggaacatgaagaagaggtcgagcatcttaaagcgcagctcgaagctctgaaggaagagatggacaaacagcagcagactttctgccagactcttctgctgtctccggaagctcaagttgagttcggcgtccagcaggagattagtcggttaaccaatgaaaatttggatctaaaagaacttgtggagaagctggagaaaaacgagcggaagctcaagaagcagctgaagatttacatgaaaaaggcccaggacctggaggccgcccaggctttagcccagtctgaaagaaaacgccacgaactgaacagacaagtgacggtccagcggaaagagaaggattttcagggaatgttggaataccacaaggaggacgaagcactcttaattcgaaatttggtgactgatttgaagccccagatgctctccggaactgtgccctgcctgccggcgtacatcctctatatgtgcatcaggcacgctgactacaccaacgatgacctgaaagtgcatagcttactgacctcaaccatcaatggaatcaagaaggtgctgaaaaagcacaatgatgatttcgaaatgacatcattttggttgtccaacacctgtcgcctactacattgtttgaagcagtactctggcgacgaaggcttcatgacccaaaatacagccaagcagaacgagcattgcttaaaaaacttcgacctgacagagtatcgacaggtgcttagcgacctgagtatccagatttaccagcagttgatcaagatagcggagggggtattacagcccatgatcgtgagtgcaatgctcgaaaatgagagtatccagggcctaagcggcgtgaagccaaccggatatcgtaaaagatccagttctatggccgatggggataattcttattgcttggaagctatcatcaggcagatgaatgcttttcatactgtgatgtgcgatcagggactggatccggagatcatcctccaggtgtttaagcagctgttctacatgattaacgcagtcactctcaataaccttctcctcaggaaggacgtctgttcatggagcacaggcatgcagctacggtataacatctcacagcttgaggagtggcttcgcggaaggaacttgcaccaaagcggtgctgttcagacaatggagcccttgattcaagcggcacaactgctgcaactgaaaaaaaaaacacaggaagatgctgaagctatctgctcactctgcacctctctcagcacgcagcagattgtgaagatactgaacctgtacacccccctcaatgagtttgaagagcgcgtgacggtggcgttcatccgaacaatccaagcgcagttgcaagaaaggaatgacccacagcaactgttgctggacgctaagcacatgttccccgtgttgtttccctttaatccctccagcctgaccatggactctatccacatccctgcctgcttaaatctggaatttctgaatgaagtctag

SEQ ID NO: 125441 - DNA, 2163 bp, synthetic construct
  misc_feature 1..2163: note = Description of Artificial Sequence: Synthetic coding sequence
  source 1..2163: mol_type = other DNA
atgcactggcccgtgacccgggagtgcacacgcgtgtggataccagatccagacgaggtgtggaggtctgccgaactaaccaaggactataaagagggcgacaagtcgctacagttgcggttggaggatgagactatcttagagtatccaattgacgtgcagcgaaaccaactgcccttccttagaaatcccgatattctcgtgggggagaacgacctcaccgccctttcgtatttacacgagcctgccgtgcttcataatctgaaagtgcgatttctcgaatctaatcacatttacacatattgcgggatcgttctggtggccattaatccttacgaacagttgcccatttatggccaggacgttatctacacgtactctggtcaaaatatgggcgacatggacccacacatcttcgctgtggccgaggaggcttacaagcagatggcccgtgacgagaagaaccaatccatcatcgtaagcggggaaagtggagccgggaagaccgtttccgcaaagtacgcaatgcgttacttcgctacggtgggcggttctgcgtctgagactaatatcgaagaaaaggtacttgcctcctcacccataatggaggccatcggtaatgccaagactaccaggaatgacaattcctctaggttcggaaagtatatccagatcggtttcgacaaaagatatcatatcatcggagcaaacatgagaacgtatttgctggagaagtcccgcgttgtgtttcaggccgacgacgagcgtaattaccacatcttttatcagctgtgcgcagctgccggactccccgagtttaaggagctggctctaacttccgctgaggactttttctatactagccagggcggcgatacgtcgatcgagggagtggacgacgcagaggactttgagaaaacgagacaggcgtttactctcctgggagtgaaggaatctcaccagatgtccatctttaagatcatcgcgtccatcctgcacctcggtagcgttgcaatacaggccgaacgggatggggattcatgttccatatctccccaggacgtgtacctatcaaacttctgccggctgttaggcgtggagcacagccaaatggaacattggctgtgtcaccgaaaactggtgacgaccagtgaaacatacgttaaaaccatgagtctgcaacaagtgatcaacgcgagaaacgcgcttgccaaacatatctatgcacagttgttcggttggatagtcgaacatattaataaagcactccacacatctctgaagcagcatagcttcatcggagtgctcgacatctatggcttcgaaactttcgaggtgaactcctttgagcaattttgtattaattacgccaatgagaagttacagcagcagttcaacagccatgtctttaagctcgagcaggaagaatacatgaaagaacaaatcccctggaccttgatcgatttctacgataaccagccttgtattgacctgatcgaggcaaagctgggcatccttgacctcttggacgaggaatgcaaagtgcccaaggggaccgaccagaattgggcacaaaaactgtacgaccgtcactcgtcgagtcagcacttccagaaacccagaatgagcaacacagcgttcatcattgtccattttgctgacaaagtggagtacttaagtgacggctttttggagaaaaatcgggacactgtgtacgaggaacagattaacatacttaaggcttcaaaatttccactggttgctgacttgttccatgacgacaaagatccagttcccgccacaacccccggcaagggatcatcctctaagatttcagttaggtcagccaggcctcctatgaaggtgagcaacaaggagcacaagaagactgtgggccaccagttccgaacctctcttagtactcagcagatcgtgaaaattctcaacctgtataccccactgaatgagtttgaggaacgagtgaccgtggcatttatccggaccattcaggctcaattgcaggagcgtaacgatcctcaacagctcctgttagacgccaaacacatgttccctgtcctctttcctttcaacccttcttcattgacgatggactccatccacatccctgcctgcttgaatctggaattcctcaacgaggtctag

SEQ ID NO: 125442 - DNA, 5229 bp, synthetic construct
  misc_feature 1..5229: note = Description of Artificial Sequence: Synthetic coding sequence
  source 1..5229: mol_type = other DNA
atggccgttgcagagttgtatactcagtataatagggtctggattccagaccccgaggaagtttggaaatctgccgaaatcgcaaaagactacagggtgggggacaaggtcctgcggttgctgctggaagacgggacagaattggattactcagtgaatccagaatccctgccgccactcagaaatcctgacatcctcgtgggcgagaatgatctaacagccctttcttaccttcacgagcctgctgtactgcacaacctgcgaattcggtttgcagagagtaaactgatttacacctacagtggcatcattctggtggccatgaatccctacaaacaactgccaatatacggggacgccatcatccatgcctactccggtcagaatatgggcgacatggaccctcatattttcgctgtggctgaagaagcctacaagcagatggccagaaacaatcggaaccagtccattatcgtctctggcgagtccggcgctggaaagaccgtctctgcccggtatgcgatgcggtactttgccactgtgtccaaaagcggctcaaatgcccatgtagaagacaaggtcctggccagtaatccaatcaccgaggccgtcggtaacgccaagaccactcggaacgacaatagctcacgattcgggaaatatacagagatttctttcgacgaacagaaccaaatcattggggctaacatgagcacctatctgttagaaaaatcacgggtggtgttccagtccgagaacgaacgtaattaccacatcttctaccagctttgtgcatccgcacagcaatcagaattcaagcatcttaagctgggcagcgcggaagaatttaactacacacgcatgggaggcaacacagtgatcgagggtgtaaacgaccgtgccgagatggtggagacacaaaagacattcacgctgctaggatttaaagaagatttccagatggatgtctttaaaattttagccgccattctgcacctggggaatgtccaaatcactgcagtgggcaacgagcgctcctcggtcagcgaggatgacagtcacctgaaggtgttctgcgagttgcttggattggaaagcgggagagtagcacagtggttgtgcaatagaaagatagtgacatcaagtgagaccgtagtgaagcccatgactaggccccaggccgtgaatgctcgggatgcactcgctaaaaaaatatacgctcacctcttcgactttatcgttgaaagaattaatcaggctcttcaatttagcggaaagcagcacaccttcataggggtgctggacatctatggttttgaaacatttgatgtgaactctttcgaacagttctgtatcaattatgccaacgagaaactgcagcagcagttcaacatgcacgtttttaagcttgagcaggaagaatacatgaaggaggacatcccctggacgctcattgatttctacgataaccagcctgttatcgatctgatcgaggctaagatgggaattctggagcttctggacgaggaatgtctcctccctcacgggaccgatgaaaactggttgcaaaaattgtacaataatttcgtgaatcgaaacccattgtttgagaagccgaggatgagcaacacatccttcgtcatacagcacttcgccgataaggttgagtacaagtgcgaaggtttccttgaaaagaatagagacactgtttacgatatgttggtggagattcttagggcctccaagttccatctgtgtgctaatttcttccaggaaaaccctacccctccctccccatttggcagtatgatcacagtgaagagcgctaagcaggttattaagcccaacagtaaacacttcaggactactgtagggtccaagtttcgcagttccttatacctcctgatggaaactctgaatgcaactaccccccattatgttcggtgcatcaaacctaatgatgagaaattgccttttgagtttgacagcaagcgaatcgtgcaacagctccgcgcctgtggggtactcgaaactatccgtatctccgctcaaagctatccaagccgctggacgtatatcgagttttactctcgatacggcattcttatgactaaacaagagttgtcgtttagcgataagaaagaagtgtgcaaagtggttctgcatcgcctgattcaggattcgaatcaatatcagttcggaaaaactaagattttctttagagccggacaggtcgcctatcttgaaaaattgaggctggataaattgcgccagagttgcgtcatggtgcagaaacatatgagaggatggttacagcgcaaaaagttcctgagagaacgaagggcggctctgattattcagcagtactttcggggacaacagacggtgagaaaagctattaccgcagtggctctcaaagaggcttgggcagccattattatccagaagcactgccgcggatacctcgtccgctcactttaccagctgatcagaatggcaacgattaccatgcaggcctattcccgcggctttctggcccgaaggcgatatcgcaagatgctggaagaacataaggctgttattcttcagaaatatgcacgggcctggctggcgcgtagaagattccagagtattcgccgctttgtgcttaatattcagctcacatacagggtccagcgactgcagaaaaaactcgaagatcagaataaggagaatcacggcttggttgagaaactaaccagccttgccgcactccgagccggggacgtcgaaaagatccagaagctggaggcagagctcgagaaggcggccacccacagaaggaactatgaggaaaaaggcaagcgctaccgagacgccgttgaagaaaagcttgccaaactccagaaacacaacagcgagctagagacgcagaaagagcagatccagctaaagctgcaagaaaagacagaagaactaaaggaaaaaatggataacctgacgaagcagctctttgatgatgtgcagaaggaagagcgccagcggatgttattggagaaaagcttcgaactgaaaacacaagactacgagaaacagatccaatcactgaaggaggaaataaaggcgctgaaggacgaaaagatgcagttacaacacctggttgagggagaacatgtgactagtgacggccttaaggccgaagtagctagactcagtaaacaggtcaagaccatatctgagtttgagaaagaaatcgagctcctgcaggctcagaagatcgatgtcgagaaacacgtgcagtcacagaaacgggaaatgcgagagaagatgagcgaaataacaaaacagcttttggaatcctatgacattgaggacgtgaggtctagactctcggtggaggaccttgagcacctgaatgaggatggggaattatggttcgcttacgaaggactgaaaaaagcaactagagtccttgaatcccatttccagtcacagaaggactgttatgagaaggaaatcgaagcactcaacttcaaggtggtacatctcagtcaggagatcaaccacctccagaagctgttcagagaagagaacgatatcaatgagtctattcggcatgaggttacacgactgacatccgaaaatatgatgatccccgacttcaagcagcagatcagtgagctggagaagcagaagcaggatttggagataaggctgaatgagcaggcagagaagatgaagggaaaacttgaagagctgtccaatcaactgcacaggtcccaagaagaagagggcacccagcgaaaggccctggaagcgcagaatgaaattcacacaaaggaaaaggagaaattaattgacaagatccaggagatgcaggaggccagcgatcatcttaagaaacaatttgagaccgagagtgaggttaagtgtaactttaggcaggaagcctcacgtttgacactggaaaacagggatctagaggaggagttggacatgaaggacagggtgattaagaaactgcaggaccaggtgaaaaccctatcaaagacgatcggcaaagcgaacgacgtgcattcgtcctccgggccaaaggaatacctcggcatgcttcaatacaagagagaggacgaagccaaactcatccaaaatctcatcctagatcttaagccccgcggggttgtggttaatatgatacctggcttacctgctcatattttatttatgtgcgtcagatacgccgatagcttaaacgatgccaacatgttaaaatccctcatgaactccacgatcaacggtatcaaacaggtggtgaaagaacatctggaagattttgagatgcttagtttctggttaagcaacacatgtcacttcttgaactgtctgaagcagtactccggggaagaggaattcatgaaacacaattcacctcaacagaacaagaactgcctgaataacttcgacctgagcgaataccgccagattttgtcagatgtcgccatcagaatttaccaccaatttattataatcatggaaaagaacatccagcccattatcgtgcccggtatgctggagtatgagagcctgcaaggaatttccgggctgaaacccaccggctttcgcaagcgcagttcctccatcgatgacaccgacggctatactatgaccagtgtcctgcagcaactgtcctatttttacaccactatgtgtcagaacggcctcgatcccgaactcgtgaggcaggccgtgaaacagttattttttctcattggcgctgtgaccctgaactccctgttccttaggaaggatatgtgctcttgtcgaaaaggcatgcagatccggtgtaacatctcatacctggaggaatggctcaaagataagaacctgcagaattccttagccaaagagacattggagcctttgtcacaggcggcatggttgttgcaggtgaaaaaaaccacagatagtgatgccaaggagatatatgaacggtgtaccagcttgtctgcagttcagatcataaaaattctgaacagctatacgcccatcgatgacttcgagaagcgagtgacccccagcttcgtgcgcaaggtacaagccctgttaaattcacgggaagacagctcccagctaatgctagacacaaaatacttgttccaggtgacattccctttcaccccttctcctcacgcgttagagatgatccagatcccttccagctttaaactgggattcctgaatcgactctag

SEQ ID NO: 125443 - DNA, 1122 bp, synthetic construct
  misc_feature 1..1122: note = Description of Artificial Sequence: Synthetic coding sequence
  source 1..1122: mol_type = other DNA
atgcccagtagcacacctactgcagggagaacatgggcaatttggactcacacctatctcccctggcagaaaaggcacacctctcggtggcctgacgggaagagtgaagcccaggacctggacctgctgacgctgtatctgaacttgtactgtataactcctgcagccgccccagagctcccacctctatacgtgttcgtgtgcgagttagacagtcagcgcgctcctatccctgggtctgatgcctacaatgaaggagccgggggcgcctacatgcgcaacaatcgcaatcaatctatcattgtatccggggaaagtggcgcaggaaaaacagtgtcggcgcggtatgccatgcgctactttgccaccgtcagcaagagcggcagcaacgctcatgtggaggataaggtgcttgcatctaatcctataacggaggctgttggaaatgctaaaacaaccaggaacgacaacagctcaaggtttgggaaatatactgaaatctcctttgatgagcaaaatcagatcattggagcgaatatgtccacctacctcttggagaagagccgcgtggtgttccagtcagagaatgagcgaaattatcacatattctaccagctatgtgcctctgcacagcaaagtgagtttaaacatttgaaactgggaagtgctgaagaatttaactatacgcggatggggggcaacaccgtgatagaaggcgtaaatgacagggccgagatggtggaaactcagaaaactttcacattactggggtttaaggaagactttcaaatggatgtgtttaagattctcgccgccatcctgcacctggggaatgtacaaatcactgcggtggggaacgaacggtcttctgtgagtgaggacgatagccaccttaaggtattctgcgagctcctcggactcgagagtgggcgcgtggcccagtggctgtgtaacagaaagatcgtaacttcctctgaaacagtggtgaagcccatgacacgtccccaggctgtgaacgctagagacgctttggccaagaaaatttatgcacacctgtttgacttcatcgtcgaaaggatcaatcaggccctgcagttctcagttcttaaacctctgatgtag

SEQ ID NO: 125444 - DNA, 321 bp, synthetic construct
  misc_feature 1..321: note = Description of Artificial Sequence: Synthetic coding sequence
  source 1..321: mol_type = other DNA
atgaatccctataaacagctgccaatttatggcgacgcgataattcatgcttactccgggcagaacatgggagacatggacccacatatcttcgcggttgctgaagaggcttataagcaaatggcaagaaacaatcggaaccagtccatcatcgtgagcggcgagtccggggcaggcaagacagtctccgcgaggtacgccatgcgctacttcgcaactgttagcaagtccggatctaatgcccatgttgaggataaggtgttagctagcaacccaatcaccgaagccgtgggcaatgctaaaacaactagaaacgactag

SEQ ID NO: 125445 - DNA, 1293 bp, synthetic construct
  misc_feature 1..1293: note = Description of Artificial Sequence: Synthetic coding sequence
  source 1..1293: mol_type = other DNA
atggcggtggccgagctgtacactcagtacaacagggtctggattcctgacccagaggaggtgtggaagtccgcggagatcgctaaagattacagagtcggtgataaggttctgcggctcctgctggaagatggtaccgaactcgactactccgtcaacccagagagtcttcctccacttcggaaccctgatatactggttggcgagaacgaccttacagcgctctcttaccttcacgaacccgccgtgcttcataacctaagaatacgattcgctgagagcaaactcatttacacctactctggcattattctcgtcgctatgaacccgtataagcagctccctatttatggtgatgctatcattcacgcgtacagcggtcagaatatgggagatatggatcctcacattttcgcagttgcagaagaagcatataaacaaatggcgaggaataacagaaaccagtcgattatcgtgtctggggagagtggcgctgggaaaactgtatccgcccgctatgcgatgcgatactttgccactgtgagcaaaagcggcagcaacgcccatgtcgaggataaggtgctggcttcaaatcccatcacggaggccgtgggcaacgcaaagactactcgcaatgacaacagctcccgatttgggaagtatactgaaataagctttgacgagcagaaccagatcattggcgccaatatgtctacttacttgctcgaaaaaagccgcgtggtgttccagtccgagaacgaacgtaactatcacatcttctaccagctgtgcgcctctgcccagcagtctgagtttaagcacctgaaactaggcagtgctgaggaattcaattacacccggatgggcgggaataccgtgatcgagggcgtgaatgacagggcagagatggtggaaacacagaagacctttaccctgctgggttttaaggaggacttccagatggacgttttcaaaattctagccgcgatcttgcacctaggaaatgtgcagataaccgccgtgggaaatgagaggtcctcggtctcagaagatgactctcatctgaaagtcttctgtgagctcctcggcctcgagtctggccgagtcgcccagtggttatgtaacagaaaaattgtgaccagtagtgaaacagttgtgaagcccatgacacgcccccaggctgtgaacgcccgggatgcgctggccaaaaagatctatgctcatctgttcgatttcatcgtggagcgaattaatcaggctttgcagtttagtgtgctaaagcctttgatgtag

SEQ ID NO: 125446 - DNA, 810 bp, synthetic construct
  misc_feature 1..810: note = Description of Artificial Sequence: Synthetic coding sequence
  source 1..810: mol_type = other DNA
atggctgttgccgagctgtacacacaatataatcgggtgtggattcccgaccccgaggaagtctggaaaagtgccgagattgctaaggattaccgggtgggtgataaagtactaaggctacttctagaagatggaacagaacttgattactcagttaatcccgagtctctgccccctctccgaaacccagacatactggtgggagagaatgacctgaccgcgttaagctaccttcatgagccagctgtgcttcacaacctgcgcattaggtttgccgaatccaagctgatttacacttattccggtatcatactggtagccatgaatccctacaaacagttacccatctatggcgatgccatcatccatgcatacagcggacaaaacatgggtgatatggatcctcatattttcgccgttgctgaggaagcttacaagcaaatggcccgaaacaatcgcaatcagtccattattgttagtggcgagtccggagccggtaaaacggtgtccgcccggtatgcaatgagatacttcgccacggtgtccaagtcaggctctaacgcccatgtggaggataaggttttagcatccaaccctatcaccgaggccgttgggaatgccaaaactacgagaaacgacaatagcagtcgatttgggaaatacacagagatttcatttgacgaacagaatcaaattattggagctaacatgtccacctacctactcgaaaagagccgcgtcgtttttcagggtgtcccaaagaacttgattattcaggaatgggaggcaattttgagtctaagagtttag

SEQ ID NO: 125447 - DNA, 3762 bp, synthetic construct
  misc_feature 1..3762: note = Description of Artificial Sequence: Synthetic coding sequence
  source 1..3762: mol_type = other DNA
atggaggacggaaagccagtgtgggcccctcaccccacggatgggtttcagatggggaatatcgtggacattggacctgattcactgacaatcgagcccctgaaccagaaagggaagacttttctcgctttaatcaatcaggttttcccggcagaagaggattccaagaaggacgtagaggataattgtagcctgatgtatctgaatgaagccacactgctccataacatcaaggtgcgttattcgaaggaccgcatatatacatacgtggctaatatcctgatcgctgttaacccttatttcgatatccccaagatttattcctccgaagcaattaaatcctaccagggcaagtcgctggggaccaggccccctcacgtgttcgccatcgctgataaagcgttcagggatatgaaagtgttgaagatgagccaaagcatcatcgtgagtggggaatcaggggctggcaagactgaaaatacgaaatttgtgctgaggtatttaacggagagctacggtacaggacaggacatcgacgacagaattgtggaagcgaatcccttacttgaggcgtttgggaacgccaagaccgtcaggaacaacaacagtagcagatttggaaaattcgtggaaatccacttcaacgagaaaagtagcgtggtgggcggatttgtgagtcactacctgttggagaaaagtcgaatctgtgttcagggaaaggaagagcggaattaccacattttctaccgcctgtgtgctggcgccagcgaggacattcgtgaaaaattgcacctgagtagccccgacaacttccgttacttgaatcggggctgcacacgatactttgctaacaaggaaacagacaagcaaattctccaaaatcggaagagcccggagtatctgaaggccggctccatgaaggatccgctgttggacgaccatggcgattttatccggatgtgtactgctatgaaaaagatcggactcgatgacgaggagaagctggacctgttcagggtagtcgccggcgtgctgcatcttggcaatattgacttcgaggaagctggcagcacctctggggggtgtaacctgaaaaacaagtctgcccaatctctggagtactgtgctgaactcctgggactcgaccaggacgacctgagggtgagtctgaccactcgtgttatgttgaccactgccggagggaccaaggggacagtaattaaagttcctctcaaagtggagcaggccaacaacgcgcgagacgctttagctaagaccgtgtactcccaccttttcgaccacgtcgtcaacagagtcaatcagtgttttccgtttgagacaagtagttacttcatcggcgttctcgacatcgcaggcttcgaatatttcgaacacaattctttcgaacagttctgtataaactattgtaacgaaaaactccagcagttctttaacgaaaggatactcaaggaggaacaggaactgtatcagaaagagggcctcggcgtgaacgaagttcattacgtggataatcaggattgtattgacctgatcgaagcgaagttagtagggatcctagatatcctggatgaagagaacaggctaccccaacccagtgatcagcactttactagcgccgtgcatcagaaacataaggaccacttcagactgaccatcccacgtaagtcaaagcttgccgtgcaccgcaatataagggatgacgagggattcatcatacgccacttcgcaggcgctgtgtgttacgaaactacgcagttcgtcgagaagaacaacgatgcgcttcatatgagcttggagtctctgatctgcgaatcgcgggacaaattcatcagagagctgttcgagtcctccaccaacaacaacaaagacaccaagcagaaggcgggcaagcttagctttatctcggtggggaataagttcaaaacccagttgaaccttctcctggacaagttgcgatctactggagcatccttcatcagatgcattaagcccaacctgaaaatgacgagtcaccactttgaaggagcccagattttgtcccagctgcagtgcagtggaatggtttcagtgctggatctgatgcaaggcgggtacccatccagggcgtccttccatgagctctacaatatgtacaagaaatacatgcccgataaactcgcgcgtttagaccctaggctgttttgcaaggcgctcttcaaagccttgggcttaaatgagaacgattataagttcggccttaccaaagtttttttccggccaggcaagttcgcagaatttgaccaaattatgaagagcgacccagaccatctggcagagcttgtgaagagggtcaatcattggttgacatgtagccgatggaaaaaagtgcagtggtgcagtctgagtgtcattaaactgaagaacaagataaagtacagagcagaagcttgtataaaaatgcagaaaaccattcgtatgtggctctgcaagagaagacataagcctcgaatcgacgggctggtgaaagtgggcacgctcaagaagcggctcgacaagttcaatgaggtcgttagcgttctgaaggacggcaagcccgagatgaataagcaaattaagaatctcgagatttccatcgatacattgatggccaaaattaagtcgaccatgatgacccaggagcagattcagaaggagtatgacgcactggtgaagtcgtcggaagaattactatccgctctgcaaaagaagaaacagcaggaggaagaggccgaacgcctgcgcagaatccaagaggagatggaaaaggagaggaagcgcagggaagaggatgaaaaacgccggcggaaggaggaggaggagcggcgcatgaaactagaaatggaagctaaacgaaaacaggaagaggaagagaggaaaaaacgtgaagacgacgaaaaaaggattcaggccgaagtggaggcccagctggcacgccaaaaagaagaggaaagccaacagcaagccgttctcgagcaagagcgaagagaccgcgagcttgctcttcggatcgctcagtccgaggccgagctgatcagtgacgaggcgcaggccgacctcgcactccgtcgtggcccagcagtgctggcaaccaaggccgctgccggcactaagaagtatgacctgagcaaatggaaatacgctgagctgagagacacaataaacacctcctgtgacatcgaactgctggctgcgtgtcgggaagagttccaccggagacttaaggtgtatcacgcctggaagtccaagaacaagaagaggaacacagagaccgagcagagagccccaaagagtgtcactgattacgcccagcagaatcccgctgctcagatccctgcacggcagcgagagattgaaatgaatagacagcaacggttttttcggattcctttcattaggcctgccgaccagtacaaggacccccagagtaagaagaagggctggtggtatgcccactttgacggcccatggatagccagacagatggaactacacccagataaaccacctatcctgcttgtggcaggtaaagatgatatggagatgtgtgaactaaaccttgaggagactggcctcacacgcaagcgtggggcggagatcctcccgcgacagtttgaggaaatctgggaacggtgtggtgggatacagtatctacagaacgcgatcgagagtcgccaggctcgcccaacttacgctaccgccatgctacaaagcttgctgaaatag

SEQ ID NO: 125448 - DNA, 3858 bp, synthetic construct
  misc_feature 1..3858: note = Description of Artificial Sequence: Synthetic coding sequence
  source 1..3858: mol_type = other DNA
atggaagacgggaaaccagtatgggccccccatcctactgatggatttcagatgggaaatatcgtcgacatagggccggatagcttgacaatcgaacctctcaatcagaaggggaaaaccttcctcgccctaattaaccaggttttcccggccgaagaggactccaagaaggatgtggaagacaactgttcactcatgtacttaaatgaggcgaccttgttgcataatattaaagtgaggtacagtaaggacaggatttatacctacgtggctaacattctgatcgctgtgaacccttattttgatatccccaaaatttactcctcggaggccataaagagttatcagggaaaaagtctcggaacaagaccccctcacgtcttcgccatagctgacaaagcatttcgtgatatgaaagtcctgaagatgtcccaaagcattatagtctctggggagtcaggggctggaaagacagaaaatacaaaattcgttttgcgataccttactgagtcatacgggactgggcaggatatagacgataggatcgtggaggcaaatccactactggaggccttcggaaacgccaagacggtacgcaacaacaactcgtccagattcggcaaattcgtcgaaatacactttaatgaaaaatccagcgtagtcggaggctttgtgtcacactaccttctggaaaagagtcgcatatgcgtccaaggcaaggaggaacgcaattaccacatcttttataggctgtgtgccggagcttcagaagacataagggagaagctgcatctgagttcccccgacaattttcgttatcttaatagaggatgcaccaggtacttcgccaacaaagaaactgacaagcagatcttgcagaatcgtaagagtcctgagtatctgaaagccggatctatgaaagacccgctgctagatgaccatggcgattttatccggatgtgtacggccatgaagaaaattggtttggatgacgaggagaagctagacctgtttcgggtggtggccggcgtgcttcatctggggaacatcgactttgaagaggccggatcaacttcgggcggttgcaatctcaagaataaatccgcccagtctctcgaatactgcgccgaactgttgggcttggaccaagatgatcttagggtttcactgacaaccagggtgatgcttactacggcaggaggtacgaaaggcactgtgattaaggtgcccctgaaggtggagcaggcaaacaacgccagagatgctctggcaaagactgtgtacagtcacctcttcgaccacgttgtcaatcgggtgaatcagtgctttccctttgaaacatcttcttattttataggagttctcgacattgcgggattcgagtattttgagcacaattctttcgagcagttttgtataaattactgtaatgaaaagcttcagcaatttttcaatgaaagaatactgaaagaagaacaggaactgtaccagaaagagggcctcggcgtcaatgaggtccattacgtcgataatcaggattgtattgacctcatcgaggccaaactcgtgggtattctcgacatactggacgaggaaaaccgccttccccagccctccgaccagcatttcacaagcgccgtccaccaaaaacataaggatcacttcagactgaccatcccccgcaaaagcaagctagctgtccaccggaatatccgagacgacgagggttttattatcagacattttgcaggggcagtctgttatgaaaccacacaatttgtagaaaaaaataacgacgcattacacatgtctctggaatccctgatttgcgagtctagggacaagtttatccgggaactgttcgagagcagtacaaataataacaaagacacaaagcagaaagctggcaaactatcattcatctcggtgggaaacaaattcaaaacacagcttaatctcctcctagacaaattgcgatctacgggagcttctttcattaggtgcatcaagccaaatctcaaaatgacgtcccatcactttgaaggggcccagattctaagtcagctccagtgttccggcatggtgtcagtactggatttaatgcagggaggctatccctctcgcgcgtctttccatgaactgtacaatatgtataaaaaatatatgcctgacaaattagcacgcctggatcccagacttttttgtaaagcactgtttaaggcactgggcctcaatgaaaatgactataagtttggcctgacgaaggtattctttcgcccagggaaattcgcagagtttgatcaaatcatgaaaagtgatcccgaccatctggcagagcttgtgaaaagagtaaatcattggctgacgtgctccaggtggaagaaagtacagtggtgcagtctttctgtgatcaagctcaagaataagattaagtaccgggcagaagcttgcatcaagatgcagaaaaccatccggatgtggttgtgtaaaagaaggcacaagccccgaatcgatgggctggtgaaggtggggacactgaaaaagaggttagataaatttaatgaggtggtgtctgtgcttaaagatggaaaacccgaaatgaacaaacaaataaaaaatttggaaatctcaatcgatacgttaatggcaaagatcaagtccactatgatgactcaagagcagattcagaaagaatacgacgcgctggtaaagagctccgaggaactcctgagcgcactccaaaaaaaaaaacagcaggaggaggaggcagagagactgagacgaattcaggaagagatggagaaggaaaggaagcggcgcgaggaggatgaaaagagaaggagaaaagaagaagaggagaggagaatgaagctggaaatggaggccaagaggaaacaggaggaggaggagcgtaagaagcgcgaagatgatgagaaaagaatccaggctgaggtggaagcccagctggcaagacagaaagaggaagagtctcaacagcaggccgttctggagcaagagaggagggatagagagctggccctgaggatagctcagagcgaagcagagcttatatcagacgaggcccaggctgacctagcattgaggcggaatgatgggactaggcccaaaatgactccagaacagatggcgaaggagatgtcagaatttctcagcagaggccccgccgttttagctaccaaggcggctgccggtaccaagaaatatgatctctccaaatggaaatatgccgagctaagggatacgattaatacttcctgtgatatcgaattgctagccgcctgcagagaggagtttcatcggcgcctaaaagtgtatcacgcctggaagtcaaagaacaagaagaggaatacggagactgagcagagggcccccaaatcagtcactgactatgactttgcacctttcctgaacaactctccccagcagaatcctgctgcgcagataccagctaggcaacgcgagatagaaatgaacagacagcaacgattttttcgcataccctttatcaggcctgccgaccagtacaaggatccgcagtctaagaaaaaaggctggtggtacgcgcactttgacggtccctggatcgcacgccagatggaactgcacccggataaacctccaatacttctcgtagctggaaaggatgacatggagatgtgtgagctcaatctggaggagaccggtctgacccgcaagagaggagccgaaatcttgcctcggcaattcgaggaaatctgggagagatgtggcggaatccagtacctgcagaatgctatcgagtctcgtcaagcgcggccaacttacgccacagccatgttacaatcacttctgaaatag

SEQ ID NO: 125449 - DNA, 3861 bp, synthetic construct
  misc_feature 1..3861: note = Description of Artificial Sequence: Synthetic coding sequence
  source 1..3861: mol_type = other DNA
atggaggacggcaaaccagtctgggccccacacccaaccgacggatttcagatgggtaatatagtcgacatcgggccagattcactgacaatagagcccctgaaccagaaagggaaaactttcctggctctcattaaccaggtcttccccgccgaggaagatagtaaaaaagacgttgaagacaactgcagtctgatgtacttgaatgaggccactctcctccacaacataaaagtacgatacagtaaggataggatttacacctatgtggccaacatcttgatcgccgtaaatccctattttgatattccaaaaatttactcatccgaagccatcaaatcataccagggaaagtcactggggactcgacctcctcacgtgtttgccatagctgataaggcattccgcgatatgaaagtgctaaagatgtcacagtccattatcgtgtctggcgaatcgggagcaggcaagactgagaatacaaagttcgtgctaaggtacctgaccgaatcttacggcaccggccaagacatcgatgaccgtattgttgaggctaaccctctcttggaggccttcggaaatgccaaaaccgtgcgcaataataatagttcgcggttcggcaagtttgtagaaattcactttaatgagaaatcgtcagtcgtgggaggattcgttagccactatcttttagagaaaagccgaatttgtgtgcaggggaaagaggagcggaattaccacatcttttaccgactatgcgcaggggcttcagaggatatccgcgaaaagcttcatctgtctagtccagacaactttcgatatttgaacagggggtgcactcgatatttcgccaataaggaaacagataagcaaatccttcagaatcgcaaaagccccgagtacttgaaagctgggagcatgaaagatcctctactggacgaccacggtgatttcataaggatgtgcactgcgatgaagaaaataggattagacgatgaagagaaacttgaccttttccgagtggtcgctggcgttcttcacctcggaaacatagattttgaagaggctggatccacttccggcgggtgcaacctgaagaataagtcagcacaaagccttgagtactgcgccgagcttctgggactagatcaggatgacttgcgggtatcacttaccacccgggtaatgcttaccacagccggcggaactaaggggacagtgataaaagtaccactgaaggtggaacaggccaataatgctagggacgccctggctaaaactgtttacagccacttgtttgaccatgtagtgaatagggttaaccagtgcttcccatttgaaacctcatcctatttcatcggggtgctcgatatcgctggcttcgagtattttgaacacaacagtttcgagcagttttgcatcaactactgtaatgagaaactgcagcagtttttcaatgaaagaatcctaaaagaggaacaggagctatatcagaaggaaggcctgggggtgaatgaggtgcattatgtggataaccaggattgtatcgatctaatcgaagccaagctcgtaggcattcttgatatcttggatgaggagaatcgcttacctcagcccagcgatcagcatttcacaagcgccgtgcatcaaaagcataaagaccattttaggctgaccatcccccgcaaaagtaaattggctgtgcatcgcaatatccgcgacgacgaagggtttatcattagacactttgctggagccgtctgctatgagaccacgcaatttgtagagaaaaacaatgatgctctccacatgtctctggagtccctgatttgtgaaagcagagacaaattcattagggagctgtttgaatcaagtactaataataacaaggacaccaagcagaaggcagggaaactgtcctttatttcagttgggaataaatttaagactcaacttaacctcctgctggataagctacgatccacaggcgcttctttcattcggtgcattaagcctaatctcaagatgacatcccaccactttgaaggcgcccagatcctgtctcaactgcaatgtagtggcatggtatctgtgctcgatctgatgcaggggggatacccctcccgagcgtcttttcacgagctctataatatgtacaaaaagtatatgccggataagctggcgaggctggatccgcgattattctgtaaagcacttttcaaggcactcgggcttaatgaaaatgactataagttcgggcttaccaaggtctttttcagacccggcaagtttgctgaatttgaccagatcatgaagtccgaccctgaccacttggcagagctggtaaagagggtcaatcattggctgacatgtagcagatggaagaaggttcaatggtgctccctgagcgtaatcaaacttaagaacaaaataaaatatcgggcggaggcatgcatcaaaatgcagaagactatcagaatgtggctttgcaaaagacgacataagccacggattgatggcctggtcaaggtggggaccctgaagaagcgacttgacaagttcaatgaagtggtgagtgtgcttaaagacgggaagccagagatgaacaagcaaataaagaacctcgagatttctatagacaccttgatggccaagatcaagagcactatgatgacacaagagcagattcaaaaggagtatgatgctctggttaagtccagcgaagagctgctgagtgcacttcagaagaagaaacagcaagaggaagaggccgaacggctgagaaggattcaagaggagatggagaaggagcgtaaacgccgcgaagaggacgagaaacggcgccggaaagaggaggaggaaagaagaatgaagctggaaatggaagcaaagagaaaacaggaggaggaagaaaggaaaaaacgcgaggatgacgagaagcgtatacaggcggaggtagaggctcagctggcccgtcagaaggaggaagagtcccagcagcaggccgtgctggaacaggaaagaagggatcgcgagctggcgttgcgcatagcccagtccgaagccgagctcattagcgacgaagcccaagctgatttggctcttcggaggtacctcgactcttacccagtcacctctaagaacgacggcacccggccgaagatgacccccgagcaaatggccaaagagatgtcagaatttctgtcaaggggaccagctgtcttagctacaaaagcagccgctggaacaaagaagtatgacttgtccaaatggaagtatgcggaacttagagacactatcaacacctcctgcgacattgagttgttggccgcatgtcgggaagagttccatagaaggttgaaagtgtaccacgcatggaagtccaaaaacaaaaaacggaatacggaaacggagcagagggcacctaaatcagtgaccgactatgcccagcaaaacccagcagcccagattcccgcgcgccagagggaaatagaaatgaaccgacaacagcgcttcttccggattccctttatacgacctgctgatcagtataaggatccgcagtcaaagaaaaaaggatggtggtacgctcacttcgacgggccatggatcgccagacagatggagctgcaccccgataagccccccatcctcctggttgctgggaaagacgatatggaaatgtgcgagctgaacttggaggaaacaggcctgacccgaaagaggggtgccgagatcctcccccgccaattcgaggagatctgggagcgatgcggcggcatccagtacctacaaaacgctatcgaatccagacaggcaaggccaacatatgcgacagctatgttgcagtctcttctgaaatag

SEQ ID NO: 125450 - DNA, 3789 bp, synthetic construct
  misc_feature 1..3789: note = Description of Artificial Sequence: Synthetic coding sequence
  source 1..3789: mol_type = other DNA
atggaagatggcaagccagtgtgggcacctcatccaacagacggctttcagatgggcaacatcgtagatattgggcccgacagcctgacaatcgaacccctgaatcagaagggcaagaccttccttgctctgattaatcaagtttttcccgccgaggaggactcaaagaaggacgtcgaggataactgcagtctgatgtatcttaatgaggcgacccttctccacaatattaaggtccgctattctaaggaccgtatttacacctacgtagctaacattttgatcgctgtcaacccttattttgatatccccaaaatctattcttctgaggccattaaatcctaccaaggaaaatctttaggaaccagacctcctcacgtttttgccattgccgataaggccttcagagacatgaaagtgctcaaaatgtcccagtccatcattgtttctggcgaatctggtgcaggcaagacagaaaacacaaagttcgtgttgaggtacctgacagagtcctatggaaccggacaggacatcgatgaccgaatagttgaagctaacccattgctcgaggcttttgggaacgcaaagacggttcgcaataacaattccagcagatttggaaaattcgtcgaaatacacttcaatgaaaagtcatccgtggtgggcggatttgtcagccactaccttttggagaaatcacgaatctgcgtccagggaaaagaggagcggaactatcacatattttaccgactctgtgccggcgcatctgaggacataagggagaaactacacctttcctccccagacaattttaggtacttaaatagaggttgcacccggtattttgccaacaaagaaaccgacaagcagatcctgcagaataggaaatctcctgagtacctcaaagctggttcaatgaaggatccattgcttgacgaccacggtgatttcattagaatgtgtactgctatgaagaagatcggcctggatgatgaggagaagctggatttatttcgcgtggtggcaggagtgctccaccttggcaatatcgatttcgaagaggccggttctaccagcggaggctgcaacctgaagaataaaagcgcgcaaagcctggaatattgtgcggaactgctcgggctagaccaagacgatctccgggtgtccttgacgacccgagttatgctgaccacagccgggggcactaagggcaccgtaatcaaggtgcccctgaaagttgagcaggccaacaacgccagagacgccctggctaagacagtgtactcacacctctttgaccacgttgtgaatcgtgttaatcaatgctttccattcgaaactagtagttacttcatcggcgtgctggatatcgctggtttcgaatatttcgagcataattcatttgagcagttctgtatcaattactgcaacgagaaattgcagcagttctttaacgagcgaatcctcaaggaagagcaggaactgtaccagaaagaaggtcttggagttaacgaggtacactacgtggacaatcaggactgcatcgacctaatcgaagcaaagctcgtgggaatcttagatattcttgatgaagaaaatcgactgcctcagccatcagatcagcatttcaccagtgccgttcatcagaaacataaggatcactttcggctcacaattccaaggaaaagtaaacttgccgtccaccgaaatattcgagacgatgagggctttatcatcagacactttgccggggccgtctgctatgagaccacccaatttgtcgaaaaaaataacgacgctcttcacatgtctctcgaatcactgatatgcgagagccgggataagtttatccgggagctgttcgagtcctccaccaacaacaacaaggatacaaagcagaaggccggaaagttgagtttcatcagtgtcggcaataagttcaaaactcaactgaatctcctgcttgacaaattgaggtctaccggggcaagctttatcaggtgtataaagcccaacttaaagatgacctctcaccatttcgagggagctcagatcctgagccagttgcagtgtagcggaatggtatctgtgctggaccttatgcagggtggatatcctagccgggcatcgttccacgaactttacaacatgtataaaaagtatatgccggataaactggccaggcttgacccacgcctcttttgcaaggctcttttcaaagcattgggtttaaacgagaatgattacaaattcggactgacaaaggtcttttttaggcccggcaagttcgccgaatttgaccagatcatgaaaagtgatccagaccacctggctgaactagtaaaacgcgtgaatcactggctgacatgtagccgctggaaaaaagtccagtggtgcagcctaagtgtgatcaaattgaagaacaaaatcaaatatagggcggaggcttgcattaagatgcagaagaccattcgcatgtggctgtgtaagagacggcacaaacctagaatagatggactggtgaaagtagggacactcaagaaacgcctagacaaatttaacgaggtggtgtccgttctgaaggacggcaaaccggaaatgaacaagcagatcaaaaatcttgagattagtatcgacaccttgatggcaaagatcaagtctaccatgatgacgcaggagcagatccagaaagaatacgacgccttagttaagtcatcagaggaactcttgagcgctctccagaagaaaaaacagcaggaggaagaggctgaaaggctacgacgaattcaagaggagatggagaaagaacggaaaagacgggaggaggacgaaaagaggaggcggaaagaagaggaagaaaggagaatgaagctagaaatggaagcaaagagaaaacaggaggaagaagaaagaaagaaacgtgaggatgacgaaaaacgaatccaggccgaagtcgaggcgcagctggctagacagaaggaggaggaatcacagcagcaggcggtcttagagcaagagcggcgcgatcgcgagctcgccctgcggatcgcccagagcgaagccgaactcatctctgacgaggcccaagccgacctggctctgcgccggggtcccgcagtgctggctactaaagccgctgcaggcacaaagaagtatgacctgagcaagtggaagtacgcagagttgagggatactattaacacctcatgcgatatcgagctgttggccgcatgcagggaggagtttcaccgacggctgaaagtctatcatgcatggaagtcaaagaacaaaaaacgtaataccgaaacggagcaacgggcacccaagtcagtgacggactatgacttcgccccctttctaaacaacagccctcagcagaatcccgcagcacaaattccagccaggcagagggaaattgaaatgaacaggcaacagagattctttaggatcccattcattagacctgccgaccagtacaaggatcctcagagcaaaaagaagggctggtggtacgcacacttcgatggaccctggattgctagacagatggaactgcaccctgacaagcctcccatccttctcgtagcaggtaaggatgacatggagatgtgcgaactgaatttggaggaaactggtctgacacgcaagcgaggtgccgagatactgccacgacagtttgaagagatctgggagagatgcggaggcattcagtatctgcagaatgcgattgagagcagacaggcaaggcctacttatgcgacggcgatgctgcaatctctgctgaagtag

SEQ ID NO: 125451 - DNA, 3888 bp, synthetic construct
  misc_feature 1..3888: note = Description of Artificial Sequence: Synthetic coding sequence
  source 1..3888: mol_type = other DNA
atggaagatggaaagcctgtctgggcccctcatccgactgatggatttcagatggggaacattgtggacattggcccggattccctcacaatagagcccttaaaccaaaaaggaaagacgttcctcgcgctgataaatcaggtgttcccagctgaagaggatagcaaaaaagatgtagaggacaattgctccctcatgtatttgaacgaggcaaccctcctccacaatattaaggtgcgatactccaaagataggatttacacttatgtggcaaacatacttatcgcagtgaacccttatttcgatattccaaagatatacagctccgaagccattaagtcctaccagggcaaatcactcggcaccagaccgccacacgtattcgccatcgctgataaagccttcagggatatgaaagtgctgaaaatgagccagtcaattattgttagtggcgagtcgggagcgggcaaaaccgaaaatacgaaatttgtattgagatatctgacagaaagttatggtaccggtcaggacatcgatgatagaattgtggaggctaacccacttctggaagcattcgggaacgcgaaaactgttagaaataataatagttctcggttcggaaagtttgttgagattcactttaatgagaagagcagtgtcgtgggggggtttgtaagtcattatctcctcgagaaaagcaggatctgtgttcagggtaaagaggaaaggaactaccatatcttctatagactgtgcgctggcgcgtccgaagatataagggagaagctgcacctttcctctccggacaactttaggtacctcaaccgaggatgtacgcgctatttcgcgaataaggagacagacaagcagatcctccaaaacaggaaaagccccgagtacctgaaagctggatctatgaaagatccactgttggatgaccacggtgacttcatacggatgtgtactgccatgaaaaaaattggactcgatgatgaagagaaactggatttgttccgagtggtggcaggggtgctacacctgggaaatatcgacttcgaagaagctggcagtacaagtggggggtgtaacctcaaaaataagtctgcacagtctctggagtactgtgctgagctgttgggacttgatcaggacgaccttcgcgtatccctgaccacccgcgtgatgttaactactgcagggggtaccaaaggcacagtcatcaaagtgcctctgaaggtggagcaggccaacaatgcccgcgacgccctcgcaaagacagtgtacagtcacctcttcgatcatgtggttaatagagtgaaccaatgcttccccttcgaaaccagttcttattttatcggagttctggatatcgcaggttttgaatacttcgagcataattccttcgaacagttttgcattaactattgcaacgaaaagctgcaacaattcttcaacgaacgaattctcaaggaagagcaggaactctatcaaaaagagggccttggggtgaacgaagtgcattatgtggataaccaagactgcattgatttgatcgaggctaaactggttgggattctcgacattctggacgaggagaacagactaccacagccaagcgatcaacacttcacctccgccgtccatcagaagcataaagatcacttcaggctgaccatcccacgtaagagtaagctcgccgtgcacaggaatattcgggacgatgaagggtttattatccgccactttgccggggctgtgtgctacgaaacaacccagttcgtggaaaagaacaacgacgcacttcacatgagcctagaatccctgatatgcgaatccagggataaatttatcagagagctgttcgaatcttccacaaacaacaataaggacacgaagcagaaagccggcaaattgtctttcatcagtgtggggaataagttcaagacccaactgaacctcttactcgacaagctgagatccacaggagccagtttcattaggtgtattaaacccaatctaaagatgacttcacatcacttcgaaggagcgcaaattctgtcccagctgcaatgttctgggatggtgagtgtgcttgatctcatgcagggtggctacccttctcgggcaagcttccacgagttatacaatatgtacaagaagtatatgcccgataaactagcccgcttggacccccgcctgttttgtaaagccctttttaaggcactgggcctgaacgagaacgactacaaattcggcctaactaaagtgtttttcagaccaggcaaatttgcggagtttgatcaaattatgaagtccgaccctgatcacctcgctgaactcgtaaaacgagtgaaccactggctaacctgttcaagatggaagaaggtccagtggtgctccttatctgtcattaaattaaagaacaaaattaaatatagagccgaggcctgcatcaagatgcagaaaaccatacgcatgtggctctgcaagcggcgtcacaagccgaggatcgacggccttgtgaaggtgggcaccctgaagaaacgccttgataagttcaatgaagtggtgagtgtcctgaaggacggtaagcctgagatgaataaacagatcaaaaacttggaaatcagcattgacacactgatggcgaagataaaatcaaccatgatgacgcaggaacagattcagaaagagtatgacgccctggtgaaatcctcagaagaactgttatccgctctgcagaaaaagaagcaacaggaggaggaagcagaaagattaaggaggattcaggaggaaatggagaaggagagaaagagacgagaggaagatgagaagcgccgacggaaggaggaagaggagcggagaatgaaattggagatggaagctaaaagaaagcaagaagaagaagaaagaaaaaagcgcgaagacgacgaaaaacgcatccaagcagaagtggaagcccagctggcgagacaaaaagaggaggaaagccagcaacaggccgtgctggagcaagaaaggagagatcgggaactcgcactacgaatcgcccagagtgaagccgaactgataagcgatgaagcacaggcagatctggctctgagaaggtatctggatagttaccctgtgacctccaaaaatgacggcacccgacccaaaatgaccccagaacaaatggcgaaagagatgtctgagttcctcagtcgcgggcccgccgtgcttgcaaccaaggccgccgccgggactaagaagtacgatctgagcaaatggaagtatgccgagcttagggacactatcaacacgagctgtgacatcgagctgttggccgcttgcagggaagagttccatagacggctcaaggtgtatcacgcgtggaaatcaaagaataagaaacggaatactgagacagagcagagggcacctaagtccgtgacagattacgattttgcccctttcctgaacaattcacctcagcagaaccccgcagctcagatacctgcccgacagagagagatcgaaatgaataggcaacagcgattctttcgcattcccttcattcggcccgctgaccagtacaaggacccccagtctaagaaaaagggatggtggtacgctcacttcgacggcccgtggattgcccgacagatggagctccacccagataagcctcccatactgttggtggcaggaaaagatgacatggagatgtgcgagctgaatcttgaggaaactggcctgacccggaagcggggggcagagattctaccacgacaattcgaggagatttgggagagatgcggcgggatccagtacttgcagaacgctatcgagtcacggcaggctcgtccaacgtatgccacagccatgctgcaatcccttcttaaatag

SEQ ID NO: 125452 - DNA, 525 bp, synthetic construct
  misc_feature 1..525: note = Description of Artificial Sequence: Synthetic coding sequence
  source 1..525: mol_type = other DNA
aagcggagggaggaggacgaaaagcgccggagaaaggaggaggaggaaagacggatgaaactcgagatggaggccaaaagaaaacaggaggaggaggagaggaagaaaagagaagacgatgagaagaggatacaggctgaggtggaagcccagctggctcggcagaaagaggaggagtcccaacagcaggcagtgctcgaacaggaacggcgtgatagggagctggccctccgtatagcgcagtctgaggcagagctgattagcgacgaggctcaggcagatctggccttgcggtctctggatagctaccccgtaaccagtaagaacgatggcactcgaccaaaaatgactcctggccctgcagtcctggcgaccaaggctgctgcagggactaaaaagtacgacctgtccaagtggaaatacgcagaactgagagacaccatcaacacctcctgcgacattgagctcttggccgcctgccgggaggagtttcaccggcggctgaaagtctatcatgcttggtag

SEQ ID NO: 125453 - DNA, 6276 bp, synthetic construct
  misc_feature 1..6276: note = Description of Artificial Sequence: Synthetic coding sequence
  source 1..6276: mol_type = other DNA
gcccttcttcagaagggcgaccacgtttggatggacctccggctggggcaggagttcgatgtcccaatcggggccgttgttaagctttgcgactcaggtcaggtgcaagtggtggacgatgaggacaacgagcattggatcagtccccagaacgcgacgcacataaagccgatgcaccccacttcggtacacggggtagaggatatgatccgcctgggagacctgaacgaggctggcattctgcgcaaccttctgatccggtatcgcgatcacctgatctacacctacacaggaagcatactcgttgcggtaaacccctaccagctgctatctatttacagtccggaacatatcaggcagtacacaaacaaaaagatcggggaaatgcccccccatattttcgccattgcagataattgctatttcaacatgaagaggaactctagagaccagtgttgcatcatatcaggggagagtggggctggcaagacggagagcactaaactcattctccagtttttagctgccatctccggccagcattcttggattgagcaacaggtcctagaagctacccctattctggaggcgttcggcaatgccaaaacgattcggaacgataactcatctaggtttggtaaatatattgacatccattttaataaacgcggtgcaattgaaggcgccaaaattgagcagtatcttctggaaaaatctcgagtgtgcaggcaggcactggatgaacgcaattaccatgtgttttattgcatgttggagggcatgtctgaggaccagaaaaaaaagttggggctgggacaggctagcgactataactatctcgccatggtcaatccaccagatctgatgagctgtttgacaagcaggaccctcataacaagaggggagaccgttagcacaccccttagccgcgagcaggcattggacgttcgagacgcattcgtgaaggggatctacggcaggctttttgtgtggatagtggataagattaatgccgccatctacaagccaccttcccaggatgttaagaactcacgacgaagtataggcctgttggatatctttgggtttgagaatttcgccgtgaatagcttcgagcagctgtgtatcaattttgcaaacgagcacctgcagcagttcttcgtgaggcacgtgtttaaactcgaacaggaggaatacgacttggagtccattgactggctgcacatcgagttcacggacaatcaggacgctctggatatgattgcaaacaaacccatgaacattatttctctgattgacgaggaatctaaattccccaagtttctggagaagaatagggatacattgcatggggacatcatccagctagttcactcatcccgcaacaaattcattaaacagatctttcaggctgacgtggcaatgggagcagagacacggaagaggtccccaacccttagctcccaattcaaacgcagtctagagttgttaatgcgcacgctgggcgcgtgtcagcccttctttgtgcgctgtatcaaaccgaacgaatttaagaagcccatgctgtttgataggcatctgtgtgtacgccagcttagatactcgggaatgatggaaaccataagaatccgcagggcaggatacccgatccgctacagttttgttgaattcgtggagcgatatagagtactccttccgggcgtgaagcccgcttataagcagggcgacctccggggaacctgccagaggatggccgaagctgttctcgggactcacgacgactggcaaattggaaagaccaagatattcttgaaagatcaccatgatatgctgctggaagtcgagagggataaggccatcaccgatcgggtgatactgttgcagaaggtcattcgcggctttaaggataggtccaattttcttaagttgaaaaatgccgcgacgcttattcaaaggcactggaggggacacaattgtagaaaaaactatggcctgatgcggctaggcttcctccgcctgcaggccttgcatagatcgcggaaattgcatcagcagtaccgtcttgctagacagcgcattattcagttccaggcgaggtgccgagcatacctggtgcggaaggctttcagacatagactctgggcagtcctcacagtacaggcttacgctcgaggtatgatcgcacgtcggctccatcagcggttgagggccgagtatttatggagactcgaggccgaaaaaatgagactcgccgaggaagagaagctgcgcaaggagatgtccgcaaagaaggccaaagaagaggcagagcgcaaacaccaggaacgtctggcccagcttgccagggaggatgcagagagggaattgaaagagaaagaggcagctcgccggaaaaaagaacttctggagcagatggagcgggcgaggcacgagcctgtaaaccactctgacatggttgataagatgttcgggttcctcgggacttccggcggtctgcccggtcaagagggccaggcacccagtggattcgaagacctggagagaggacggcgtgaaatggtagaggaagaccttgacgctgctttgcccttacctgacgaagacgaggaggatctcagtgaatataagttcgctaagttcgccgcgacttacttccagggcacaacaacgcatagctatacacggagaccgctgaagcagccactactctatcatgatgacgagggggatcagttggccgcccttgcagtgtggattactattctgaggttcatgggagacctcccagaacctaagtaccacaccgctatgtccgacggttcagagaagatacctgtaatgaccaagatttacgagacgttaggcaagaagacctacaagcgggagctgcaagcattgcaaggcgagggggaagcacagcttccggagggacagaagaaatcgagcgtgcgtcacaaactggtgcatctgacgctgaaaaagaaatccaagctcaccgaagaggtaacaaagcgccttcacgacggggagtccaccgtgcaaggtaactcaatgctcgaggatcggcctacaagtaatctggaaaaactccatttcataattggtaacggtatcctaagaccagcactgcgggatgagatctattgccaaatctccaagcagctcacgcacaatccctccaaaagcagctacgcgagagggtggatactagtatcactgtgcgttggctgctttgccccttcagaaaaatttgtgaagtatctcagaaatttcatccacggtgggcctcccggatatgctccgtactgtgaggagagactgagaagaacctttgtgaatggaacccgtacacagccccccagctggctcgagctgcaagccaccaagtcaaagaaacccattatgcttcccgtcacctttatggatgggaccactaaaactctgctcaccgacagcgccacaactgctaaggaattgtgcaacgccctggccgataagatctcgcttaaggatcgattcgggttctcgctctacatagctctgtttgataaagtcagcagtctcggctctggctcagaccatgtgatggacgccatatcacaatgcgaacagtatgccaaagagcagggcgctcaggagagaaacgcaccctggaggctgttctttcgtaaggaagtttttactccctggcatagcccatccgaggacaacgtggccacaaacctgatttaccaacaagtcgtgagaggagtaaaatttggcgaatacagatgtgagaaagaggatgatctggctgaactggccagccaacagtatttcgtcgattacggaagcgaaatgattcttgagaggctcctgaacctggtgcccacatacatacctgacagagaaatcaccccccttaagaccctcgagaaatgggctcagctggcgattgcagcacacaagaagggaatctatgctcagcgcagaactgatgctcagaaagtcaaagaagacgttgtctcctacgctaggtttaagtggccacttctgttctcccgtttttatgaagcgtacaaatttagcggcccttctctccccaagaatgatgtgatcgtcgcggtgaattggaccggtgtgtatttcgtggacgagcaggaacaagtgttgttagaactgtccttccctgagatcatggctgtaagttcctcccgtgaatgtcgggtttggttgagcttgggatgttcagacctcgggtgcgcagcaccccattctgggtgggcaggactgacacctgccggaccgtgttctccctgctggtcttgccgcggcgccaaaacgaccgcgccctcatttaccttagcaacaatcaagggcgacgaatacacttttaccagcagcaacgctgaggacattagagacctggtcgtcacattcctcgaagggctaaggaaacgctccaaatacgttgtggctttgcaggataatcccaaccccgctggagaagagtccgggttcctatcgtttgctaagggtgatctcatcatcttggatcacgacactggagagcaggttatgaacagcggctgggccaatggtatcaacgaaagaactaaacagaggggcgactttcctactgattccgtctacgttatgccgacagtgaccatgcccccccgcgagattgtggcgctcgtgaccatgactcctgatcaaaggcaagatgttgttagactcctgcaactgcggacagccgagcctgaagtgcgtgctaagccctacacactggaggagtttagctatgattactttagaccgccgcctaaacatactctaagccgcgtgatggtgtcaaaagccagaggaaaggaccgactgtggtctcatacaagggaacccctcaaacaggccctgttgaaaaaactcttaggctctgaggagttatcacaggaggcatgtctagcttttattgccgtgttaaagtacatgggggactacccttccaagcgtacccggtcagttaacgaacttaccgatcagatcttcgaggggcccctcaaggccgaacccctgaaagacgaggcatatgtccagatactaaagcaacttacagacaatcacatacgctactcggaagagcgcgggtgggagctgttgtggctctgtacaggcctcttccccccttctaatatcttgctgccgcatgtccagaggtttcttcagtctcgaaaacattgtccattagccatcgactgtcttcagcggctgcaaaaagccctgagaaatggcagcagaaagtatccacctcacctggttgaagtggaggctattcagcacaagaccacacaaatttttcataaagtgtatttcccagacgatactgacgaggctttcgaggtcgaaagtagtactaaagcaaaagatttttgtcagaatatcgcaacccggctgctgctgaaatcaagtgaaggcttctcactgtttgtaaaaatcgctgacaaagtgctgtctgttcccgagaacgattttttcttcgattttgtccgacatctaacagactggatcaaaaaggctcggccaatcaaagacggaattgtgccatcgcttacctaccaagtttttttcatgaaaaagctgtggaccacaactgtacctggaaaagatcccatggctgacagtatcttccattattatcaggagctgccaaagtacctgagagggtaccacaagtgtacacgggaggaagtcctgcagctcggcgcactgatttatcgcgtcaagtttgaagaagacaagtcctattttcccagcataccgaagcttctccgagaactggtgccacaggacctgatccgccaggtcagtccagatgactggaaaagaagtatcgtcgcttatttcaataaacatgccggtaagagcaaggaggaggcaaaactggcctttctcaaactaatctttaagtggccgaccttcggttcggctttcttcgaggttaaacaaacaacagagccaaactttcctgagattttgctgattgccatcaataagtatggagtttcattgatcgaccctaagaccaaagatatactgactactcatccattcacgaaaatcagcaactggtcctctgggaatacctacttccacattaccattgggaacctggttaggggatcaaagctcctctgtgaaacgagtcttgggtataaaatggatgacctcctgaccagttatatctcccagatgctaacagctatgtcgaagcaaagaggatcaagatccggcaaatag

SEQ ID NO: 125454 - DNA, 6555 bp, synthetic construct
  misc_feature 1..6555: note = Description of Artificial Sequence: Synthetic coding sequence
  source 1..6555: mol_type = other DNA
gcattgttacaaaagggagaccatgtgtggatggatcttcgtcttggtcaggagttcgatgtgcccatcggggccgtggttaaactctgcgactccgggcaagtgcaggttgtggacgatgaagataatgagcactggatatccccccagaacgcaacgcacattaagcccatgcaccccaccagtgtgcatggagtggaagatatgataaggcttggagacttgaacgaagcgggcattctgagaaatctgctgatacgttatcgggatcacctgatctatacatacacaggatcaattctggtagcggttaatccctaccagctacttagtatctacagtccggagcatatccgacagtacaccaacaagaagattggggagatgcctccacacatttttgctattgccgacaactgctacttcaacatgaagcggaacagccgcgatcagtgctgtatcatttccggagaaagcggtgccggaaaaaccgaaagtactaaactcatccttcagttccttgctgccatctcgggtcaacatagctggattgagcagcaagtgcttgaggctacaccgattctcgaagccttcggcaatgccaagactattcgaaacgacaactcttcccggtttggcaagtatatcgatattcacttcaataagagaggcgctatagaaggtgcaaagatcgagcagtacttactggagaagtctagagtctgccgccaggccctggatgagcgcaactatcatgtcttttactgtatgttggaaggtatgtcagaggaccagaaaaagaaacttggtctgggccaagcatcagactacaattatctcgccatgggcaattgtatcacctgcgaggggcgcgtggatagtcaggaatatgccaacataaggagtgctatgaaggttcttatgttcaccgataccgagaactgggagatatccaagctcctggcagccatcttacatctgggaaacctgcagtatgaggcaaggactttcgagaaccttgacgcgtgtgaagtactattctcacctagccttgccacggccgcatccctgctcgaagttaatcctcctgacctcatgtcctgcctgacttcgaggacgcttatcactcgcggggagacagtgtcaacaccattaagcagagagcaggccttggacgttagggatgcgtttgtgaaaggcatatacggacgcctgttcgtttggatcgttgacaagatcaatgccgccatttacaaacctccatcccaggatgtgaaaaatagtaggcgatctattggcttactagatatctttggcttcgagaattttgctgtcaattccttcgagcaactgtgcattaacttcgcaaatgagcacctgcagcagttttttgtacgacatgtgttcaagctggagcaggaagagtacgacctggaatctatcgactggttacatatcgagttcaccgataaccaggacgccttggacatgatcgccaataaacctatgaatatcatcagtctgattgacgaggagagcaaatttccaaaaggaactgacaccactatgctccacaagctgaatagtcaacataagctcaacgcaaattatatcccacctaagaataaccacgagactcaattcggaatcaatcattttgcagggattgtgtactatgaaacccagggtttcctggagaagaaccgcgacactctgcatggagacattatacaactagtccacagcagccgaaataaattcatcaaacaaatctttcaggcagatgtggccatgggagccgagacacgtaagagatccccaacgcttagcagccagttcaagcgatctctggagctgctcatgcggactctgggagcctgccaaccctttttcgtccgctgcattaaacctaacgaattcaagaagcccatgctgtttgatcgacacctctgcgtgagacagttgaggtattctggcatgatggaaaccatacgtatcaggagagcgggatatcccattaggtactcgttcgtggagtttgtggaacgctacagagtactgctgcccggagtgaagccggcttataagcagggcgatcttaggggcacctgccagagaatggcggaggccgtgctgggcacccatgacgactggcaaattggcaagacaaaaatttttctgaaagaccaccatgacatgctgcttgaggtggaaagggacaaggcaattaccgatagagttatcttgcttcagaaggtcatccgaggcttcaaggatcgatcaaacttcttaaagctcaagaacgccgccacacttatccaacgtcattggcgcgggcacaattgtcggaagaactatgggctaatgcggttgggatttctacgacttcaggccctgcatcggtcacgcaaactgcatcaacagtataggctggcgcgacaacggattatccagttccaggctagatgcagagcctaccttgtgcggaaggcattccgccacaggctttgggcggtgctcaccgttcaagcatatgcaagaggcatgatcgcccggaggctccaccagagattacgagccgaatacttgtggcgattagaagcagagaagatgagactggctgaagaggaaaaactcagaaaagaaatgagcgcgaagaaggctaaagaggaggccgagcgcaagcatcaggaaagattagcccagcttgcccgcgaggatgccgagcgtgaactgaaagaaaaggaagcggcaaggcggaagaaggagctccttgaacagatggaaagagcgcgccacgaacccgtgaaccattccgacatggtggacaaaatgttcggtttcctcggcaccagcggcggccttcctggtcaggagggccaggctccaagcggttttgaggacctggaaagaggacgacgggagatggtggaagaggatctggacgcggctttaccgctgcctgacgaagacgaggaagatctcagtgaatataagtttgctaagttcgccgccacgtactttcagggaacaaccacgcattcctacacccgacgccccctcaagcaaccgctactctaccacgacgacgaaggggaccagctagccgcactggcggtgtggataactatcctcaggttcatgggggacctgcccgaacctaagtaccacactgcaatgtctgacggaagcgagaagatcccagtgatgaccaagatttacgaaacccttggaaagaaaacatacaagcgagagctccaagcacttcaaggggaaggcgaggtgaccaaaagactccacgatggcgagtccacggtccagggcaattccatgcttgaagaccgcccaacctctaatttggagaaacttcacttcatcatcggcaacggcatcttaagacccgcactgcgcgatgaaatatactgccagatttcaaagcagctcacccacaaccccagcaagtcttcttatgcccgcggttggattctggtatccctatgcgtgggatgtttcgcccccagcgagaagtttgtcaagtatttaaggaattttatacacggtggaccgcctggctatgcaccgtactgtgaagagaggttgcggcggactttcgtgaacggaacacgaactcagcctcctagctggctcgagctgcaggctacaaagtccaagaagcctataatgttacctgtcacttttatggacggcactacgaagaccctcctgactgattcagcaaccacagcaaaggaattatgcaacgccctggctgacaagatttctctgaaggataggttcggtttctctctgtacattgctttgttcgacaaagtgtcatctcttggctcaggctccgatcacgtgatggacgccatttcccagtgcgaacaatacgcaaaagaacagggtgcccaggagcggaacgccccctggcggctgtttttcagaaaagaggtcttcacgccttggcactccccgagcgaggacaacgtcgccaccaaccttatataccagcaggtcgtcaggggtgttaaatttggagaataccgctgtgaaaaagaagatgatttagcggagctcgcatcgcagcagtactttgtggattacggatcagagatgatcctcgagcgcctgttaaacctggttcccacctacatacctgatcgagagatcacccccctgaagacactggagaagtgggcacagttggcgattgcggcccataagaaggggatctacgcccagcgtcggaccgacgcccagaaggtgaaggaggatgtggtctcctatgcacgcttcaaatggccgttgctgtttagtcgattctacgaagcctacaagttttccggccccagtctgccgaaaaatgacgtgatcgtagctgtgaattggacaggagtctatttcgtggatgaacaagaacaggtgctcttggagctttcattccccgagataatggccgtgagctcctcgcgagagtgtcgggtgtggctgtcactgggatgttccgacctcggatgtgctgccccccattctggttgggccgggcttactccagccggcccttgtagcccctgttggagctgccgaggtgccaagacaactgcgccttccttcacattggcaacaataaagggggacgaatatacctttacgtcctctaacgctgaagatattcgagacctggtggtcacgttcctcgagggactgaggaagcgcagtaaatacgttgtcgcccttcaggacaatcccaacccagctggggaggagagcgggtttctctctttcgccaagggcgatctcattatcctggatcacgacacgggggagcaggtgatgaactctggttgggctaatggaataaatgagcggactaaacagaggggggatttccccacagacagtgtctacgttatgccaaccgtgacaatgccccctcgggaaattgtggccctcgtaaccatgacacctgatcagcggcaagatgtggttcggctgttacagctgcggacagctgaacctgaggttagggcaaagccgtacacgctggaagaattttcttatgactatttccgaccgccccccaagcataccctaagccgcgtgatggtgtccaaagcccgaggtaaggaccggctgtggtctcacacccgcgagcccctgaaacaggcgctgctgaagaaacttctggggtctgaggagttgtcacaagaggcctgcctggccttcatagccgtcttaaagtatatgggggattacccctctaaacgaacacgatctgtgaatgaactgaccgaccagatttttgagggccctttgaaagctgagcctctgaaagacgaggcctacgtgcaaattctgaaacagctcacagacaaccacatcagatactctgaagaacgcgggtgggaactgctctggttgtgcacagggctgtttccacctagcaacattctccttccccacgtgcagcgcttcctacagtcaagaaaacactgccctttagcaattgactgtctccaacgactgcaaaaggctctcagaaatggatcccgcaagtaccctcctcacctggtagaggtcgaggctattcagcacaaaaccacccagattttccacaaagtttattttccagacgacacagacgaggcatttgaggtggaaagctcaactaaggctaaagacttctgccagaacatcgctactcgactgctgttaaaaagtagcgagggcttctcactgtttgtgaagatcgccgacaaagtgctaagcgtaccggagaacgacttctttttcgacttcgtaaggcatctgaccgattggattaagaaagcacggcccatcaaggatggaattgtcccttctttaacctaccaagtcttttttatgaagaagctttggacaaccactgttccagggaaggaccccatggccgatagcatcttccattattatcaggaactgccaaaatatttgagaggctaccacaagtgcacccgggaggaggtactgcaactcggcgccctgatctatagggttaagtttgaggaggacaagtcttatttccccagcattccaaaactactgagggagctggtaccccaggatcttattagacaagttagccctgacgattggaagagatccatagtggcctattttaacaagcacgccgggaaaagtaaagaagaagccaagctggcttttctgaagttaatctttaaatggcctacattcggaagtgccttctttgaagttaagcagactactgagcctaatttccccgagatactgctgatcgccatcaacaagtacggagtatcccttatcgaccctaagaccaaagacatattaacgacgcaccctttcaccaaaatctccaactggagcagtggaaacacatattttcacataaccatcggcaatctggtacgcggctccaagctgctgtgtgaaacctccctaggctacaagatggatgatctcttgacatcatacattagccagatgttgaccgccatgagcaaacaacgtgggtctagaagcggtaagtag

SEQ ID NO: 125455 - DNA, 3609 bp, synthetic construct
  misc_feature 1..3609: note = Description of Artificial Sequence: Synthetic coding sequence
  source 1..3609: mol_type = other DNA
gcactgctgcaaaagggcgaccatgtgtggatggacctgaggctggggcaggaatttgatgtgcctatcggagccgtggtgaagctgtgtgactcaggccaggtgcaggtggtcgacgacgaagacaatgaacattggatctcaccgcaaaatgcgacgcacatcaagcctatgcaccccacctccgtgcatggcgtcgaagatatgataaggctgggtgatctgaatgaagctggcatcctgcgcaatcttctgatcagatacagggaccatttaatttacacctacaccggtagtatcctagtggccgtcaatccgtaccagcttctcagtatttactccccggagcatatacggcagtatactaataagaagattggcgaaatgccgccgcatattttcgctatagctgacaattgttacttcaatatgaagaggaacagccgagaccaatgctgcatcatctcaggagaatccggtgcaggtaagactgaatcgacaaagctcattttacagttcctggctgccattagtggccaacatagttggattgaacagcaggttttagaagccacacccattctggaggcatttgggaatgcaaagaccattcggaacgataactcctctcggttcggaaagtacatcgacatccattttaataaacggggtgcgattgagggtgccaagatcgagcagtatttactggaaaaatccagagtctgcagacaggccctggatgaaagaaattatcacgttttctattgtatgctggaggggatgagcgaagaccagaagaaaaaacttggactcggccaagcctcagactataattacttagcaatgggcaattgtattacatgtgaggggagagtggattcccaggagtacgcaaacatccgctccgctatgaaagtcctgatgttcacagacacagaaaactgggaaatctccaaattactcgccgccattctacatctggggaatttgcaatatgaagcacggaccttcgaaaatttagatgcctgtgaggtgctgttcagcccatccttagccaccgcagcatctcttcttgaggttaatccgcccgacctgatgtcctgtcttacaagccgcacactcataacacgaggcgaaacggtgtcaactcctttaagccgcgaacaggccctagacgtgcgtgatgcgtttgtaaagggtatttacggcaggttattcgtttggattgtggacaaaattaacgccgctatttacaagccgccctcacaggatgtcaaaaactccaggaggagtatcgggctgctggatatattcggattcgaaaatttcgcagtcaactcattcgagcagctgtgtattaatttcgccaacgagcatctgcagcaatttttcgtacgccacgtcttcaagctcgagcaggaggagtacgacctggagagcatagactggttgcatattgaatttaccgataatcaggacgctttggatatgattgccaacaaacccatgaatatcatcagtctgattgacgaagaatccaagttcccaaaaggaacggacaccactatgctccataaactgaactcccagcataaacttaacgcgaactatatccctcctaaaaataatcacgaaacacagttcggcattaaccactttgctggcatcgtctactatgaaacgcagggattcctggagaaaaacagagacactctccacggagatatcattcagctcgtccattcctccagaaacaaatttatcaaacagattttccaagccgatgtcgctatgggagctgagacaaggaaaagatcccctactctgtcctcccagtttaagagatctctcgagctactaatgcgcactttgggtgcttgccagccatttttcgtccgttgcataaagccgaacgagttcaaaaaacccatgctgtttgatagacacctttgcgttaggcagctcagatatagcgggatgatggagacaattcgcatccgaagggcgggataccccatcaggtatagctttgtcgagttcgtagagcggtacagggtgctactgcccggcgttaagcctgcatacaagcagggagatctgagaggcacttgtcagcgcatggccgaggccgtgctcggcactcatgatgactggcagatcgggaaaacaaaaattttcttgaaggatcatcatgatatgttgttggaggtggaaagagacaaggctattaccgacagggtcattcttctccaaaaggtgattaggggcttcaaagacaggtcgaatttcctgaaactgaagaacgctgcaaccctcatccagcggcactggcgcggacataattgtcgcaaaaattacggactgatgcggctggggttcttgcgactacaggccctccacaggagcaggaaactgcatcagcagtatcggttggctcggcagagaatcatccagtttcaagctcgctgcagggcttacctggtgcgcaaggcatttcggcaccggctgtgggccgtgctgactgttcaagcctatgctcgcggaatgatcgcgaggcgcctgcatcaacgcctcagagccgagtacttatggcggcttgaggccgagaagatgaggcttgccgaggaagagaagttaaggaaggaaatgtctgccaaaaaagccaaggaggaagccgagcgaaagcaccaggagcgcctagcacagctggcaagagaggacgcagagcgggaactgaaagaaaaggaggccgcccgacggaaaaaggagcttctggagcagatggagcgtgcgaggcacgaaccggtgaatcactcagacatggtggataaaatgttcgggtttttagggacctctggcggcttaccagggcaggagggccaagctccatcaggctttgaagacttggaacgggggcgaagagaaatggtggaggaggatttggatgctgctctgcctcttcccgacgaggatgaagaggatttgtcggaatataagtttgccaaattcgccgccacttactttcaggggacaactactcattcatatactcggcgacctcttaagcagcctctgctttaccatgacgatgaaggtgaccagctagccgccctggctgtttggataactatattgcgatttatgggcgatctgcccgagccaaagtatcatactgccatgtctgacggaagtgaaaagataccggtcatgacaaagatatacgagactctcgggaaaaagacctacaaacgcgagttacaggcactgcagggagagggcgaggtcctgcaggcacagttgcctgaagggcagaagaaatcttcagtgcgacacaaattagtccatctgacactcaaaaaaaagtcaaagctcacagaggaggttacaaagagactccacgatggagagtccaccgtccaggggaatagtatgctcgaagatagaccgacgagcaacctggagaaactgcatttcatcatcggcaacggcatcttacggcccgctcttcgctcagtccccccggagtcccttttagtggccgaatggtgcctgtgtcaaccttcaaaacggctgtcgcaagcccccggatttggattcgcagcttcttag

SEQ ID NO: 125456 - DNA, 6645 bp, synthetic construct
  misc_feature 1..6645: note = Description of Artificial Sequence: Synthetic coding sequence
  source 1..6645: mol_type = other DNA
gccctcctccagaagggggatcacgtatggatggacctgcgccttggacaggaatttgacgttccgatcggcgctgtggtaaagctgtgcgacagtggtcaggttcaggtggtggatgacgaagataacgaacattggatcagccctcagaacgccacacatatcaagcccatgcatccaactagcgtgcacggggtcgaagatatgattagactcggtgatctcaacgaagcggggattctccgaaacctcttaataaggtatcgggatcacctgatctacacctataccggcagcatccttgtcgccgtaaatccctaccaactgcttagtatctatagccctgaacatatccggcagtatacgaataagaaaataggggagatgcccccccatattttcgctatcgcggacaactgttatttcaatatgaaaaggaatagtcgagaccagtgttgtattattagcggggaatctggagccggcaaaaccgagtccacaaagctgattctccagtttctggcggccatttctggccagcactcgtggatcgagcagcaggttctggaagcgacccccatactcgaggcttttgggaacgcaaagactatacggaatgataatagttcccgcttcggaaagtatatcgatattcactttaacaaacggggtgctattgagggagccaagatcgaacagtatctgctcgaaaagtccagggtctgcagacaggctctcgacgagcggaactaccatgtcttctactgtatgctggagggaatgagtgaagatcaaaaaaaaaagctgggtttgggacaggcatcagattataattaccttgccatgggtaactgcatcacctgcgaaggtcgtgtggacagtcaggagtacgcaaacattcgttcagctatgaaggtcttgatgttcaccgacacagaaaactgggagatctctaagctactagccgctatcctgcacctgggaaatctacaatacgaggctcgtacctttgaaaatctggatgcctgtgaggtcctgttcagcccgtccctggcaacggcggcaagtctgctggaggtcaatccacccgacttaatgagttgtctcacatccaggacactgattacccgcggggagaccgtgagtacaccccttagcagagaacaggccctggacgtcagggatgcattcgtcaagggaatttatggccggcttttcgtctggatcgttgacaaaatcaacgccgccatctacaagccgccctctcaggacgtgaaaaactctaggagatccatcggcctactggatatctttgggttcgagaacttcgctgtgaatagctttgaacaattatgcatcaatttcgctaacgagcacctgcagcagttctttgttcgtcacgtgtttaaactggaacaggaagagtacgacctggaatctattgattggctgcatattgagtttacagacaatcaggacgctctcgatatgattgctaataagcccatgaatattataagcttaatcgacgaggaatcaaagttccccaagggtacagacactacaatgttacacaagttgaactctcaacataagcttaatgctaactacatacctccgaaaaacaatcacgagacacagtttgggatcaatcacttcgcggggatcgtgtactacgagacccaaggctttcttgagaagaacagagatacattgcacggtgatatcatccagctggtccactcttcccggaataagtttatcaaacagattttccaagcagacgtggccatgggagcggagacaaggaagaggtctccaaccctgagctcccaattcaagcgtagcctcgagctgctgatgcgcacactgggagcatgtcagcccttcttcgtccgatgcatcaagcctaatgagttcaagaagcctatgctgttcgatcgacacctctgtgtaagacagctgcggtattctggcatgatggaaaccattcgcatccgacgagctggctaccctatcaggtatagctttgtggagttcgtcgaacggtacagagtgctccttccgggagtcaaacctgcctataagcaaggcgacctgcgtggaacatgccagcgaatggccgaggccgtcttgggtactcacgacgattggcagatcggaaaaaccaagatcttcctgaaggaccaccatgatatgttactcgaagtagaaagggataaggcgattactgacagagtgattttgttacagaaagtgatcagaggattcaaggaccgaagcaatttcttgaagctcaagaacgctgcaaccctcatccagaggcactggagggggcataactgcagaaaaaattatggcctaatgcggctgggctttttgcgactgcaagcacttcaccgctcccgtaaactgcatcagcaataccggttggcccggcagcgaattatccagttccaagcaaggtgcagggcgtacctagtcagaaaagcgttcaggcaccgactttgggcagtcctgactgtgcaggcctatgcccggggcatgattgccaggcgcctgcaccagcggctgagagccgagtacctttggagacttgaagccgaaaagatgcggttggcagaggaggagaagctccggaaggagatgagtgcgaaaaaggcgaaagaagaagcagagcgcaagcaccaggaaaggctggctcagctcgcaagggaagatgccgaaagagagctgaaagagaaggaagcagcaaggcgcaagaaggagctcctcgagcaaatggaacgggctaggcacgagccagtgaatcacagtgacatggtggacaagatgtttggctttctggggacttccgggggacttcccggtcaggaaggacaagctcccagcgggtttgaggacctggaaagggggcgaagggaaatggtcgaagaggatcttgacgcagctctgccactgccagatgaggatgaggaagatctgtctgagtataaattcgccaagttcgcagccacttacttccaaggcactacaacacacagctatacacgtcgccctttgaagcaacctcttctctaccacgatgatgaaggtgatcagctcgcggcccttgcagtctggattactatcctacggtttatgggcgacttaccggaacctaaatatcatactgccatgtcagacggaagcgaaaaaatcccagtgatgactaagatctatgagactctcgggaaaaagacttacaaacgtgagttgcaagctcttcagggagaaggcgaggcacagttgcctgagggtcaaaagaagagttctgtccgccacaaactggtccacctcaccttgaagaagaagagtaaactaactgaggaagtaacaaaaaggctccatgacggggagagcaccgttcagggaaatagcatgctagaggacaggcctacaagcaatttagagaaactacacttcatcataggcaacggtattctgaggcctgcactccgcgatgaaatttactgtcaaatttctaagcagctaacgcataatccttcgaaaagctcttacgcccgaggctggatactggtgtccctatgcgtgggctgtttcgcaccttcggaaaagtttgtgaaatacctcaggaattttatccacggcggacctccagggtacgctccttactgcgaagaaaggttgcgccggactttcgtgaacggcacccggacgcagcctccttcctggctcgaactgcaagctactaagagcaaaaagccaatcatgctcccagtgacatttatggatggcacaactaaaactttgttgactgattcggctacaactgccaaggaactctgtaatgccctcgctgataaaatctctctgaaggatcgctttggtttctctctgtacatagcgcttttcgacaaggtgtcatccctgggctccggctccgatcatgtgatggacgcgatttcacagtgcgaacagtacgccaaagagcagggggctcaggaaagaaacgccccatggcgactgtttttccggaaagaggtctttaccccgtggcattccccatccgaggataatgtggcgactaatcttatttaccagcaggttgtgcgcggagtgaaattcggagagtatcgctgcgaaaaggaagacgatttggctgagctagccagtcagcagtactttgtcgactacggatccgagatgatcctggagcgcttattaaatctggtccccacatatatcccagatcgtgaaatcacaccgctgaagaccctggaaaagtgggcccagcttgcaatagctgcccataaaaaagggatttacgctcagagacgcactgatgcccagaaggtaaaagaagatgtggtgagttatgccagattcaagtggcctctgcttttttcccgtttttatgaggcctacaaattcagcggtccgtcactgccaaagaatgacgttatagtggccgtcaactggacaggcgtgtactttgtggacgagcaggagcaagtccttctagagctgtcctttcccgagattatggccgtcagcagctcacgcgaatgtagagtgtggttgtcactgggctgctccgatctgggatgcgcagcaccacatagcggctgggctggtttgactcccgccggaccttgctcaccctgctggtcctgcaggggcgcaaagaccactgctccctccttcacgctcgctaccattaagggggacgagtacacatttacaagctctaatgcggaagatatacgtgatttagttgtgaccttcttggagggccttagaaaacgttccaaatacgtggttgccctgcaggacaatcccaaccctgcaggggaagagagcggcttcctgagttttgctaaaggtgatcttattattctcgatcacgacaccggagaacaggtaatgaactcgggctgggctaacggaattaacgaacggacaaagcaaaggggggacttcccaactgacagcgtgtacgtgatgccaaccgtcacaatgcccccacgagagattgtggcactggtcaccatgactcctgatcagagacaggatgtggtgcgcctgctgcaactcaggaccgctgaacccgaggtgcgagcgaaaccttacactttggaggagttttcctacgactattttagaccacctcccaaacatacattatcacgagttatggtctccaaggctagaggcaaggataggctgtggtcgcatacacgagagcctctaaaacaagccctgttgaagaagctcctggggagtgaagagctgtcccaggaggcctgcctggccttcatagcagttctgaagtatatgggcgattatccatccaagagaacgaggagtgtaaatgagctaaccgaccagattttcgaggggcccctgaaggcagaaccactcaaggacgaggcatacgttcaaatcctgaagcagctgaccgacaaccacatccggtattcagaggagagaggttgggagttactgtggttatgcaccggcctcttccctccatctaatatcctcctcccacatgtgcagcggttcctacaatccagaaaacactgtcccctggcaatcgactgcttgcagcgcctgcagaaggccctgagaaacgggtcccgcaaataccccccacatctcgtggaggttgaagcaatccagcataagactacgcagatctttcacaaagtgtattttcctgacgatacggatgaggccttcgaggtagaatcctccacgaaggcgaaggacttctgtcaaaatatcgcgacgcgccttctgttgaagtcatctgaaggtttctccctgttcgtgaagatcgctgacaaggttctcagcgtccccgagaacgattttttttttgatttcgtgaggcacctgactgattggatcaaaaaggctagaccaattaaggatggtatagtgccatccctgacgtatcaggtattttttatgaagaaattgtggaccaccacagtccccgggaaagatcccatggcggacagtatctttcactattaccaggaattgcctaagtatttgcggggctaccataagtgtacaagggaggaggtccttcagttgggcgctctgatctatcgggttaagttcgaagaggacaaaagctactttccatccattccaaagctgttgcgggaacttgtccctcaagatttgatcagacaagtgagcccagacgactggaagcggagcatcgtcgcctactttaacaagcatgcaggcaagtctaaagaggaggctaaattagccttcctcaaattgatcttcaagtggcctacatttggctcagccttcttcgaagtgaagcagaccacagaaccaaactttccagaaattctcctgattgccattaacaagtacggtgtgagcctgattgacccaaaaaccaaggacatcctgaccacgcatccattcaccaaaatctctaattggtcttccgggaatacatattttcacattaccatagggaatctcgtaagagggtccaaattgctgtgcgaaacttctctgggttacaaaatggatgatctgcttaccagttacatctctcagatgctaactgctatgagcaagcagagagggtcgcggtccggaaagtag

SEQ ID NO: 125457 - DNA, 6648 bp, synthetic construct
  misc_feature 1..6648: note = Description of Artificial Sequence: Synthetic coding sequence
  source 1..6648: mol_type = other DNA
atggtaatattgcagcagggggaccatgtctggatggacttgcgacttgggcaggaattcgacgtgccaataggcgccgtggtgaagctgtgcgattctgggcaggtacaagtcgtggatgacgaggataacgagcattggatcagcccccagaacgcaacccacatcaaaccaatgcatccaacctctgtgcatggcgtggaagacatgatcagactgggggatctgaacgaggccggcatactgaggaatctgttgattcgctacagagatcatctcatctatacgtacacaggttctatcctggtcgcagtgaacccgtatcagctcttaagcatttacagtccggagcacattcgccagtacacaaataaaaagattggcgaaatgccgccccatatttttgccatcgcagacaactgctacttcaatatgaagaggaatagcagggatcagtgttgtattatttcaggagagagtggcgccggcaaaacagagagcacaaagctgattttgcaatttctcgcagcaataagcggccagcactcctggatcgagcagcaagtcctggaggcaacaccgatactagaggcatttggcaatgcgaagactatacggaatgacaattcttcccgctttggcaaatacattgacattcatttcaacaaaaggggagcaatcgaaggtgcaaaaatcgagcagtacctgttagagaagtcaagagtctgtcgtcaggctctcgacgaaagaaactaccatgttttctactgcatgcttgaggggatgtcagaagaccaaaagaagaagttaggtttagggcaggccagcgactacaattacctcgccatgggtaattgcattacctgtgaggggcgggtggacagtcaggagtacgctaatatcaggtccgcaatgaaggtgctgatgtttacggacacggaaaactgggagatatccaaacttctggcagcaatcctgcatctgggcaatctgcagtacgaagcccggaccttcgaaaatctggatgcatgtgaagtgcttttcagtcctagtctggcaactgcagcatctctgcttgaagtgaaccctcctgacctgatgtcctgcctgacatcacgtacccttattacaagaggtgagactgtgtctacacccctgtcgagagagcaggcgcttgatgtccgagacgccttcgtgaaaggcatctacgggagactatttgtgtggattgtggataagattaatgcagcgatctataaacctccctcccaggacgtcaaaaattcacggcggtccattggactgttagacatattcggcttcgagaacttcgccgtcaatagtttcgagcagctttgtatcaacttcgcgaatgaacacctgcagcagttctttgtcagacatgtgtttaagctggagcaagaggagtacgatctggagtctatcgattggctacacatcgagtttactgataatcaagacgcgctagatatgatcgccaacaagcctatgaatattatcagtctgatcgatgaagagtctaaattccctaaaggaacggacaccaccatgctccacaaactcaatagccagcacaaactgaacgctaactatattccaccgaagaacaatcacgaaacgcagtttgggatcaatcacttcgcaggcatcgtctactacgagacccagggatttctggaaaaaaacagagacacccttcatggcgacattattcaactggtgcatagctccaggaataagtttatcaaacaaatttttcaggctgacgtggccatgggcgcagaaacgcggaaaaggtccccgactctatcttcccagtttaagcgctctttagagctcctaatgcgaacattgggcgcctgccagccattctttgtcagatgcattaagcccaacgaatttaaaaaacctatgcttttcgaccgccatctttgcgtccggcaactcagatattcaggaatgatggagaccatacgcatacgaagagcaggctaccccatacgctatagttttgtcgaattcgtcgagagataccgagtgctcctcccgggagtgaagccagcatacaaacaaggcgacctgcgcggaacctgccagcgtatggccgaggcagtgctaggcacacatgatgattggcagattggaaagaccaaaatatttttgaaggatcaccacgatatgctcttggaggtcgaacgggacaaagccatcacagatagggtgatattactgcagaaggtgatcagaggcttcaaggacaggagtaactttttaaaattaaagaatgccgccaccctcattcagagacactggcgaggacacaactgtagaaaaaattacggcctgatgagactcggctttctgcggctgcaggccctgcaccgttctcgtaagttgcaccagcagtaccggctagcgagacagcggattatacagttccaggcacgatgtcgtgcttatttggtacggaaagcttttaggcataggctgtgggctgtactgaccgttcaggcctacgcaagagggatgatcgcgagacggctccaccagcgacttagggcggagtacctctggcgcctggaggcggaaaagatgcggctggcagaagaagagaagctgcgcaaagaaatgagcgctaagaaagctaaggaagaggcggagcgcaagcatcaggaacggcttgcgcagttagcacgggaggatgctgagcgcgagctgaaggaaaaagaagcggcaaggcgtaaaaaagagctcctggaacagatggagcgagcccgccacgagcctgtgaaccacagcgatatggtcgacaagatgtttggattcctaggtaccagcggcgggctcccgggccaggaaggccaggcaccgtcaggattcgaagatctggagagaggtaggcgcgagatggtggaggaagatttagacgcggctctgcccctccccgatgaggacgaagaggatttgtctgaatacaaatttgctaaattcgctgcaacatattttcagggcaccacaacccatagttacacacgccgcccattgaagcagcctctgttatatcatgacgatgaaggagatcagctggccgcgctggccgtgtggattacaatcctacggttcatgggtgacctgcccgaaccgaaatatcacaccgccatgagcgacggcagtgagaagatccccgtgatgactaagatctacgagaccctcggcaagaaaacctataagcgtgagctgcaggccctgcagggtgagggagaggcccagctccctgagggccagaaaaagagctctgtgagacacaagctggtgcacttgacactgaagaagaaatccaagctgactgaggaagtaacaaaacggttgcacgatggcgagagtactgtgcagggcaattctatgcttgaggatcgacctacttctaatctggaaaaactccactttataattggcaacggaatccttcgtccagctcttcgagacgagatctattgtcagataagtaagcagcttacacacaatccttcaaagtcctcttacgccagggggtggatccttgtctctctctgtgtgggctgttttgcaccgagcgaaaagtttgtaaaataccttagaaactttatccatggaggtccccccggttacgctccatactgtgaggaaaggctccgaaggacttttgttaacggaaccaggacccagccgcccagctggttggagctccaggctactaagagcaaaaaacccattatgctgccagtaacttttatggacggcactacaaaaactttgttgacggactcagccaccacagccaaggagctctgtaacgcactcgccgataagattagcctcaaagaccgtttcgggttttctctgtacatcgctttgtttgacaaggtctcttccctgggctcagggagcgaccacgtcatggacgctatttcccagtgtgagcaatacgctaaagaacagggcgcccaggagagaaacgcaccatggaggctttttttcagaaaagaagtctttacgccttggcactcaccatctgaagacaacgtagctactaatctgatctaccagcaggtagtgagaggggtaaaatttggagagtacaggtgcgaaaaggaagatgatctcgccgaactcgcctcgcagcagtattttgtggactacggcagcgagatgatcttggaacggttgctgaacctggtgccaacttacatccccgatagggagatcactccactcaaaacactcgagaagtgggcccaattggctatagctgcccacaaaaaaggtatttacgcacagcggagaactgatgcccagaaggtgaaggaggacgttgtgagctacgcccggttcaaatggccattgctgttctcaagattttacgaagcatacaaattctccggaccaagcttgcctaagaacgatgtgattgtggctgtgaactggaccggggtctattttgtggacgagcaggaacaggtgttattggagcttagttttccagagattatggccgtgtcttcctccagagagtgtcgggtttggctatcgttaggttgttccgacttgggatgcgctgctccccactccggctgggccggactaaccccagctggaccatgctcaccctgttggagctgtcgaggagcaaaaaccaccgcaccgtccttcacgttggcaactatcaagggagatgagtacacattcacatcttcaaacgccgaagacatcagagatctagtggttacctttctcgagggcttgcgcaaacggtcaaaatacgttgttgctctgcaagacaatcccaatcccgcgggagaggaaagcggattcttgtcattcgcaaagggcgacctgatcatactagaccacgatactggggagcaagtcatgaattctgggtgggcaaatggtatcaacgaaaggaccaaacaacggggggattttccaacagactccgtatatgtcatgcccacagttacaatgccaccgcgggagatcgttgccctcgtaacaatgactcccgaccagcgccaagacgtagttcggctgttacagctgaggaccgccgagcctgaagtgagggcgaagccatacacactggaggagttcagctacgactacttccgcccgccgcccaagcatacgttaagccgggtgatggtcagtaaggcgcggggaaaagaccgactctggtcccacactcgggagccactgaaacaggcacttcttaaaaagctcctcggttctgaggagctgtcccaggaggcttgtctcgctttcatcgccgtgctgaaatacatgggcgattatccctctaagcgtacaagaagcgttaacgagttgaccgaccagatcttcgaagggcccctcaaggccgaacctctgaaggatgaggcctatgttcagatcctcaagcagctgacagacaatcacatcagatattccgaggagcggggctgggagcttttgtggctttgtaccggcttgttccctcccagcaacatcctgctgccccacgtccagagatttttgcagagcaggaagcattgccccctggccatcgactgtctacaaaggctgcaaaaggctcttcgtaatggcagcagaaaatatcctccgcacctggttgaggtagaagcgatccagcataagacgacacaaatatttcataaggtgtatttcccggatgataccgatgaggcatttgaagtggaaagctctaccaaggccaaggacttttgccaaaacatagctactcgtctgctactgaaatccagcgaaggcttttcactgttcgtcaagattgctgataaagtactcagtgtccccgagaatgattttttcttcgatttcgtgcggcatcttaccgactggataaaaaaggctcgaccgatcaaagatggtatcgtcccatcccttacatatcaggtgtttttcatgaaaaaactttggaccactaccgtcccaggtaaggaccctatggctgactccatctttcactattaccaggagttaccgaagtacctcaggggctatcataagtgtacacgggaagaggtgctgcagctgggagccctgatttaccgcgtgaagttcgaggaagacaagtcctattttcctagtattccgaaactactacgcgaacttgtccctcaggacttaatccgtcaagtgagccccgacgactggaagcgatctatagtagcatacttcaacaaacacgctggtaaatcaaaggaggaggccaagctggccttcctgaagcttatctttaagtggccaacttttggcagtgcttttttcgaggtgaagcaaaccactgaacccaacttccccgaaattctactcattgctatcaacaaatatggggtctctcttatcgacccaaagacgaaggatattttaactacccacccctttacaaagatctcaaattggtcgagtggtaatacctattttcatataacgatagggaatctagtcaggggaagcaaactgttgtgcgaaacctcgctgggctacaagatggacgatctgttgactagctatatcagccagatgctaacagctatgtcaaagcaaaggggctcaaggagcgggaaatag

SEQ ID NO: 125458 - DNA, 3537 bp, synthetic construct
  misc_feature 1..3537: note = Description of Artificial Sequence: Synthetic coding sequence
  source 1..3537: mol_type = other DNA
atggtcatccttcagcaaggcgatcacgtatggatggacctcagattgggacaggaatttgatgtgcccatcggagcagtggtgaaactatgcgattcaggacaagtccaggtagtggacgacgaggacaacgagcattggatcagcccccagaacgccacacacatcaagcctatgcacccgacatctgttcacggtgtggaagacatgatccggcttggtgaccttaacgaggccggtatcctgaggaatcttctcatccgatatagagaccatctgatctatacatacacaggctctatccttgtggcagtcaacccatatcagttactgtcaatctactcacctgaacacatccgtcaatacactaacaagaaaataggggagatgcccccccatatcttcgccattgcagacaattgctattttaacatgaagcgcaactcaagggaccagtgctgcattatttcgggagagagcggagcagggaagactgaatcaaccaagttaattctacagtttctggccgctatctccgggcagcattcctggatagagcagcaggtacttgaagcgacaccaatactggaagcttttggtaatgcaaaaacaatacggaatgacaacagttcccgcttcggcaaatatatcgatatccatttcaataagcgaggagccatagagggcgcaaaaatagaacagtatctgctcgaaaagtcgagggtctgccgacaggctcttgatgaaagaaactaccacgtattctattgcatgcttgaaggcatgtctgaggaccagaagaagaagctgggtttaggccaagccagcgactataactacctggcaatggggaattgcatcacatgtgagggccgagttgattcccaggaatacgctaacattaggtccgccatgaaggttctgatgttcacagataccgaaaactgggagatttccaagctgctggctgctattctgcacttggggaatctgcaatacgaagcacgcacatttgagaaccttgatgcatgcgaggttctcttctctccatcattggcaactgccgcctctctgttggaagtgaacccacccgacctcatgagctgtctgactagccggaccctcatcacccggggggagaccgtgtccacacctctaagccgggagcaggccctggacgtccgggacgccttcgtaaaaggcatttatggccggctgttcgtgtggattgtagataagataaacgcggctatttacaagcccccctcccaagacgtgaagaactcaaggcgctctatagggctactggacatctttggctttgaaaatttcgctgtgaatagtttcgagcaactgtgcataaacttcgccaatgaacacctgcaacagttctttgtgagacacgttttcaagctggagcaagaggagtacgatctagagtctatcgattggctacacattgagttcacggacaatcaggatgccctcgacatgatcgcgaacaaacctatgaacataatttccctcattgacgaggagagcaaattcccaaaggggacggataccaccatgctgcacaaactcaatagccagcacaagctgaacgctaactatattccccccaaaaacaatcacgagacccaattcgggataaaccactttgctggcattgtctattacgagactcagggatttctcgaaaagaatagggacaccttgcacggggacattatccagttagtccacagcagtaggaataagtttattaagcaaatcttccaggcagacgtagccatgggcgccgagaccaggaaacgctcaccaacactgtctagccaattcaaaagatcgctggaactgttgatgcgaacactgggggcatgccagcccttcttcgtaagatgcatcaagcctaacgagttcaaaaaacccatgctgtttgaccggcacctgtgcgtgcggcaattgcggtactccggaatgatggaaacgattaggattcgcagggccgggtacccaatcaggtactcatttgtcgagtttgtcgagcgctacagggttttattgcctggtgtgaagccagcctacaagcaaggcgacctgcggggcacatgccaacgtatggcagaagcggtcctcggtacgcacgatgattggcagatagggaagactaagatcttccttaaagaccatcacgatatgctgctggaagtggaaagagataaagccatcactgacagggtgatactgctccagaaagtgatccgcggctttaaggataggtctaacttcctgaagctgaagaacgccgctacgttgattcagcggcattggcggggccataattgccgcaaaaattacggactcatgagactgggattcctcaggttacaggccctgcaccgctcaagaaaactgcaccagcagtatcggctcgccagacagaggattattcaattccaggcaaggtgccgcgcctacctggtgcgaaaagctttccgccacagactctgggcggttttaaccgtgcaagcttacgcccggggcatgatcgctcgtcgactgcatcagcggcttcgagccgagtacttgtggcgtttggaagccgaaaagatgcggctggccgaagaagagaagctaaggaaagaaatgtcagccaagaaggccaaggaggaggcagaacgaaagcaccaggaacggctggcacaacttgccagggaggatgcggagagggagctcaaagaaaaagaggccgctaggagaaaaaaggagctgctggaacagatggagcgcgcccggcacgagcccgtcaaccatagtgacatggttgacaagatgtttggtttcctgggtacttcgggcgggctgcccggacaggaagggcaggcgccgtccggtttcgaggacttagagcgagggcgccgcgagatggttgaggaggacctggacgccgcgcttccactaccagatgaggatgaagaagatttatccgagtataagttcgccaagtttgcagctacgtactttcagggtacgacaacgcactcttacacaagaagacctctgaagcagccactgctctatcatgatgacgagggcgaccagttggccgctctggcagtgtggatcacaattctcagatttatgggcgatctccctgagcctaagtaccacaccgctatgagcgatgggagcgagaagatacctgtgatgaccaagatttatgagactctcggcaagaaaacctacaagcgggaactgcaagcattacagggtgagggtgaagcacaactgcctgagggccagaagaagtccagcgtgaggcacaaactggtacacctcacgctcaagaaaaagtctaagctgaccgaggaggtgactaagcggcttcacgatggagagagtacagtacagggcaactcaatgctggaggacagacctacttctaacctggagaagctacacttcattatcggaaacggtattctgagacccgcactcagatccgtccccggcggaggggacactcgggcctag

SEQ ID NO: 125459 - DNA, 6528 bp, synthetic construct
  misc_feature 1..6528: note = Description of Artificial Sequence: Synthetic coding sequence
  source 1..6528: mol_type = other DNA
atggtgatacttcaacagggcgatcacgtctggatggatctaagacttgggcaggagttcgacgtgcccattggtgccgttgtgaagctctgcgatagtgggcaggttcaggtggtagacgatgaagacaatgagcattggatctctcctcagaatgcgacgcacatcaagcccatgcacccaacttctgttcatggggtggaagacatgatcagactgggcgacctgaatgaagccggaattttgcgcaacctgctaattcgttacagggatcatctaatctacacatacaccggcagcatcctggtagcggttaacccgtatcagctgctcagcatatactcccctgagcacatcagacagtatacgaacaaaaagatcggcgagatgccaccccacatctttgcgatcgccgacaattgctatttcaatatgaaaagaaattctcgggatcagtgttgcattatttccggggagtccggcgctggaaagacagagtctactaagcttatcttgcaattcctggctgctatctctggacagcactcttggatcgagcaacaagtgctggaggcaacaccgattctggaagctttcggcaacgccaagaccattcgaaatgacaacagctccaggttcggtaagtatatagatatacactttaataaacggggcgctatcgagggagctaagatagagcagtatttgctagagaagtcccgcgtgtgtcgccaggcactcgacgaaagaaattaccacgttttctactgcatgctagaaggcatgtctgaagatcagaaaaaaaagctcggacttgggcaggcatcagattacaactaccttgcaatggggaattgcattacctgtgagggaagagtagactcgcaggagtacgcaaatatccggtctgccatgaaggtgctgatgtttactgacaccgaaaactgggaaatttccaaactcttggccgccattttgcacctgggaaatttgcagtatgaggccagaaccttcgaaaaccttgatgcctgtgaggtcttattctctccatctctggcaaccgctgcgtctctgttggaggtcaacccccccgatctcatgagttgtctaaccagcaggaccctgattacccgtggtgaaactgtgtcgacgccactctccagagaacaagcacttgacgttcgagatgcgtttgtgaaaggaatatacgggagactgttcgtgtggattgtggacaagatcaatgcagcaatttacaaaccgccgagccaggacgttaagaactccaggcggagcatcggactgttggacatttttgggtttgaaaatttcgccgtgaattccttcgagcagttatgcatcaactttgctaacgaacacttgcaacagttctttgtacggcacgtatttaagctggaacaggaggagtacgatctggagtccatagattggcttcacatcgaatttacagacaaccaggatgcgttagatatgatcgcaaacaagccaatgaatattatctcactcattgacgaagaatctaagttccccaaaggcacggatacgaccatgctgcacaaactgaactctcaacacaagctgaacgcaaattatatcccacctaaaaacaatcatgagacacaattcgggattaatcactttgcgggcattgtgtactacgaaactcaaggttttttggaaaagaacagagatacgttacatggtgatatcatccagctggtccacagctctagaaataaattcatcaaacagatctttcaggcggatgtggctatgggggctgaaacccgaaagagatcacccacactgtcctcccaatttaaacgcagtctggaattgttgatgcgcacccttggtgcttgccagccattcttcgtacgctgcattaagcccaatgagttcaagaaacctatgttatttgatagacacctgtgcgtacggcaactccgctactctggtatgatggaaactatacggataaggagagcaggctatcctatccgatattcctttgtagaatttgttgagcggtacagggtccttttgccgggcgtgaagcccgcttataaacagggggatctcaggggaacatgccagaggatggctgaggccgtgctgggcactcacgatgactggcaaattggcaagaccaagattttcctgaaggatcaccacgatatgcttctggaagtggagagggacaaggcaataacggaccgcgtaatcttattgcagaaggtaataaggggtttcaaagatcggtcaaatttcctgaaattgaagaacgccgctacactcatacaaaggcattggagggggcacaactgtcgcaagaactatgggcttatgagactagggttcctgagattacaggctcttcatcgctctcggaagctacaccaacagtaccggctggctaggcagcgaattatccagttccaggcacggtgtcgggcctacttggtccggaaagcgtttaggcaccgcctgtgggctgtgctcaccgtgcaggcttacgccagaggcatgattgcccggagactgcaccagcgcctccgagcagagtatctctggcggctggaggcggagaaaatgcgacttgctgaggaagaaaaattacgtaaggagatgagcgccaagaaggcaaaagaggaggccgaacgaaagcaccaggagcgcctggcccagctcgctcgcgaggatgccgagcgggagcttaaagagaaagaagctgccagacgcaagaaagagttgctcgagcagatggaaagagctagacatgagccagtcaaccatagcgacatggtggacaaaatgtttggctttttagggacttccggcggcctccccggccaggagggccaggctccgtcaggctttgaagacctggagagggggaggcgcgagatggttgaggaagacctcgacgcagctttgcctctccccgatgaggacgaggaggatttgagcgaatataaattcgccaaattcgctgctacatacttccaggggactactacccacagttacactaggcgacctctaaagcaacccctgctttatcacgacgatgagggggatcaactagctgcgctggctgtgtggattaccatcctgaggtttatgggagacctgcccgagcctaagtaccacaccgctatgtcggacggttcagaaaaaatccccgtgatgaccaagatttacgaaactctggggaagaaaacatataagcgcgagctccaggctctgcagggggagggcgaggcacagctgcccgaagggcaaaaaaaatcttctgtgcggcataagctggtacatcttacccttaaaaagaaatcgaagctcacagaggaggtgacgaaacggttacacgacggagaatccaccgtgcaaggcaactccatgctggaggacagacccacttctaacttggaaaagctgcactttatcattggaaacggcattttgcggccggccctcagagatgagatttactgtcagatttccaagcagctgacccataacccgagtaaaagttcatatgcgcgcggatggatcctcgtaagtctttgcgtcgggtgcttcgccccaagtgagaaatttgtgaagtacctccggaactttattcacggaggaccccccggttatgccccctactgtgaagagcgcctgcgaagaacttttgttaacggcacacggactcagccaccctcatggctcgagctgcaggccactaaatctaagaaaccaataatgctgcctgtaaccttcatggacgggaccaccaaaaccctccttactgatagcgcaacaacggccaaggagctttgtaatgcactggctgataagatatcactgaaggaccgctttgggtttagcctttacatcgctttgtttgacaaagtaagcagcctgggaagcggttcagaccatgtaatggatgccatttcacagtgtgagcagtatgccaaggagcagggcgctcaggagcgaaacgccccatggagactgtttttcagaaaggaggttttcactccttggcactcccccagcgaggacaatgttgcgacgaatctcatctaccagcaggtggttcggggggttaagtttggagagtacaggtgcgagaaagaagacgatttagcagagctagcaagtcagcagtacttcgtggactatgggtctgagatgattctcgaacgcctactgaacctcgtgccgacctatatccccgatcgtgaaattactcccctaaaaacactggagaaatgggctcagctggccattgcagcccacaaaaagggcatctacgcccaaaggcggaccgacgcacagaaggtgaaagaggacgtggtgtcatatgccaggttcaagtggccactgctcttttcaagattctacgaagcttacaaattttctgggccaagtctaccaaaaaacgatgtcatcgtggctgtcaactggacaggagtatatttcgtcgacgaacaggagcaggtactgttagagttgagctttcccgagattatggctgtgtctagctcacggggcgctaagaccaccgccccttccttcactctagctaccattaagggggacgaatataccttcacttcatctaatgccgaggacataagagacttagtggtgacctttctggaaggcctccgtaagcgcagtaagtacgtcgttgctctgcaagataaccctaaccctgccggcgaggagtctgggttcctctccttcgctaagggcgatctaattatcctagatcacgatacaggcgagcaggtcatgaattcagggtgggcgaatggcatcaacgaacggacaaagcagaggggagattttccgaccgattcggtctacgtcatgcctacggttactatgcctccacgcgagatcgtggccctagtaacaatgacacccgaccaaagacaagatgttgtccggctactgcaactgaggactgccgagccggaggtgcgagcgaagccctataccctcgaggagttttcatatgactatttccgcccacctcctaagcatacgctgtcaagagtgatggtgtccaaggcgcgagggaaggatcgcctttggtctcacacccgcgagccattgaaacaagcattacttaaaaaactccttggctcagaggagctttcccaagaggcctgtcttgcctttatcgcggtgctcaaatacatgggagattaccccagtaagcggacaagaagtgttaatgaactcacggatcagatttttgagggccccctgaaggctgaaccactcaaagatgaggcctatgtgcaaatactgaaacagctgacagacaaccatatcagatactctgaggagcggggctgggagctcctgtggttgtgcactggcctatttccaccttctaacatcctgctgcctcatgtacagcgctttttgcagagtcgtaaacattgtcccctcgcgatcgactgcctgcaaaggttgcagaaggcacttcgcaacgggtcgcgcaaatatcccccccacttggtggaggtagaagcaatacaacacaaaaccacccagatttttcacaaggtttatttccccgacgatacagacgaagctttcgaggtggaatcttctacaaaggctaaggacttctgtcagaacatcgccactaggctgcttctgaagtcctccgaagggttctccctctttgtaaaaattgccgataaagtactgagtgtccccgagaatgatttcttttttgatttcgtccggcacctcaccgattggattaaaaaggctcgacccattaaagacggcattgtgccctctctgacatatcaggtcttttttatgaaaaagctctggacaactaccgtgccgggcaaagaccctatggctgattccatcttccactactaccaagagctgcctaagtacctgcgcggatatcataagtgtactcgcgaagaggtgctgcagctcggcgctctgatttacagagtcaaattcgaggaagacaaaagctacttcccgtccatccctaagcttctccgtgagctggttccccaggacctgattagacaggtcagccccgatgactggaaaaggagtattgttgcttacttcaataagcatgccggcaaatcgaaggaagaggctaaacttgcgttcttgaagttgatctttaagtggccgacttttgggtcagcctttttcgaacagacaacagagccaaacttcccagagattctgttgatcgccattaataaatatggggtcagccttatcgatccaaaaacaaaagatatactgactacccacccctttaccaagatttcgaactggagtagtggcaatacctactttcacatcacaatagggaatctcgtccgggggagtaagctgctttgcgagacctccctaggatataaaatggatgatctgctgacatcctatatctcccagatgcttacagcgatgagtaaacaacggggttccagaagcggtaagtag

SEQ ID NO: 125460 - DNA, 2532 bp, synthetic construct
  misc_feature 1..2532: note = Description of Artificial Sequence: Synthetic coding sequence
  source 1..2532: mol_type = other DNA
ggcctatcagtccagtggctgctggacggcctcgcttgcttcttcgcctccctccacgtgccactcggtcgagtgcagctacatgcatctgcccggggaatccaggaaaaggaagacgacctcgcagaactcgcttcacaacagtatttcgtagattatggctccgagatgatccttgagagacttctgaacttagttcccacctacattcctgatagagaaattacccctttgaagacgcttgaaaagtgggcccaattggctattgcagcgcacaagaaagggatctatgcccagcgtcgcacagatgcacagaaggtgaaggaggacgtggtcagttatgcacggtttaagtggcctttactgttctcccgtttttacgaggcttacaagttctctggaccttcactgcccaagaacgacgtcattgtcgcagtgaactggaccggcgtctactttgttgacgagcaagaacaagtgctacttgagttgtcatttcctgaaatcatggccgtgtcttcatccaggggagcgaagaccacagctccgagttttaccctggcaaccataaagggggacgagtacaccttcacctcaagcaatgctgaggatatcagggacttagtcgtgaccttcctcgagggactccgcaagcggtctaagtatgtggttgcccttcaggataacccaaacccagcaggcgaggagtcaggattcctgtcattcgccaagggagatctgattatacttgaccatgacacaggcgaacaagtgatgaactccggatgggccaatggcatcaacgaacgcactaagcagagaggcgatttcccaaccgactccgtttacgtgatgcccaccgtgactatgcctcctcgtgagatcgtagctctggtaactatgactcctgatcaacggcaagatgtggtgaggctgctgcagctgaggaccgctgaaccagaagtgcgggccaaaccatatactctggaagagttctcatacgactactttagacccccccctaagcatacactgtcccgggtcatggtgtctaaagcccgtggcaaggatcggttatggtctcatacgcgcgagcctctcaagcaagcacttctcaagaagctcctggggtccgaggagttgtcacaggaagcctgtttagctttcatagccgtgctcaagtacatgggagattatccctctaagagaacacggtccgtgaatgaactgaccgaccaaatttttgaaggcccactgaaggctgagcctctgaaggacgaggcctacgtgcagattctgaaacaactcacagacaaccatattagatactccgaagaaagaggatgggaactcctgtggctttgcacaggtctgtttccaccatccaacatcctactgccgcatgtgcagcgcttcctgcagagcagaaagcactgccccctggctattgactgtctgcagcgcttgcagaaagctctgcgtaatggaagccgaaagtacccccctcatcttgtggaagtggaggctattcaacataaaactacccaaatcttccataaggtatattttccagacgacacagacgaagcattcgaggtagagagtagcaccaaggcaaaggacttttgccagaatattgcaactcgccttctattaaagagttcagaaggcttcagtctcttcgtaaagattgccgacaaggtgctctccgtcccagagaatgacttcttcttcgatttcgtccgccacctcactgactggatcaagaaagcccgcccgattaaggacggaattgtgcccagccttacatatcaggtattttttatgaaaaagctctggaccaccacagtccctggaaaggacccaatggcagatagcatttttcattactaccaggaattgccaaaatacctgcgagggtaccataagtgtactcgggaggaggtgttgcagctgggggccctcatctatagagtgaagtttgaggaagataagagctattttccaagtatccctaaactgctacgtgagctggtgccacaagatttgatcagacaagtttcaccggacgattggaagcgttctatcgtagcgtacttcaataaacacgccgggaaatccaaggaagaggccaagttagccttcttgaagcttatcttcaaatggccaacctttggcagcgccttttttgaagtgaaggttcaccatggtcttttacgtgctgaagaagagggtaatagggcgcttattaaacacagggattcatctttggggctctgggaaagggccatggccttggacacatgccctggtgaagggcggagagcagcccccagcgccctctcgcaacttagtgtgttggcaggtgtgtcccctggagatagaggcacacgccggtccagcgcctggcaatggcgccagacatgcaagcaggcgggcgttatggaggacggcctgtgcagcgatacgggcgagccaagcccccgttggcagtcctcaggaggctcagccggttgcgaaaaagcgtcttag

SEQ ID NO: 125461 - DNA, 4167 bp, synthetic construct
  misc_feature 1..4167: note = Description of Artificial Sequence: Synthetic coding sequence
  source 1..4167: mol_type = other DNA
atgagattgggttttctgcggctgcaggccctgcatcgtagtaggaaactgcaccaacagtaccgtctggcacgacagagaattatacagttccaggccagatgtcgggcgtacttggtccgcaaggcgttccgccaccggttatgggccgtcctcaccgttcaagcctatgctagaggtatgatagcccgccgtctgcaccagcggctgagggctgagtatctttggcggctcgaggcagagaaaatgaggctcgcggaggaagagaaactccgaaaggagatgtctgccaagaaagctaaagaggaagctgaaaggaagcatcaggagagactggcccagttggcacgagaagacgccgaaagggagttgaaagaaaaggaggctgcccgacgtaagaaagagcttctcgaacaaatggaaagggcacggcatgaaccagtaaatcactctgatatggttgacaaaatgtttggatttctgggcactagcggaggcctgccgggccaggaggggcaggctccctcggggttcgaggaccttgagcgagggcgccgtgagatggtagaagaagacttagacgccgcgctgcctctccctgacgaggacgaagaggacctgtctgaatacaaattcgctaaattcgccgcaacctactttcagggtaccacaactcatagttacactcgacgacctttgaagcaaccactgctctaccacgatgacgagggggaccagttggccgctctggccgtatggattaccattttgaggttcatgggggacctgccagagcccaagtatcacaccgcaatgtccgatggttccgaaaagattcccgtgatgacaaagatctacgaaaccctgggaaagaaaacgtacaagcgcgagctgcaagccctgcagggggagggagaggcccaattgcctgagggtcagaagaagtcttctgtcagacataagctagttcacctaacgctgaaaaagaagagcaagcttactgaagaggtgactaagcgcttgcacgatggtgagtccacggtacaggggaattccatgctagaggatcgccctactagtaacctggagaagctccactttattatcggcaatgggatcctgagacctgcacttcgagacgagatttactgccagatctctaagcagttgacgcacaacccctctaagtcaagctatgcacggggatggatccttgtctcgctgtgcgtgggatgcttcgcacccagcgagaaatttgtgaaatacttgcgcaattttattcatggaggcccaccagggtacgctccatattgcgaagaaaggctgagacgcaccttcgtgaatggcaccagaacgcaacccccttcttggctggaactccaggcaaccaaatccaagaagccaattatgctgccagtaaccttcatggatgggaccaccaaaaccctcctaactgactctgccacaacagctaaggagctctgtaatgcccttgcggataagatatctctcaaggatcggttcgggttcagcctatatatcgctctgttcgacaaggtctcctcactggggtcaggatcggaccacgttatggacgccatttctcagtgtgaacaatacgcaaaggagcagggcgcacaggaaagaaatgctccctggagactgtttttccgcaaggaagttttcacgccatggcactcaccctcagaggataacgtggcgacaaacctcatctatcagcaggttgtgaggggggttaaattcggggaatacaggtgcgagaaagaagacgacttggctgaactggccagtcagcaatatttcgttgactacggctccgagatgatactggagagactcctaaatctcgtgcctacctacatcccagacagagagataacgcctctcaaaaccctggaaaaatgggcacagttggcaattgccgcacacaagaagggaatctatgcgcagagacgaactgacgcgcagaaggttaaggaagacgtcgtcagctatgcccgtttcaagtggcccctgcttttctcccgattctatgaagcttacaaattcagcggcccctccctgccgaaaaacgacgtgatagtggccgtgaactggaccggggtttatttcgtagacgagcaggagcaggtgctactggagctgtctttccctgagataatggccgtgtccagttcacggggagccaaaacaactgctccatcatttaccttagccactataaaaggagatgaatacactttcacatcctccaatgctgaagatattagggacctggtggtgacctttttggaggggctccggaaacgttcaaaatatgtcgtagctttacaggacaatcctaatcctgccggcgaagagtctggtttcttatccttcgccaagggcgatctgattattctggaccacgatactggcgagcaggttatgaattctggttgggccaacggcattaacgaacgtactaaacaacgcggagacttccctacagacagcgtatatgttatgcctacggtaaccatgccccctagagaaattgtggccctggtcacaatgactcctgaccaaagacaggatgtcgttagactgctgcagctacgcaccgcagagcccgaggtacgggccaagccgtatacattggaggagttttcttacgattattttaggccaccccccaagcacactctgtctcgcgtgatggtaagtaaggcccggggcaaggaccgcctctggagccacacaagggaacccctcaagcaagcactgctgaaaaagctgttgggctccgaagaactttcacaagaagcctgccttgcattcattgctgtcctgaagtacatgggcgattaccctagcaagaggacccgttcagttaacgaattgacagatcagatttttgaaggtccactgaaggcagaaccacttaaagatgaggcttatgttcagatcctcaaacaattgaccgataatcatatcagatacagtgaggagaggggatgggagctgctgtggctgtgcaccgggctcttccccccttcaaatatattacttccacatgtgcaacgcttcttgcagtctaggaagcattgccccctggccatcgattgtctgcagagattgcaaaaggcgctgcgcaatggtagcagaaagtatcccccccacttagtcgaggtggaagccattcagcacaaaacaacacagatcttccacaaagtatactttccagacgacacggacgaagcatttgaagtggagagctcaacaaaagctaaggacttttgccagaatattgcaacgcggctcttactcaagagtagtgaaggcttcagtctatttgtgaagattgctgataaagtgttgagcgttcccgaaaacgacttctttttcgactttgtccggcacttgaccgactggattaaaaaagcgcgacctatcaaggacggaattgtgccctcgctcacttaccaagtgtttttcatgaaaaaactttggaccaccactgtccctggaaaggatccaatggcagatagtatcttccactattatcaagaacttcccaagtacctgcggggctatcacaagtgcactagagaagaggttctgcagttaggcgccctgatttaccgcgtaaaattcgaagaggataaaagctatttcccttctatccccaaactactgcgggaattagttccccaagatttaatcagacaggtcagcccagatgactggaaacggtcgatcgtggcttatttcaacaagcacgccggaaagtccaaagaggaggcgaagctagcgtttctgaaactaatttttaagtggcctacctttggatccgcattcttcgaggtgaagcaaacaacagaacccaactttccagagattcttctgattgccataaacaaatatggcgtgtcacttattgatccaaaaaccaaagatatcctgactacacatccatttaccaagatatctaactggagcagcggcaacacatacttccatattaccatcggtaatctggtgcggggatcgaagttactatgcgagacaagtctgggttataagatggacgatttgctgacttcttatatcagtcagatgttgaccgccatgtccaaacaacgcgggtcacggagcggcaaatag

SEQ ID NO: 125462 - DNA, 2580 bp, synthetic construct
  misc_feature 1..2580: note = Description of Artificial Sequence: Synthetic coding sequence
  source 1..2580: mol_type = other DNA
atgggacggaagcttgatctgagtggcttaacagatgatgaaactgaacacgttcttcaggtggtgcagagagatttcaatttgagaaagaaggaagaggagagactgtctgaactgaagcagaagctggatgaggaggggtcgaagtgctccatcctgtcaaaacatcagcagttcgtcgaacactgttgcatgaggtgctgctctcccttcacctttcttgtcaatacaaagcgccagtgcggcgattgcaaatttaacgtctgcaagagctgctgctcctaccagaagcatgagaaagcgtgggtctgctgtgtatgtcagcaggcaagactcttacgggcccagtcgctggaatggttttacaataacgtcaagtctcggtttaaaaggtttgggtctgccaaagtgctgaaaaacttgtatcgcaaacatcgactggagtccggcgcatgctttgatatcctgggcggctcactcttcgaatccaacctggaaaacgagggatccatttccggctcagatagcaccttctaccggcagagtgagggccacagtgtgatggatactctggccgtggcactaagagtagccgaggaggcaatagaagaagcgataagtaaagcagaggcctacggtgattctctggacaaacagaacgaagcaagctacctgagggatcacaaagaggaactgacagaagagctggctaccaccatactgcaaaagatcatacgaaagcagaaatctaaaagcgagcagcaagtggaagaagaacctggctggcctcacccccagtcatgcagcaccaaggtagctgatgaaggtacaagtgcgtcccccggcggttaccgcgcccctgcggccctctggaggagtcaatccgccttctctattactggagaggaggctctgaaaaccccccctgtagaagccccttctcggcaacctcgcgaccagggccagcatccgcgggctgaatccgccttgcccagctggaagagcgttgatcgcttagacgagaccaacctggctcctgtgctgcagagtcccgatggaaattgggtggcattaaaggacggagcgcccccgcctaccagactcctggctaaaccaaaatcaggcacgttccaggcattagaggtggcctcctctgtcgcctctgcatatgacgagatgggcagcgactccgaagaggatttcgactggagtgaagctttatctaagctatgcccacggagccgtgcactgccaaggaacccccaaccccagccaacacaggcccagagcagtgaccagggtccgattgcagcctcccctagctccgcactctccccgaatccagaagccatgtgttccgactccgaaacctcctctgctggatcctcccgggaagtgggacatcaggccagattatcatggctccagcgtaaggccccgcgcaatccagctgccgagaaaatgcggctgcacggggagctcgatgtcaacttcaatcctcaactcgcctctcgagaaacatcggactcatcagaaccggaggaggcaccgcacacaacagaccgacgagccaggcggtggcggcgggcccgcctcggatccgaagagccatcaaaggagccttccagccccagtgcccagcttcgcgatcttgacacacaccaagttagcgatgatcttagcgagactgacatttccaacgaagcccgcgacccgcaaacgctcacagataccactgaggaaaagaggcgtaatcggctctacgagttagcgatgaagatgtctgagaaggaaacatcctcaggagaggaccaagaatcggagccaaagaccgagagtgaaaatcagaaggagtccttgagcagcgaggataactcacagagcgtgcaggaggaactcaagaagaagttcagcgccgtgagcctttgcaatattagtaccgaagtgctaaaggtaatcaacgcaaccgaggagcttattgctgggagcaccggaccatgggagtctccccaggttccgcccgataggcagaaaggcatgttcccccggggtaccgaccaggtccgcctggacgaacagctgacttcattagaggagaacgtttatcttgcagctgggaccgtatatggcctggagacccagctgaccgagctcgaagacgctgccagatgtatccactccggaaccgacgagacacatcttgcagacttagaggaccaggtagccacagccgctgctcaagtccaccatgctgaactgcagatttctgacatcgaaagtcgcatttctgccctcaccattgccggcctcaatattgctccttgcgtgcgcttcacgaggcgcagagatcagaagcagcgaactcaagtgcaaaccatagatacatcccgccagcagaggcggaaactgccagctccgcccgtgaaagccgaaaaaatcgagacttcgtccgtgacaacaattaaaacattcaatcataattttatccttcaaggctctagtacaaaccgaactaaggagagaaaggggactacaaaggacctgatggagcccgctctcgaatccgccgtcatgtattag

SEQ ID NO: 125463 - DNA, 2313 bp, synthetic construct
  misc_feature 1..2313: note = Description of Artificial Sequence: Synthetic coding sequence
  source 1..2313: mol_type = other DNA
atgcggaaagcggcgtccgccgctagcagccggagtacgtctagtctctggtccaccgctgcttgcgcggcagccagaccgtctccatctagtagtactcccagtgcctccgtcgagatagcgaacagcatgtcggcacgtgcagccgcccctacccggagtaccaaacggcccggatccgctgcttctgcttccaagagagggggcagtctgtttgagagtaacttggagaatgaaggatctatctccggcagtgattcgactttttaccggcaatcagagggtcatagcgtgatggacaccctcgccgtggcgctgagggtggctgaggaggctattgaggaagcaatctccaaagcagaagcttacggagactcactggataagcagaacgaggcctcatatctgcgggatcacaaagaagagctcaccgaggaactggcaacgaccatcctccaaaagattatcagaaagcaaaagtcaaagtctgagcaacaggtagaggaggaacccggatggccgcaccctcagagctgtagcactaaggtggccgatgagggcaccagtgcttccccggggggctatagagccccagcagcgttgtggcgcagccagtcagcattttccatcaccggggaggaggccctaaagacacctcccgtggaagccccttcccgccagcctcgggatcaaggacaacacccacgagccgaaagtgcactaccttcatggaaatcggtggacaggctcgacgagactaatctcgcacctgttctgcagtcccccgatgggaattgggtggcattgaaagatggtgctccacctccaacccggctgctggctaaacccaagtctggaacctttcaggctctggaggtggctagttccgtcgcctcagcgtacgacgaaatggggagtgacagtgaggaggatttcgattggagcgaagcactgagtaagctctgccccaggtctcgcgctttgccccgcaatcctcagccacagcccacccaggctcagagttccgaccagggacccatcgcagcctccccaagttcggcattgtccccgaatcctgaagctatgtgctccgatagtgagacgagctctgctgggtccagccgagaggtgggacaccaggctcggctttcctggctgcagagaaaagcacccaggaatcctgccgccgagaaaatgaggctccacggcgaacttgacgtgaactttaatcctcaactcgcctctagggagacctcagacagctcggagcctgaagaagccccgcatactaccgaccggcgggctagacgctggcggcgtgcacggcttggttctgaggagccttccaaggagccatcttcgccctccgcccaactgcgcgatctggatacacaccaagtgtcagacgatcttagtgaaacagacattagcaacgaggcccgagaccctcagacacttaccgacacaactgaggagaagcgtaggaatagactttacgaattggccatgaaaatgtctgaaaaagaaacttcctctggggaagaccaggaatccgagcctaagaccgaaagcgaaaaccagaaagagagccttagcagtgaggacaattcccagtcggtgcaggaggaactgaaaaaaaagttttccgcagtgtccctctgtaacatttcaacagaggtgctgaaagtcatcaacgcgactgaagagttaattgctgggtctaccggaccctgggaaagtccccaggtcccacctgatcgccagaaaggcatgtttcccagggggaccgaccaagttcgactggacgaacagctaacctctcttgaggaaaatgtgtacctcgccgcaggcacagtctatggacttgagactcagctgactgagcttgaggacgcagccagatgcatccactccggaactgacgagacccatttggctgatttggaagatcaggtagcaacagcagccgcacaagtgcaccacgctgaactgcaaattagcgacatcgagagccggatatctgcgttaacaatcgcgggcctcaatatagctccttgcgttaggtttacccgccgtagagaccagaagcagcgaacccaggttcagacaatcgacaccagcaggcagcagaggagaaaactaccagcccccccagtgaaggcggagaaaatcgaaacttccagcgtgactaccataaaaactttcaaccacaatttcatcctccagggatcaagcactaatcgtactaaggagcggaagggcaccacaaaggatctcatggagcctgccttggagtcagccgttatgtactag

SEQ ID NO: 125464 - DNA, 2580 bp, synthetic construct
  misc_feature 1..2580: note = Description of Artificial Sequence: Synthetic coding sequence
  source 1..2580: mol_type = other DNA
atgggccgcaagctcgacctctctggcctaacagatgatgagacagaacatgtactgcaagtcgttcagcgcgatttcaacctacggaagaaggaggaggaacgcctcagcgagctcaagcaaaagctggacgaagagggatccaaatgctctatcctgagcaagcatcagcagttcgtggagcattgttgcatgagatgctgtagcccttttacttttttggtaaataccaaacgacagtgtggcgattgcaaatttaacgtatgtaaatcgtgttgtagctatcagaagcacgaaaaagcctgggtgtgttgcgtttgccaacaggcccgcctgctgcgggcacagtccctcgagtggttctacaataatgtgaagtctaggttcaagagattcggatccgctaaggtgcttaaaaacctctaccgtaaacacagactggagtctggagcttgttttgatatcctcggaggctctctgttcgagtcaaatcttgagaatgagggcagcataagcgggagcgactctaccttctaccgacagtcggagggacactccgtgatggacaccctagccgtggcactgagggtcgcagaggaagccatagaggaagctatttcgaaagcagaagcatacggggactcgctcgacaaacagaatgaggcctcttatcttcgagaccacaaagaagagctgaccgaagaactggcaaccaccatcctgcaaaaaatcatcaggaagcaaaagtcaaaaagcgaacagcaggtggaggaggagcccgggtggccacacccccagtcttgcagtactaaggtggccgatgagggaacatccgctagccccggtgggtatcgggccccagccgccctttggcgctctcagtccgcatttagcattacgggggaggaagcgcttaaaaccccaccagtggaagcccccagtcgtcagccccgcgatcaggggcaacaccccagagctgaaagcgcactgccaagttggaagagtgtggacagacttgacgaaacaaatctcgcacccgtgctgcagtcaccggacggtaactgggtggcactcaaagacggtgctccacctcctacaagactcctggcaaagccaaagtccgggacgttccaagcactcgaggttgcctcatcagttgcaagtgcatacgacgaaatgggttctgattctgaggaggacttcgactggtccgaagccctctcaaagctttgtcctcgcagcagagcgctcccccgtaatccccagccacagccaacccaggcccaatcgagcgatcaaggtcctattgcagcatcgcctagtagcgccttatctccaaacccagaggcgatgtgctccgattctgagaccagctctgccggctcctcccgtgaggttggccatcaggccagactgagctggttgcagaggaaggccccacggaatcccgccgctgagaagatgcgcttacatggcgagctggacgtgaattttaacccccaactggcaagcagggagacaagcgacagcagtgagccggaagaagcacctcataccaccgaccgcagggcccggcggtggcggcgcgctcggctcgggagcgaggaaccctccaaggaaccatcatctccgtctgctcagttgagggacctagatacccatcaggtgagtgatgacctaagcgaaacagacatcagcaatgaagccagggacccccagacattgactgacactacggaagagaagagaaggaacagattgtacgagcttgccatgaaaatgtcggagaaggagacctcatctggcgaagatcaggagtccgaacccaagacggagagcgaaaatcagaaagagtctctgagctccgaggacaattctcaaagcgtgcaggaagaactcaagaagaagttctccgctgtctctttgtgcaacatcagcaccgaggtcctgaaagtcattaatgctaccgaggagctgattgccggcagcaccgggccgtgggagtcaccccaagtgcctcccgacaggcagaagggaatgttcccgcgggggaccgaccaggtgagactcgacgaacagctcacgtccctggaggaaaatgtttacctggccgccgggacagtctatggcctggagactcagctgacagagctggaagatgcagcgaggtgcattcactccggaacagacgagactcatttggctgacttggaagatcaggtggccacagccgctgcgcaggtgcatcatgcagagctacagatttcagatattgaatcccgtattagcgctttgacaatagccggactgaatattgcgccctgcgtgcggtttacccgtcgacgcgatcagaagcagcgtacccaagtgcagacaatcgacacttctcgtcagcagcgacgaaaattgccagcaccgcctgtcaaggcggaaaagatcgaaacgagctcagtgacaacaattaaaactttcaaccataactttatcctgcagggctcgtcaactaaccggacgaaagaaaggaagggaacaacaaaggatctgatggagcctgctctggagtccgctgtcatgtactag

SEQ ID NO: 125465 - DNA, 2019 bp, synthetic construct
  misc_feature 1..2019: note = Description of Artificial Sequence: Synthetic coding sequence
  source 1..2019: mol_type = other DNA
atggatacattagccgtggcactacgagtggcggaggaggccatcgaggaagccatttccaaagccgaggcttatggtgatagtttggacaagcaaaatgaagccagctatctgagagaccacaaggaagagctgacggaggagcttgctacaactattctccagaaaatcattcgtaagcagaagtccaagtccgagcagcaagtggaagaggaacccggctggcctcacccacagtcatgcagtacaaaagtggccgacgagggcacatccgcatcccccggtgggtatcgcgccccagcggccctctggaggtcccaatctgccttcagtatcacaggggaggaggcactgaaaactccacccgtcgaagcacccagcaggcagccccgcgatcagggacagcatccacgagctgagtcagctcttccgtcatggaagtcggttgatcggcttgacgagactaatctggccccagtgctccaatctccagatgggaattgggtagctttgaaggacggagccccgccccctacacggctgttggccaaacccaagagcggtacctttcaagctttggaggtcgcttcctctgttgcaagcgcctatgatgagatgggcagcgattctgaagaggatttcgactggtctgaagccctgtcaaagctatgccctaggtccagggccctacctcgcaacccgcagccacagcctacccaggctcagtcatccgatcagggccctatcgccgcctcaccaagctcagcactctccccaaaccccgaagccatgtgctctgactccgagacctcttctgctggctcatcaagggaggtcggacatcaagccaggctgtcctggctccagcgaaaggctcccagaaatcccgcagccgaaaagatgcgactccacggcgagctggacgtaaactttaacccccaattagcgagccgtgaaacaagtgattctagcgagccagaagaggctccccacacaacagatcgccgggccaggagatggcgcagagcccggttaggttccgaagagccaagcaaggagccaagctctccctcagcccagttacgagatctcgatactcatcaggtctccgacgacttgtccgagaccgacatcagcaacgaggctcgcgatccccagaccttgacagatactaccgaggaaaagaggcgcaaccggctgtacgagctggctatgaagatgtcagagaaggagactagtagtggcgaagaccaagagagcgaacccaagacggaaagtgagaatcagaaggaaagcctgagtagcgaggacaatagccaatctgtccaggaggaattgaaaaaaaagttctccgccgtctctctttgcaacataagcacagaggtcttgaaagtgattaatgctaccgaagaactgatcgcgggctccactggaccatgggagagcccacaggttccgccagacagacagaaggggatgttcccccgcggaaccgatcaagtcagacttgatgagcagctgacctctttggaagagaacgtttacttagcagccggaaccgtatacgggctcgaaactcaactgacagagctggaggatgccgcgcgatgcatccatagtggcacagacgaaacacacttggcagacctcgaggaccaggtggctacggcagcagcccaggtacatcatgccgagctgcagatctcagacatagagtccaggatttctgcattaacaatcgcgggccttaacatcgccccatgtgtgcggtttactcgaagaagagaccaaaagcagcgaacccaggtgcagacgatcgataccagtcgccagcagcggaggaaactcccagcgccaccagtcaaagccgagaaaattgagacgtccagtgtgacaacaattaagactttcaatcataactttatcctacagggcagcagcactaataggactaaggagcgcaagggaaccactaaagatctgatggagcctgcactggagtccgcagtgatgtactag

SEQ ID NO: 125466 - DNA, 2886 bp, synthetic construct
  misc_feature 1..2886: note = Description of Artificial Sequence: Synthetic coding sequence
  source 1..2886: mol_type = other DNA
atgaagtatctgctgaatttcattggccagggacctgccacatatggtcccttctgcgctgagcggcttagacgaacctatgctaacggagtgcgagccgaaccccccacatggcttgagctacaggctgtcaagtcaaagaagcacattcccattcaggtgattcttgcaaccggagaaagccttactgtgcctgtggattctgcaagtacctccagagagatgtgcatgcacatagcccacaagcagggtctgagcgaccacctcggcttctcccttcaagtggcagtttacgacaagttctggtccttaggctcaggcagagaccacatgatggacgcaatagcacgctgcgagcaaatggcgcaggagcgcggggaatcccaacgccagtccccctggcggatctactttaggaaagagttctttactccttggcacgatagcagagaggatcccgtgtccacggagctgatttataggcaggtgttacgaggtgtttggtccggggaatatagttttgagaaagaggaagaactggtagagctgctcgcccgccactgttatgtacagctgggcgcgtccgccgaatctaaagctgtgcaggaacttctaccctcatgtattccgcacaaattataccggaccaagcctcctgacaggtgggcaagccttgtcactgccgcctgtgcaaaggctccctacacacagaagcaggttacccctttagctgtgcgggagcaagtggtggatgcggcccgactgcaatggccattattgttcagtcgtttgttcgaggtgataaccttatccgcttttactctgccttccctgctcgctaggcctccgccggctcaagatgccggaccagccggtgaagacgctgcagggactctgttcccacgaggccacggaagcggccaccagcaggtccgcgccttaagggaagatcttttccttcacactgagccccatcccccggcccctggccggacggcacacgaggttctgcattggggaattactcgatgtacagggtcattctctctgaagcctcgtagtaccaggaaaggtcagggcagtgtgcagccactagcaggcacatatctggaagggtccttcctgtgccacgggcgcgaactggttgcatggagggttcaggtagtgtgggaaggagacaagggacagtgccttgccggagcagatccccatagccacggaagcccttggatctccctgaccggaaatttcagcatgcccttcgggaaaagcactcaacagtcaggaacgtgtatctcgggcctctgtcaggtctattcaggacaccattcgccacttgcaacctcccctagatcaaccgatagtattacccacagtgccgacgagagaatgagcaaactgaaacacgccgaggtcaggtggctgcgtgtctccacctggcaaagtcggcagctgatatccgcgctgactttcgcagtaagcctgcggtgccactgcacgccggccacatcattatccgctcactcacaaccacacacttgggcggcccctctgtccgcatctgagcggccaacagtggtcagcggcctcgtcctcgcccttgctgagcagctgtgcgtgctgattcgatggaggggcctcctcgtaaccttgagtttcatcagccgagaggcgcagggaggtcagaggttactactgtccaccatgcatgaggaatacgagtttgtgtcgccaagcagcgtggccatcgcagagttggtagccctgtttctcgaaggactcaaggaacgtagtatcttcgctatggcactacaggaccggaaagctacagatgacacaacattactggcctttaagaaaggggatctcttggtgcttacaaagaagcaaggactgctggcttcagaaaattggacactgggacagaatgatagaacaggcaaaaccggcttggtccctatggcgtgtctttacacaatccctactgtcacaaagccttccgctcagcttctgagcctgcttgcaatgtccccagagaaacgaaagcttgcagcacaggagggccagtttacggagccccggcctgaagagcccccgaaagaaaagcttcacactttagaagagttctcctacgagttctttcgggcacccgaaaaagacatggtgtccatggcggttttgcccctcgccagggcccggggccacctctgggcatactcgtgtgagccactgcggcagcctctccttaagcgagtgcacgccaatgtagacctttgggatatcgcttgccaaatcttcgccacccccatcctgagatatatgggggactaccccagcaggcaagcctggccaaccctcgagttaacggaccaaattttcacacttgccttgcagcaccccgcactccaagatgaagtctattgtcagattctgaaacagctcactcacaactctaataggcatagtgaggagagagggtggcagctgttgtggctgtgcactggattgtttccgcctagtaagggactcttaccacacgcccagaaatttatcgacacccgtagggggaagctgctggccccagactgcagccgccggattcagaaggttttaaggacaggcccacgaaagcagcctcctcaccaggtggaagtggaggcggccgagcaaaacgtcagtaggatctgccacaaaatttactttcccaacgacactagtgagatgctggaggtggtggccaatacgcgagttagggacgtctgtgattccatcgccaccagactccagttggcatcatgggagggatgtagtctgttcatcaaaatatcagacaaggtgatatctcagaaagaaggggacttttttttcgactcactcagagaatag

SEQ ID NO: 125467 - DNA, 6354 bp, synthetic construct
  misc_feature 1..6354: note = Description of Artificial Sequence: Synthetic coding sequence
  source 1..6354: mol_type = other DNA
atgagcggcttccgattaggcgaccatgtatggctggaacctccgagcactcacaagactggcgtggctattgggggcattatcaaggaagccaaaccaggtaaggtcttagtggaggacgacgaagggaaggaacattggatccgagctgaggacttcggagtgctatcaccgatgcaccccaacagcgtccaaggcgtggatgatatgattaggctgggtgaccttaatgaggcaggcatggttcacaatctccttattcgatatcagcagcacaagatctacacctacacagggtcaattcttgtggccgtaaacccttttcaggtactgccgctgtatactctggagcaggtccaactctactatagccgtcacatgggagagttgcctccgcacgtcttcgcaattgccaacaactgctacttcagcatgaaacgcaacaaacgcgaccaatgttgtattatttcaggagagtccggcgccggcaaaactgaaacaactaagttgattctgcagtttctggcgactatcagcgggcagcacagttggattgaacagcaggttttagaagccaaccctattcttgaggctttcgggaatgcaaaaaccatccgcaatgacaacagttcacggttcggtaagtatatagatatttacttcaatccctcaggggtcattgagggtgcccgcatcgagcagttcctgctggagaaatctcgggtgtgcagacaagctccggaggaaaggaactatcacatcttctattgcatgttgatgggagtgagcgcagaggataagcagctgctgtccctgggtacaccctctgagtatcattatcttactatgggcaattgcaccagctgtgagggtttaaacgacgcaaaagattatgcccacatcagatcagcaatgaaaatcctgcagttctcggatagcgaatcctgggatgtgatcaagctcctcgcggccattctgcacctcggaaacgttggatttatggcctccgtgtttgagaatctggacgcctccgacgtgatggaaactcctgcgttccccactgtaatgaagctgttggaggtccagcatcaggagttaagagattgcctgatcaaacatacaattttgataagaggagaattcgtgacccggagcctcaatattgcccaggctgcagatcggcgagatgccttcgtcaaggggatttacggccatctgtttctgtggattgtcaagaagattaatgcggccattttcacacctcccgcccaagacccaaagaacgttcgacgagccatcggactgctcgacatctttgggtttgaaaacttcgagaataactctttcgaacagttgtgtataaactttgctaacgaacacctgcagcaattctttgtccagcacgtgtttaccatggaacaggaggagtaccgctccgaaaatatctcttgggactacattcattacaccgataataggcctactctagatctgctggctctgaagcctatgtccataatctctctgttagatgaggaaagccggtttccacagggtactgatcttaccatgctgcagaagttgaacagcgtccatgccaataataaggcatttcttcagccaaaaaacatacatgacgccaggttcggcatcgcgcattttgctggcgaggtttattaccaagctgaagggttcctagagaaaaatagagatgtgctgtcgaccgacatcctcactctggtttacagctccaagaacaagttcctcagagagattttcaatctggagctggcggagacaaagctaggtcatggcactattcggcaggccaaggccggaaaccatctgttcaaaagtgcagactctaataaaaggccctccacactgggctcgcagttcaaacagagcctggatcaattgatgaagattctcacaaactgccagccctatttcatacgctgcatcaagcccaatgaatataagaagccactgttatttgatcgcgaactgtgtctcaggcagcttagatacagtggcatgatggaaactgtgcacatacgtaagtccggattcccaatacggtatacttttgaggaattttcccagagatttggagtgttactgccgaacgccatgagaatgcagctgcagggtaaactgaggcagatgaccctgggtatcaccgatgtttggctgcggacagataaggactggaaagcgggtaagacgaaaattttcctgagggaccaccaagatactctcctggaggtgcagcgttctcaggtgctcgaccgggcagcgttaagtattcagaaggtgctgcgagggtatcgctacaggaaggaattcttgaggcagagacgggcagctgtgactctccaggcctggtggcgcggctactgtaataggcgcaacttcaagctgatcttagtgggcttcgaacgattacaggctattgccaggagccagcccctggctcgccagtatcaagctatgcgacagcggaccgtgcagctgcaggctctgtgtagaggctacctggttcgtcagcaggtgcaggccaaaaggagagctgtagtggtcatccaggcacatgctaggggcatggcggcaaggcgaaatttccaacagcggaaggccaatgcacccctagtgatcccggctgaggggcaaaaatcgcagggagcactgcctgcaaaaaagcgcagatctatttatgacacagtgacagatacagagatggttgagaaggtattcgggtttctgcccgccatgatagggggacaagaaggacaggcctcacctcacttcgaagacctggagtccaagacgcagaaacttttggaggtagatctggacactgtgccaatggccgaggagcccgaggaggacgtggatggccttgctgagtatactttcccgaagttcgctgtgacctattttcagaaatccgccagtcacacacacatacgtcgccccctcagatatcccctgttgtaccacgaagacgacacagattgccttgcagctctagtgatctggaacgtgatcctaaggttcatgggcgaccttccagagcctgtactttacgctcggagctcacagcaagggtcgagcgttatgcggcagattcacgataccttgggcagagaacatggcgcacaggttccccaacatagccggagcgctcaggtggcctcccagttgaacattggggaggaagcactcgaaccggacggcctgggggccgatcgccctatgtctaaccttgaaaaagtgcactttatcgtgggatatgcaatacttcgcccaagtctcagggacgaaatttactgtcaaatctgcaaacagctgtccgagaatttcaagacctcctccctggcaagaggctggatcctcttaagcctttgtttgggttgctttccgccatctgagcgctttatgaagtatctgctgaatttcatcggacagggccctgctacgtacggacctttctgcgccgaacggctgaggcgcacttacgccaatggagtgagggccgagccaccaacatggctggagctgcaggccgtaaaatccaagaagcacattcccatccaggttattctcgctacaggcgagtcgctgacagtaccagtagattccgcctccacctccagagaaatgtgcatgcatatcgcccataaacagggactctcagatcatttggggttctctctgcaggtagctgtgtatgacaaattctggtcgctggggtccggccgagatcacatgatggacgccatcgccaggtgcgagcaaatggcccaagaaaggggcgaatctcagcgccagagtccctggcgcatctactttagaaaggagttctttactccatggcacgatagccgggaagacccggtctctactgaactgatctataggcaggtgctgagaggtgtgtggagcggagagtattcgttcgagaaagaggaagaactggtggaacttcttgccaggcactgttacgtgcagctgggggcctccgcagagagcaaggcagtacaggaactgcttccttcttgtattccccacaagctgtatcgaacgaagccccccgatcgttgggcttctcttgtaacagctgcttgtgcaaaggccccatacacccagaaacaggtgacccccctggcggtcagggagcaagtagttgatgccgcgcgcctgcaatggcctctcttattttcacggctgtttgaggtgattaccttgtccggacccaggctgcctaagactcagttgatactcgccgttaactggaagggcctctgctttctcgatcagcaggaaaaaatgctgctcgaactgagctttcctgaggtcatgggtctggccaccaaccgggaagcccagggcggacagcgcttgctgttgagcactatgcatgaggagtatgaatttgttagcccttctagcgtggccattgctgagctcgtagccctctttctggaaggactcaaggagagatccatttttgccatggctctccaagacaggaaggccacagacgataccaccctgctggcctttaagaagggcgacttgctcgtcctgacgaagaaacagggacttctggccagcgaaaattggactctgggacagaatgaccgcacagggaagaccggcctggtgccaatggcatgcctgtataccatacctaccgttaccaagcccagcgctcagctgctgagccttttggccatgagccccgagaaacggaagcttgctgcccaggaaggtcagtttacagaaccgagacctgaagagcctcctaaagagaaacttcatactttagaggagttcagttatgaattttttagagctccggagaaggacatggtatcgatggcagtgctgccactcgccagggctagggggcacttgtgggcttacagttgcgaacctttgcgccaacctttactgaaaagggtgcatgccaacgttgatctgtgggatatcgcgtgtcaaatcttcgccaccccgatcctaaggtatatgggagactatcccagccgacaggcttggcctaccctggaactcactgaccaaatcttcaccctcgcattgcagcaccctgccctgcaagatgaggtttattgccagatccttaaacaattgactcacaacagtaatcggcattcggaggaacgtgggtggcagctcctgtggctttgcaccggcttgttccctccaagtaaaggactgctacctcatgcacagaagttcatagacacccggcgaggaaagttactcgcccctgactgctcaagacgcatacagaaagtgctgagaaccggccctagaaagcagcctccccatcaggtggaggttgaggcagccgagcaaaatgtttcacggatttgtcataaaatctatttcccaaatgatacgagcgagatgctggaggtggtggctaacacaagagtacgcgatgtgtgtgattcaattgccacgcggttgcagttggcctcctgggaaggctgctcattatttataaaaatctcagataaggtgatctcccagaaggagggcgactttttctttgattctctgcgagaagtgtcagactgggtgaagaagaataagcctcagaaggagggagcacctgttactctgccctaccaagtttatttcatgcgcaagctttggttgaacatttcaccaggtaaggatgtcaatgcggatacgatacttcactaccaccaagagctgccgaagtatctgcggggtttccataagtgttccagagaggatgccatacacctcgccggactgatttataaggcacaatttaataatgatcggtctcagttggcctccgtgcccaaaatcctgagggagctggttccggaaaacctgactaggctgatgagttctgaggagtggaagaaaagcatcctgctcgcttatgataaacacaaggataagactgtcgaagaagccaaagtcgctttcctcaaatggatctgtaggtggcctacttttgggtctgccttcttcgaagtgaagcagacatccgagccctcatatccggatgtaatcctgattgctattaatagacatggcgtgctgctgattcatcccaagaccaaagatctgttaacgacgtacccctttaccaagatcagttcttggtcgtccgggtccacctacttccacatggccctgggcagcttgggacgcgggagccgtctcctgtgcgaaacaagtttgggatacaaaatggacgacttgctgacctcatatgttcaacagctgctaagtgcaatgaataagcaacgtggttctaaggcaccagccttggcatccacttag

SEQ ID NO: 125468 - DNA, 6351 bp, synthetic construct
  misc_feature 1..6351: note = Description of Artificial Sequence: Synthetic coding sequence
  source 1..6351: mol_type = other DNA
atgtcagggttcaggctgggggaccacgtgtggctcgagcccccttccactcacaaaacaggcgtggctatcggaggcattattaaggaggccaaacctggcaaagtgctggttgaggacgacgaaggtaaggaacactggatcagagcagaggactttggggtgctgtcacccatgcaccctaattcggtccagggcgtcgatgatatgatccgccttggcgacctaaacgaagccgggatggtgcacaatctcctgatccgctaccagcagcacaagatctacacttatactggctccatcctcgttgctgtcaacccattccaggtgctgcccctttacacactcgaacaagtgcagctgtactatagtcgccacatgggcgaactgcccccacacgtctttgcaatcgccaacaactgctatttcagcatgaagcggaacaaaagggatcagtgttgtatcatcagtggcgaaagcggagccggcaagacagaaactaccaaactcatcctgcaatttcttgccacaattagtggacagcatagttggattgaacagcaagtattggaggcaaatccaatcctcgaagccttcggtaatgctaagactatccggaacgacaactcttcgcgcttcggcaagtacatagatatctacttcaatcccagcggcgtgatagaaggcgcccggatagaacagtttctgctggaaaaaagcagggtgtgccgccaggcacctgaagaaagaaactatcacattttctattgcatgctaatgggtgtgtctgcagaagacaaacagttgctcagcctgggcacaccaagtgagtaccactatctgaccatggggaactgtacttcctgcgagggcctgaatgatgctaaggactacgcacacatccgcagcgcaatgaagattctgcagttttcagatagcgaatcctgggacgtcatcaaactgctggccgccattctccatctcggcaatgttggctttatggcgagcgtgtttgaaaacctcgacgcatctgacgtaatggaaacccctgcctttcccacagtgatgaagctgctggaagtgcagcatcaggagcttagggactgtctaataaaacacacaatcctcatccgtggagaatttgttacccgctctctaaacatcgcacaggccgccgacagaagagacgccttcgttaaaggtatttacggccacctcttcctgtggatagtcaaaaagattaatgccgcgatcttcacgcctcctgcccaggatcctaagaatgtacgccgcgctattggacttttggatatatttgggttcgagaacttcgagaataattcattcgaacagctctgtattaacttcgcaaatgagcacctccagcaattttttgttcagcatgtgttcaccatggaacaagaagagtacagatcagaaaacattagctgggactacatccactacaccgacaacagacccactttagatcttctggctctgaaacctatgagtatcatctccctgcttgacgaagaatctcggtttccacagggaacagatttgactatgcttcagaagttgaactcagtacacgcaaataacaaggcattcctacagcccaagaatattcacgatgctcggtttggaattgcacattttgcaggcgaggtgtactaccaggctgaaggatttttggagaaaaacagagacgtcctgagcactgatattctgacactggtttacagcagcaaaaacaaatttctgagggagatcttcaacctggaacttgcagagaccaaactcggccacggcaccatacggcaggctaaagcagggaaccatctttttaaaagcgccgacagcaataaacgtcccagtaccctagggtcccagttcaagcaatcacttgaccagcttatgaaaattctcacaaattgtcagccctacttcatcaggtgcatcaaacctaatgaatacaagaagccgcttttgttcgatagggagctctgtctgagacagctccggtatagcgggatgatggagactgtgcacatccgaaagagcggatttcctatcagatacacctttgaggagttttcacaaaggttcggggttcttctccccaacgccatgaggatgcagctccaagggaaactgcgacaaatgaccctcggcatcactgatgtgtggctgagaactgacaaggattggaaggcagggaaaactaaaatttttctaagagatcaccaggatacgctattggaggtgcaacgatcccaggtcctagatcgcgctgccctgagcattcaaaaggtcctcagggggtacaggtatcgaaaggagtttctccggcagagacgtgccgccgtcacactgcaagcctggtggcgtggctactgcaatagaagaaacttcaagcttattttagtaggattcgagcgccttcaggccattgctcgctcacagcctctggcccgccagtatcaggcaatgaggcaaagaactgttcagttgcaagccctgtgccggggttatctcgtgcgtcagcaggtgcaggccaaacgccgagccgtggtagttatccaggcacacgccaggggcatggctgcccggaggaacttccagcagcgcaaggccaatgcacccctcgtgatccctgcagagggacaaaagagtcagggagctctgcccgcaaagaagcgtaggagcatatacgataccgtgacggacaccgagatggtcgaaaaggtgttcgggtttcttcctgcaatgatcgggggccaggagggtcaagcgagtcctcactttgaagacctggagagtaaaacacagaaacttcttgaggtcgatcttgatacggtgccaatggccgaagagccagaagaggatgtggatgggttagctgaatataccttccccaaattcgcagtcacatactttcaaaagagtgcaagccacacccacattagacggccacttagatatcctcttttataccacgaagatgataccgattgtctggctgctctggtcatttggaacgttatcttacgattcatgggcgacctgccagagcccgttctttatgcacggagttctcagcaagggtcatccgttatgcgacagattcacgatacattaggtcgggagcacggggcacaagtccctcagcattctcggtccgctcaagtggcttcccagctgaatataggcgaggaggcgctggaaccagatggtctgggagctgacagacctatgtcgaacttagagaaggtgcattttatagtaggatatgcaattctccgaccatctcttcgcgacgagatttattgtcaaatctgcaaacagctcagcgaaaattttaaaaccagctctctggcaaggggctggatactgctcagcctgtgcctggggtgctttcccccctctgaacggttcatgaaatatcttctgaatttcattggacaggggccagctacctacggcccattttgtgccgaacggctccgtaggacctatgccaacggagttcgagccgagccacccacctggttagaactccaggccgtgaaatcgaagaaacacatccctatccaagtgattctggcaactggtgagtcgctgacagtaccagtggactcagctagtacaagtcgggaaatgtgcatgcacattgcgcataagcaagggctcagcgatcaccttggcttttctttgcaggttgccgtctacgacaaattctggagtcttggtagtggtcgggatcacatgatggatgcaattgctagatgcgagcagatggcccaggagaggggagagtctcagaggcagtccccatggaggatatattttaggaaggagttcttcaccccttggcacgatagtcgagaggacccagtgtccaccgaactgatctacagacaggtgctgcgaggcgtgtggagcggagagtactcctttgaaaaagaagaggagctggtggaattgctggccaggcattgttacgtccagctcggtgcctctgcagagagcaaggcagtgcaggaactgcttccgtcctgcatccctcacaagctgtaccgcaccaagccaccggaccgctgggcttctctcgtcacggccgcctgtgctaaggcaccctacactcagaagcaagtcacacccctcgcggtgcgggaacaagtggttgatgccgcccgactccagtggccactgctgttcagccgtctcttcgaggtgatcactctgtccggcccacggctgcccaagactcagcttatactcgcagtgaactggaagggcctgtgttttcttgatcagcaagagaaaatgctgctcgaattaagttttcctgaggtgatgggcctggccacaaatcgagaggcacagggcgggcagcggctgctgctgagtacaatgcacgaggagtacgagttcgtcagtccctcttccgtggccattgcagagttggtggccctattcctcgaggggttgaaggagaggtctatctttgcaatggccctgcaagacaggaaggccacagacgacaccacactgctggcatttaaaaagggcgacctcctcgtgcttactaaaaagcagggtctgttagcctctgagaactggacattgggtcagaacgaccgaaccggcaagactggtctcgtacctatggcctgtctttatactatccccacagtgacaaaaccctcagctcagctgctcagtctcctagcgatgagtcccgagaagcgcaagctggccgctcaggagggccaattcacagagccgaggccagaagaaccccctaaggaaaaactgcataccctcgaggagttctcctacgaattcttccgagcccctgagaaagatatggtgagtatggcagtgctgccccttgcgagggctcggggacacctgtgggcctacagttgcgaaccgctgcggcagccactgctcaagcgtgtgcatgcaaatgtcgatctctgggatatagcttgccagatattcgtggcgatccttaggtacatgggggattatccgtccaggcaggcatggcccacactggagctgaccgaccaaatattcacactcgccctgcaacaccctgccttgcaggatgaggtgtactgtcagatcctcaaacagttaacacataatagcaatcggcattctgaagagcggggctggcaactgctgtggctgtgcacaggtttgttccccccaagcaagggtctgttgccacacgctcagaaatttattgacactcgacgcggtaaactcctggcccccgactgttcacgtagaattcaaaaagttctgcgcacgggaccacggaaacaacccccacatcaggtggaggtggaggcagccgagcaaaacgtgtcccgaatttgccacaagatctatttccccaacgatactagtgaaatgttggaggtagttgccaacactagggtgcgcgacgtgtgtgacagcatcgccacacgactgcagctggcttcatgggagggctgttccctgtttatcaaaatctcagataaggtcattagtcagaaggaaggcgacttttttttcgactcgctccgtgaagtatccgattgggtgaagaagaataagccccaaaaagagggtgctcctgtgaccctgccgtaccaggtgtactttatgagaaagctgtggttgaacatttctcctgggaaagacgtgaacgctgacactatcctgcattaccatcaggagctgcccaagtacttacgtggttttcataagtgttcacgggaagacgctattcacctggcgggcctcatatacaaggcacagtttaataacgatcgttcccagctggcctccgtgccaaaaattctccgcgaactggtgcccgagaacctcactcggctaatgtcctctgaagagtggaagaaatcaatcctgctagcctatgataagcacaaagataagactgtcgaagaagccaaagttgctttcctgaaatggatatgtagatggccaacttttggatccgccttctttgaggtgaagcaaacaagtgagccctcttatccagatgttatcctgatcgccatcaaccgacatggcgtcttgctcattcatcctaaaaccaaggatctcctgactacctatccttttactaagatctcctcctggagctccggttccacctatttccatatggcacttggtagcctaggcaggggcagcagattactgtgcgagacgtccctaggctacaagatggacgacttactcacgagttacgttcagcagctgctgagcgctatgaataaacagcgcggctcaaaagcccctgcacttgccagcacgtag

SEQ ID NO: 125469 - DNA, 6351 bp, synthetic construct
  misc_feature 1..6351: note = Description of Artificial Sequence: Synthetic coding sequence
  source 1..6351: mol_type = other DNA
atgagcgggtttcgcctgggggaccacgtttggctggaaccgcccagtacccacaaaaccggcgtggctatcggcggtataatcaaagaagccaagcccggtaaagtgctcgtggaggacgacgaaggtaaagagcattggattcgggccgaggactttggggtattgtcccctatgcatcctaattccgtgcagggagttgacgacatgatccggctgggggatttgaacgaggcgggaatggttcacaatttactaataaggtatcagcaacacaagatatatacttatactgggtcaattcttgttgccgtgaaccccttccaggtgcttccactgtacacattagaacaggttcaattgtactacagtagacatatgggcgagttacctccccacgtcttcgcaattgcaaataattgctattttagtatgaagcggaacaagcgcgatcagtgctgcattatcagtggtgaaagcggcgcaggcaagactgaaactactaagctcattctgcagtttctggccacaatttcaggccagcacagttggatcgagcaacaagttcttgaagcaaacccaattctcgaggcctttgggaacgcaaagactatccgtaatgacaatagtagtcgcttcggtaagtacattgacatctacttcaatccttccggcgtcatagaaggagctcgaatcgaacagtttctgctcgagaagagtcgagtgtgtagacaggctcccgaagagaggaactaccacatattttactgcatgttgatgggcgtctccgctgaggacaagcagcttttgagtttgggcactccatccgagtatcactaccttacaatgggcaattgtacgtcatgcgagggcctgaacgatgccaaagactacgcacatattaggtctgcgatgaagatcttgcagttctcagatagcgagtcatgggacgtaattaaactactggcagctatcctgcatcttggcaacgtaggcttcatggcttccgtgtttgagaacctggatgcctctgacgttatggaaacccccgcatttcctactgtgatgaaactgttagaggtgcagcatcaggaactccgagactgcctgatcaagcacaccatcttaattaggggcgaatttgtgaccagatccctcaacatcgcccaggccgctgatcggagggatgctttcgtgaaaggcatctacgggcacctgtttctttggatagtcaaaaaaattaatgcggccatcttcacacctcctgctcaggaccctaagaatgttagacgtgctatcggacttctcgacatattcggattcgagaacttcgagaataacagcttcgaacagttgtgtatcaacttcgccaacgagcatttacaacagttcttcgtgcagcacgtattcacgatggagcaggaagagtatagatcggaaaacatctcttgggactacatacactataccgacaaccggcccacactcgatctcctggctttgaaacccatgagcatcatttcactgctggatgaagagagccgctttcctcagggcacagacctcacaatgctgcaaaaattaaacagcgtccacgccaacaacaaggcttttctgcagcccaaaaatattcatgatgccaggtttggcatcgcccattttgctggtgaggtctactatcaggcagaaggtttcctggagaagaaccgggatgtgcttagtaccgacattctaacgctggtctatagcagcaaaaataagtttctccgcgagatctttaatctggaattggcggaaaccaagctcgggcatggaacgatcaggcaagccaaggcaggaaaccacctgttcaagagcgcagactctaacaagcggccctctactctgggtagtcagtttaagcagtcactggaccagcttatgaaaatcttgacaaactgtcaaccctattttatccgctgcataaaacccaacgagtacaaaaagccactgctctttgatagagagctttgcttacgacagcttcggtactcgggcatgatggagacagtacacattagaaagagtggcttccccatccggtatacatttgaggaattctctcagagatttggtgtactcctgcctaacgccatgaggatgcagttgcagggtaagctccgccagatgacattggggattaccgatgtgtggctgagaactgacaaggactggaaagccgggaaaacaaaaatcttcttgcgtgaccatcaggacactcttttggaagtacagcggagccaggtcttagaccgggcggctctttcaatacagaaagttcttcgcggctacagataccgaaaggagttcctccgccagaggcgggctgctgtgacactgcaggcttggtggaggggctattgtaataggagaaacttcaaattgatcctggtgggctttgaaaggctgcaagccatagcccgtagccagccactggcacgacaatatcaagccatgagacagcggaccgtgcaactccaggcgctttgtcgcgggtatctcgtaaggcagcaggtccaggccaagcggagagccgtggttgtgatacaggctcacgcccgggggatggctgcacgtcgcaacttccaacagaggaaagccaatgcccctttggtcattcccgccgaagggcaaaagtctcagggggctctcccagctaagaaacgccgaagtatatatgacacagtgacagacacagaaatggttgagaaagtgtttggttttctgcccgcaatgatcgggggtcaggagggccaggcctcaccacacttcgaagacctagagtccaagacccagaaactcctggaagtggatcttgatactgtgcccatggctgaggagcctgaagaggacgtggacggtcttgcagagtatacctttccaaagtttgcagtgacctacttccagaagtccgctagtcacacccacattcgccgtccactacgatatccgctgctataccacgaagatgacactgattgcttagctgccttagtgatctggaatgtgatcttacggttcatgggtgatttgccagagccagtactttacgcgcgctctagccagcaaggaagttcggtaatgagacagatccatgatacactaggccgggagcacggggctcaagttccccaacacagccgctctgcccaggtcgcatcccaactgaatattggggaagaggctttggagcccgacggattaggagcagaccgccccatgagcaacctggagaaggtgcatttcatcgtcggctatgcgattctgcggccatcgttaagggacgagatctattgtcaaatctgcaagcagcttagcgagaactttaagacatcctccttagcccgaggctggattctcctgagtctgtgtctgggctgttttccaccgtccgagcgctttatgaagtacctgcttaattttattggccaggggcctgccacatacggaccgttctgcgccgaacgcctcaggagaacatatgccaacggcgtcagggctgagccaccgacttggctggagttgcaggcggtgaagagcaagaaacacatacctatccaggtgatcctcgccaccggcgagtcattaactgtaccggttgatagcgcctctacatctagagagatgtgcatgcatatcgctcacaagcaaggtctgagcgaccatttgggcttcagcctgcaagtggcagtgtacgacaagttttggtcccttggtagcggaagagaccacatgatggacgcaatagcccgatgcgagcagatggcccaggaaagaggcgaatcacagcggcagtccccctggcgcatctatttcaggaaggagtttttcaccccgtggcatgattcacgcgaggatcccgtgagtactgagctgatatacagacaggtgctccgaggggtgtggtcaggcgaatactccttcgagaaggaggaagagcttgttgagcttcttgcccgtcactgctacgtacaattgggcgcttcagccgagtctaaggctgtgcaggagctcctgcccagctgtattccccataagctgtacagaacaaaaccccccgaccggtgggcctctttggtgacggcagcctgtgctaaggccccgtatacacagaagcaggttactccactggctgtgagggaacaggtcgtcgacgccgcccggctgcagtggcccctattgttttcaaggttatttgaggtaattacactgtcgggacctagattgcctaaaacccagttgatccttgcagtcaattggaaagggctctgcttccttgaccagcaggaaaagatgctcctggagttgtcgtttccagaggtgatgggcttggccacgaacagggaggcccaggggggccagcgactgcttctgagtacaatgcatgaggaatacgagttcgtctcaccgtcatcagttgctatcgccgaactggtagccttgtttcttgagggcttgaaggagagatctatttttgctatggctctgcaggaccgcaaagccacagatgacaccaccctcctcgctttcaaaaagggggacttattagtgttgacaaaaaagcagggattgctggcctctgagaactggacactagggcagaatgataggaccggcaagacaggcctggttcccatggcttgcctgtacacgatacccacagtcacaaaacctagtgcccagttgctgtctcttctggcgatgtctcctgagaagcggaaactcgctgcacaggagggtcagtttaccgagcccaggccagaggaacctcccaaggagaagcttcacacacttgaagagttctcgtacgaattctttcgcgcacccgaaaaagacatggtcagcatggctgtgctaccgctggcccgcgctcgcgggcatttatgggcgtacagttgtgagcctcttaggcagcccctgctgaagcgcgtacacgccaatgtcgacctgtgggacatcgcttgccagatcttcgtagcaatacttaggtacatgggtgattacccatccagacaggcctggcccacgctggaattaacagaccagattttcactctagcactgcagcaccccgccctccaagacgaagtctattgtcagatccttaaacagctgacccacaatagcaacaggcattcagaagagcggggatggcagcttctatggctgtgcaccggcctgttcccacccagcaagggactgctccctcatgcccagaagttcattgacactaggcgcggcaaactcctggcccccgattgcagcaggagaatacagaaagttctgcgtactggaccccgaaaacaacctccacatcaggttgaggtggaagccgctgagcagaacgtgtccagaatatgccataagatttattttcccaatgataccagcgagatgttagaggttgttgcaaacacaagggtgcgggatgtttgcgattcaatagccactcgactccagctggccagctgggaaggatgttccctgttcattaaaatcagcgacaaggtgatctctcagaaggagggagacttcttttttgactcgctgcgcgaggtaagcgattgggtcaagaagaacaaaccccaaaaagaaggggcacccgtcacactcccataccaggtctatttcatgcggaagctatggctcaacatctcaccaggaaaagatgtgaacgcggataccatcttgcactatcaccaagagctgccaaaatacctcaggggcttccacaagtgttcacgagaagatgctatccacttagctggccttatttacaaagcgcagtttaataatgatagatcccagctcgcatctgtcccaaagattctccgggagctggtcccggagaacctcacccggctgatgtcttccgaagaatggaaaaaatctatcctgttggcttacgataagcataaggacaagacagttgaggaggcgaaggtggctttcttgaaatggatatgcaggtggcccactttcggctcagcattcttcgaagttaagcagactagcgagccaagttaccctgacgtgatcttgatcgctattaacagacacggtgtgctcctgatccatccaaagactaaagacctgcttaccacataccctttcaccaagatctcgtcttggtcttcaggcagcacctacttccatatggctctgggaagccttggaaggggctcacgcctgctctgtgaaacgtcattgggctacaagatggacgatctcctgaccagctacgtccaacagctactctcagcaatgaacaagcagagggggagcaaggcacccgcacttgcgtcaacttag

SEQ ID NO: 125470 - DNA, 4248 bp, synthetic construct
  misc_feature 1..4248: note = Description of Artificial Sequence: Synthetic coding sequence
  source 1..4248: mol_type = other DNA
atgcctgatcagttcgaccaagctgtggtcctgaatcaattgagatacagcggaatgctcgagacagtgaggattcggaaggcaggatacgcagtgagacggccatttcaggatttctataaaagatataaggtcctgatgagaaacttggccctgcctgaggacgtccgcggtaaatgcacttccctactccagctgtatgacgcttcaaattcagagtggcaactcggaaaaactaaagtgttcctgcgcgaaagtttagagcagaaactagaaaagcggcgagaagaggaagtctcacacgctgcaatggtgattcgggctcacgttcttggcttcttggcacggaagcaatatcgaaaggtcctgtactgcgtggtgatcattcagaaaaactacagggcatttctcctgagaaggaggttcttacacctgaagaaggcagcgatagtgttccagaagcagctgcggggacagatcgcgcgccgagtctatagacaacttctggccgagaaaagggagcaagaagaaaagaagaagcaagaagaggaagagaagaaaaagcgggaggaagaagaaagagaaagggagcgcgaacgtcgcgaggccgaattgagggcccagcaggaagaggagacacgcaagcagcaggagttggaagcactccaaaaaagtcagaaagaggccgagctcacacgtgaacttgaaaaacaaaaggagaacaaacaggttgaggagatcctgcgcctggaaaaagagattgaggatctccagagaatgaaggagcagcaggagctttccttgactgaggcgtcgctgcagaagttacaagagaggagggaccaggaactcaggagattagaagaggaggcatgtcgggccgcccaggagtttttagagtcactcaatttcgacgagattgacgagtgtgtgcgaaatatcgagagaagtctatccgtgggcagtgaatttagtagtgagcttgctgagagcgcgtgcgaagagaaacccaatttcaatttcagccagccctaccccgaggaagaggttgatgagggtttcgaagcagatgacgatgcatttaaggattctccgaatccaagtgaacacggacattccgaccagaggactagcggcattagaacatccgacgatagctctgaggaggacccctatatgaatgatacagtcgtgcctacctccccgtcggctgactcaacagtgttattggcaccttctgtacaggatagcggaagccttcacaactctagcagcggggaatcaacctactgtatgcctcagaacgctggcgatctgcccagccccgacggtgattatgattacgatcaggacgactacgaggacggagctataacttcagggagctcagtcacattttcaaactcctatggatcccagtggtccccagactatcggtgtagcgtagggacctacaactcctccggtgcctaccgtttcagttctgagggcgcccagagctcattcgaggattctgaggaagatttcgattcaaggttcgataccgatgacgaattgtcttataggcgggattcagtatactcatgtgtgacacttccttattttcactcatttttgtatatgaaggggggtctgatgaattcctggaagcgcagatggtgcgtgctgaaggacgagaccttcctatggtttcggagcaagcaggaggcgctgaagcagggctggctgcacaagaagggcggcggatcttcaaccttaagtcgaaggaactggaaaaagcgatggtttgtcctccggcagtctaagctgatgtatttcgagaacgatagtgaggagaagcttaagggtactgtcgaagttaggacagccaaagagatcatcgataatactaccaaggagaatggtatcgatatcatcatggccgacaggacgttccatttgatcgcagaaagtcctgaggacgccagtcaatggttcagcgtcttaagccaggttcacgcctctaccgaccaagagatccaggaaatgcacgatgaacaggctaatccgcagaatgctgtggggactctggacgtgggattaatagattcagtgtgcgcttccgacagtcccgacaggcccaactcttttgtgattattaccgcaaatagggttttgcattgcaatgccgacactccggaggaaatgcaccattggatcactctgttgcaaagaagcaagggggacactcgggtcgaaggccaggagttcatcgtgcgggggtggttacacaaggaagtgaaaaacagccctaaaatgagctcactgaaattaaaaaagcgctggttcgtcttaacacacaatagtctggactactacaaaagcagcgaaaaaaatgccttaaaactggggacgctggtcctcaatagcctctgcagtgttgttcccccagacgagaaaatctttaaagagacagggtattggaacgtgaccgtgtatggaagaaaacactgttatagactgtacacaaagctcctcaatgaagcgacccggtggagtagcgctatacaaaacgtgactgatacaaaggccccaatcgataccccaacccagcaactgatacaagatatcaaagaaaattgcctgaatagcgacgttgtcgagcagatttacaaaaggaatcctatcctccgttacacgcatcatcctttgcactctccgctcctcccgctgccgtatggtgacatcaacctcaacctgctgaaagacaaaggttacacaaccctacaagacgaggcaatcaagattttcaacagcctgcagcaactcgaatccatgtctgatcctatcccaatcattcaggggatacttcagactggccacgacctacgccctttacgggatgaattgtactgtcagttgattaagcaaactaacaaggtgccccatcccgggagtgtgggaaacttgtactcttggcagatcctcacatgcctgtcctgtacttttctgccttcccgaggaattctgaaatacctgaagttccacctgaaacgtatccgggaacagtttcctggatcagaaatggagaaatacgcactgtttacctacgaatccctgaagaagacaaaatgtcgggagtttgtgccgtcccgagacgagattgaggccctgatccatcggcaggagatgacctctaccgtgtattgccacggggggggttcatgtaagatcactattaattcccatacaaccgccggtgaggttgtcgagaagctgattcgggggctggcaatggaagactcccggaacatgttcgccctgttcgagtataatggacatgtggataaggctatcgagtctagaacagtggtggccgatgtgctggctaaattcgaaaaattagcagcgacaagtgaagtgggggatcttccgtggaagttttactttaaactttattgcttcctggatacagacaatgtccccaaggatagcgtcgagtttgcctttatgtttgagcaggcccatgaggctgttattcatggacaccaccctgcaccagaggagaatctccaggtcttggctgccctgcggcttcagtatcttcagggggattacaccttacacgctgcgattccaccgcttgaggaggtgtacagcctgcagaggctaaaagccaggattagccagtccacgaagacatttactccatgcgagcgtctcgagaagaggcgtacgagcttcctggagggcacattgagacgctcttttagaacaggttcagtggtgcgacaaaaagtcgaggaggaacaaatgctagacatgtggataaaagaggaggtgtcaagtgctagagcctctattatcgataagtggagaaagttccaggggatgaatcaagagcaggccatggcaaagtatatggccctaattaaagagtggcctggctatgggagcactctgtttgatgttgaatgcaaagaaggcggtttcccccaagagctgtggctgggtgtgtctgcagacgccgtctccgtctacaagcgcggagaggggaggccacttgaggtttttcagtacgagcacatcttgtctttcggagcccctcttgctaatacatacaagatcgtggtggatgaaagagaactgctgttcgagacttccgaagttgtcgacgtggcgaaactgatgaaagcctacatctccatgatcgtgaagaaaaggtacagtacgacaaggtcggccagtagccaaggaagttcccgatag

SEQ ID NO: 125471 - DNA, 4248 bp, synthetic construct
  misc_feature 1..4248: note = Description of Artificial Sequence: Synthetic coding sequence
  source 1..4248: mol_type = other DNA
atgccggaccagttcgaccaggcagttgtgctgaatcaactcaggtatagcggcatgctggaaacagtgaggatccgaaaggcagggtacgccgtgcgtcggcctttccaagatttctacaaacgctataaggtactgatgcgcaatttggccctaccagaagatgttcgaggtaagtgcaccagcctgctccaactttatgacgcctctaatagtgagtggcagctgggcaagactaaagtgtttttacgtgaatctctggaacagaagttggagaagcggagggaggaggaagtgtcacatgctgccatggtgattagggcacacgtcctcggtttcctagcccgtaagcagtatagaaaggtcctctattgtgtggtaatcatccagaagaattaccgtgctttcctgttgcgtcgtcggtttctccatctgaagaaggcagccattgtatttcagaaacaattgcgcggccaaatagcgcgccgtgtgtatcgccagctactggcggagaagcgggagcaagaggaaaagaagaaacaggaggaagaggagaaaaagaagcgcgaagaagaggaacgcgaacgagaaagagaaaggagggaagctgaactgagagcccagcaggaagaggagacccgtaagcagcaggagctcgaggcactccagaaaagccagaaggaggcggaactcacccgagagttggagaaacaaaaggagaataaacaggtcgaagaaattctgcgcctggaaaaggagatcgaggacctacagaggatgaaggagcagcaggaactgtctctcactgaggccagcctccagaaattacaagaaaggagggatcaggagctacgccggttggaggaagaggcctgcagggctgcacaggagttcttggaatcccttaatttcgacgaaatagatgagtgcgtgagaaacatagagaggtctctgagtgtgggatccgaattctcaagcgaacttgcagagtctgcctgtgaggagaaacctaactttaacttcagccagccctaccccgaagaggaggtagatgagggatttgaggccgacgatgatgcttttaaggatagcccgaatcctagcgagcacgggcacagcgaccaacggactagtggcatcagaacatcggatgatagttctgaggaggatccctatatgaatgatactgtggtgcctacttcaccctccgccgactcgacagtactgttggccccgagcgtccaggacagcgggtccctccataactcctcgtctggcgaatctacctattgcatgcctcaaaatgctggcgatcttccgtcccctgacggagactatgactacgaccaggacgactacgaagacggggccatcacatcgggttcgtcagtgacattttccaattcctacggatctcagtggtcaccagactatcgttgctccgtgggtacctacaactctagtggagcctaccgtttctcaagcgagggtgcccagtcaagcttcgaagattccgaagaggacttcgactccagattcgacacagacgatgaactgtcatatagacgagacagtgtgtacagctgcgtaactctaccttacttccacagctttctgtacatgaaggggggtctaatgaacagctggaaacgccgctggtgtgtgctcaaagacgaaacattcctttggttcaggtcaaagcaggaggcgctgaagcagggctggttgcataagaagggcggtggcagctcaaccctgtcacgccgtaattggaaaaagcgatggttcgtgctcagacaatctaaacttatgtatttcgagaatgacagtgaagagaagctgaaagggaccgtggaagtgaggacagctaaggaaattattgataacacaactaaggagaatggcatagacatcataatggccgatcgcacctttcacctcattgccgaatccccggaggacgccagccagtggtttagtgtgctgagccaggtgcatgctagcactgatcaggagatacaggagatgcatgatgagcaggcaaatccacagaatgctgtgggcactctggacgttggactgatagattccgtctgcgcgagcgattcgccggatcgtcccaactcctttgtcataataaccgcaaatcgtgtgctgcattgtaatgcagacacacctgaggaaatgcaccactggatcactttgctgcagagaagcaagggggatacaagggttgagggccaggagttcatcgtcaggggatggctgcacaaggaggtaaagaattcaccaaagatgtctagtctcaaactgaagaagagatggttcgttctcactcacaacagcctggattattataaatcatcagagaagaacgccctgaagctgggcactttggtgctgaatagcctgtgctccgttgtgcctcccgacgagaaaatcttcaaagagacagggtattggaatgtgacggtttacgggcgcaagcattgctaccgcctgtacacaaagctcctaaatgaggcgactcggtggtccagcgcgatccagaacgtgaccgacacgaaggcaccaatcgacaccccaacccagcaattgattcaagatataaaagagaactgccttaattcagatgtggtagagcagatttacaagcggaatccaatattgagatacacacatcacccgctgcattccccacttctgccactgccctacggagatatcaatctgaatctcctgaaagataaaggctacaccaccctgcaggacgaagccattaagatatttaacagcctgcagcagctggagtcaatgagtgatccaatacctataatccaggggatcctgcaaactggacacgacctgcgtcccctgcgagacgaactatattgtcagctgatcaaacaaacgaacaaggtaccgcatccaggatcagtcggcaacctctatagctggcaaattttgacctgcctctcctgcacctttctgccctcccggggcatactgaagtatctcaagtttcacttgaaaaggatccgcgagcaattccctggaagcgaaatggagaaatatgctctttttacctacgagagcctgaagaagacgaagtgcagggagtttgtgccgagtagggacgaaattgaggccctgatacaccggcaggagatgacatcaacagtctactgtcacggagggggctcttgcaagatcactataaattcccatacaactgctggcgaagtagtcgaaaaactgatcaggggccttgccatggaggatagccgtaacatgtttgctctattcgagtacaatggccacgttgataaagcaatagaatctagaaccgtggtggcagacgtccttgccaagtttgagaagttagcggccacctccgaggtgggtgatctgccgtggaagttctatttcaagctgtactgtttcctggataccgacaatgtcccaaaggactcagtggagttcgctttcatgttcgaacaggcacacgaagcagtcattcatggtcatcatcccgccccggaggagaatctgcaggtgttagcagccctcaggttacagtacctccagggcgattacactctgcatgctgcaatcccacccctcgaggaggtttactcactgcagcggcttaaagcccgaatttcacagtcaaccaagacgttcacgccatgtgagaggctcgagaagagacggacatcatttctcgaaggcaccctgcgacgctcattcaggaccggctcagtcgttcggcaaaaggtggaggaggaacagatgctggatatgtggattaaagaagaagtgtcatctgctagggcttctattatagataagtggcggaagtttcaaggaatgaatcaggaacaggccatggctaaatatatggccctgattaaggaatggccaggttatggctccacgctctttgacgttgaatgtaaagagggtggatttccccaggaactgtggttaggcgtcagtgcagatgcagttagtgtatacaagcggggcgaggggaggcctctggaggtctttcagtacgaacacatcctgtcattcggtgccccgctcgccaatacgtataaaatcgttgtcgatgagcgggagctgttgttcgagacaagcgaggtggtcgacgtggcaaagctaatgaaggcctatatctcaatgatcgtaaagaagcgttatagtacaacgcgcagcgcatcaagccaggggtcctcaagatag

SEQ ID NO: 125472 - DNA, 4194 bp, synthetic construct
  misc_feature 1..4194: note = Description of Artificial Sequence: Synthetic coding sequence
  source 1..4194: mol_type = other DNA
atgctcgaaacggtgcggatccggaaagccggttatgcggtgcggcgacccttccaagatttctacaagcgttacaaggtgctaatgagaaacttagccttacccgaggatgtgagaggcaaatgtaccagtcttctgcagctctacgatgcaagcaactcggaatggcagcttgggaaaacaaaagtttttctaagagaatcattggagcaaaaactggagaaacgacgcgaagaggaggtgtctcacgcagccatggtcatccgagctcatgtgctgggttttctggccagaaagcagtacaggaaggtgctgtactgcgtagtcatcatacaaaagaactaccgagcttttttgctgcggagaagattcctgcacttgaagaaagctgccatcgtctttcaaaagcagttgcgcggccagatcgccagacgggtctacaggcaactgttggcagagaagagggaacaggaggaaaaaaagaagcaggaagaggaggaaaagaaaaagcgtgaagaggaagagcgggaacgtgagcgggaacgacgggaggctgagctgcgggcacaacaggaggaggagacaaggaaacagcaggagttggaggctctgcagaagtctcagaaggaggcggaacttacccgggagctcgagaaacagaaagagaacaaacaggttgaagaaatcctgcgactggagaaggagattgaagacctgcaacggatgaaagaacagcaggagctgtctctaactgaagcctccttgcagaaactgcaggagcgacgcgaccaagagctccggaggctcgaagaagaggcatgcagggccgctcaagagttcctcgaaagcctcaatttcgatgaaatcgatgagtgtgtgcgtaatatcgagcggtccctgagcgtgggcagcgagttctcaagcgagctcgccgagagcgcctgtgaagagaaacccaacttcaacttctcccagccctatcccgaggaggaggttgacgagggattcgaggccgatgacgatgccttcaaggacagtcctaaccctagtgagcacggacactccgaccagaggaccagtggcatcagaactagcgacgattcatccgaggaagatccctatatgaacgatacagttgttccaaccagcccctccgcagattctacagtcttgctcgcgccatctgtccaagattccggatcccttcataacagtagctccggagaaagtacttactgcatgccccagaacgccggcgatctgccttcgccagacggcgattacgactacgatcaggatgactacgaggacggcgcaatcacgtctgggtcgagcgtgaccttcagtaatagttacggctcccagtggagcccagattatcgatgctccgtcggaacttacaacagtagcggcgcctatagattttcctccgagggagcccagtcctcttttgaggactcagaggaagattttgacagcaggtttgataccgacgatgagctcagctaccgacgggattcagtgtacagttgcgtgaccctgccatatttccacagtttcctctatatgaagggaggcttaatgaattcctggaagcgacgctggtgtgtgctgaaggacgaaaccttcctatggtttcgctcaaaacaagaggcactaaagcaggggtggcttcacaagaaaggcgggggatcctcaacactttcacggcggaactggaaaaaacggtggttcgttttgcgccaatccaagctcatgtactttgagaacgatagtgaggaaaaacttaaagggaccgtggaggtgaggaccgccaaagagataatcgataacacaacaaaagagaatggtattgacatcatcatggccgatagaaccttccatctgattgctgagagccctgaagatgcatcccagtggttttcagtgctctcacaggtgcacgcgagtacagaccaagagattcaagagatgcatgacgagcaggccaatccacagaacgccgtcggcacactcgacgtggggcttatagactccgtttgcgcaagtgatagtccagataggcccaattcatttgtgatcatcacagcgaatcgggtcttacactgcaatgctgatacacccgaagagatgcaccactggataactttactgcagcgctcaaagggagacaccagagtggaagggcaggagtttatcgtgagggggtggcttcacaaagaagtgaagaattcgcctaaaatgtccagtttgaagctgaagaagaggtggttcgtcctgacccataatagtttggactattataaatcgagtgaaaagaatgctcttaaactcggcacactggtcttaaatagcctgtgttcggtcgtgcccccagacgagaagattttcaaagaaacgggctactggaacgtgaccgtgtacggaaggaagcattgctataggctgtatacaaagctcctgaatgaggcaactcgctggagttctgccattcagaatgtgacagacactaaggcacccatagatactcccacgcaacagctaattcaggatatcaaagagaactgcttgaactctgatgtggttgaacagatttataaacgaaatcccattctgcggtatacccatcatcccctgcattcccctctcctacctctgccctacggcgacatcaatttgaatctgctgaaggacaagggatatacgacactgcaggacgaggcgattaagattttcaactcactgcaacagctcgaaagcatgagcgatcccattcccatcattcagggcatcctgcagaccggccacgacctccgccccctgagagacgagctgtactgccagttaatcaagcaaactaacaaggtgcctcaccccggctctgtaggcaacctttactcttggcagattctgacctgcctgagctgtacatttcttccctcgcggggaatcctaaagtacctgaagttccacctgaaacgcattcgcgagcagtttccaggcagcgagatggaaaaatacgctctgtttacctatgagtctttgaagaaaactaaatgcagagaatttgtgccgtctcgcgacgagatagaagccctgattcacagacaggaaatgacctccaccgtttattgccatggcggcggatcttgcaagattacgatcaattcacataccacagccggcgaagtggtagagaaactgatacgcggtctggcaatggaggacagtcgtaacatgtttgctctcttcgaatataacggtcacgtggacaaggctatcgagagtagaactgttgtggccgacgtcctggctaaatttgaaaagctggccgctaccagtgaagttggcgatttgccgtggaagttttattttaaactttactgttttctggacacagataacgtgcctaaagatagcgttgagtttgcatttatgttcgagcaggcccatgaagccgttattcacggccaccatcccgcccccgaggagaacctgcaggtgcttgcagcacttcgccttcagtacctgcagggagattacacactgcatgccgcgatcccacctcttgaggaggtgtatagtttacagcggcttaaggctcggattagccagtcaactaaaacgtttaccccctgcgaaaggctggagaaacgaaggacaagttttctcgagggaaccctgaggcggagctttagaacagggtccgttgtacgtcagaaggtggaggaagagcagatgctggacatgtggatcaaagaggaagtctcatccgccagggcttcaattatcgacaagtggcggaagttccagggcatgaatcaggaacaggccatggccaagtatatggccttgatcaaggagtggcccggctatggttccactcttttcgacgtcgaatgcaaggagggaggattccctcaggagctttggctcggtgtgtctgccgatgcagtcagcgtttacaaaaggggtgagggacggcctctcgaggtgttccagtacgaacacattctttcgtttggcgcccctcttgccaatacatataaaattgtggttgacgagagggaactgctttttgagacctctgaggttgtggatgttgccaagcttatgaaagcctatataagtatgatagtaaagaagcgctactctaccacccggtcagcttctagccagggatcttctagatag

SEQ ID NO: 125473 - DNA, 6177 bp, synthetic construct
  misc_feature 1..6177: note = Description of Artificial Sequence: Synthetic coding sequence
  source 1..6177: mol_type = other DNA
atggataacttttttacagaaggcacacgtgtatggctacgagagaatgggcagcacttcccatccacagtcaacagttgcgcggaaggaatcgtcgtcttccgtacagattatgggcaggtatttacatataagcagagcactatcactcatcaaaaagtcacggccatgcaccccaccaacgaagaaggagtggacgacatggcttcactcacagagttacacgggggctcaatcatgtacaatctctttcagaggtacaaacgcaatcagatctacacctatattggaagtatcctggcatctgtgaacccatatcaaccaatcgcgggcctttacgaacccgccacaatggaacaatactccaggcgacatcttggtgagctacccccacatatcttcgccatagccaatgaatgttacagatgtctgtggaaaagacacgacaaccaatgtatactgattagtggggagagcggtgccggcaagacagagtcaactaagctaattttgaagtttctgtccgttatctcccagcagtctcttgagctgtctttgaaagaaaaaacgagttgcgtcgagcgagctatcctcgaatcctcaccaatcatggaggcatttggcaatgctaaaacagtgtacaacaacaacagttctcggtttggaaaatttgttcagctcaatatttgccagaaaggaaatatccagggcggcaggatcgtggactatttactggagaagaatcgcgttgtacgacagaatcctggcgaacgaaactaccatatattttacgctcttctggccggcctggagcatgaggagcgcgaggagttttacttatctacccccgagaactatcactaccttaatcagagtggatgtgtggaggataagaccatctcagatcaggagtcctttagggaggtgatcacagccatggacgtaatgcagttttctaaggaggaggtgcgcgaagtatcccggttgctggcagggattctacatctcggcaacatcgaattcatcactgccggcggtgcgcaggtgagttttaagactgccctcggaagatccgcagagctccttgggctggaccccacccaattaacagacgccttaactcagcgctctatgttccttcggggtgaagaaatcctgacccctctgaacgtgcagcaagccgtcgatagccgggacagcttggcaatggccttgtacgcatgctgcttcgagtgggttataaaaaagataaattccaggatcaaagggaatgaagactttaagagcattgggatcctggacatctttggattcgagaactttgaggtaaatcacttcgagcagttcaatatcaattatgcaaacgaaaaactgcaggagtacttcaataagcatatctttagtctggaacagctggaatacagcagagagggccttgtctgggaggacatcgactggatagataatggagaatgtctggacttgattgagaagaagctgggcctactggctttgattaatgaggaatcccatttcccccaggcaacggattctacccttctggagaagctgcacagccaacatgcgaataatcatttttacgttaagccaagggtagctgttaataattttggagttaaacactacgccggggaagtgcaatatgacgtgaggggtatcctggaaaaaaatagggatacttttcgggacgacctgcttaatctgcttcgagagtcccgcttcgacttcatctacgacctctttgagcatgtgtctagtagaaataatcaggatacattaaagtgtggtagcaagcataggcgtccgactgtatccagccaattcaaagactccttgcatagcctaatggcgacattgtcatcctctaatcctttcttcgtaagatgtatcaaaccaaacatgcagaaaatgcccgaccagttcgaccaggctgtagtgctcaatcagctgagatatagcggaatgttagagactgttcggatcaggaaagctggatatgccgtcagacgccccttccaagacttttacaaacgctacaaagttctgatgagaaaccttgctctacctgaggatgtgagaggcaagtgtacttccttgctccagctctacgatgcatctaacagtgagtggcagcttggcaaaacaaaggtcttcctcagggagagtctggagcagaaacttgaaaagcggagagaagaagaagtatcgcacgcggctatggtgatccgggctcacgtgctaggattcctggcaaggaaacagtacaggaaggtactgtactgcgtggttataatccagaagaattatcgggcattcctgctgcgccggcgctttttgcatcttaaaaaggcagcaatcgtgtttcagaaacagctaagaggtcagatcgcccggagagtgtaccgacagctcctggccgagaagcgcgagcaggaggagaagaagaaacaggaggaggaggaaaaaaaaaagcgcgaggaagaagagcgtgaaagggaacgtgaacggagggaggcagaactgagagcccagcaggaagaggagactagaaaacagcaggagctggaggccctgcagaagagtcagaaggaagcagaacttactcgtgaactggaaaaacaaaaggagaataagcaggtggaggaaatattgcggctggaaaaggagattgaagacctgcaacggatgaaagaacagcaggagctgtccctgacggaggcctccttgcagaagctgcaggaacgaagggatcaggagcttaggcgtttagaagaggaagcctgcagagcagcccaggaattcctggaaagtctgaatttcgatgagatcgatgaatgcgttaggaatatcgaacgctccctaagcgttggatccgagttctcctccgagctggcagagagtgcttgcgaggagaagcctaattttaatttcagccagccatacccggaagaggaggttgatgaggggtttgaggcagacgacgacgcatttaaggattcacccaaccctagcgaacacggccactccgatcagcgcacctcaggaattcggacaagtgatgacagctcagaggaggatccctacatgaacgataccgtggtccctacctccccctcagccgactctaccgtgctgctggctcccagtgtgcaggactccgggtctctgcataactccagcagcggcgagagtacctactgtatgccgcaaaacgctggcgacttaccctcacccgacggagactatgactatgatcaagatgattacgaagacggagcaattacctcgggtagttctgtaacattctccaactcgtacggttcgcagtggagtcctgactatcgatgctcagttgggacctacaactcctccggggcttatcgcttcagcagtgaaggcgcacagagttcctttgaggattccgaagaggacttcgattcacgatttgacacagacgatgaattgtcgtacaggcgtgattctgtctattcttgtgtaaccctcccatacttccattcatttctttacatgaaagggggcttgatgaattcgtggaagcgaagatggtgcgtgttgaaggatgagactttcttatggttccggtccaagcaggaggcattgaaacaggggtggttacacaagaagggtggcggcagttcaaccctgagtagacggaattggaaaaaaagatggtttgttttgagacagtccaagcttatgtactttgagaacgactctgaggaaaagctgaaaggcactgttgaggtccgcacagcaaaggagataatcgacaatactacaaaagaaaacggcatcgatattataatggccgacaggacattccatctgatcgccgagtctcctgaagatgcctcacagtggttctcagtccttagtcaggtacatgcaagtaccgatcaggagatccaggaaatgcatgacgagcaggcgaatcctcagaacgctgtcgggaccctcgacgtgggtctgatcgacagcgtgtgcgctagcgatagccccgatagaccaaactcctttgttatcattactgccaatcgcgtgctgcactgtaatgccgatacccctgaagagatgcaccactggatcactctgcttcagaggagtaaaggagacacccgggtggagggtcaggagttcattgtgagaggctggctgcataaagaggtgaagaatagtcctaaaatgagctccctcaagctcaaaaagcgatggttcgttctcacccacaacagtcttgactactacaagtcaagcgagaaaaatgctctgaaactgggtactctggtcttaaacagcctgtgttccgtggtccctcccgacgagaagatcttcaaggagaccgggtattggaacgtgacagtgtatggccgaaaacattgttacaggctgtacacaaagctgctgaatgaggccaccaggtggagttccgcgattcagaacgtgactgatacaaaggcccccatagacaccccaacccagcaattaattcaagatataaaggagaactgtctgaattctgacgttgtggagcagatctacaagaggaacccaattctaagatacacccaccacccactgcactctcccctgttaccactgccctacggtgatataaacctaaatctcttgaaagacaaaggctatactaccctccaggatgaggctatcaaaattttcaatagcctgcaacagttagagtcaatgtctgaccctattccgatcatccagggaatcctacagacagggcatgatctccgcccgctgagggacgagctctactgtcagctgattaagcagactaacaaagtgccgcatccaggcagcgtgggaaatttgtactcctggcagatcctgacttgtctgtcttgtacctttctgccttcgcgtggcattctaaaatacttaaagttccacctgaagagaatccgcgagcaattccccgggagcgagatggagaaatacgccctgtttacatacgagagcttaaaaaaaacaaaatgccgagagttcgtgccttcacgcgacgagatcgaggccttaatccatcggcaggaaatgactagcaccgtgtattgtcacggtgggggctcctgcaagatcacaatcaactcccacaccacagctggggaagtggtggagaaattgatccgcgggctggctatggaggactcgcggaacatgtttgcgctgttcgagtataatggacatgtagataaggcaatcgagagcaggaccgtggttgcggacgtgttagctaagtttgagaaactggccgctacttctgaggttggtgacctgccatggaagttttacttcaagctttactgctttctggacactgataatgtgcctaaggacagtgtagagtttgccttcatgtttgagcaggcacacgaagcggtgattcatgggcatcacccagctcccgaagaaaacctccaggttctcgctgccctgaggttgcaatatcttcagggcgattatacccttcacgccgccattcctcccctcgaggaggtttattccctccaacggctcaaggctagaatctcccaaagtaccaaaacttttactccgtgcgagcgtctcgagaaaaggcggacctcttttctggaaggaacacttaggcgctccttccgaactgggtcagtcgtaaggcaaaaagtcgaagaggagcagatgttggatatgtggatcaaggaggaagtaagctctgctcgggccagcattattgacaaatggagaaagttccaaggcatgaaccaagagcaagccatggcaaaatacatggcactgattaaagaatggcccgggtacggaagcaccctgttcgatgtggaatgcaaggagggcggttttccacaggaactgtggctaggtgtgagcgcagacgccgtgagcgtatacaagcgcggtgaaggccgcccccttgaggttttccagtacgagcatatccttagtttcggggcccctctggcaaacacgtataagatcgttgtggacgaacgagagctgctgtttgagacaagtgaggtagtcgacgttgcaaaactgatgaaagcttacatttctatgattgtgaaaaaacgctatagcacgacccgcagtgccagtagtcaggggtccagccgttag

SEQ ID NO: 125474 - DNA, 4194 bp, synthetic construct
  misc_feature 1..4194: note = Description of Artificial Sequence: Synthetic coding sequence
  source 1..4194: mol_type = other DNA
atgctcgaaacggtccgaataaggaaagctggctatgccgtgagaaggcctttccaagatttttataagcgctataaggtgcttatgcggaatttggcattgcccgaagacgtgcgtggaaagtgcacatccctattgcagctgtatgacgcctctaactctgaatggcagttgggtaagaccaaagtcttccttcgggaaagcttggaacagaagctggagaaaagacgggaagaagaggtctctcatgctgccatggtcattagagcccacgtgctcgggttcctagcacgtaagcagtacaggaaggtcctctattgtgtcgtgatcattcagaaaaattaccgcgcttttctcctcagaagaagattcctgcatctaaagaaagcagctattgtgttccagaaacagctgcggggacagatcgccagaagggtataccgtcagcttctcgcagagaagcgtgaacaggaggaaaagaaaaagcaagaggaagaagagaagaaaaagagggaggaggaggaacgagagcgcgagcgggagaggcgagaagctgaactgagggctcagcaggaagaggaaactaggaagcaacaggagttggaggcccttcagaagagccagaaggaggcggagttgactcgcgaacttgagaaacagaaagagaacaagcaagtggaggaaatactgaggctcgagaaggaaattgaagatttacagagaatgaaggagcagcaggagctctctctgacagaggctagtcttcagaagctgcaagagagacgggaccaggagctacgcagattggaggaggaagcgtgcagagccgcccaggaatttctggagtctttgaactttgacgagatcgacgagtgtgtcaggaacattgagaggagcttatcagtgggatccgaattctcaagcgaactggccgaaagcgcttgcgaagagaaaccaaatttcaatttttctcagccttaccctgaagaagaggtggacgaggggttcgaagctgatgatgacgcctttaaggatagccccaatcctagtgaacatggacattctgaccagagaacaagtgggattagaacctcggacgactcatcagaagaggatccatatatgaacgacaccgtggtgcccacctcaccaagcgctgacagtacagtgctactcgccccttctgtgcaggattccggatccttacataatagctcgtcaggcgagtcgacctattgtatgcctcaaaacgctggcgacctgcccagcccggacggagattatgactacgaccaggatgactatgaggacggcgccatcacaagcggttcttcggtgacattctcaaacagctacggctcccagtggtcgccagactataggtgcagcgtggggacctacaactcctccggagcatacaggttcagtagcgaaggcgctcagtcctccttcgaagatagcgaagaagacttcgacagcagattcgataccgacgacgagctctcataccgtcgggatagcgtgtactcatgtgtgactctgccttactttcactcttttctgtatatgaagggagggctcatgaacagttggaaaagaagatggtgcgtgctgaaagatgaaacttttctgtggtttcggtcaaaacaggaagccctcaaacaaggatggctccataagaagggcggtgggtcgtccactttgtccagacggaactggaaaaaaaggtggttcgtgctaaggcaatccaagttgatgtactttgagaatgattccgaagagaaactgaagggaacagtagaggtcaggacagccaaggaaatcattgacaacaccacaaaagagaatggcattgatataatcatggctgaccgaaccttccatctgatagcggagtcccctgaggacgcctctcagtggttctctgtgttgagtcaagtgcacgcttccaccgatcaggaaatccaagagatgcacgatgaacaggccaatccacaaaacgccgtaggcactctggacgtggggttaatagattccgtgtgcgcaagcgactcacccgaccgcccgaacagctttgtcataataacagcaaacagggttctacactgtaatgctgatacccccgaggaaatgcatcattggatcactctgctgcagcgaagcaaaggtgatactagagtagaaggacaggagtttatcgtacgtggttggctccataaggaggtcaaaaatagccccaaaatgtcctctctcaaactaaagaaaagatggtttgtcctgacccataatagtttagactactacaaaagttccgagaagaacgctctgaaactgggtacgcttgttctgaacagtctatgttcagttgtgccacctgatgaaaaaattttcaaagagaccggctactggaacgtgacggtgtatggccgcaagcactgctaccgcctctacaccaagctgttgaacgaagccacccggtggagtagcgcaatacagaacgtgaccgacactaaagcccccatagatacccctacccaacaattgatccaggacatcaaagagaactgtttaaactccgatgtagtggaacagatttacaagagaaaccctatcttgaggtacactcatcaccctcttcactcccccctgttgcccctgccttatggcgacattaatctgaacctgctgaaagacaaggggtacactactctgcaggatgaggccatcaagatctttaatagcctgcagcagctagaatcaatgtcagacccgatcccgatcatccagggcattttgcagaccgggcacgatctacgccctttacgagatgagctgtattgccagttaatcaaacaaacgaataaggtgccccatcccggttctgtgggtaatctgtacagttggcagatactcacttgtctctcctgtaccttcctaccgagccgcggaatccttaagtaccttaaatttcacctgaagcggattcgcgagcagttcccgggtagtgagatggaaaaatacgctcttttcacatatgaaagcttgaagaaaaccaaatgccgggaatttgtgccgtcccgcgacgagatagaggcactgattcataggcaagagatgacatctaccgtctactgccacggtgggggatcttgtaaaattactattaatagccacacaacagccggggaggtcgtcgagaagctgatccgcggactggcaatggaagattcccgtaatatgtttgccttgtttgaatataacgggcatgtcgacaaggctattgagtcccgcacagtcgttgcagatgtgctcgccaagtttgagaagctggccgccacttccgaggttggggatctgccctggaagttctacttcaaactgtattgtttcctcgatacagacaatgttcccaaagattctgtggaattcgctttcatgttcgagcaagcccatgaagctgtcattcatggacaccaccccgcccccgaggagaacttgcaggtcctggctgctctgcggctacagtatttgcaaggcgattatacactgcacgccgctataccaccactagaggaggtgtacagccttcagcgtctgaaggcacgtatttcacagtcaaccaaaacttttacaccatgtgaaagactggagaaacggcgcacctctttcttggagggcactttacgaagaagcttccggaccggctctgtggtgagacagaaagtggaggaggaacagatgctggatatgtggatcaaggaagaggtatccagcgccagagcctccatcatcgacaagtggcgaaagttccaaggaatgaaccaggagcaggctatggctaaatacatggcgctgataaaagagtggccagggtacggaagtaccctttttgatgtggagtgcaaagagggtggttttccacaggaactctggttgggggtgagtgccgacgccgtgtccgtctataaaaggggggagggtagaccactggaggtttttcagtacgagcatattctaagttttggcgctcctctggcaaacacctataagatcgtagtggacgagagagaattgctcttcgagacaagcgaagtggtagacgttgccaagctgatgaaagcctatatcagcatgatagtcaagaagcgctattctacgacaaggtcagcatcttcccaaggctcgtcacgttag

SEQ ID NO: 125475 - DNA, 552 bp, synthetic construct
  misc_feature 1..552: note = Description of Artificial Sequence: Synthetic coding sequence
  source 1..552: mol_type = other DNA
atggagaatggcgccgtttacagtccaacaacagaagaggacccgggaccggcaagagggcccaggtctggcctcgctgcttactttttcatgggcagactgccccttctcaggcgagtgctcaaaggcctccagttactgctctctctgctggcttttatctgtgaggaagttgtgtcacaatgtactctctgcgggggcttgtatttcttcgaattcgtgtcctgtagcgcctttctgttaagcttgctgatattgatagtttattgcacgcctttttatgagcgcgtcgatactacaaaagtcaagagctctgacttctacatcacactaggtactggttgtgttttcctgctggcaagcattatcttcgtctctactcacgatcggacctcagcggagattgccgcaatcgtttttggcttcatcgcctctttcatgtttttgctggatttcattacaatgctgtatgagaagcggcaggagtcccaactcaggaagcctgaaaataccacacgcgcggaggcactgactgagcccttgaatgcctag

SEQ ID NO: 125476 - DNA, 1437 bp, synthetic construct
  misc_feature 1..1437: note = Description of Artificial Sequence: Synthetic coding sequence
  source 1..1437: mol_type = other DNA
atgctggagttcgcccagaaatattttagagacccccagaggcgaccacaggacggattacggctaaagtccaaagaacctagggagagtaggactctggaggacatgctctgctttacaaaaacacccctgcaagagtctcttattgaactgtctgatagcagtcttagcaagatggcgaccgacatgttcctcgccgtcatgcgctttatgggcgacgctcctctgaagggacagtccgacctggatgtgctgtgcaacctcctgaaactgtgtggggaccacgaagtcatgagagatgaatgctattgccaggttgtaaagcaaataaccgacaataccagcagcaagcaggacagctgccaaagagggtggaggttgctctatatcgttacagcttatcactcttgtagtgaagtactgcacccccatctgaccagattcctgcaagatgtgagtcggaccccgggtcttccgtttcagggaattgccaaggcatgcgaacagaacctccagaagacacttaggttcggaggcagactggagttgccgtcctccattgagctccgggctatgctcgcaggtcggagcagcaagcgacagctctttctgctcccagggggcttggagaggcacttgaagataaaaacctgcacggtggcacttgatgtggttgaggagatttgcgcagaaatggccttaactcgccccgaagccttcaacgaatacgtgatcttcgttgtgacaaaccgtggtcaacacgtgtgcccattgtcccggcgcgcctacatccttgatgtggctagtgagatggaacaggtcgacggcgggtacatgctgtggtttcgaagagtgctgtgggaccaacccttgaaattcgagaacgagctgtacgtcaccatgcactataatcaggtccttcccgattatttgaagggactgtttagctccgtgccagcatcacggccttccgagcagcttctgcagcaggtgtccaaactggcatctctccaacacagagctaaggaccatttctacctccctagcgtgcgtgaggtgcaggagtacatccccgcccagctttatagaacaactgccgggtctacctggctaaatttagtaagccagcatcgtcagcagacacaggctctttcgccccatcaggcacgagcacagtttctgggactgttgagcgctctgccaatgtttggcagtagcttcttctttatccagtcttgctccaacattgctgtaccagccccgtgcatcctggcgataaaccataacggcttgaactttctcagtaccgaaacgcacgtcagcggactgtccctggctttgccgagccccccctccgtgccttggtcaccaacgccaagcaagcgacccagaccgcctgctgccgaggcccagtttcattgtttgccaccttcctag

SEQ ID NO: 125477 - DNA, 555 bp, synthetic construct
  misc_feature 1..555: note = Description of Artificial Sequence: Synthetic coding sequence
  source 1..555: mol_type = other DNA
atgaacatgctatcctcccttagccctaccgtcgttctgccagactaccttaagggactatttagcagtgttccagcgtcgcggccctccgaacaactcctacagcaggtgtcaaaattggcttcgcttcagcaccgcgctaaggaccacttctacctccccagtgtgagagaagtccaggaatacatccccgctcagctgtaccgaactactgctggtagcacatggctcaatctggtgtcgcagcatcgacagcagactcaggctctgagcccccaccaggcccgtgcacaatttcttggcctgttgtcagcgctgcctatgttcggcagctccttcttcttcatacaatcatgctcaaacatagccgtgccggccccttgcatcctggctattaaccataatggacttaactttttgagcacggagacccatgtgagcggactttctctggctctcccatcgcctccttcagtgccgtggagccccacaccatctaagcgtccccgtcccccagcagccgaggctcaatttcactgcttaccgccctcctag

SEQ ID NO: 125478 - DNA, 735 bp, synthetic construct
  misc_feature 1..735: note = Description of Artificial Sequence: Synthetic coding sequence
  source 1..735: mol_type = other DNA
atgcgcgatgaatgctattgtcaggtggtcaaacaaatcacagataacacatctagtaaacaggactcttgtcagagagggtggagacttctgtacatcgtcaccgcttaccacagctgttctgaggtgttacacccccacttaacccgattcctgcaggatgtgtcacggacccccgggctaccatttcaggggatagctaaggcatgcgaacaaaacttgcagaagaccctcagattcgggggccgactggagctgccaagttccattgaactccgtgcaatgcttgccggacgctccagtaaacgccaactgtttctgctgccggggggactggagcggcaccttaagattaaaacatgtactgtcgcgctcgatgtggtggaggaaatttgcgctgagatggctctaacccgtcctgaagcttttaacgagtatgtaatcttcgtggtcactaatcgcggggggaagtcaagatctaccagccagccttcgagcactgtgcagcggcaggcgcgcccgggctccacctggtcagcctcaacagggagtcgtcaccgcagaagcgcgccaacccggccggtgcccagcttttgggccagcagcgccccctacctttgtagtgcccccccatcctcctcttcccgggcggccgccaccctgctgtgtcaacccctcgcttcactgccatcaacaacgatggcatcaacattttcagctcagcggttgatgtag

SEQ ID NO: 125479 - DNA, 429 bp, synthetic construct
  misc_feature 1..429: note = Description of Artificial Sequence: Synthetic coding sequence
  source 1..429: mol_type = other DNA
atggtgaaaggtggccaggaagccggtgggcagctccgcgttctccgggcctactcttttgccgacatactctttgtcacgatgccctcccagaatatgctggagtttaatctggcctcagagaaagttattttgttttcggcccgggctcaccaagtgaagacactggtagacgattttatcctggagcttaaaaaggactccgactacgtggttgctgtgcgtaatttcttgcctgaggatcctgccctcctggcctttcacaagggtgatatcatccatctgcagcccctcgagcccccccgcgtcggctatagtgccgggtgtgttgtgaggagaaaagtggtatacctggaagagttgcgtaggcggggacctgatttcggagtgtgtccccggacatggaaccccatacggggcgccagctag

SEQ ID NO: 125480 - DNA, 6165 bp, synthetic construct
  misc_feature 1..6165: note = Description of Artificial Sequence: Synthetic coding sequence
  source 1..6165: mol_type = other DNA
atgtttaatctcatgaagaaagacaaggataaggatggagggcggaaggagaagaaagagaagaaggagaaaaaggagaggatgagtgccgccgaactcaggagtcttgaagaaatgtcccttcggcgcggctttttcaacctcaaccgctcctctaaaagagagagtaagacccgtctggaaattagtaatccaattccaattaaagtcgcttctgggtccgaccttcacctgacagatatcgactcagactcaaacagaggttcggtgatacttgactctgggcatctctcaacagcatctagttctgatgatttaaaaggcgaggaaggctcctttagaggatctgttctacaaagagccgcaaaatttggtagcctcgccaagcagaattcccaaatgatcgtgaaacggttcagtttcagtcagcgctccagagatgagtccgcctccgaaacttcaaccccatccgagcactccgcggctccttcgccccaagtcgaggttagaacactagaaggtcagctcgtccagcatcccggtcccggcatcccacgaccaggccatagatctcgcgcacctgagctggtgaccaaaaagttcccagtagacctacgtctgccgccggtggtccccctgccgccgccaactctacgggagttggaactgcaacgcaggccgaccggcgacttcgggtttagcctccggcgcactaccatgctggatcggggaccagaagggcaggcttgtaggcgagttgtgcacttcgccgaacctggcgcggggacgaaggatctggcactggggttggtccctggtgaccgcctggtggagattaatgggcacaatgtggagtctaaatccagggatgagatcgtggagatgattaggcaaagcggcgacagcgttcggctcaaggtgcaacccatccctgagttgtctgagttaagccggagttggcttcgctcgggggagggccctagacgcgaaccaagcgatgccaaaacggaagaacagattgctgctgaggaggcatggaatgaaaccgagaaggtctggttggttcaccgcgatggctttagcctggccagtcagctcaagtctgaggagctcaaccttccggaaggcaaggttcgggtgaagctagatcacgacggagctattttggacgtggacgaggatgacgtcgaaaaggccaatgccccaagttgcgacagactcgaagacctggcatcgctcgtatatctgaatgaatcgtcggtgttacacaccctgcgacaacgctacggtgcctcattgctgcacacctatgccggtccctccttgttggtattgggcccgcggggtgcgccagccgtctactccgaaaaggtcatgcatatgtttaagggatgtcgccgggaagatatggccccccacatctacgccgttgcccagactgcataccgcgccatgctaatgagcaggcaggatcagtcgattattctgctggggtcctccggatcaggaaaaacaaccagctgccaacacttggtccagtatctggccaccattgccggcatctccgggaacaaggtgttttccgttgagaaatggcaggcattgtacactctcctcgaagcgttcggtaactctccaaccatcatcaacggcaatgcaacgaggttttcccaaatactgtcccttgacttcgaccaagctggtcaagtggccagtgcttcaatacagacaatgctgctggagaaactacgggtcgctcgcaggccagccagcgaagcaacattcaacgtgttctactacctgctcgcgtgtggggatgggacactaagaaccgagctgcacctgaaccacttggccgaaaataatgtgtttggaatcgtcccactggccaagccagaagagaagcagaaagcggcccagcagtttagcaagctgcaggccgccatgaaggtccttggcatcagccccgacgagcagaaggcatgttggtttatcctggccgctatctatcatctaggggcagcgggcgccactaaagtccactccactgcggggagaaaacagttcgcaaggcatgagtgggctcaaaaggccgcttacctcttaggatgcagtctggaggagctgagctccgccatctttaaacaccagcacaaaggcggcacgctgcaacgtagcacctcttttagacaggggcctgaggagtctggtttgggtgatggcactggcccaaaactctccgccctggaatgtttggagggaatggcagcaggactgtactccgagcttttcacactactcgtcagtcttgtgaatcgcgcactgaagtcctcacagcacagcttgtgtagcatgatgatcgttgacacacctggtttccagaaccctgagcagggtggcagcgctcggggagcatcattcgaagaactttgtcacaattatacacaggatcgcctgcaacgtttatttcacgagcggacatttgtgcaggaactggagcggtacaaagaggagaatattgagctagcattcgatgatcttgaaccccccacagatgatagcgttgcagccgtcgaccaggctagtcaccagtccctagttagatccctcgcacgcacggacgaagccagaggactgttgtggcttctcgaagaggaagccctggtgccgggtgccagcgaagacaccctgctagaacgcctctttagctattacggaccacaggagggagataaaaagggacaaagccccctgttgcattctagtaagcctcaccacttcctgctgggtcacagtcatgggaccaactgggttgaatacaacgttacaggctggctgaactacaccaaacagaaccccgccacccagaacgccccacgcctgttacaagacagtcagaagaaaattatctctaatctgtttctgggccgggcagggtctgcgaccgtgctgtcggggagtatcgcaggccttgagggaggtagccaactagcattaaggagagccaccagcatgcgaaagacatttaccacagggatggccgccgttaagaagaaaagcctctgtattcagatgaagttgcaggtggatgctctcattgatactatcaagaagtctaagctgcatttcgtccactgtttcctcccggtcgctgaaggctgggcaggggagccacggtctgcatcgtcaaggcgggtttcttctagctctgagttagatctcccaagtggagatcattgcgaagctggccttcttcaattggatgttcctctcctgcggacacaattgaggggaagccgactgttagatgcaatgcgcatgtaccgacagggctaccctgaccacatggtgttttcagagttccgcaggcgattcgacgtactggcaccccacctcacgaaaaagcacggccggaattatatcgtggtcgatgagcgccgagctgtcgaagagcttttagagtgcctggacctagagaagtctagttgttgtatggggctttccagagtgtttttccgggccgggaccttggctagactcgaggaacagcgcgatgagcagaccagccgaaatctgacactgtttcaggccgcctgtagaggatatctggcgcgccagcatttcaaaaagagaaaaatacaggatctggccatccgctgtgtgcagaaaaatataaagaaaaataaaggggtaaaggactggccttggtggaaactgttcacaacagtgagacccttaattgaagtgcaactgtccgaggagcagattcggaataaggacgaagagatccaacaactcaggtctaagttagagaaggcggaaaaggaaaggaacgaactccgacttaattctgaccgactggagtcccggattagtgaactcacttcggaactgacggacgaacggaacaccggggaatctgcctcccagttactggacgcagagaccgccgagcggctccgcgcagagaaggagatgaaagaactccagactcagtatgacgctttgaagaaacagatggaagtcatggaaatggaggtgatggaagctaggcttattagagctgccgagattaatggcgaagtagacgacgatgacgctggtggagaatggcgattaaaatatgaacgggccgtacgcgaagtcgacttcacaaaaaagaggctgcaacaagagttcgaggacaagctcgaggtggaacagcagaataaacgccagctggaacgccgtcttggtgatctacaggcagactcagaagagtcccagagagcactacagcagcttaaaaagaaatgtcagcggttgaccgctgagttgcaggacacaaagctgcatctggagggccagcaggtgcggaaccacgagttggagaaaaagcagcgaagattcgatagtgaactctctcaagctcacgaagaagcccagcgggagaagctccagagagagaagctgcagcgtgagaaggacatgttactcgcagaggccttctcccttaaacaacaacttgaagaaaaagacatggacatcgccgggttcacccaaaaagtggtgagtctggaagccgagctgcaggatatctctagccaggagtccaaggatgaagcctcgctggccaaggtaaaaaagcagctgagagatctggaggccaaagtgaaggatcaggaggaagagcttgacgagcaggccgggaccatccaaatgttagagcaagcaaagctgcgcctcgagatggaaatggagcgtatgcgacaaacacattcaaaagaaatggagagcagagacgaagaggtggaggaagcacggcagtcctgccaaaagaagctgaaacagatggaggtgcagctggaggaggagtatgaagataaacagaaggtgctgagggagaaaagagaactggaaggtaaactggcaaccctcagcgaccaggtgaacagaagagactttgagtccgagaaacgtctgagaaaggatcttaaaaggactaaggccttgctcgcagacgcgcagttgatgcttgaccacctgaagaatagcgcgccttccaaaagagagatcgctcagttgaagaaccaacttgaggagagtgaattcacctgcgccgccgcagtcaaggcacggaaggctatggaagtagagattgaggatcttcacctgcagatcgacgacatagcgaaggccaagacagcactggaggaacaactcagtcggttgcagcgcgagaaaaacgagatccagaatcggctggaggaggaccaagaggacatgaatgagctaatgaagaaacacaaagccgcagtagcacaggctagtagggacctcgcacagataaatgatctccaggcacaactggaggaggcaaataaggaaaagcaggagctacaagaaaaattgcaggccctgcagtcacaagtggaatttcttgagcagagtatggtcgacaaatcgctggtgtctcgccaggaagcaaagatccgggagttagagacccggctggaattcgagcggacccaggtgaagcgactagaaagcttggcctcccggttgaaagaaaatatggagaagctgactgaggaaagagaccagcggattgctgctgagaaccgcgaaaaagagcagaacaagcgtcttcagagacaactgagagatacaaaagaggagatgggcgaactcgcccgaaaggaggccgaggcttccaggaagaagcacgagttggagatggaccttgagagtctggaagccgccaatcagtccctccaggcagaccttaaactggcgtttaaacggatcggcgatctgcaggcggcaattgaggacgaaatggagtccgacgagaacgaggatttgattaattctctgcaggacatggtcacaaaataccagaagaggaagaataagctggagggcgactccgatgtcgacagcgagctggaagaccgagtggatggagtgaagtcttggctgagtaagaacaagggcccttctaaggcggcctctgacgatggctcactgaaaagttcttcccctacctcgtactggaagagcctcgctcccgacaggagcgacgacgagcacgaccccctggacaacacttcccgtcctcggtattcacactcatatctgtcagattcagataccgaggcgaagttaacagaaacaaatgcttag

SEQ ID NO: 125481 - DNA, 6009 bp, synthetic construct
  misc_feature 1..6009: note = Description of Artificial Sequence: Synthetic coding sequence
  source 1..6009: mol_type = other DNA
atgtttaacctgatgaagaaagataaagacaaagatgggggtagaaaagagaagaaggaaaagaaggaaaaaaaagagagaatgtcagctgccgaattgcggtccttggaagagatgagcctgcggcggggtttcttcaacctcaaccgctcaagtaaacgcgaatctaaaacccgcctggaaatctctaacccaatcccaatcaaggtggcgtctggatcggatctgcatctgaccgatatagattccgacagtaatcggggctccgtaatcctggattcaggccatctgagcactgccagttccagcgatgacctcaagggggaagaagggagtttcagaggcagtgtgctccagagagccgcaaaatttggctcgttagctaagcaaaattcgcagatgatcgtcaagaggttctccttttctcagcggagtcgcgatgagtcggcaagcgaaacatcaacccctagtgaacactctgcagctccttccccccaggtagaggtccgtactttagagggccagctggtgcagcacccaggaccaggcatccctcgcccaggccatagatccagggcccctgaattggttacaaagaaattccccgtggatctgagactgccgcctgtggtgcctctgccaccccctaccttacgcgagctcgagctacagaggcggcctacaggcgacttcggctttagcctgagacggaccaccatgctcgacagggggccagaggggcaggcctgcagaagagtggtgcacttcgctgaaccgggagcgggcacaaaagacttggccctggggctcgtgccaggtgatagactagtcgaaatcaatgggcataatgttgagagcaaaagtagggatgaaatcgtggaaatgataagacaatccggtgacagtgtccgcttaaaggtccagcccataccagagctgagcgagctcagcagatcgtggctgaggtctggtgaagggccgagaagagaaccaagcgacgccaagaccgaagagcagatagcggccgaagaggcctggaatgaaactgaaaaggtttggctggtgcacagggacgggttttcgttggccagccagctgaaatctgaggaactgaacctccctgagggcaaagttcgcgtcaagttggaccacgatggcgccatcctggatgtggatgaggacgacgtcgaaaaggctaacgcccctagctgtgaccgcttggaagatttggcgtccctggtgtatttgaacgagagttccgttctgcacacgctgcggcaacgctacggcgcctcactgctgcatacatatgccgggccatcactgcttgtgttgggtccccgcggggcaccggccgtctattcggaaaaagtcatgcacatgtttaaaggctgccgccgagaagacatggccccccatatctacgccgtggcacagaccgcctaccgcgcaatgttgatgtcccgccaggaccagtcaatcattcttttggggagctctggcagtggcaaaactacaagttgccagcacttggtgcaatacctcgcgacgatcgccggaatctcaggcaataaggtattttctgtcgagaaatggcaggccctgtatactcttttggaggccttcggcaatagccccaccatcatcaatgggaacgccacaagattcagccagattttgtctctggacttcgatcaagccggacaggttgcctctgccagcatacagactatgctcctggagaaattgcgtgtggctcgaaggcctgcaagcgaagcaacctttaacgtcttctactaccttctcgcttgtggcgatgggactctgcggaccgagctgcatctcaaccaccttgccgaaaataacgtgtttgggatcgtacccctggccaagccggaggagaagcagaaagctgcccagcaattcagcaagctccaggccgctatgaaggtcctggggatatctcccgacgagcagaaagcttgctggtttatcttggcagccatttatcacctgggcgccgccggtgctactaaagttcattcaaccgcgggacggaagcagtttgctcggcatgaatgggctcagaaggcagcctatttgcttgggtgcagcttggaggaactctcctccgccatttttaaacatcagcataagggcggcactctgcagagatcgacttctttccggcaaggtcctgaagagtcgggtcttggcgacgggaccggcccaaaattgagcgcactggagtgtctcgaaggcatggccgctgggctgtacagtgagctgtttactctgttggtgagcctggtgaatagggcactgaaaagtagccaacacagcctctgttcaatgatgatcgttgatacgccgggctttcagaaccctgaacagggcggttctgcccgcggcgcttcattcgaggagttgtgccacaattacactcaggatcggctgcagagattattccacgaacggacctttgtgcaggagctcgagcgatacaaggaagagaacatcgagctggcctttgacgacctagagccacccactgacgacagcgttgcggctgtcgatcaggcatctcaccaatcactcgttagatcactggccaggacagatgaggcccggggcctgctgtggttattggaggaggaagctctggttccaggggcctccgaggacacccttcttgaacgattgtttagctattatggcccacaggaaggcgacaaaaaaggacagtctcctttactgcatagctcaaaaccccaccacttcttgctggggcactcacacggtaccaactgggtggaatacaacgtgacgggctggctgaactatactaaacagaatcccgcaacacagaacgcacctcgtctgttgcaggatagccagaaaaagattataagcaacctattcctggggagagccggctccgccacagtgctcagcggttccatcgctgggttggaaggtggatcccaactagcccttagacgtgctacctctatgcgaaaaacctttactaccggcatggcggcagtcaagaagaagtccctgtgcatccagatgaaacttcaggtggacgccttgatcgacacaattaaaaaatcaaaactccacttcgtccactgttttctgccggtcgccgagggttgggcaggcgagccccggtccgcctcttctcgacgcgttagcagtagttcagagctggacttaccttcaggagaccattgcgaggctgggctgctgcagttggatgttccccttctgcggacccaattgcgggggagtagattactagatgcgatgcggatgtacaggcagggataccccgaccacatggtgttttctgaatttaggcgccggttcgatgtattagcgccgcatctaacgaagaaacatggtcggaactacatcgtcgtggacgagagacgggccgttgaggagctgctcgaatgcctcgacctcgagaagagttcttgttgtatgggactgtcacgcgtgttcttccgcgctggtacgctggcgcgtctggaagaacaacgcgatgagcagacatctagaaatctcactctgtttcaggccgcttgccgcggttacctggcccgtcaacatttcaaaaaacgtaagattcaggatctggcaatacgctgtgtccagaagaacattaagaagaacaagggtgtgaaggactggccctggtggaaactatttacgaccgtgaggccgctcattgaagtgcagttatcggaggaacagatccggaacaaagatgaggagattcagcaattgcgatctaaactggaaaaagcagagaaagagagaaacgaattaagactaaacagtgaccggcttgagtcacggatcagcgaactcacttctgagctaactgacgagaggaatacaggtgaaagcgcttcacagctgcttgatgcagaaaccgctgagaggctcagagccgagaaggagatgaaggagttacaaacccagtatgacgctctgaaaaagcagatggaggtgatggagatggaagtgatggaagctagactaattagagccgccgagatcaacggcgaagtggacgatgatgatgccggcggagaatggcgcctcaaatatgaacgggccgtgagagaggttgacttcacgaaaaagagactgcagcaggaatttgaggataaactggaggtagagcagcagaacaaacgacagctggagcgccggcttggagacctccaagccgactctgaggagagtcagagagccttgcaacagcttaagaaaaagtgccagagacttaccgctgagctccaagacacaaaacttcacttggaaggtcagcaggttcgcaatcacgagcttgagaagaagcaacgcagattcgacagtgagctcagccaggcccacgaggaggcacagcgcgaaaagctccagagggagaaactgcagagggaaaaagatatgctgctggctgaagctttcagcctgaagcagcagctggaagagaaagatatggatattgctgggtttacacagaaggtggtcagtctcgaggccgaacttcaagacatcagtagtcaagaaagcaaggacgaagcctctttagccaaggtgaaaaagcagctaagagatctggaagcaaaagtgaaagatcaggaggaagagctcgacgaacaggcaggcaccattcagatgctggagcagctgaaacagatggaggtgcaacttgaagaggaatacgaggacaaacagaaagtcctccgcgagaagagagaattggagggcaaacttgccacacttagcgatcaggtaaatcgacgcgacttcgagagtgaaaaaagactgaggaaagacttaaagcgcaccaaggcactcttagcggatgcccagctaatgttggatcatctcaagaattctgctccttcaaaacgagaaattgctcaattgaagaaccaactggaggagtcagaatttacctgtgctgcggccgtgaaagcccgcaaggccatggaagtggaaattgaagacttgcacttgcaaatcgacgacatagcgaaggccaagacagcgcttgaagagcaactatcgcgccttcaaagagagaagaatgagatccaaaatcgattggaggaggatcaggaagacatgaatgaattgatgaaaaagcacaaagctgcggtggcgcaggcaagtcgagatctcgcccagataaatgacttacaggcgcagttggaagaagcgaataaggagaagcaagagctgcaagagaaactccaagcgctccagtctcaggttgaatttctggagcagagtatggtggacaaaagtctcgtctctagacaggaggcaaaaattcgggaactcgaaacacgcttggagttcgaacgtactcaggtgaagaggcttgaatccctcgcttccagactcaaagagaatatggagaagctgacagaagaacgggaccagcggatcgctgctgaaaatcgagaaaaggagcaaaataagcggctgcagaggcagctaagggatacaaaggaagagatgggggagttagccaggaaagaggccgaggccagcagaaaaaaacacgaactcgagatggacctggagagcctggaggccgctaaccaatcactgcaagccgacctaaagctggccttcaaacggatcggcgaccttcaagctgctatcgaagatgagatggagtcagatgaaaacgaggacctgattaattcagaaggcgactcggatgtggactcagagctggaggaccgggtcgatggcgtaaagtcctggctgtccaagaataagggcccaagcaaggctgcttctgatgacggctcgctgaaatcttcttcgcctacatcttattggaaaagcctggctcctgatcggagcgatgacgagcatgaccctctggacaatacttccaggcccaggtacagccacagctacctcagtgacagcgacacagaggccaaattaaccgagaccaacgcctag

SEQ ID NO: 125482 - DNA, 4929 bp, synthetic construct
  misc_feature 1..4929: note = Description of Artificial Sequence: Synthetic coding sequence
  source 1..4929: mol_type = other DNA
atggagggacctaggaccaccaagctcgaaggttcctcgaaggagggtagcggaccttcccggtcacctcagcctccaacctcccctattccacctgaaacttcacagagagctcggagcccagctcccaccttggctatgaacggacctggcgcagcaactgccgaaggcctgtcggaggaagccccagccgtgtactctgagaaggtgatgcatatgttcaagggctgcagaagagaggatatggccccacatatctacgctgtggctcagactgcttatcgcgctatgctgatgtctaggcaggatcagtccattatactgctcggaagtagcggctccggcaagactacctcctgtcagcatctggtccagtacctcgcaacaattgccggaatcagcggtaataaggtcttctccgtcgagaagtggcaggcactgtacacactgttggaagcctttggtaattcccctacaattatcaacggaaacgctactcggttttcacagattctgagcctcgactttgaccaggccggacaagtggcctccgcttccattcaaacaatgctccttgagaaattgagggtggccaggcggcccgcctccgaagcaactttcaatgtgttctattatctcctggcctgcggtgatgggacgctccgaaccgagctccatttgaaccacctggctgagaacaatgtgtttggcatcgttccgctggctaaacctgaggaaaaacagaaagcagctcagcaattttcgaagctgcaggctgccatgaaagttctgggcatcagcccagatgaacagaaggcctgttggtttatactggcggccatctaccatttgggagctgctggcgccacgaaggaagccgctgaagctggcagaaaacaatttgcgaggcatgagtgggcacagaaggccgcttacctgctgggctgctcactcgaggagctttcctcagccatcttcaaacaccagcataagggcggaacgcttcagagatcaacatcgttcaggcaggggcctgaagaaagtggcctcggagacgggactggccccaaactgtccgcattggagtgcctggagggcatggcagcggggctgtactccgaactcttcacgctgctcgtgtccctggtgaaccgcgcgctcaaaagcagccagcacagcctctgctctatgatgatcgtggatactccaggcttccaaaatcctgagcagggaggaagcgcccggggtgccagtttcgaggaactctgtcacaattatacccaagatcggttgcaaagattgtttcacgagcggacattcgtgcaggaactggagcggtataaggaggagaatatcgagctggcttttgatgacctggagccccccaccgatgacagtgttgccgccgtggaccaggcttctcaccaatcgctggtcagatcactggcaaggaccgatgaggccagaggcctgctctggctgctggaagaagaggcactcgtaccaggggcctcagaagacaccctgctggagaggctcttctcctactatgggccccaggaaggggataagaaagggcagagtccacttttgcactcctcaaaaccgcaccatttccttctaggccattctcacggtacaaattgggtggaatataatgtgacagggtggctaaattataccaagcagaatccagccacgcaaaatgcacccaggcttctgcaggacagccagaagaaaataatttccaatctctttttgggtcgtgctggctcagccaccgtgctctccggcagtatcgcaggacttgagggaggctcccagctggccctgagacgtgctacaagcatgaggaaaacctttacaaccggtatggccgccgttaagaaaaaatctctttgcatccaaatgaaattgcaggtggacgctcttatcgatacgattaaaaagtccaagcttcattttgtacactgtttcctgcccgtcgccgagggctgggctggcgaacctcgtagtgcctcaagtcggcgggtatcatctagcagcgagctagacctgcccagtggcgaccactgcgaagccggcctgcttcagctggacgttcccctactccgcacccagctcaggggctccagattgctggatgctatgagaatgtacaggcaaggctacccggaccacatggtcttttcggaatttagaaggcgtttcgatgtgctcgccccccacctgactaagaagcatggacgcaattatatcgttgtagacgaacgtagagccgtggaggagctgcttgaatgcctggatctggaaaagtcttcctgctgcatggggctctcccgcgttttttttagagctggaactctggcacggctcgaagaacagcgagatgagcagacgtctaggaatcttaccctgttccaggccgcatgccgcggatacttggcccgacagcatttcaagaaacgtaagatccaggacttggctatcaggtgtgtccagaaaaacattaaaaaaaataagggcgtgaaggactggccttggtggaagctctttaccaccgtaagacccctgatagaagtgcagctgtctgaagagcagataagaaataaggacgaggagattcagcaactaagaagtaagctcgagaaggctgaaaaagagaggaacgaactgaggctcaattccgatcgcctggagagtcggattagtgaactgactagcgagctaacggacgagcgcaatacaggagaatcagcctcacagttgcttgatgcggagacagccgaaaggctcagggctgaaaaagagatgaaagaactgcaaacccagtacgacgctttaaaaaagcaaatggaggtcatggaaatggaggttatggaggcacggttaataagggctgcagaaatcaatggcgaggtcgacgatgatgatgcagggggtgagtggcgtttgaagtacgaacgcgccgtccgagaggtagacttcaccaagaaaagacttcaacaagagttcgaggataaactcgaagtggagcagcagaacaagagacaactggagagacgcctgggagatctacaggctgattcggaggagagccaaagggccctgcaacagctgaagaagaagtgccagcggttaactgccgaacttcaagataccaagttgcatctggaagggcagcaggtgagaaatcacgagttggagaagaaacaaagacgcttcgatagcgagctgagccaggcccatgaagaggcacaacgggaaaagctccagagggaaaagctccagagggagaaggacatgcttctggccgaagcctttagtttgaaacagcagctggaggaaaaggatatggatattgccgggtttacccagaaggtcgtgtctctggaggcagagttgcaggatatctccagtcaggaaagcaaggacgaagcatcccttgccaaagtgaagaagcaattgagagaccttgaggcaaaagtgaaagatcaggaagaagagctggatgagcaggcgaagctgaggttggagatggagatggagaggatgcgtcagacacactctaaggagatggagtctagagacgaagaggtggaggaagcccgtcagtcttgtcagaaaaagctgaagcaaatggaagtacagctcgaagaggagtatgaagacaagcagaaggtgttgcgcgagaagagggagctagaaggcaaactggcaacattatctgatcaagttaaccgcagagatttcgaatcggaaaagcggttaaggaaagatctgaaacgtactaaagctttactggcggacgctcaactcatgctcgatcacctaaagaactctgctccctctaaaagagagatcgcgcagctgaagaatcaacttgaagagagtgagtttacctgcgctgcagcggtaaaagcccgcaaggcgatggaggttgagatagaggatctgcacctccaaatcgacgacatcgcaaaggccaagacagccctcgaagaacagctgagccgcctgcagcgggaaaagaatgaaattcagaatcgcctggaggaggatcaggaggatatgaacgaacttatgaagaagcacaaggcagccgtcgctcaagcgtctcgtgacctggcccagatcaacgatctgcaagcccagctggaagaggccaataaggaaaagcaggagcttcaggagaaactccaagcactgcaatctcaggtcgaatttttagaacagtcaatggtggataagtcactggtaagtcggcaagaggcaaagatacgagaattggagactagactcgagttcgagcgaacccaggtgaaacggttggaatctctggcttcccggctgaaggagaatatggaaaagctcacggaggaacgggaccaaagaatcgccgcagagaacagggagaaggaacagaacaaacgcctccagcggcagctgcgcgacacaaaagaagagatgggcgagttggcacgaaaggaagcagaggcatccaggaagaagcatgagctcgaaatggacctggagtctctcgaggccgccaatcagtctctgcaggcagacttaaagctggcgttcaagagaataggggatctccaggcagccatcgaggatgagatggagagcgatgagaacgaagacttaatcaatagcgagggtgactccgacgtggactccgagctggaggaccgggttgacggtgtgaagtcttggctgagcaaaaataaaggaccctctaaggctgcatctgatgacggcagcctcaagtcctcatctcccacatcctattggaagtctctcgcaccggaccgctcggacgatgaacatgacccactcgataatacctcgcgacctcgatactcccattcttacctgtccgattctgacacagaagccaagctcacagagactaacgcttag

SEQ ID NO: 125483 - DNA, 6165 bp, synthetic construct
  misc_feature 1..6165: note = Description of Artificial Sequence: Synthetic coding sequence
  source 1..6165: mol_type = other DNA
atgttcaacttaatgaagaaagataaagataaagatggcggaagaaaggagaagaaagaaaagaaggaaaaaaaagagcgaatgagtgccgcagaactgcgtagcctggaggaaatgagtttgcggaggggctttttcaatctcaacaggtcttccaaacgggagtcgaaaactaggcttgagatcagcaaccctattccaataaaggtggcctctggctcagacctgcacctgaccgacatcgattcggattctaatcgcggtagtgtaatcctggatagcggacatctgtccactgcctcatcctcagacgatctgaagggcgaggaaggcagctttagaggtagcgtgctgcagagggccgctaaatttggctctctcgctaagcagaatagtcaaatgattgtgaagcggtttagtttttctcaacgtagcagagatgagagtgcatccgagactagcacgccttctgaacactccgccgcaccttcaccacaagtcgaagtccggaccctggaagggcagttggtacaacacccgggccccgggatacccagaccaggacacaggagccgggcccctgagctggtgactaagaaattccccgtggatctgcggcttccccctgtggtaccgctgcctccaccgaccttgcgagagcttgaactgcagcgccggcccaccggtgactttggatttagtctcagaaggaccacaatgctagatcgggggcctgaggggcaggcttgtcgcagagtggtacatttcgctgaaccgggcgccggcaccaaggacctggccttaggactcgttccaggggataggctcgtcgagattaatgggcacaatgttgaatctaagtcacgagatgaaatcgttgagatgataagacagagtggagactctgtgcgactgaaggtgcagcccattcccgagctgtcagaattgtcccggtcatggttaaggtcaggggagggaccccgccgcgaaccaagtgatgctaagacagaggaacagatcgccgctgaggaagcatggaacgaaacagagaaagtctggctggtgcatcgcgatgggttttctttggcgtcacagctgaagtccgaagagctcaacctgccagagggcaaagtacgtgtgaaactcgatcatgacggagccattctcgacgtggacgaagacgacgtggaaaaagcaaacgctccttcgtgcgatcgactcgaggaccttgcttctttggtctacctcaacgagtcttccgtgttgcacactctacggcagagatatggtgcatctctgctccatacatatgccggtccatccctgttggttctgggccctcgcggcgcgccagctgtctactctgaaaaagtcatgcacatgtttaagggctgtcgccgagaggacatggccccccacatttacgccgtagctcaaacagcctatcgcgctatgctaatgagtcgtcaggatcaatcaattatcctccttggctcatctggtagcggaaagacaacatcttgtcaacacctggtccagtatctggcaaccattgcggggataagcggcaataaagtgttttctgtcgaaaaatggcaggcgctctatactctgctagaggcctttggtaatagccccaccatcattaacggtaacgccacccgatttagtcagattttgtcacttgatttcgaccaggccggccaggtggcatccgcctccattcagacaatgctgttggagaagctccgagtcgcccgcaggccagccagtgaagccacattcaacgtattctactacctgttagcttgcggggatgggacactgcgcaccgagctgcacctgaaccaccttgcggagaataatgtttttgggatcgtcccactggccaagcccgaagaaaaacagaaggcagcccagcagttcagcaaactccaggccgctatgaaggtgctggggatatctcccgacgagcagaaggcatgttggtttatcctggccgccatctatcacctgggggcggctggggcaaccaaagaagcagccgaggcaggccgaaaacaatttgcccggcatgaatgggcccagaaggccgcttatctcttaggatgctctttggaagagctgtctagcgcaatctttaagcatcagcacaagggcgggactcttcagagatctacaagctttagacagggccctgaagaaagcgggcttggcgatggcacgggcccaaaactttcagcgctcgaatgcctcgagggcatggccgccggactctactccgaattgtttacactactggtgagcctcgttaatagggcactgaagagtagccaacatagtctgtgctcaatgatgatagtcgatactcctggatttcagaaccccgaacaggggggatccgcccggggcgcgagctttgaggagttgtgccacaattatacacaggacagactgcaacgcttattccacgagaggacctttgtgcaggaattggaaagatataaggaggaaaatattgaactggccttcgacgacctcgagccgcccaccgatgactcagtcgctgcggtggaccaggcgagccatcagtctctggtccgatcgttggcacgcacagacgaggcccgcggcctgctctggctgctcgaagaggaagccctagtcccaggggcatctgaagacaccctgttggagaggttgtttagttactacggcccacaggagggcgacaagaagggacaaagtccattgctgcattccagcaagcctcaccactttctgttgggacactctcacggcactaactgggtggagtacaacgtgacaggttggttaaattacacaaagcagaaccctgctactcagaatgcaccaaggctgcttcaggattctcagaagaagatcatttcgaatctgttcttaggacgagcaggcagcgcgaccgtgttgtccggatctatcgcaggtttagagggtggatcccaactggcccttcgtagggccacttccatgagaaagactttcacgaccgggatggctgccgtgaaaaagaaatccctgtgcatccaaatgaagttgcaggtcgatgcgttgatcgatactataaaaaaatcgaaactccatttcgttcactgttttctgcctgttgcagagggttgggccggcgagccaaggtctgccagctccagacgcgtaagcagcagtagcgaactcgacctgccttccggggatcattgcgaagctggacttctgcagctggatgtgcctctgctgcgaacacagttgaggggcagtcgcctcctggacgctatgagaatgtatcggcaggggtaccctgatcacatggtctttagcgaatttcggcggaggtttgacgtcttggcaccccaccttacgaaaaagcacggacggaactacattgttgtcgacgagagacgtgcagtcgaagagctgttggaatgcttagatctcgagaagagctcctgctgcatgggacttagtagagtcttcttcagggcaggcaccctggctcggctcgaggagcagagggatgagcagacgtctcggaatctgactttgtttcaggcagcttgccgaggttacctcgcccgtcagcactttaagaaaaggaaaatccaggacttggctataaggtgcgtgcagaaaaacattaagaaaaataagggcgtcaaagactggccatggtggaagctgttcaccactgtgagacctctgatagaggtgcagctgtctgaggaacagataaggaacaaagacgaagaaatccagcagttgcggtcaaagctcgaaaaagcagagaaagagaggaatgagctacgcctgaatagtgacaggttggagagtagaatcagcgagctcacctctgagctgaccgacgagcggaacaccggagagtcagcaagtcagttgctcgacgccgaaacagctgaacggctgcgggctgaaaaggaaatgaaggaactccagactcaatacgacgctcttaagaaacagatggaagtgatggaaatggaggtgatggaggctcggttgattcgggcagctgagattaacggcgaggtcgacgatgatgacgccgggggcgagtggcgcctgaagtacgagcgggccgtgagggaggttgactttacaaagaaaagactgcaacaggagttcgaggacaagctggaagtcgaacagcaaaacaagcgtcagctggaaagacggcttggcgatttgcaagccgactccgaagagtctcaacgagcactgcagcagttgaagaaaaagtgccagcggctcactgctgagcttcaggataccaagctccatctggagggccagcaggtgcgtaatcacgaactggagaaaaagcagcgcagatttgatagtgaactttcgcaggcccacgaggaggctcagagggagaaattgcagcgcgagaagcttcagagggagaaagacatgctgttagctgaggcttttagcctcaaacagcagctcgaagagaaagacatggacattgccggatttactcagaaagtcgtgagcctcgaggccgaactccaggacatctcatcacaggaaagtaaggacgaagcgagtctggcaaaggtgaagaagcagttacgggatctcgaagccaaggtgaaagatcaggaagaggaactggatgaacaagcaggcacgattcagatgctcgagcaggctaaactgaggctggaaatggaaatggaaaggatgaggcagacccattccaaagagatggaatcgcgcgacgaggaagtggaagaagcaaggcaatcatgtcagaagaagctgaaacaaatggaagtgcagctcgaggaagagtacgaggacaaacaaaaagtgctacgcgagaagcgggaactcgagggaaagctggcgacgctttctgatcaggtgaaccgcagggactttgagagtgagaaacggctccgcaaggatctgaaaaggaccaaagcattattggccgacgctcagctgatgctcgatcacctgaaaaatagcgctccatcgaaacgggagatagcacaattgaagaatcagctggaagagtccgagttcacctgtgcggccgcagtgaaagccaggaaggccatggaggtggaaattgaggatctccatctgcagatagatgatatcgcgaaagcaaagaccgcccttgaggaacagctatctcgtctccagcgggaaaaaaacgagatccaaaacaggcttgaggaggatcaggaggacatgaacgagctcatgaaaaaacataaagccgctgtggcgcaggcttctcgggatctagcacagatcaatgacctccaggcgcaactagaggaggcaaacaaggaaaagcaggaactgcaggaaaagctgcaggctctgcagtcgcaggtggagttcctggagcagtcaatggtggataagagtctcgtaagtcgccaagaggcgaagattcgtgagctagaaactagactggagtttgagaggacacaggtgaaacgccttgagtctctagcatcccgcttgaaggagaacatggagaagctcacagaggagcgcgaccaaaggatcgccgcagaaaaccgcgaaaaggagcaaaacaagcggctgcaacgccaactgagggacaccaaggaagagatgggcgagctggctcggaaggaagccgaggcttctagaaagaagcacgagttggagatggacctggaatcgctagaggccgccaatcaatcactccaagcagatttaaagttggcctttaaaagaattggggacttacaggcagctatcgaagacgagatggagtcggatgagaacgaagatctgattaactccctgcaggatatggttaccaaataccagaaaaggaagaataaattggaaggagattccgacgtggattcggagttggaggacagggtggatggcgtgaagtcatggctctcaaaaaataaggggccgagcaaggctgcctcagacgacggttctctgaaaagttcttcaccaacaagctattggaagtctctggcacccgacagaagcgatgacgaacacgacccgctggacaatactagcaggccccggtatagccatagctacctttctgacagcgacacagaggcgaagctcaccgaaaccaacgcatag

SEQ ID NO: 125484 - DNA, 2808 bp, synthetic construct
  misc_feature 1..2808: note = Description of Artificial Sequence: Synthetic coding sequence
  source 1..2808: mol_type = other DNA
atgcgtatgtaccgtcaaggctatccagatcacatggttttttccgagtttagaaggaggtttgatgtcctggccccgcacctcaccaagaaacacggtcggaattatattgtagtagacgagagaagggccgtggaggaactgctcgaatgtctggatctggagaagtcttcttgttgcatgggactcagccgggtgttttttagggccggaacactggcaagattggaagagcaacgtgatgaacagacatcacgaaatcttacactgtttcaggccgcctgccgaggttatcttgcccggcagcactttaaaaagcgaaaaatccaggatttggccattaggtgcgtgcagaaaaatatcaaaaaaaacaaaggggttaaagactggccttggtggaaactattcactaccgtccgacctctgatcgaggtgcagctcagcgaagagcaaattcgcaataaggacgaggaaatccagcagttacgatcaaagctggaaaaagctgaaaaagagagaaacgaactgagactgaactctgatagactcgagtccagaatcagtgaattaacctctgagttgaccgacgagcgtaatacaggagaaagcgcctcccagctcctggacgctgagacggccgagcgcttacgggccgagaaagaaatgaaggaattacagactcagtatgatgcactaaaaaagcagatggaggtgatggagatggaagtgatggaagcccgcctaattagggccgccgagatcaacggagaggttgatgatgacgatgccgggggcgagtggaggttgaaatatgagcgggctgtacgcgaagtagacttcaccaagaaaagactgcagcaggagtttgaagataagctggaggtagaacagcagaacaagagacagctcgaaagacgactgggcgatctccaagctgattctgaggagagtcaaagagcgctgcagcagctgaagaaaaagtgtcaacgcttaaccgccgagctgcaagatacgaagctccatcttgaggggcagcaggtgagaaatcatgagctcgaaaaaaaacagcgaagattcgacagtgagctgtcacaagcacacgaagaagctcagagggaaaaactccagagggaaaagttgcagagagagaaagacatgctcctggccgaggccttcagcctgaagcaacagcttgaagaaaaagacatggacatcgcagggttcacacaaaaggtggtgtccttggaagcggagctgcaggatattagttcgcaagagtcgaaggacgaagctagcctggccaaagttaagaaacagttgcgcgacctggaggctaaggtcaaggaccaggaggaagaacttgatgagcaggccgggacgatccagatgctggaacaagcaaaactgagattggagatggagatggaaaggatgagacagacccattcaaaggagatggagagcagagatgaggaagtggaggaggcacgccaatcttgccagaagaaactcaagcaaatggaagttcagctcgaggaagagtatgaagacaaacaaaaagtgctgcgcgaaaagcgcgaactggagggtaaactggccacccttagcgatcaagtgaataggcgggacttcgaatcagagaaacggttgaggaaggacttaaagcgaaccaaggccctacttgctgatgcgcagcttatgctggatcacctgaaaaactcagcgccctccaaacgtgaaatcgcacaactgaaaaaccagctcgaagagtctgaattcacatgtgcagctgcagtaaaggcacgcaaagctatggaagtggaaattgaggacctgcacttacagatcgatgacattgcgaaggcaaaaaccgcgctcgaagaacagctctcacgcctgcagagagagaaaaatgagatccagaaccgacttgaagaggaccaggaggatatgaatgaacttatgaaaaagcacaaggcagctgtggcacaagcatcccgagaccttgcccagatcaacgacctgcaggcacagctcgaagaggccaacaaggagaagcaggaacttcaggagaagctgcaagccctgcagagccaggttgagttcctggaacagagcatggtggacaagtcgctggtatctcggcaggaggctaaaattagggagttggagaccagattagagtttgagcggacccaagttaaaagattggagtccttggcctcacgccttaaggagaacatggaaaagctgacggaagagcgagatcaacggatcgcagcggagaatagggagaaggaacaaaacaagagattacaaaggcaactgcgcgacaccaaggaggaaatgggggaactggcccgcaaggaggccgaggcaagtcggaagaagcatgagctggagatggacctcgagagcctggaagctgcaaaccagagtctccaagccgacctgaagctcgcgttcaagaggattggtgacctccaggccgccatcgaggacgagatggaaagcgacgagaacgaggaccttattaatagcgaaggggatagcgatgtggatagcgaactcgaggatagggtggacggggtcaaaagttggcttagcaaaaacaaaggcccatccaaagcggccagtgatgatgggagcctaaagtcaagctctccaacatcttactggaagtcactggcccccgatagatctgatgacgaacatgatccgctagacaatactagtcgacctagatacagccattcatacctgagtgactccgacacagaggccaaacttaccgagaccaacgcttag

SEQ ID NO: 125485 - DNA, 6120 bp, synthetic construct
  misc_feature 1..6120: note = Description of Artificial Sequence: Synthetic coding sequence
  source 1..6120: mol_type = other DNA
atgttcaacctcatgaaaaaagataaagacaaggatggaggacggaaggagaagaaggaaaagaaagaaaaaaaagaacgcatgtcagccgctgagctgagatcattggaagaaatgagtttgaggagaggcttttttaacctgaatcgtagcagtaagcgagaatccaaaacacggttagagatatccaaccccatacccatcaaggtggcctcaggatctgacttgcacctgactgatatcgattctgacagcaacagagggtcggtgatattggacagcgggcaccttagcaccgcttcctctagcgacgacctgaagggggaagaaggaagcttccgtggatccgttctgcagcgcgcggcaaagtttggtagcctcgccaagcagaactcccaaatgatagtcaaaagattctccttcagccagcggtcgcgcgacgagtctgcctctgaaactagcaccccatcagagcacagtgctgccccttcgccccaggtcgaggtgagaactctagagggacagctggtacagcaccccgggccaggaattccaagacccggtcatcggtcacgtgctcccgaactggtgaccaagaagttcccagtggatctgcgcctgccccccgttgtacctttgcctcccccgaccctgagggagctggaactccagcgtaggcctacgggtgattttggcttctcgctgcgacggacaaccatgttggaccgcgggcctgaagggcaggcttgccggcgcgtcgtccatttcgcagaacctggcgcaggcaccaaggacttagccctgggattggtgcccggggatagattggtcgagatcaatggtcacaatgtggaatccaaatcaagagacgaaatagtcgagatgatacgccagtcaggcgattccgtccggcttaaggtgcagcccatccccgaactgtctgaacttagccggtcttggctccgttctggggaaggacctaggagagagcccagcgatgccaaaactgaggaacagattgccgcagaagaagcctggaatgagactgagaaagtttggctggtgcaccgagacgggtttagtcttgcctctcagcttaaatcagaagagttgaatctgcccgagggcaaggtaagagtaaagcttgaccacgatggggccatcctcgacgttgacgaagatgacgttgaaaaggctaatgctccctcttgtgacaggctggaggatcttgcctctctcgtctatctcaatgagagcagtgtgctccacacgttgcggcaacgctacggtgcatctctcctccacacatatgcaggtccctcattgttagtgctcggacctcgcggagcgcctgccgtgtattccgaaaaagtgatgcatatgttcaagggctgtaggcgagaggacatggccccccatatctacgctgtggcgcagaccgcctaccgagcaatgttgatgagtcggcaagaccagtcaattatactgctcggcagttccggatcaggcaagaccacgagctgtcagcatctggtgcagtatctagctactatcgcgggtatcagcggaaataaggtcttttcggtggagaagtggcaggccctttacacactgctggaggcctttggcaactcaccaacaattattaacggcaacgcgactagattctcccaaattctctcccttgacttcgaccaggccggacaggtcgcttcagcatccattcagacaatgcttctggaaaagctacgggtcgctaggaggccagcatcagaggccacattcaatgtcttctattacctactcgcttgtggagatggaacgctaaggaccgaactccatctaaaccaccttgctgagaataatgtgttcgggattgtcccgcttgccaaacctgaggagaagcagaaggccgcccagcagttctccaagctgcaggcagccatgaaggtgctcggaatttcccctgatgaacagaaggcctgctggtttatccttgccgccatttatcatctgggagccgctggagcaaccaaggaagctgctgaggccgggcgcaagcagttcgcaagacacgaatgggcacagaaggcagcatatctgctcggttgcagtctcgaggagttatcaagtgccatatttaagcaccaacataagggaggcacgctgcagcggtctacatctttccggcaggggcccgaggaatccggattgggggacggaactggacccaagctgagcgctctggagtgccttgaggggatggccgccggcctttattctgaactcttcacactcctcgtgagtctggttaatcgggcactaaagtccagtcagcacagcctctgcagtatgatgatagtagatacaccaggcttccaaaaccctgagcagggtggctctgcgagaggggctagcttcgaggaactatgtcataactacacccaggatcgcctgcagcgccttttccacgagcgaactttcgtacaggagttggaaaggtataaggaggagaacatcgaactggctttcgatgatctggagcctcctaccgatgacagtgtggcagcggttgatcaggcaagccaccagagccttgtgcgcagtctagcgcgtaccgacgaagcccggggtcttttgtggctgctcgaagaagaagcacttgtgcccggcgcatctgaagacactctgttggaacggctgttcagttattatgggccccaggaaggggataagaagggccagtctccgctgcttcacagctccaaacctcaccacttcctgctggggcactcccatgggaccaactgggttgaatacaatgtgactgggtggcttaactacacgaaacagaaccctgcgacccaaaacgctcctcgcctgttgcaggactcacagaaaaagattatctctaacttgtttctgggaagagccggctcggcaacagtgttatccggctccattgccggcctggaaggtggctcgcagttggccctgcgtagagctaccagtatgcgtaagacgtttaccacaggaatggcagctgtcaagaagaaatccctgtgcatccaaatgaagcttcaggtcgacgcactaatcgataccattaagaaaagcaagttgcactttgtgcactgtttcctacctgtggcagaaggctgggctggtgaacccagatcagcctcatcaagaagagtgagctcttcttcggaactagacctgccttcgggggatcattgcgaggccgggctgctgcagctggatgtgcctcttctgaggacccagctaagagggagccgcctgcttgatgccatgcgaatgtacaggcagggttatcctgaccacatggtgttctccgaatttcgacggcgcttcgatgtgctggcgccgcacttgactaaaaagcacgggcggaattatattgttgtggacgaacgccgcgctgttgaggaactcctggagtgcctggaccttgagaagtcctcctgctgcatgggactttctagggtcttttttcgggcaggtacattagcacggttggaggagcagagagatgaacagacatcccgcaacttgacactgttccaggccgcctgccgcggttaccttgcccggcagcacttcaagaagcgcaagatccaggacctagctatccgctgcgtccagaagaacatcaaaaagaataaaggtgtcaaggattggccgtggtggaagttatttacaacggtaaggcccctgattgaagttcagctatctgaagagcagatccgcaacaaagacgaggagatccagcagctgcgttcaaaactcgaaaaagctgaaaaggagaggaacgagctccgcctgaactcagaccgtctggagtcgagaatttctgaactcacatcagagctgaccgacgaacggaatactggagagtcggccagtcagctgctggacgcagagaccgccgaacggttaagggcggagaaagagatgaaggagttacagacacagtatgatgctctgaaaaagcagatggaagtgatggaaatggaagtgatggaggcaagactcatccgagccgccgagatcaatggagaggtagacgacgatgacgcagggggcgaatggcggctcaagtatgaacgcgcagtccgtgaagtggattttacaaaaaagcgcctgcagcaggagttcgaagataaactggaggtggaacagcagaacaaacgtcaactcgagcggcgcctaggggacctacaagccgattctgaggaatcccagcgagcccttcagcagctaaagaagaagtgtcagcgccttactgccgagctgcaggacaccaaattgcacctggaggggcagcaggtgcgaaaccatgagttagaaaaaaagcagcggcggttcgatagtgagctaagtcaggcccacgaggaagcccagcgggaaaagctccagcgcgaaaaattgcagagggaaaaggatatgctgttagcagaggccttctctctgaagcagcagctcgaggaaaaggacatggacatagccggcttcacgcaaaaggtggtaagtctggaggcagagctccaggatataagctctcaggaatcaaaggatgaagccagcttagctaaggtgaaaaagcagctaagggatttggaagcgaaggtcaaggaccaggaagaggagctggacgagcaggcaggtactatccaaatgctcgagcaggctaagcttcgcctggaaatggaaatggaacgaatgcgacagacacactcgaaggaaatggagtctcgcgacgaagaagtggaggaggcccgccagtcgtgtcaaaagaaacttaaacaaatggaagtccaactcgaggaagagtacgaagataaacagaaggtgctgagggagaaaagagaactggaaggtaagcttgcaacactttctgatcaggttaacagacgggatttcgagtccgaaaagcggctacgaaaagacctgaagaggacaaaagctctgctagccgacgcccagctaatgctggaccaccttaaaaactcagcaccctccaaaagagagattgcccagctcaagaatcagttggaggagtctgaatttacttgtgccgctgccgtcaaggctagaaaggctatggaagtggagatcgaggacctccacctgcagattgacgacatagcgaaagctaaaactgccctcgaggagcaactgtcacgccttcagcgggagaaaaatgaaattcagaatcgactcgaggaggatcaggaagatatgaacgagctgatgaaaaagcacaaggcggcagtggcacaagctagccgggatctggctcaaatcaacgacctgcaggcccagctggaagaagccaacaaggaaaaacaggagctgcaggagaagctgcaagccttgcagagccaggtggagtttctcgagcagtcaatggtggataagtcgttagtctcaaggcaagaggcaaagattcgggagcttgaaacaagactagaattcgagcggacccaggttaaacggttagagagtttggcctctcgattgaaggagaacatggagaagctgactgaggagcgggaccaacgcattgcagccgaaaatcgagaaaaagagcagaacaaacgactgcagaggcagcttagagacacgaaggaagagatgggagaattagcgagaaaggaggctgaagcctcaaggaagaaacacgagctcgagatggacctggaaagtctcgaagccgcgaatcagagcctgcaggcagacctgaaactagcttttaaacgtattggagatttacaagcagcaatcgaggatgaaatggaatccgacgagaacgaagacctgataaactctgaaggagacagcgacgtggatagcgaactcgaggaccgggtggacggcgttaagagttggctgtctaagaataagggcccatccaaagcagcctccgatgatggatcactgaagtcgagttctcccacctcatactggaagagcctagcacccgataggtccgatgacgaacacgatcctctggataacacgtctcgcccacggtactcccactcttatctgtcggattccgatactgaagccaaactcaccgagacaaatgcctag

SEQ ID NO: 125486 - DNA, 6009 bp, synthetic construct
  misc_feature 1..6009: note = Description of Artificial Sequence: Synthetic coding sequence
  source 1..6009: mol_type = other DNA
atgtttaatctaatgaagaaagataaggacaaagatggtggtcggaaagaaaagaaggagaagaaggagaagaaggaacggatgtccgccgccgagctacgctcactggaggagatgagcctgcgcagagggttcttcaacctgaataggtccagtaagagagagagcaaaactcgactcgagatttctaatcctatccccataaaggtggccagcggaagtgatctgcacctgactgacattgactctgattccaacaggggctctgttatcttggacagtggccacctttcaacagccagttccagcgatgatctgaagggagaggagggatcatttaggggatctgtgctccagagagctgcaaaattcggcagccttgctaagcagaacagtcagatgatcgtgaagaggttttccttctctcagcgcagcagagacgagagcgcaagtgagacgtcaaccccctctgagcacagcgccgcccctagtcctcaggtggaagtgagaacccttgagggtcagctggtccagcatcccggtcccggaattccacggcccggtcatcgatcccgtgcccctgagctggttacaaaaaaatttcctgtagacctgcgccttccaccggtcgtcccgttacctccacctactctgagagaactggaattgcaaaggcgcccaacaggtgattttgggttctctctcagaaggacaaccatgctggaccgcggccccgaagggcaggcatgtcggcgagtggtgcatttcgcagaacctggcgcagggactaaggacttggccctggggctcgtgcccggggatcggctggtcgaaattaatggccacaatgtggaatcaaaatctcgagatgagatagtggagatgatcagacagtctggcgatagcgttcgactcaaagttcagcccatccccgagctgtccgagctgagtcggtcctggctcagaagcggtgaaggcccacgacgggagcccagcgatgcgaaaaccgaagagcaaatcgccgcagaagaggcctggaacgagaccgagaaggtctggctggtccacagagacggcttcagcctggcctctcagcttaaaagcgaagaactgaacctgcccgaaggcaaagttcgagttaagctcgaccatgatggcgccattttggatgttgatgaagacgatgtggaaaaagccaacgccccttcttgtgatcggctagaagatctggcatcccttgtctacctcaacgaatcttcagtgctacataccttgagacaaaggtatggcgcctccctcctacatacttacgcaggaccctcactgttggttctggggccccgaggcgctccagcagtgtatagtgagaaggttatgcacatgtttaagggctgccgacgggaggatatggctccccacatctacgccgtagcccaaaccgcttatagggcaatgttaatgagcaggcaggaccaatctataatcctgctgggatcgagtgggagtgggaagaccacgagctgtcaacatctggtgcaatatctggctactatcgccggaatctctgggaataaagtcttttctgtcgagaagtggcaggctctttataccttattggaggcattcgggaactcccctacaataattaacggcaacgctactaggttttctcaaattctgtcactggatttcgaccaggccggccaggtggcctccgcaagtattcagactatgctacttgaaaagctcagagtagcccggagacccgccagcgaggctacgttcaatgtgttctactatctcctcgcctgtggagatggaaccctgcgtactgaactgcacctgaaccacctcgccgaaaataatgtgtttggaatagtgcctctcgctaagccggaggaaaagcagaaagctgcccagcaattcagcaaactacaggctgccatgaaggttctcgggatttccccggacgagcagaaggcttgttggtttattctagccgccatttaccatctgggcgccgctggcgctactaaggaagccgctgaggctgggcgcaagcagttcgcaagacatgagtgggcacagaaggcggcctatcttctgggctgttcccttgaggagctctcaagtgccatttttaagcatcagcacaagggggggacactgcaacgttcaacttcttttcgacagggtcccgaggaatcgggtctgggggacggcaccggacctaagctgtcggcattggaatgcctcgaaggcatggccgccggcttgtacagcgagttgtttactctgttggtgtccctggtgaacagggccctcaagtcaagtcagcactctctctgctctatgatgattgtagacactcccgggtttcagaaccctgagcaggggggctccgctagaggggcctcctttgaggagctctgccataactatactcaggatcggttgcagagattatttcacgaacgtactttcgtgcaggagctggagcgttacaaggaagaaaatattgagttggcctttgacgatctggagcctcctaccgacgacagcgtcgctgccgtggaccaggcctcccaccagtcacttgtcagatccctggccaggacagatgaagctcgcgggcttctgtggctgttggaggaggaagcactagtgcctggagcttctgaggacacgctgctggagagactgttttcatactatggaccccaggagggagacaagaaggggcagagtcccttactgcactctagcaaacctcaccatttcctgctggggcatagtcatggaactaactgggttgaatataacgtgacagggtggcttaattacacgaagcagaatcccgctactcagaatgctccacggctcttgcaggattcacagaagaagatcatctcaaatctgttcctgggcagggccggctccgcaaccgttctttctggctctatcgcaggactggaggggggttctcagctcgctctccggagggctactagtatgcggaagactttcacaactgggatggccgcagtgaaaaagaagagtctgtgcattcagatgaaactgcaggtggacgccctgatcgacactattaagaaatcaaagttgcatttcgttcattgttttctccccgtggccgagggttgggccggcgagcctaggtctgccagcagccggagggttagctcttcatccgagctagacctgccgtcaggtgatcactgcgaagcaggcttactacagcttgacgtgcccctgctgcgcacccagttaaggggtagcaggctgttggatgcaatgcgaatgtatagacagggctaccctgatcatatggtgttctcggagtttcgaagaagattcgacgtactcgctccacatcttactaagaaacacgggcggaattacatcgttgtggacgaaagacgggccgtcgaggagctgctcgagtgccttgatctcgaaaaatcttcttgctgcatgggactgtccagggtgttttttcgagcaggcacactcgctagactggaggagcagagggatgaacagacctctagaaatttgacgctttttcaagctgcatgcagggggtatctagcccgtcagcatttcaagaaaagaaagatacaagacctagctataagatgcgtgcagaagaatataaaaaagaataaaggtgttaaagactggccctggtggaagctcttcaccacagttcggccactaatcgaggtacaactgagtgaggagcagatccggaacaaggacgaagagatccagcagcttaggagcaagctggaaaaagccgaaaaagagagaaatgaactgcgccttaattctgaccgcctggaatcgcgtattagtgaactgacttcggagttgaccgacgagcgaaacacaggggagtcagcctcccaactcttagatgccgaaacggctgagcgcctgcgtgccgaaaaagagatgaaagagctacagacccaatacgacgctctaaagaaacagatggaagttatggaaatggaggtcatggaagcacgcctgattagagctgcggagatcaatggtgaggttgacgacgacgacgccgggggagagtggagactgaaatatgaacgggcggtgagagaggtggatttcacaaagaagagactgcaacaggaatttgaggataaactcgaggtggagcagcaaaataagcgccagctcgagcggaggctgggggacctgcaggccgacagtgaagagagtcaaagggcgttgcagcagctgaaaaaaaaatgccaacgccttactgctgagctgcaggataccaagctgcacctggagggccagcaggtgaggaaccacgagctagagaagaaacagcgcaggtttgattccgagctttcgcaggcacacgaggaagcccagagggagaagcttcaacgcgaaaagctgcaacgggagaaggatatgttgctggctgaggccttttctctaaaacagcagctcgaagaaaaagacatggatatagctggattcacacagaaggtagtttccctggaagctgaactccaggacatctcctctcaggagagtaaggacgaggctagcctcgctaaagtgaagaagcagttgagagatctggaggccaaggtcaaagatcaagaagaagaattggacgagcaggccggaactatacagatgctcgagcaactgaagcagatggaggtccagctggaagaggagtacgaagacaagcagaaggtgctgagggagaaacgggaactcgagggaaagttggctaccctttctgatcaggtgaacaggcgagatttcgagagtgagaagcgactcagaaaggaccttaagagaaccaaagcgctattggcagacgcccagctgatgctagatcatctcaaaaattcggctccctcgaagcgtgaaatcgcccagttaaagaaccagctggaggagtccgagttcacctgtgccgctgccgtgaaggcccggaaagctatggaggtggaaatcgaagacttgcacctgcagatcgacgacattgccaaggccaagaccgcactggaagagcagctatcccggctccaacgagaaaaaaatgagatccagaaccgcttagaggaagaccaggaggatatgaacgagctgatgaaaaagcacaaagcagcagtcgcccaagcgtcacgagacctggctcagatcaacgacttgcaggcccaattagaagaagccaataaggagaagcaggagctccaggagaagctgcaggccctgcagagtcaggtggagttcttagagcaatcaatggtggacaagtcattggtgtcacgacaggaggccaaaattagagaactcgagacgagactggagtttgagagaacgcaagtgaaaaggctcgagtcgctggcgtcgcgactcaaggaaaacatggagaaactgacggaagagagggaccaaaggatcgccgccgaaaacagagagaaagagcagaataaaagacttcaacggcagcttagggacactaaagaggagatgggcgagctcgctcgcaaagaggctgaggccagtaggaagaagcatgaactggagatggatctggaatccctggaggccgccaaccagagcctgcaagctgatctgaaattagccttcaaacggattggtgacctgcaggccgcaattgaagacgagatggagtccgatgaaaacgaggatctgatcaatagtgagggcgactcggacgtggactccgaactcgaagatcgagtcgatggggtgaaaagttggctatctaagaacaagggaccttcaaaagctgccagcgacgacggctccctaaagagttcttctccgacgagttattggaaatcgctggcccccgatcggtctgatgacgagcatgaccccttggacaacactagcagacccaggtattcccattcgtacctttcagatagtgacaccgaggctaagctgaccgaaacaaacgcatag

SEQ ID NO: 125487 - DNA, 2808 bp, synthetic construct
  misc_feature 1..2808: note = Description of Artificial Sequence: Synthetic coding sequence
  source 1..2808: mol_type = other DNA
atgagaatgtataggcaggggtaccccgatcacatggtgttctctgaatttcggcgccgattcgacgtgctagctccacacctgacaaagaagcatggtcgtaattacatcgttgtcgatgagagaagagcagtggaggaattacttgagtgcctcgacttggaaaagtcctcgtgctgtatgggcttatcaagggtattctttcgggcgggtacactagccagactggaagagcagcgtgacgagcagacaagtcggaacctcacattgtttcaggcggcctgtagaggatatctcgcgcgtcagcatttcaagaagaggaaaatacaggatctggccatccgatgcgttcagaagaacatcaagaagaataagggagtgaaggactggccctggtggaaactctttacaaccgttagacctctcattgaagtgcagctgagtgaagagcagattagaaacaaggatgaggagattcagcagctgcggagtaagctggagaaagccgaaaaagagagaaacgagctcaggctgaatagcgacaggctggaaagccgaatctctgaactgacgagcgaactgacagacgaaagaaacacaggcgagtcagcgtcccaattactcgatgccgaaacggccgagagactccgtgctgagaaggaaatgaaggagctgcagacccagtatgacgctctcaagaagcagatggaggtgatggaaatggaagtcatggaggcccgactgattagggccgccgagatcaacggagaagtggatgatgatgacgccgggggcgagtggcgacttaagtatgagagagccgtcagggaggtggatttcaccaagaagcggctccagcaggaattcgaggacaaactggaagtggagcagcagaataagaggcaattggaaaggagactgggcgacctccaggcagattctgaggaatctcaacgcgccctgcagcagctgaagaagaagtgccagagattgaccgccgaactacaagatacgaagctgcatctggagggccagcaggtccgtaaccacgaacttgaaaaaaaacagcgacgcttcgacagcgagctgagtcaggcccatgaggaggcgcagagggaaaaactacagagggaaaagctgcagagagaaaaggatatgctgctcgcagaagcgttcagccttaaacagcaattggaggagaaggacatggatattgctggctttacacaaaaagtggtttcactagaggcagaactccaggatataagctctcaggaatctaaggacgaggcctcgctggcaaaggttaagaagcaactgagggatctcgaggctaaggttaaggatcaggaagaagagttggatgaacaggccggcacaatccagatgttggagcaggccaaactgcggctcgagatggagatggagcgtatgagacagacccacagtaaggaaatggaatcgagagatgaggaggtcgaagaagctcggcaatcatgtcagaagaagctgaagcagatggaggttcagctcgaggaggaatatgaagacaagcagaaggtgctgagggagaaacgggagctggagggcaaactagctacactaagcgaccaggtgaacagacgcgactttgaaagcgagaagcgcttgagaaaagacctgaaaagaaccaaggcattgctggcagacgcccagctgatgctcgaccatctcaagaactctgcaccgtccaagcgcgagatcgcacagctcaaaaaccagttggaggagtccgaattcacatgtgccgcagcagttaaggctaggaaggccatggaagtggaaattgaagacctgcatttgcaaattgatgatatcgctaaagctaagacagccctagaggaacagctctcccgattgcaaagggagaaaaatgaaatccagaataggctggaggaggatcaggaggacatgaacgagctgatgaaaaaacacaaagcagcagtggcgcaggcttcccgcgatcttgcccagattaacgacctccaggcacagttagaggaagccaataaagagaagcaggagctgcaggaaaagcttcaggccctgcagtctcaggttgagtttctcgaacagagtatggtggataaatccctcgtgtcccgccaagaggctaagatccgggagctcgaaacccgcctcgaatttgagagaacccaggtgaagcgccttgaatcattagcatccaggctcaaggaaaatatggaaaagctgactgaagagcgggaccagcggatcgcagcagaaaatagagagaaagaacagaacaagaggctgcagcggcaactacgggataccaaggaggaaatgggggaattggcccgcaaggaggccgaggcctccaggaagaaacatgagctggagatggacctcgagtcattggaggctgcgaatcagtcgctgcaggcggatctaaagctggcttttaagaggattggagatctgcaggcagccattgaagacgagatggagtcagacgaaaacgaggaccttatcaattcagagggggactcggatgtggattcggagctggaggatagagtggacggcgtgaaatcctggctgtccaagaacaagggcccaagcaaggctgctagtgatgacggctccttaaagtctagttcacctacctcctactggaaatccctcgcacctgacaggagcgacgatgagcacgaccctttggataatacgtcaaggcctcggtacagtcatagctatttgagtgacagtgatacagaggccaaactgacagagaccaacgcctag

SEQ ID NO: 125488 - DNA, 963 bp, synthetic construct
  misc_feature 1..963: note = Description of Artificial Sequence: Synthetic coding sequence
  source 1..963: mol_type = other DNA
atgacattcgtgcttctttcctcaagtcagctggaagagcagctgtcccgcctgcagcgtgagaagaacgaaatccagaatcgacttgaggaggatcaggaggatatgaacgagctgatgaagaaacataaggctgcagtcgcccaggcatccagagaccttgctcagatcaacgatctgcaggcccaactggaggaggcaaataaagagaaacaagagctgcaggagaaactgcaggctttgcagtctcaagtggagtttctggagcagagcatggtggacaagagtcttgtatcacgccaggaggccaagatccgagagctagagacgagattggagttcgagagaacccaggtgaaaagactggagagcctcgcatcacgccttaaagagaacatggagaagctgacagaagagagagaccagagaatcgctgccgagaacagagaaaaagaacagaacaagcggctgcaacgccaacttcgggataccaaagaagaaatgggcgaattagcacgaaaggaagccgaggcgtccaggaaaaaacatgaactggaaatggacttagaaagcctggaagctgcaaaccagtccttacaggccgatctgaaactcgcctttaagcgaataggggacctacaggctgccatagaagacgagatggagtctgatgaaaacgaagatctgattaatagcgaaggagactctgacgttgacagcgagctggaggaccgggtggatggggtgaagagctggctgagcaagaacaaaggcccaagcaaagcagcttctgatgatggatccctgaaatcctcttcccctacatcttattggaagagcttggccccagatcgtagcgatgacgagcatgatcctcttgataacaccagccggcctcgctacagccattcctatctgtcagactcagataccgaagccaaactgacggaaacaaacgcttag

SEQ ID NO: 125489 - DNA, 7704 bp, synthetic construct
  misc_feature 1..7704: note = Description of Artificial Sequence: Synthetic coding sequence
  source 1..7704: mol_type = other DNA
atggccataagcagccggctagccctctgggagcagaagatcagggaggaggacaagtctccacccccttctagccccccacctctgttttctgttatccccgggggtttcatcaagcagcttgtgcgcggaaccgagaaggaagctaaggaagcccgacaacgcaagcagctcgctgtggccagccctgagagggagatcccagaaatctctatctctcagcccaactccaagtcttcttccggcacacgctccggcagccaacagatttctcaggacgatcagtcgtccagccccggtagcagcgatatactcggaaaagaatccgaagggtctcgctcccccgacccagaacagatgacatctatcaacggagagaaggcccaggaactcggctcttccgcaaccccaaccaagaagacagtgcctttcaagaggggggtgcgccgcggtgacgtgctcctaatggtggccaaactagatcctgattcggctaagcccgagaagacccacccacatgatgcaccaccatgcaaaacatccccacctgccaccgatactgggaaggagaagaaaggcgagacctccagaacaccttgcggaagtcaagcctccaccgaaatcctagctccgaaggccgagaaaacgcggacaggaggcctcggtgatcccgggcaagggaccgtggcgctaaaaaaaggagaggaggggcagagtatcgtggggaaagggctaggtactcccaagactacagagctcaaggaggccgagcctcagggcaaagatcggcaaggaacgagaccacaggcccaggggccaggggagggggtgcggcccggcaaagccgaaaaggagggggcagaacctaccaatactgtggaaaaagggaatgtgtctaaagacgtgggcagtgagggaaagcacgttcggccccagatacccggtaggaagtggggtggatttctgggccggcggtccaaatgggatggcccccagaacaagaaggataaagagggagtgctcctgtcaaaagctgagaaaacaggcgaaccccagacacaaatggagaagactagtcaagtgcagggcgaactgggggatgacctacgtatgggcgagaaggccggcgagctcaggtccactactggaaaggctggtgaatcttgggacaaaaaggaaaagatggggcagccacagggcaaatccgggaacgcgggggaggctcgttctcagaccgagaaaggatgtgaggccccaaaagaggttagtacaatggtggagtctcctgctgcacctgggaaagggggctggcccggtagtcgcggacaagaggctgaggagccatgcagccgagcaggcgatggcgcaggggctctagaaactgaactggagggcccctcacagccagccttagagaaggatgctgagagaccgcggatccgtaaggagaatcaagatggacccgccccgcaggaagaaggtaagggcggccagtctcgagatagcgaccaggctcccgaggatcgttggtacgaagctgaaaaagtctggcttgcccagaaagacgggttcacccttgcaacggtgcttaaaccagacgaaggcaccgccgatctcccagcaggtcgagtccggctctggattgacgccgataaaaccataaccgaggtggatgaggagcacgtgcacagagctaacccaccagaactggatcaggttgaagacttagcttcccttatttcagtgaatgagtcctcggttctgaatacgctgctccagcgctataaagcccagttgctgcacacctgcaccggccccgacttaattgtgcttcagccccggggaccttcggtcccaagcgctggtaaagtccctaaggggcgccgggacggcctgccagctcacataggctctatggcacagcgggcgtactgggcactgctgaaccagcggcgcgaccagtccatcgtcgccctcgggtggtcaggtgcaggaaagacaacttgttgcgaacaagtgctcgaacacctcgtggggatggctggctcggtggacggccgagtttcggtcgaaaagatacgagcaaccttcaccgtcctgcgcgctttcggcagcgtgagcatggcccatagccgcagtgcaacgagattttctatggttatgtcactggactttaatgccactggacgaataactgccgctcagctacagacaatgctgctcgagaagtcccgtgtcgctagacagccggagggagaatcaaactttcttgtattttctcagatgctggctggactggatctcgatctgagaacagagttaaaccttcatcagatggcggattcctccagctttggaatgggtgtgtggtccaaacctgaagacaaacagaaggcagccgccgccttcgcgcagctgcagggggccatggagatgctcggtatctccgagtccgaacagcgagccgtttggcgtgtccttgccgccatttaccatctaggcgcagctggtgcctgcaaggttggcagaaagcagttcatgcgatttgaatgggcaaattacgcggctgaggcccttggatgcgaatacgaggaactcaatacagcaactttcaaacaccatcttaggcaaataatccagcagatgaccttcggcccttcccgttggggactcgaagacgaagagacaagttccgggctcaagatgactggtgtggactgtgtagagggcatggcaagcggcctctaccaggaactgttcgcagctgtggtgagcctgatcaaccgcagcttctcttctcatcatctgagcatggccagcattatggtagttgactccccaggctttcagaatccccgccatcagggaaaggatcgggcggctacctttgaggaactatgccacaattacgctcatgagcggctccagctcttgttttatcaaagaacctttgtttccactctccagaggtaccaggaagagggagtgcctgtccaatttgacctccccgatccttcacccggtaccaccgtggccgtcgtggaccagaacccatcccaggtgcgacttcctgccggcgggggagcccaggacgccagaggcctattctgggtcctcgatgaagaggtgcatgtggaagggtcgtcagattctgtagtactcgagcgactgtgtgccgcttttgagaagaagggcgccggaacagaaggaagttcagctcttcgcacttgtgaacagccactccagtgtgagatcttccaccagcttggatgggaccctgtgagatacgatctcaccggttggcttcatcgggccaaacccaatctcagcgccctggatgctccgcaagtcctccaccaatctaagcgtgaggagctccgttcactcttccaagctcgtgcaaagctgccccctgtgtgtcgtgccgtcgccggtctggagggaactagccagcaggcccttcaaagatcgagaatggttcggcgtaccttcgcaagtagtctggctgccgtcaggagaaaggcaccctgcagccaaattaagctgcagatggatgcactgacatcaatgataaagcggtccagactgcacttcattcactgtctggtcccaaatcccgtggttgagtccagaagtggacaagagagtccgcctccccctcagccgggtcgggataaacccggagccggcggtcccctggcactcgacatccccgccttaagagtgcagctggcaggcttccatatcctagaagcgctgagacttcatcgaacaggttacgctgatcacatgggacttacacgattccgtcgacagtttcaagtgctcgacgccccactgctcaaaaaactgatgtccaccagcgagggtattgacgagcgcaaagcagtagaggagctgctcgaaacccttgacttagagaagaaggccgttgcggtcggccacagccaggtgttcctgaaggctggagtcatcagccgcctggaaaaacagagggaaaaattagtgagtcagtcgatagtcctgtttcaagcagcttgcaagggcttcctttcaaggcaggagttcaagaaactgaaaatcagacgcctagccgctcagtgtattcagaagaatgtggctgtctttcttgcggtcaaagattggccttggtggcagctcttggggtcccttcaacctctcctgtcagcaaccatcggcacggagcagctgagagctaaagaagaggaactcacgactctgagacgcaagctggaaaagagtgagaagcttaggaatgagctgagacaaaatactgaccttctcgagagtaagatagccgacctgacctctgatctggcagacgaacgttttaagggcgacgtagcctgccaggtactggaaagcgagcgggccgagcgcctgcaggcattccgcgaagtgcaggaactaaaatccaagcacgaacaggtgcagaagaaattgggtgatgtcaataaacagcttgaggaggctcagcaaaaaattcagctgaatgatctagagcggaatcctacagggggagccgatgaatggcagatgcggttcgactgcgcccagatggaaaatgagtttcttagaaaaaggctgcaacaatgtgaggagagattggatagcgaactcacagctagaaaagagctggagcaaaagctgggggaactgcaaagtgcctatgatggagccaagaaaatggctcaccaactaaaacgtaagtgtcaccatctgacttgcgatctggaagacacgtgcgtgctgctggagaaccagcagagtcgcaaccacgaactggaaaaaaagcagaagaaatttgatctccagctagctcaagccctgggggaatctgtctttgaaaagggtctgcgggagaaagtgacccaggaaaacacatccgtaaggtgggaacttggccagttacagcagcagcttaagcagaaggaacaggaggccagccagctgaagcaacaggtggagatgttgcaggatcataagagggaactgttgggctcacctagtcttggcgagaattgtgtagctggcctaaaagaaaggctgtggaagctcgaatccagcgcccttgagcagcaaaagatccaaagccaacaggagaacaccattaaacagctggaacagttgcgccaacggttcgagcttgagattgagaggatgaaacagatgcatcaaaaagatcgggaagatcaggaggaggagctagaggacgtgcggcagagctgtcagaaaagattgcatcagttggagatgcagctggaacaagagtacgaagaaaagcagatggttctgcatgagaagcaggacttagagggattaattggcaccctgtgcgaccagatcgggcatcgagacttcgacgtcgagaaaagattaagaagggacttacgaagaacacacgccctgcttagcgatgtgcagctcctgctgggtaccatggaggatggtaaaactagcgtctcaaaggaggaactggaaaaggttcacagccagctggagcaatctgaagccaaatgcgaagaagcgcttaagacccagaaggtcctgacagcagatctggaaagcatgcattctgaacttgaaaacatgactagaaataaatcattggtggatgaacagctgtacaggctgcaattcgagaaggcagacctcttgaagcggatagatgaagatcaggatgaccttaatgaacttatgcagaagcacaaagatctcatcgcgcagtctgctgctgatatcggacagatacaagagctccaacttcagctagaagaagccaagaaggagaagcataagctccaggaacagctgcaggtggctcagatgcgcatcgagtaccttgagcagtctacagtggatcgtgcaattgtgagtcgacaggaagcggtgatttgcgacctcgagaacaagacagagtttcagaaggtgcagatcaagaggttcgaggtgctcgtaattcggctgagagattccctgatcaagatgggtgaagagctctcccaggctgcaacttctgagtctcaacagagggagagctcgcagtactaccaacggcggctcgaggagctcaaagcggacatggaagagctggtccagcgcgaagcagaggcctctagaaggtgcatggagcttgaaaagtacgttgaggagttagccgcagttaggcaaacccttcagactgatcttgaaacgagtatacgtaggatcgccgacctacaggcggccctggaagaagttgcatcttccgattctgataccgagagcgtgcagaccgccgtcgattgtggctcgtccggccgaaaggagatggataatgtatctattttgtcttcacaaccggaaggctcactccaatcttggctgtcatgcaccctgagtctcgctaccgacacaatgcgaactccaagccgccagtccgccacaagctctcgcattctgtcacccaggattaatgaagaggcaggagatacagagcggacgcagagcgccttggctctgagccgagcacgttccaccaacgtgcatagtaagacctctggggataagccagtgagccctcatttcgtgcgacgccaaaaatactgtcacttcggcgacggggaggtgctggccgtgcagcgcaagtcaactgagcgccttgaaccagcaagctcacctttggcttcacggtccaccaacactagccccctgtctcgggagaagctgcccagcccatcagccgcgctgtccgagttcgtggaaggactccgccgcaaaagagcacagcgcgggcagggctcaactttaggtcttgaggactggccgaccctgcctatttatcagactacgggtgctagcaccctgcgccgcggccgcgcaggatcagatgaaggtaatctctctctgcgagtaggcgctaagtctccactggagatcgagggggctgccggcggcctgctgcgatccacctcccttaagtgcatcagttctgatggggtgggcgggactactctactacctgagaagtctaaaacacagttttcatcctgtgaatccctcctggagtcccggcctagtatgggacgcaaattgtcgtcaccaacaactccccgcgacatgcttctgtccccaaccctgaggccaaggcgaaggtgcctggaatctagcgtggatgatgcaggttgccctgatttgggaaaggagcctttggtgtttcagaacagacagttcgctcacctaatggaagagcccctgggatccgaccctttcagttggaaactaccttctctcgattacgaacgcaaaaccaaggtggactttgacgacttcctgcccgccatccgcaagccccaaacacctacatctctggcggggagcgctaagggcggacaggatgggtctcaaagaagctcaattcattttgagactgaggaggccaacagatcttttttatctggaatcaagactattcttaaaaagtccccagagcctaaagaggacccggcccacctaagcgattcttcttcttccagtggatccatcgttagctttaagtctgccgattccatcaaatccaggccaggcattcctcgtctagccggggatgggggggaaaggacctctccagaacgtagggagcccggtactggcagaaaggatgatgatgtggcatcaattatgaaaaaatatttgcaaaagtag

SEQ ID NO: 125490 - DNA, 7707 bp, synthetic construct
  misc_feature 1..7707: note = Description of Artificial Sequence: Synthetic coding sequence
  source 1..7707: mol_type = other DNA
atggccatctcctccagactggccttgtgggaacagaagattagggaggaagataaatcacccccaccctccagtccgccacccttattcagcgtcattcccggcggctttataaaacaattagtccggggaacagagaaggaagctaaagaggcgcggcaacgaaaacagctggcagtggcttcacccgaacgcgagattccggagatctctatcagccaaccaaactctaagagcagtagcggaactcgctctggatctcaacagattagtcaggatgatcagagctcatcccccggctcttcagatattctgggcaaagaatctgaggggagcagatcaccagacccggaacagatgaccagcatcaatggagagaaggcccaggagcttgggtccagtgccacccccactaaaaaaactgtgcccttcaaaaggggggttagaaggggagatgtgcttctgatggttgccaagctggatccggatagcgccaaaccagagaagacacatccacatgatgcccccccgtgcaaaacttctccacctgctacagatactgggaaagagaaaaagggcgagacaagccgcactccatgtggctcccaagcttctaccgagatcctcgcccccaaagccgaaaagacccgcacaggaggcctgggggatcctgggcagggcaccgtggcattgaaaaagggggaagaagggcaatccatcgtgggaaaaggtctcgggaccccaaagacaaccgagctgaaagaggcagaaccacaggggaaagatagacaagggacgagaccgcaggcccaaggcccaggggagggcgtgcggccggggaaggctgaaaaggagggggccgagcctactaacacagtggaaaagggaaacgtgagtaaggacgttggctcagaagggaaacatgtaagaccccagatcccgggacgaaagtgggggggctttctagggaggaggagcaagtgggatggtccacaaaataagaaggataaggagggcgtcttactgtcaaaagctgagaagaccggtgagccccagacccagatggaaaagacttcacaggtacagggtgagcttggcgacgacctgcggatgggagagaaggctggcgaactacggagcaccactggaaaggccggtgagtcatgggacaagaaggagaaaatgggacaacctcagggtaagtcgggaaacgccggggaggcgaggtcccagacagagaaaggatgtgaggccccgaaggaggtctctacaatggtcgaatcccctgccgccccagggaaaggcgggtggccaggcagtcggggccaggaagctgaagaaccttgttccagggcaggggacggcgccggtgcactcgagactgagttggagggccccagccaacccgccttggagaaggacgctgagcgacccaggatcaggaaggaaaatcaggacggtcccgccccgcaggaagaggggaaaggcgggcagagccgggatagcgatcaggccccagaggacagatggtatgaggcagagaaggtgtggctagctcaaaaggatggattcaccctggcgactgttctcaaacctgacgagggaaccgccgatctgccagcaggccgggtgcgtctgtggattgacgctgacaagacaatcaccgaggttgatgaggaacacgtgcatagggctaatcccccagagttagaccaggttgaggacctggctagcctcatcagtgtcaatgaaagttctgtgctgaatacgcttttacagcgctataaggcccagttattacacacttgtacgggaccagatttgatcgtgttgcagccccgaggaccctccgtccccagcgctggtaaagtgcccaaaggacgcagggatgggctgccagctcatatcggttcaatggcacagagagcctactgggccctgctaaatcagcggagggatcaaagtattgtagccttgggctggagcggtgccggcaaaactacctgctgtgagcaggtgctggaacatctggtgggcatggcaggcagtgtcgacgggcgtgtttccgttgagaaaatccgagccacatttactgttctgagggcgtttggctctgttagcatggctcatagtcggtcagctactcggttctccatggtaatgagcctcgattttaacgcaacaggtcgtatcacagctgctcaactccagactatgttgctggaaaagagcagagttgccaggcagccagagggcgagagtaattttctggtgttcagccagatgctcgccggactcgatcttgatctccggacagagctcaatctacaccagatggcagatagcagtagcttcggaatgggggtgtggtccaaacccgaggacaagcaaaaggcggcggctgcctttgcgcaattgcaaggcgctatggagatgcttggcatcagtgagagcgaacagagagccgtatggcgagtcctggctgccatctaccaccttggggccgctggagcctgcaaggtggggcggaagcaattcatgagatttgagtgggctaactacgcagctgaggcccttggatgcgagtatgaggagctcaacaccgcaacatttaaacaccatctgaggcagatcatacagcagatgacctttggcccctcccgttgggggttggaagacgaggagacctcgagcggcctcaaaatgaccggtgtggactgcgtggaggggatggcgtccggactttatcaggagttgttcgccgcagtcgttagcttaattaacagatcattttcttcccatcacttatcaatggccagcatcatggttgttgacagccccggatttcagaatccacggcaccagggaaaggatagggcagctacttttgaggagctctgtcacaactatgcccatgagcggttgcagctgctgttttaccagcgcacctttgttagcacccttcagaggtaccaggaagaaggagtccctgttcagttcgatcttcccgaccccagtcccggcactacagtggccgtagtggatcagaatccctcccaacaagtaaggctgccagctggcggaggggcccaggatgccagaggactgttttgggtgctggatgaggaagttcacgtggaaggcagcagtgactcagtcgtgctcgaacgtctgtgcgccgccttcgagaagaagggcgccggaacagaaggtagcagcgcattacggacctgcgagcagccccttcagtgtgaaatcttccatcagctcggttgggacccagtacgctacgatctcaccgggtggttgcaccgggccaaaccaaatctcagcgctctggacgcacctcaggtgctgcatcagtcaaagcgcgaagagctgcgcagcctctttcaggctcgggcaaagctgccgcccgtgtgtcgggcggtggctggccttgaggggacctcccagcaggccttgcaaagatctcgcatggtaagaagaactttcgcctcatcactggccgctgtgcgtcgtaaagcaccttgcagccagattaagttgcaaatggacgccctcacgtccatgatcaagcggtccagacttcactttatccactgtctggtgccaaacccagttgtcgagtcgaggagtggccaggagtctccccccccgcctcagccaggccgtgacaagcctggagctggaggcccactggccttggacatccccgcgctaagggttcaactagctgggttccatatactagaagctttgagactccaccgcaccgggtacgccgatcacatggggctgactaggttccgcaggcagttccaggttttggacgcgcccctgctaaagaaactgatgtccacaagtgaaggcatcgacgaacgcaaggcagtggaggagttgctggaaaccctcgatttagaaaaaaaggctgtcgctgtgggccatagccaggtgtttctaaaagccggagtgattagtcgtttggagaaacagcgagagaaactcgtgtctcagagcatagtgttattccaggcagcgtgtaagggattcctgagcaggcaagagttcaagaagttgaaaattagacggctggctgctcagtgcattcaaaagaatgttgctgtgttcctagctgtaaaggattggccatggtggcagcttcttggcagccttcaacctctcctctcggccactatcgggaccgaacaattgagggcaaaggaggaggagctgactacgctgcgccggaaactagaaaaaagcgagaagctcaggaatgagctccgccaaaataccgacctgctggagagtaagatcgctgatctcacctccgacctcgctgacgagcgattcaagggagatgttgcttgtcaggtgctggaatctgagcgtgctgagaggctgcaggctttcagggaagtgcaggagcttaagagcaagcacgagcaggtgcagaagaaactgggcgacgtgaacaagcaactggaggaagcacagcaaaagattcagctgaacgacttagaacggaaccccactggcggagctgatgagtggcagatgcgtttcgattgcgcccagatggagaatgaattcctgcgaaaacgccttcaacagtgtgaggagcgactcgacagcgagctgacagctagaaaagagctagagcaaaagttgggggagctgcaatcggcttatgatggcgcaaaaaaaatggctcatcaactcaagcgcaaatgtcaccatctgacttgcgatctcgaggatacttgtgtactgctagagaatcagcaatcaagaaatcacgaactggagaaaaagcagaagaaattcgacctccaactggcacaggccttgggggagagcgtgttcgaaaagggcctccgcgaaaaggtcacccaggagaatacctccgtgcgttgggagctgggccagctacaacagcaactgaagcaaaaggaacaggaagcctcccagttaaagcaacaagtggagatgttgcaggaccataagcgggagctgttagggagccctagtctcggagagaattgcgttgcaggactgaaggagcgcctgtggaagctcgaatccagcgcactggaacaacagaaaatacagagccagcaagagaataccatcaagcagctggaacagctgcggcagcgttttgagctcgagatcgaacgtatgaagcagatgcaccaaaaggatagggaggatcaggaagaagaattagaagatgttcggcagtcctgccagaaacggctgcaccagctcgaaatgcaactcgaacaggagtatgaggagaagcagatggtcctacatgagaagcaggatctcgaaggactcatcgggaccctttgcgatcaaattggtcatcgcgattttgatgtggagaagcggttacggcgcgatctgcggcggacccacgcacttctatccgacgtccagctacttctcggaactatggaagacggtaaaacgtccgtcagcaaagaagaactcgaaaaggtgcacagtcagctagagcagagcgaggcgaagtgtgaggaggcgttgaagacacagaaagtactaactgctgacctcgaaagtatgcatagcgaattagagaacatgaccaggaataaaagcctggtggacgagcagctttatagactgcagttcgagaaggccgacctccttaaaagaatagacgaggatcaggacgatctgaatgaactgatgcagaagcacaaggaccttatcgcccagtccgccgcagacattggccagatccaagagctgcagcttcagctagaagaagctaagaaggagaaacacaaattgcaggagcaattgcaagtggctcaaatgagaattgagtatctggagcagtctaccgtggatagggcaattgtatcccgccaggaggctgtaatctgcgacctggaaaacaagacagagtttcaaaaggtgcagataaagcgattcgaagtccttgtgattaggctgcgcgacagtttaattaaaatgggggaggaactctctcaagccgcaacatccgagagccagcaacgagagagttcccagtactatcaacggcgactggaggaactgaaggctgatatggaggaactggtgcagagagaggccgaagcatcccgcagatgcatggaactagagaagtatgtagaggagctcgccgcagttaggcagacactgcagactgatctggaaacctcaattcgcaggatcgcggatctccaagcagcactcgaggaagtggctagctccgactcagacactgagagtgttcagactgctgttgattgtggttcatctggtaggaaggagatggataatgtgtccatcctctcctcccagccggaagggtctcttcagtcatggctgtcttgcacactgtccctggctactgatacaatgcgcaccccaagtcgccagagtgccacttccagccgcatactctctcctaggattaatgaagaagccggtgacacagagcgaacacagtccgcactggccctctcaagagcccgctccactaacgtgcattccaaaacttccggggacaaacccgtgtctccacatttcgtgcgtcgacagaaatactgccacttcggagatggcgaagtgctcgctgtgcagagaaagtctaccgaacgactagagcccgccagctcccccctggcgtctaggagtacaaacacaagcccactgagcagggagaagctgcccagtccttccgccgccctctcggagtttgttgaagggctgcggcgtaagagagctcagagaggacagggaagtacactgggattagaggattggcccaccttgcccatttatcagaccactggagcgagcacccttaggcgtgggcgagccggatcagatgaaggaaacctcagtctcagggtaggcgctaagtcgccactggagatcgagggagccgccgggggcttgttgcgttctacttccttgaaatgtatttcttctgacggagttggaggcaccactctcctgcctgagaagtctaaaacgcaattttcgtcttgcgagtccttgttggagtccaggccgtccatgggacgcaagctgtccagcccaacaacgcctagggatatgctgttaagcccgactcttaggccgcgacgaagatgcttggaatcttcagttgacgacgctggctgccccgacctcggaaaggaaccgctggtgttccagaatcgtcagtttgcccatttgatggaagagcctctgggatctgacccattttcctggaagctaccttcattagattatgaacgaaagaccaaggtcgactttgatgattttctgccggccatacgtaagcctcagacaccaacaagcctggctgggagcgcaaagggaggccaggacggaagccagaggtcatcaatccacttcgagactgaagaggccaacaggagtttcctctctggtattaaaacgatcctaaagaagagcccagagcccaaggaagaccccgcccacctgtctgacagcagctcatcttctggctccatcgttagcttcaaatccgccgattcaatcaaatcgagacctggaatacctcgcctagctggagatggcggcgaaagaacctctcctgaacgtagagaaccagggacagggaggaaggacgacgatgtggcaagcattatgaagaagtatctccaaaaatag

SEQ ID NO: 125491 - DNA, 7704 bp, synthetic construct
  misc_feature 1..7704: note = Description of Artificial Sequence: Synthetic coding sequence
  source 1..7704: mol_type = other DNA
atggcgatctcatctaggctggccctgtgggaacagaagattcgtgaggaggataagagtcccccgccatccagcccaccgcctctattctcggtaattccaggcgggttcatcaaacagttggttagaggtacagaaaaagaagcaaaagaggcaaggcagaggaagcagctcgcagtagcgagcccagaacgcgagattccagaaattagcatttcccagccaaactcaaaaagctcttccggcacacggagcggctcccagcaaattagccaagacgaccagagctcttcacctggctcatccgacattctagggaaggagtccgagggctctcgcagcccagacccggagcagatgacaagcatcaatggcgaaaaggctcaggagctgggaagcagcgccacacccaccaaaaagacagtgccatttaagagaggagtcaggcgtggagatgtgttgctcatggtcgctaaattggatccagatagcgctaaacccgagaaaacccatccacatgatgctccaccatgtaaaactagtcctccagccaccgataccggtaaggagaagaaaggagaaacgagccggaccccctgtggctcacaggcctcaacagagattctagcccccaaggctgagaaaacacgcactggaggtctgggcgacccaggccaaggaacagttgctttgaaaaagggggaggagggccagagtattgttgggaaaggccttgggacacccaagaccaccgagttaaaggaggctgagccccagggcaaggaccggcaggggacacgccctcaggctcaggggcctggagaaggtgttaggcctggaaaggcggaaaaggagggcgccgaaccaacaaacaccgttgagaaagggaatgtgtcgaaagatgtgggaagcgagggcaaacacgtccgaccacagatacctgggaggaaatggggaggattcctgggccgaaggtcaaagtgggacggtccacaaaataagaaagataaggagggcgtacttctcagcaaagccgagaaaacgggcgaaccgcagacacagatggaaaaaacctcccaggtgcagggggagctcggcgacgaccttagaatgggtgaaaaggctggagagctgcggagtaccactgggaaagcaggcgaaagctgggataagaaagagaagatgggccagccccaggggaaatcggggaatgccggagaggcccggagtcagactgagaaaggctgtgaggcgccgaaagaggtaagtactatggtagagtcccctgccgcccctggcaaaggtggatggcccgggtctagggggcaggaggctgaagaaccatgtagtagagcaggcgacggtgccggcgcgctggagacggaacttgagggccctagtcagccagccttggaaaaggacgcagaaagaccccgcatccggaaggagaatcaggacggacctgcaccccaggaagagggcaagggtgggcagtctagagactccgatcaagccccggaggaccgctggtacgaggcagagaaggtttggcttgcccagaaagatggatttacattggccacagtcctcaaacccgatgaagggaccgccgacctgccagccggtagagtgagactgtggatcgatgcagacaagacaatcacggaggtcgatgaggaacacgtgcacagagcaaaccctccagaactcgatcaggtcgaggacctggctagccttatctctgtgaatgaaagcagcgtcctcaacaccctcctgcaacgctataaggcccagctcttgcatacctgtactggacccgacttgattgtcctccagccccgcggaccctcagtgcctagtgccggcaaggtacccaagggcaggagagatggcttgccggcccacattgggagcatggcccagcgtgcttattgggccctgcttaatcagaggagagaccaatccatagtcgctctcggatggtccggagctggaaaaaccacctgctgcgaacaggtgttggaacacctggtcgggatggccggcagcgtagacggcagagtctcagttgagaaaataagagcaacgtttaccgtcctgcgagcgtttggcagcgtcagcatggcccactcccgttccgcgacgaggttctccatggtgatgagtctagactttaatgccacggggaggatcacagccgcacagctgcaaaccatgcttctggagaaaagtagggtggctagacaaccagagggcgagtctaactttctggtttttagccaaatgctggcaggactcgacttagaccttcggaccgaactgaacctacaccaaatggccgatagcagcagcttcggaatgggtgtttggtccaagcccgaagataaacaaaaagccgccgctgcgttcgctcagctccagggggccatggaaatgcttggtatttcggagtctgagcagagagccgtctggagggtcctggccgcaatctatcatctgggggccgccggcgcatgcaaggtcgggcggaaacaattcatgagatttgagtgggctaattacgctgcagaggcgctgggttgcgaatatgaagagctgaataccgccaccttcaagcatcacttacgccagataattcagcagatgacattcggcccttcacgctggggactggaagatgaggaaactagctcgggccttaagatgaccggggtcgactgtgttgaaggcatggcctcaggtctctatcaggaactctttgccgccgttgtatcattgatcaaccgatctttctcttcgcatcatctttccatggcttctatcatggtcgtggacagtcccggttttcaaaaccctcgtcaccaggggaaagaccgggctgccacttttgaagagctctgtcataactatgcccacgaacgattgcagctgctgttttaccagcgaacctttgtcagcacccttcaaagatatcaagaagagggtgtgccagtgcagttcgacctccctgacccaagccctgggacaaccgtggccgtggttgatcaaaatccttcgcaggttcgcttgccagctggaggtggggctcaagacgcacgcggccttttctgggtgctggacgaggaagtgcatgtggagggcagtagcgactcagtcgtgctggagaggctctgtgctgcatttgagaagaaaggcgccggaactgagggaagcagcgctctgcgcacatgtgagcagcctttgcagtgcgaaatcttccatcaattggggtgggaccccgtccgatatgacctaaccgggtggctgcacagggcaaagcccaatctttctgcactggatgcaccacaggtgttgcatcagagtaaacgggaggagttgaggtccctattccaggcccgagccaagttaccaccagtttgcagggcagtggctgggctcgagggcacatcccagcaggcgcttcagagaagtagaatggtgagacgtactttcgccagctcgctcgccgcagtgcgtcgaaaggctccttgctcccagattaagttacaaatggacgcacttacgtctatgataaaaagatcaaggcttcacttcattcactgcctggtgcctaatcccgtggtcgaaagcaggtccgggcaggagtccccacccccccctcagccaggtagagacaagcccggagccgggggtccactcgcactcgatattccagctttgcgtgtccagctggccgggtttcatattctggaggcactgaggttacaccggactggttacgcggatcacatggggctgacccgctttcgccgccagttccaggtacttgatgcccccctgctcaaaaaacttatgagtacatcagagggcattgacgaacgcaaggcagttgaagagctgcttgagaccctggatctagagaaaaaggccgtagcggtggggcactcgcaggtttttcttaaagctggcgtaatctcgcgcctagagaagcagcgggagaagttagtgtcccagtcgattgtactattccaagcagcctgtaagggattcttatcacgccaagaattcaagaagctcaagattcggaggctagcggcccaatgcattcagaagaatgtggctgtgtttcttgccgttaaggactggccttggtggcaactcctcggtagcctacaacccctgttaagcgccaccattgggactgagcagctgagggctaaagaggaggagcttacgaccttgcgcaggaagctggagaaaagcgagaagctgcggaatgagctgcgtcagaataccgatctgctcgagagcaaaattgctgatctgacgagcgatttagctgacgaaagatttaagggagacgttgcgtgccaggtgctggagagtgagagggcagaaaggctgcaggccttccgtgaagtccaagagctcaagagcaagcacgaacaagtgcaaaaaaagttgggagatgtgaataagcaactggaagaagcgcaacaaaagattcaactcaatgaccttgagcgaaacccaactggaggggcagatgagtggcagatgaggttcgattgtgcccagatggagaatgagttcctccgaaagagactacagcagtgtgaggaaaggcttgatagtgagctgaccgccagaaaggagcttgagcaaaagctgggtgaactgcagtccgcttacgacggggcaaaaaagatggcccaccaactgaagagaaaatgccaccacttgacttgcgaccttgaggacacatgtgtcttgctggaaaatcagcagtcgaggaaccatgaacttgagaagaaacagaagaaatttgatctgcagctggcgcaggcgctgggagaaagtgtgttcgaaaaaggcctgcgcgaaaaagttacccaggagaatacatccgtacgttgggagctgggccagctgcagcagcagttgaaacagaaggagcaggaagccagccagctcaaacagcaggtggaaatgctgcaagatcacaaacgcgagctcctgggttcaccttcactgggggaaaactgcgtcgcaggactgaaagagcggctgtggaagctcgagtcaagtgccctggaacagcaaaagattcagtcccagcaagaaaacaccataaagcagctcgagcaactgaggcagcgcttcgagctggaaattgaacgaatgaaacagatgcaccaaaaagatagggaggaccaagaagaggagctggaagatgtcagacagtcttgccaaaagcgcctgcatcagttggaaatgcagctcgaacaggagtacgaagagaagcagatggtcctgcatgagaagcaggaccttgaggggttgatcggaacactgtgtgaccagattggccacagagatttcgatgtggagaagaggctgcggcgagacctgcgccggacacacgcccttcttagcgatgtgcagctgcttctcgggacgatggaggatggtaaaacgagtgtgagcaaggaggaactggagaaggtccacagccagctagagcagtcagaagcgaaatgcgaagaggctctgaaaacccagaaagtccttacagctgatctcgagtctatgcacagcgagttggaaaatatgacgcgcaacaaaagcctggttgacgagcagctctaccgccttcaattcgaaaaggctgacctcctaaagcggattgatgaggatcaagacgatctgaatgaactgatgcaaaagcacaaggacctgattgctcaaagtgccgccgatattgggcagatacaggagcttcagttgcaacttgaggaggcaaaaaaggaaaaacataaattacaggagcagctgcaggtggcccagatgaggattgagtatctcgaacagtctacggtggatcgtgcaatcgtgagcaggcaagaggccgtgatttgcgacttggaaaacaaaaccgaattccagaaggtgcagatcaaacgttttgaagtactggtgattaggctgcgcgattccctgattaaaatgggcgaagagctcagccaagctgcgacctctgaatctcagcagagagaatcctctcagtactatcagagaagactagaagaactgaaggccgacatggaagagctcgtgcaaagggaggccgaagctagcaggcggtgtatggagctggaaaagtatgtggaagagcttgccgcggtacgacagaccctgcagacagaccttgaaacatctattcgccgtattgcggacctgcaagccgctctggaggaagtcgccagctccgatagtgacacagagtcagtgcaaaccgctgtggactgcggtagtagtggccgcaaggagatggacaatgtgtccattctaagttcccagcccgaggggtctctgcagtcatggctcagttgcacactgtcccttgcaacagacaccatgcgcactccttcaagacagagtgccacgtcctctcggatactttcgccaagaatcaacgaggaagcgggagacactgaacggacacagtctgcactggcactgagtcgcgcccgcagcaccaatgtgcatagtaagacctctggagacaagccagtctccccccattttgtccgcagacagaaatactgtcacttcggagacggggaagtgctggctgtccagaggaagagcacagaaaggctggaacctgcctccagtccgctggccagccgtagtaccaatacaagtcctctttcccgggaaaaacttccatctccttccgcggcgctgagtgaattcgtggagggcctgaggcggaaacgcgcacaacgcggccagggctctactctcgggttggaagactggcctacactccccatctaccaaaccaccggagcctccacattgcgcagaggtcgcgctggttccgatgaggggaacttgtccctgcgggtaggagcgaagtctccactcgagatcgaaggagcggcgggcggactactgcgtagtacaagcctgaagtgcattagctctgatggcgtaggtggaacgacactgctccctgagaaaagtaaaacgcagttttcctcctgcgaatcattgctggaatcccgccctagtatggggagaaaattaagctcacctacaaccccacgtgacatgctcttaagcccaactctgaggcctcgtagacgctgtctggaatcctctgtggatgacgcgggatgccccgacctcgggaaagaacccctggttttccagaatcgccagttcgctcatctgatggaagaaccgcttggttcagacccgttctcctggaagctcccctcactcgattatgagcgcaagaccaaagtcgactttgacgacttcctgccggctatccgcaagccacaaaccccgaccagcctcgcgggctctgcaaaggggggccaagacggctcgcagcggtcaagtatacattttgagacagaagaagccaacaggagtttcctctcaggtatcaagaccattcttaaaaagtccccagagcctaaagaggacccggctcacctcagcgatagttcgtcatctagcggttctattgtaagctttaagtctgccgattcaatcaagagtaggcctggaatcccgaggttagcaggtgacggcggagagcgaacttcacctgagaggagagagccgggaactggtcgtaaggatgatgacgttgcgagtatcatgaagaagtatctgcagaagtag

SEQ ID NO: 125492 - DNA, 603 bp, synthetic construct
  misc_feature 1..603: note = Description of Artificial Sequence: Synthetic coding sequence
  source 1..603: mol_type = other DNA
atgggaaacagcaagtcaggcgctctcagcaaagaaatattggaagagctgcaattaaatactaagttttcagaagaggaactgtgttcctggtatcagtcattccttaaagactgcccaaccggtcgcatcacacagcagcagtttcaatccatctacgctaagttttttcctgacactgacccaaaagcttatgctcaacacgtgtttcgcagttttgatagcaacctggatggaaccttggactttaaagaatatgtgattgccttacacatgaccactgccggcaagacaaatcagaagctggaatgggcattcagtctgtacgatgtagatggtaacggaactatatcgaagaacgaagtactcgagatcgtgatggccatattcaagatgattacgcctgaagacgtcaaactgctgcctgacgatgagaatacccccgaaaagcgagctgaaaagatctggaagtactttggcaagaatgacgacgataagctcaccgaaaaggagttcattgaagggactttggctaataaagaaatcctacgtctcatccaatttgagccgcagaaagtaaaagaaaagatgaagaatgcttag

SEQ ID NO: 125493 - DNA, 1884 bp, synthetic construct
  misc_feature 1..1884: note = Description of Artificial Sequence: Synthetic coding sequence
  source 1..1884: mol_type = other DNA
atgtcctctgacagcgagatggccatctttggtgaggctgccccctttttaaggaagagcgagagagagagaattgaagcacagaacaagccctttgacgccaaaacgagtgtgtttgtcgtagaccctaaagaatctttcgtgaaggctaccgtgcagagccgcgaaggcggtaaggtcacggcaaaaactgaagccggcgcaacggtgactgttaaagatgatcaggtttttccaatgaatccccccaagtacgacaaaatcgaggacatggcaatgatgactcatctgcacgaacccgcagtactttacaacctcaaggagaggtatgctgcatggatgatctacacttacagtgggcttttctgtgtgaccgtgaacccttataagtggctacctgtctacaacgcagaggtggtgaccgcgtatcgggggaaaaagagacaggaagcccctccccacatcttctccatcagcgacaatgcctaccagtttatgttgaccgacagagagaaccagtccatcctgatcacaggagaatctggggccggcaaaaccgttaatactaaaagggtgattcagtactttgccaccatcgctgtcaccggggaaaagaaaaaagaggaggtgaccagcggcaaaatgcagggaacactggaagatcaaattataagcgcaaatccccttctggaagccttcggcaacgccaaaaccgtacgaaatgacaattcctcaaggttcgggaagtttatcaggattcatttcggcactactggtaagctggcctccgcagacattgagacatacctgctggagaaaagccgggtgaccttccagctgaaagccgaacgaagctatcacatcttctatcagataatgtccaacaaaaagcctgatctgatcgaaatgttactgatcacaactaatccatacgattacgcctttgtctcccagggcgagatcaccgtcccctcaatcgatgaccaggaagaactgatggccaccgacagcgccatcgagatcctgggattcacaagtgacgagagagtttccatatacaagctcacaggagcagtaatgcactatggtaacatgaaattcaaacagaaacaacgagaggagcaagccgagcctgacggcaccgaagtcgccgacaaggcagcctatctgcagaacctcaattcagctgacctgctgaaagcactatgctatcctcgggtgaaagttgggaatgagtacgttaccaaaggtcagactgtccagcaggtttacaatgcagtgggcgcccttgctaaagccgtctatgacaagatgttcctttggatggtgactcgcataaaccagcaactagacacgaagcagccccgagccaactcagaggttgcccagtggcggaccaagtatgagacagatgcaatacaaaggactgaggagctggaggaagcgaaaaaaaagctggctcagcgcctgcaggacgccgaagagcacgttgaagcagtgaacgctaagtgcgctagtctggaaaaaactaagcagagacttcagaacgaagtggaagatctcatgatcgacgtggagaggacaaacgctgcttgcgcggctctggataaaaaacagagaaattttgataagattctagccgagtggaagcagaaatgcgaggaaacgcatgcggagttggaagcctctcagaaggagtctcggagcctttcgacggagctttttaaaatcaagaacgcatacgaagaatcccttgaccagctggaaaccctgaaacgagagaacaaaaatcttcaacaggagatctccgacttgaccgaacaaatagccgagggaggaaagcggatccacgaactagagaaaattaagaagcaggtcgagtag

SEQ ID NO: 125494 - DNA, 5919 bp, synthetic construct
  misc_feature 1..5919: note = Description of Artificial Sequence: Synthetic coding sequence
  source 1..5919: mol_type = other DNA
atggctcaaaaaggtcaacttagtgatgatgagaaattcctctttgtggataaaaactttatcaattctccagtagcccaggcagactgggcggctaagcgactcgtctgggtgccaagcgaaaagcagggttttgaggcggcaagtatcaaggaagagaagggtgatgaggtggtcgtggaactggtcgaaaatggcaagaaagtcaccgtaggcaaggatgatatccagaagatgaatcctcctaaattctccaaagtggaggatatggcagagctgacatgcctgaacgaagcaagtgtactccataatctaagagagaggtacttttctggcctaatttatacctatagcgggctgttttgtgtggttgttaatccttacaagcacctgcctatatactccgagaagatcgtcgatatgtacaaaggtaaaaaaaggcatgagatgcccccacacatctatgcaattgcggacacagcttaccggagtatgctccaggatagggaagaccagagcatcctgtgcaccggcgagagtggtgcaggaaaaacggaaaatactaagaaggtaatacagtacctggctgtggtggcatcctctcataaaggaaagaaagatacatccataaccggggagcttgagaaacagttgctccaggctaaccccatcctggaagcattcggcaacgccaagactgtgaagaacgataatagcagtcggtttggaaagtttatcagaataaactttgacgtgactggctatatcgttggagctaacatcgaaacttatctgctagaaaagagcagggcgataaggcaggctagggacgagagaacttttcacatattttactatatgatcgcaggagcaaaggagaagatgagatccgatctcctactggagggattcaataactataccttcctcagcaatggttttgtgcctatacctgccgcccaagacgatgaaatgttccaggaaaccgtggaagctatggcgatcatggggttctctgaagaggaacagcttagtattctgaaggttgtgagctccgttttgcaattgggaaatattgtgttcaagaaagagaggaacaccgaccaagcgtccatgcctgacaatacagccgcccaaaaagtgtgccacctcatggggatcaatgtgaccgatttcacacgatccatactgacaccgcgcattaaagtgggcagggacgtggtgcagaaggcacagacaaaggagcaggccgattttgctgttgaagccctggccaaggcaacatacgaaaggctgttccggtggatcctgacaagggtgaataaggcgctggacaaaacccaccgtcagggcgcatcatttttagggatattagacatcgctggcttcgaaattttcgaagtgaatagcttcgaacagctttgcatcaactacacaaatgaaaaattgcaacagttgtttaaccacaccatgttcatcctcgagcaggaggagtatcagcgagagggaattgagtggaactttatcgactttggcctagatttgcagccctgtattgagttgattgagcggcccaataatccaccaggggttttggcattgttggatgaggagtgctggttcccaaaggccacagataagagcttcgttgagaaactgtgtactgaacaaggctcccatcccaagttccagaagccaaagcagctgaaggataagacagagttcagtataatccactatgccggaaaggtcgactataatgcctctgcctggctgaccaagaacatggacccacttaacgataacgtaacaagcttgctcaacgcgagcagtgataagtttgtggccgacctgtggaaggatgtggacagaatcgtgggcctggaccagatggctaaaatgacagagagctcactgccaagcgcctcgaaaactaaaaagggcatgttcagaacagtgggccaattgtataaagaacagctgggcaaattaatgacaactttgagaaacaccactcccaatttcgtcaggtgcattattccgaatcacgagaagagaagtggtaagttggacgccttcctggtgctggaacaacttcgctgtaatggcgtactggagggcataagaatctgcaggcaggggttccctaatcgcattgtgtttcaggagttccgacagcgctacgaaatcctggccgcgaatgctatccctaaaggcttcatggatggaaagcaggcttgtatcctcatgattaaggccctagaattagaccctaatttgtatcgcattgggcaatctaagattttcttccgcaccggagtgcttgcacacctggaggaggaacgagacttaaaaatcacagatgttatcatggcttttcaggcgatgtgtcgaggttacctggcaagaaaagcctttgcaaaacgtcagcagcagcttacagcaatgaaggtcatccagaggaactgtgcagcctatctgaagttgaggaattggcagtggtggaggctgttcacaaaagtgaagccattgctgcaagtgacaagacaggaggaagaaatgcaagccaaggaagacgagctgcagaagacaaaggaacgccaacagaaggctgagaatgagttgaaagagctcgagcagaaacacagccaactgacggaggagaaaaatctcctgcaagaacagttgcaagcggaaacggagctatacgcagaagcggaagagatgagggtgaggttggcagcgaaaaagcaggagctggaggagattctgcacgagatggaagcgcgcctggaagaagaggaggataggggccagcagctgcaggccgagcggaaaaaaatggcccagcagatgctcgacctggaggagcaactggaagaagaagaagcagctcgccagaagttgcagctggagaaggtcacagcagaggccaagatcaaaaagctggaggacgagatactcgttatggatgaccaaaacaacaagcttagcaaggaaagaaagttactggaggagcggatatcagacctcactacaaatctggcagaggaggaagagaaagccaagaacctgaccaaactgaaaaataaacatgagtccatgatttccgaactggaggtgaggcttaagaaagaggaaaaatccaggcaagaactagaaaaactgaagaggaagctcgagggtgatgcatcagattttcatgaacagatagccgatctacaggcccagattgccgaactgaagatgcaactggccaagaaggaagaagagctccaggctgccctggcaaggctggacgatgagatcgcccagaagaataacgccctcaagaagatccgggagttagaaggccatattagcgacttgcaggaggacttagacagcgaacgggcagctcggaacaaagccgaaaagcagaagcgggatctaggtgaggagttggaagcgctgaagacggagcttgaagatacactggattccaccgcaacgcagcaggagttacgtgccaagagagaacaggaggtaaccgtcctgaaaaaggccctcgacgaagagaccagaagccatgaggcacaagtacaggaaatgcggcagaagcatgcccaagcagtggaggagttgacagagcaactcgagcagttcaagcgtgcaaaggcaaacctggacaaaaacaagcagacactagaaaaggaaaatgctgacctcgcaggtgagctgagggtcctgggccaggccaaacaggaggtggagcacaagaagaaaaagctcgaggcccaggtgcaagagcttcaatcaaaatgtagtgatggcgaacgggcgcgagcagaattaaacgataaagtgcataaacttcaaaatgaggttgaaagtgtgactgggatgctgaatgaggctgagggaaaggctattaaactggccaaggacgttgcttccttgagttcgcagctgcaggacacacaggagctgcttcaggaagagacgaggcagaagctgaatgtatcaacaaagttgcgacagctggaagaggaacgcaacagtctgcaggatcaattggacgaggaaatggaggccaagcaaaatctggagcgtcacataagtactctcaacatccagctgagtgacagcaagaaaaagctacaagatttcgcctccacagttgaagctttagaggagggaaaaaagcggttccagaaagaaatagagaatttaacccaacagtacgaggaaaaggccgccgcctatgataaactggagaagaccaaaaatcgactgcaacaggaactcgacgatctggtcgtggacctggacaatcagcgacagctggtgtcaaacctggaaaagaagcagaggaagtttgatcagctgttggccgaagaaaagaacatctcttcaaaatatgccgatgagcgtgaccgggccgaggcggaagctagagagaaggagacaaaggcgctgtctctcgctagagcattggaagaggcccttgaagccaaggaggaactcgaaaggactaacaaaatgctgaaggccgagatggaggatctggtatcgtccaaggacgatgtgggcaaaaatgtgcacgaactcgagaaatcgaagcgggctttggagacgcagatggaggagatgaaaacccaattagaagagctggaagacgaactgcaggccactgaagatgcaaagttgcggctcgaggtaaacatgcaggcacttaaggggcagtttgaaagggatctgcaagccagagacgaacagaacgaggagaagaggagacagctgcaacgtcagctgcacgaatacgagactgaacttgaagatgagcgtaaacaaagagcactggctgccgcagctaaaaaaaaactcgagggtgacctgaaggatctggagttacaggctgattccgcgatcaagggccgggaagaagcaatcaaacagctacggaagttgcaagcgcagatgaaggacttccagagggagctagaagacgcacgcgcctctagagatgaaattttcgcaactgcgaaagagaacgagaaaaaggctaaaagtttggaggctgatctgatgcagttacaagaggaccttgcagctgctgagagggcgagaaaacaggctgacctcgagaaagaggagcttgccgaggaattggcctcatccttatctggccggaacgcactccaggatgagaaaagaagactggaagcgaggatcgcccagctggaggaagaacttgaggaggagcaggggaatatggaggccatgagcgatcgggttcggaaagctacccaacaggccgagcagttgtcaaatgaactagccacagagagatcgactgcccagaagaatgagtccgcccgacagcagttagagaggcagaacaaagaattacgctcaaagctgcatgagatggagggggccgtgaagtctaagttcaagagcaccattgcagcccttgaagcaaagatagctcagctggaggagcaagtcgaacaggaggctcgcgaaaaacaggccgccacaaaatcccttaagcagaaggataagaaactaaaggaaattctcttacaagtggaagatgagcgaaagatggcagaacagtataaagaacaggccgagaaggggaacgctagggtaaagcagcttaagcgccagctcgaggaagcagaggaggagtctcagcgaatcaacgctaatcgccgaaagctccagagggagcttgatgaagccactgagagtaacgaggccatgggcagagaggtgaatgctctaaaatcaaagctgagaagaggcaatgagacctcctttgtgccaagtcggcggagtggaggacggagagttatcgagaatgccgatggcagcgaagaagagaccgacacacgggacgcagactttaatgggaccaaagccagtgagtag

SEQ ID NO: 125495 - DNA, 5817 bp, synthetic construct
  misc_feature 1..5817: note = Description of Artificial Sequence: Synthetic coding sequence
  source 1..5817: mol_type = other DNA
atggctcaaaaggggcagctctctgacgacgaaaaatttctgtttgtggacaagaacttcattaatagtcctgtggctcaggcagactgggcagccaagagactggtctgggtccctagtgagaagcaggggtttgaagccgcttccattaaagaggaaaagggcgacgaagtggtcgtcgaactggtagagaatgggaagaaagtgactgtgggtaaagacgatattcagaaaatgaacccgcctaagttcagtaaagtcgaggacatggcggagctcacatgcctgaatgaggccagcgtactgcacaatctgcgggaaagatactttagcgggttgatatacacatacagcggactgttttgtgtggttgtcaatccttataaacacttacctatctactctgagaaaattgtggatatgtataaagggaagaagagacacgagatgcctccccatatttatgccattgcagataccgcctatagatcgatgctgcaggatcgcgaggaccagtccattctctgcactggcgagtcaggcgccgggaagacagaaaacaccaagaaggtgattcagtaccttgctgtcgtggcctcttctcacaagggtaagaaagatacctcaattactggcgagctcgaaaaacagcttctccaggccaatcctatcctggaggcctttggcaatgcgaaaacagtgaaaaatgataacagtagtcgcttcggcaagtttattcggattaattttgatgtgaccggctacattgtgggtgctaatatcgaaacttatcttcttgaaaagtcgagggccatcagacaggctagagacgaacgaacttttcatattttctattatatgatcgccggcgcgaaggaaaaaatgagatctgacctactgctcgagggattcaacaattacacattcttgtcgaacggttttgtacccattccggcagctcaggatgacgagatgtttcaagaaacagtggaggcaatggccattatggggttcagcgaagaagagcagttgtccatcttgaaggtggtgtctagtgtcctgcagctgggcaatatcgtttttaaaaaggagagaaacaccgaccaagcgagtatgcctgacaatacagccgcacaaaaagtgtgccacctgatgggcatcaacgtcacagactttacacgaagcattctaacacctcggatcaaggtcggacgggacgtggtgcagaaggcccagaccaaagagcaggctgactttgccgtggaagcactggcaaaagccacttatgagagactgtttcggtggatccttaccagagtgaacaaggcccttgacaagacccacaggcagggcgccagctttcttgggattctggacatcgccggctttgaaattttcgaggtgaatagtttcgagcagctttgcatcaactatacaaatgagaaactgcaacaactctttaaccacactatgttcatcctggagcaggaagagtaccagagggagggcatcgagtggaatttcattgattttgggctggatttgcaaccttgcatcgagctgattgagcggcccaataatcccccaggggttctagccctattggacgaagaatgttggttcccgaaggctactgacaagtccttcgtcgagaaactgtgcaccgagcagggatcccaccccaagttccagaaaccaaagcagctgaaagataagacggagttttctatcatccattatgctggtaaggtggattacaacgcctcagcatggctgacgaaaaatatggaccctcttaatgacaacgtcacatccctccttaatgcaagctcagataagttcgtcgctgatctctggaaggacgtggataggattgttggcctggatcagatggctaagatgacagaaagctccctgcctagtgccagcaagaccaaaaaggggatgttcagaacagtgggtcaactgtataaagagcagttagggaaacttatgaccactctccgaaacaccacgcctaactttgtgcgatgtatcattcctaaccatgagaagagatctggtaagttggacgcattcttagtcctggagcagctgcggtgtaatggcgtcctagaaggtatcaggatatgcagacaaggctttcccaatagaattgttttccaagagtttcgccaacggtacgagatccttgctgcgaacgccattcccaaggggtttatggacggcaagcaggcttgtatactaatgatcaaggccttagaacttgatccaaacttgtataggataggccaaagcaaaatcttttttcgcactggcgtgcttgcccacctggaagaagaacgcgatttgaagatcactgatgttattatggcctttcaggctatgtgccgggggtatctggcccggaaagcgtttgcaaagagacagcaacagcttacagcaatgaaggtgattcagcggaattgcgccgcatacctcaagctccggaattggcagtggtggcgactgttcacaaaggttaaacccctgttacaggtaaccagacaggaggaagaaatgcaggctaaggaagatgaacttcaaaaaaccaaagagaggcagcagaaagcggaaaatgaattgaaggagctggaacagaagcactcacagttgactgaggagaagaacctcctccaggagcaattgcaggcagagactgaactgtatgcggaggctgaagaaatgcgtgtgagattggccgctaagaaacaggaacttgaagaaatcctgcacgagatggaggcccgtctggaggaagaggaggatcgcgggcagcaattacaggccgagagaaagaagatggctcaacagatgctggatttggaggagcaattggaggaggaagaggctgcacgccaaaagctgcagttggagaaggtcaccgctgaggccaagattaagaagcttgaagatgagatcctggttatggatgaccagaacaataagttgtccaaggaaagaaagctgctggaagagcgcattagcgatctaactactaatttagccgaggaagaagagaaagctaaaaatctcacgaaactcaagaataagcacgaaagcatgatctccgagctggaggtgcggttgaaaaaggaagagaaaagccggcaggagcttgagaagctaaaacggaaactggaaggggacgcctctgatttccacgaacagatcgctgatttgcaagcccaaatcgccgagcttaagatgcagctggcaaagaaggaagaagaactccaggcggccctagcccgactagacgacgagatcgctcagaagaacaacgccctcaaaaagattcgggagctggaggggcatatctcagaccttcaggaagatctggactccgaacgagcggcaaggaataaagctgagaagcagaagcgggacctcggcgaagaactcgaagccttaaagaccgagcttgaagatacgctagactccacagctacacagcaggaactgcgggccaagcgagaacaagaagtgacagtgctcaaaaaggccctggacgaggaaacacggtcacacgaggcgcaagtgcaggagatgagacagaaacacgcacaagccgtggaagaactcactgagcaattagaacagttcaagagggccaaggcaaatctggacaaaaataaacagactctggagaaggagaacgccgatctggcaggggagctcagggtgctcggacaagcaaaacaggaggtggagcacaagaagaagaaactcgaggcacaggtgcaagaattacagtccaagtgttctgatggcgaacgggctcgggctgagctgaacgacaaggtccataaacttcagaatgaggttgagagtgtgactgggatgttaaatgaagccgaaggcaaggccatcaagttggcaaaggacgttgcgtcactttcaagtcagctacaggatacgcaggaactgctccaggaagagacaagacaaaagttgaatgtgagtaccaaactgcgccaactcgaagaagagcgtaactctcttcaggatcagctggatgaagagatggaagctaaacagaaccttgagcgccatatttccactctaaacattcagctatccgacagtaaaaaaaagctgcaggatttcgcctcaacagtggaggcattggaagaaggcaaaaaacgtttccagaaagaaatcgaaaacctcacccagcagtacgaagaaaaggctgctgcctacgataagctggaaaaaactaaaaaccgattacagcaagagcttgatgatctggtcgtggatctcgacaaccaacggcagctggtctcgaatctcgaaaagaagcagcgcaagttcgatcagcttttagccgaggaaaaaaacatttcctccaaatatgctgatgagcgagatagagccgaggctgaggctcgtgaaaaagagacaaaggcgctcagccttgctcgcgcgttggaggaggccctggaagccaaggaggagcttgagcgaacaaataaaatgttgaaggcggaaatggaagatctcgtgagcagtaaagacgacgtggggaaaaatgtgcatgagctggagaagtcgaaaagggcactggaaacacagatggaggagatgaagacgcagctggaggaactggaagacgaactacaggcaactgaagatgcaaaactccggctggaggtgaatatgcaggctctcaaggggcagttcgagcgagacctccaagcccgagacgagcagaacgaggagaagagaagacagctgcagagacagttacatgagtatgaaactgagctagaagacgagagaaaacagcgcgccctggcggcagccgcaaagaaaaagctggaaggcgatttgaaggacctagagctgcaggctgactccgccatcaaagggcgggaagaggccatcaaacagctgcgcaaactgcaggcacagatgaaagacttccagcgggagctcgaagacgcccgagcctcccgtgatgagatcttcgcaactgccaaagagaatgagaaaaaggctaaatctctggaagccgacctcatgcagctccaggaagatctggccgccgccgagcgcgcacggaagcaggcagacctagagaaggaggaactcgcggaggagttggccagttccttatcagggagaaatgcactgcaagatgaaaagcggagacttgaggcacggatcgcccagctggaagaggagcttgaggaggaacagggcaacatggaggcaatgagtgatcgagtgcgaaaggccacacaacaggccgagcaactcagcaatgagttagccactgagcgttccactgcgcaaaaaaacgagtcagcaaggcagcagttggagaggcaaaataaagagcttagaagcaaactgcacgaaatggagggcgccgttaaatccaaatttaaaagcacaatagccgccttggaggccaaaattgcacagctcgaggaacaggtcgaacaggaagctagggaaaagcaggcagctaccaagtcattgaaacaaaaggataaaaagcttaaggaaatccttttgcaggtcgaggatgagcgcaaaatggctgaacagtataaagagcaagcggagaaagggaatgcacgcgttaaacagttaaagcgtcagttagaagaagccgaggaggagagccagcgtattaacgcaaacaggcggaaactccagagggagctcgacgaggccacagagtctaatgaggccatgggccgggaggtgaatgcccttaagtctaaattgcgcggccccccaccccaagaaacttcacaatag

SEQ ID NO: 125496 - DNA, 6090 bp, synthetic construct
  misc_feature 1..6090: note = Description of Artificial Sequence: Synthetic coding sequence
  source 1..6090: mol_type = other DNA
atggcgcagaaaggccagctcagcgatgacgagaagtttctattcgtagacaaaaactttatcaactccccagtggctcaggctgactgggcagccaaacgcttggtctgggtgcctagtgaaaagcaaggatttgaagccgcaagcattaaagaggagaagggcgatgaggtggtcgtggagctagttgagaacggcaagaaggtgaccgttggcaaagatgacatacagaagatgaatccacctaagttctccaaagtggaagatatggctgaacttacatgcttaaatgaagcgagcgtgctgcataacctgcgtgaacgctatttctcaggcctcatttatacatactctggcttattttgtgtggtggtcaacccctataagcacctgcctatatattccgagaaaatcgtggacatgtataagggcaagaaacgccacgagatgccgccccacatttacgccatcgcagatacagcctatcgatctatgttgcaggatcgcgaggatcaatcgattctgtgtactggtgaatcaggagcgggcaagacagagaatacgaagaaggtcatccagtacctggccgtggtcgccagctcacacaaaggtaagaaggatacttccataactgagggcccgagcttctggcgaggggagctcgagaagcagctgctgcaggcaaatccaatactcgaagcattcggaaacgctaaaaccgtgaagaatgacaattcctctcgctttggcaaattcattcgtatcaacttcgacgtcacagggtatatcgtcggcgctaacatcgaaacatacttgctggagaagagccgggctatccggcaagcccgggatgaacggacgttccatatcttttattatatgatcgcaggcgccaaggagaagatgaggagcgatttgctgttggaaggtttcaataactatacattcctgtcaaatggctttgtgcctatcccggctgctcaggacgatgagatgttccaggagaccgtggaagcgatggccatcatgggcttttcggaagaagagcagctctctatattgaaagtggtttccagcgtactccagctgggcaacatcgtgttcaaaaaggaaagaaataccgaccaggcctccatgcccgacaacacagccgcgcagaaggtgtgtcacctcatgggcatcaatgtgactgatttcactagatcgattctgactccccgcatcaaagtgggtcgcgacgttgtgcagaaggctcagaccaaggaacaagccgattttgctgtagaagccctcgccaaagcaacctacgagagattgtttcgctggattctgacccgggtaaacaaggccctggacaagactcacaggcagggtgcttcctttttaggcattttggacatcgccggctttgagatctttgaagtgaattcgttcgagcaactgtgcatcaattataccaacgagaagctccagcagttgttcaatcatactatgttcatcctggaacaggaagagtatcagcgggagggcatagagtggaatttcatcgactttgggcttgacctgcagccttgcatcgagctgattgaacgtcccaacaatccaccaggggtgttggctcttctagacgaggaatgctggttcccaaaagctaccgataagtcattcgttgagaagctttgcactgagcaggggtcacatccaaagtttcagaaaccgaagcagctaaaggacaaaaccgagttctccataatccattatgccggcaaggtcgactataacgcatccgcctggctgaccaagaatatggatccactcaatgacaacgttacttccctcctgaatgcaagttcagacaaatttgttgctgacctgtggaaggacgtggatagaattgtgggtctggaccagatggcgaagatgacagagtcctctctccccagcgcaagtaagaccaagaaagggatgtttcggactgttggacagctgtacaaggagcagcttggaaaacttatgaccacccttcgcaatactacgcctaacttcgttagatgtatcattccaaaccacgaaaaacggtctggtaaacttgatgcctttcttgtgctggagcagcttaggtgcaacggggttctggaaggcattcgtatctgccgccagggctttcccaatcggatagtgtttcaggagtttaggcaacgctatgaaatactggctgccaacgctatcccaaagggattcatggatggcaaacaggcatgcattctgatgatcaaagctctcgaattggaccccaatctgtatcggataggccaaagcaagatattctttaggacaggagtattggcccacctggaggaggagcgcgatctcaagattacggacgtgattatggccttccaggctatgtgcaggggctatctggcgaggaaagcgttcgccaaacgacagcagcagctgacagccatgaaggtaatccaaagaaactgcgcagcctatctgaagctgcgcaactggcagtggtggaggctcttcacaaaggtgaaacccttgctgcaggtgaccagacaggaggaagagatgcaggcgaaagaggacgaattacagaaaactaaagagcggcagcagaaagccgagaacgagctgaaggaactcgaacagaagcattctcagctgacggaagaaaaaaatctgttgcaggagcagctccaggcagagaccgagctctatgccgaggcggaagagatgagagtgcgattggcagcaaagaagcaggagctcgaagaaatcctgcacgaaatggaagcccgcctcgaagaggaagaagataggggccagcagctgcaagcagaacgcaagaagatggcccagcaaatgcttgacctggaagagcagctagaggaggaagaagcggctcggcagaaactgcaattagagaaggttaccgcagaagctaagattaaaaaactcgaggacgaaattctggtgatggacgatcagaataacaaattaagtaaggagagaaaactgctggaggagaggatctctgatctcaccaccaacctcgctgaagaggaggaaaaagctaaaaacttgactaaacttaaaaataagcacgagtctatgatcagcgagctcgaggtccgactaaaaaaggaggaaaaaagccgccaggagcttgaaaagctgaaaagaaagctcgaaggggatgcgagtgactttcacgagcagattgccgacttgcaggcccagatcgcagaattaaagatgcagctagccaaaaaggaggaggagctgcaggcagccctggcccggcttgatgacgagatcgcacaaaagaacaacgcgctgaaaaagataagggagctggaaggacacatatccgacctccaggaagatctggattcagaacgagcggccaggaacaaggcagaaaagcaaaagcgggacctgggggaagaactggaggctctcaagacagagctggaagatacgctggactcaacagccactcagcaagagctgagagctaaaagagagcaggaggtgacagtgctcaagaaggcccttgacgaggagacacgaagtcatgaagcccaggttcaagagatgcggcagaaacacgcacaggccgtagaggagctgacagagcagcttgagcagttcaaacgggccaaggcgaatctggacaagaacaagcagacgctcgaaaaggaaaacgcagatttagccggcgagttaagggtgctcggtcaagcaaagcaagaggtggagcataaaaagaaaaaactggaagcgcaagtgcaggaacttcaaagtaagtgttccgatggtgagagagcacgagccgagttgaacgacaaggtgcacaagctgcaaaatgaagtcgagagcgtgaccgggatgcttaacgaggccgaagggaaggccataaaactggctaaggacgtcgcctcactcagttcacagttgcaggatacgcaagagctgctccaagaggagactcgtcaaaagttaaatgtttctaccaaactaagacagctggaggaagagcgaaatagcctgcaagaccagttggacgaggagatggaagccaaacagaacctggagagacatatcagtactctcaatatccagctctcggacagtaaaaaaaagctgcaagactttgctagtaccgtggaagccctcgaggagggcaaaaaaaggtttcagaaggaaattgaaaacctgacgcagcagtatgaagagaaagcagctgcctacgacaaactggaaaagacaaaaaatcgtctgcagcaagaactagacgatctagtggtggatctggacaatcagcggcagctcgtgagcaaccttgagaaaaaacagcgcaagttcgatcagctgctggccgaagagaaaaatataagtagcaagtatgccgacgagcgcgaccgggctgaagctgaagctagggagaaggaaaccaaagcactgtctttagcccgcgccctggaagaggcactggaggcgaaggaggagcttgagcgtactaacaaaatgcttaaggcagagatggaagacttggtctcttcaaaggatgatgtcggtaagaatgtgcatgaactcgagaagtctaaacgtgcccttgagacacagatggaagagatgaaaactcaactcgaggagctcgaagatgaactgcaggccacagaggacgcgaaactccgcctggaggtcaacatgcaggccctcaaagggcaattcgagcgggacttgcaggcccgggacgaacagaacgaggagaagagacgtcagttacaacgacaactccatgaatatgagacagagctggaagacgaacgaaagcagcgcgccctagccgctgccgccaagaagaaactggagggggatctcaaggaccttgaactccaggctgacagcgctattaaaggcagggaagaggctatcaagcagctccgaaagttgcaggcccagatgaaagactttcaacgagagctggaagatgctagagccagtagagacgagatcttcgctacagccaaggagaacgaaaagaaggcgaagagcttggaggcagatttaatgcaactccaggaggatctcgccgccgccgagagagccaggaagcaggctgacctggagaaagaggaactggccgaggaactcgcctcatctctttctggacgcaacgccttgcaggacgagaaaaggcggctcgaagcacgtatcgcccagctggaggaggagttggaggaagagcaaggcaacatggaagcgatgagcgaccgcgtgcggaaggccacccagcaggccgagcagctctccaacgaactggccaccgaacgaagcacagcacaaaagaatgagagcgctcggcagcaactcgagagacaaaacaaagaactgcggagcaagctgcatgaaatggagggggccgtcaaatccaagtttaagtctacgattgccgccctggaagcaaagatcgcccagctggaggagcaggtggagcaggaagcaagggaaaagcaggcagctacaaagtccttgaagcaaaaggacaagaagctgaaagaaatcctgctgcaagtggaggacgagcggaaaatggcagagcagtacaaggaacaggccgagaagggcaatgcccgagtaaagcagctcaagagacaactcgaggaagcggaagaggagagccaaagaatcaatgccaaccgccgaaaacttcaacgagagctggacgaagccaccgaatcaaatgaagcaatggggcgggaggtcaacgctctgaaatcgaagctgagaggaccaccccacagaaagctgcgctcagacgcccccggcgaagagactcgtcccctgagcttcctcctggaggggctggaagacgtggaactgctaaaaatgcagatggttctgaggcggaagcgaaccttggaaactcagacaagcatggagccccggcctgttaacaaacaactctcaacggtgctccaccatggaaaaaagaccaaaaatcagaacaagcagactaagaagacacagcaacagccacggacaaaacaaaaccccgcggattgtacctag

SEQ ID NO: 125497 - DNA, 5940 bp, synthetic construct
  misc_feature 1..5940: note = Description of Artificial Sequence: Synthetic coding sequence
  source 1..5940: mol_type = other DNA
atggctcagaagggacaattgtccgacgatgagaaattcctgttcgtggacaagaactttattaattcaccagtcgcacaggccgactgggcggcaaagcgactggtttgggtgccgtcagagaaacaaggcttcgaagcggccagcataaaagaggagaagggggatgaagtggtagtcgagctggtggagaacggcaagaaggttaccgtggggaaggatgatatccaaaagatgaacccccctaagttcagcaaggtggaggatatggcagaactgacctgccttaacgaagctagtgtcctgcacaatctccgtgagagatatttttccggcctgatatacacctattccggcttgttctgcgtggttgtgaacccctataagcacctccctatttattctgaaaagatcgtggacatgtataagggaaaaaagaggcacgagatgcctcctcacatctatgcaatagctgatacagcatataggtctatgcttcaagacagagaggaccagtcaatcttatgtaccggagaatcgggagcaggtaagactgagaataccaaaaaggtgattcagtacctggctgtcgttgcctcttcacacaaaggtaagaaagacacaagcatcacacaagggccatccttcgcttacggagaactggaaaaacagcttttgcaggccaatcctattctagaagccttcgggaacgcaaaaaccgtcaagaacgacaactcgtcacggtttggtaaatttatcagaattaacttcgacgtaaccgggtatatcgtcggagcaaacatcgagacctatctgctagaaaagtccagggcaattcggcaagcgagagacgagcgaacctttcatatattttactacatgatcgccggggctaaggaaaagatgcgttccgacctgctgctggagggcttcaataattatacatttttaagcaacgggttcgtgccaattccagcggcccaggacgatgaaatgtttcaggagacagtggaagcaatggctattatgggtttctctgaagaagaacagctgagcattctcaaagtggtgtcctctgtattgcaactcgggaatatagtttttaaaaaggaaaggaacactgaccaagcttcaatgcccgataatactgcggcacaaaaggtgtgtcacctgatggggatcaacgtcacagacttcacacgaagcattctgactccaagaatcaaggtgggccgggatgtggtccagaaggcacagaccaaagagcaggctgattttgccgtcgaggcgctggcgaaagccacttatgagaggctcttcaggtggatcctgaccagggtgaataaagcgctcgataagacacacagacagggagctagctttctgggaatactagacattgccggattcgagattttcgaagtcaattcgttcgagcaactttgtattaactacaccaacgaaaagctgcagcaactgtttaatcacactatgttcatcctggagcaggaggaataccagcgggaaggcatcgagtggaactttattgacttcggtctggacttacaaccctgtatcgagctgatcgagcgaccgaacaatccaccgggggtgctggccctgttggatgaggagtgctggtttcctaaggctactgacaagagcttcgtcgagaaactgtgcaccgaacaaggctcccatccaaagtttcagaaacccaaacagctcaaggacaaaaccgaatttagtattatccactacgcaggtaaagtggactataacgcgtcagcatggttgaccaaaaatatggaccctctgaacgacaacgttacttcgctgctaaatgcctctagcgataaattcgtagccgatttgtggaaggacgttgaccggatcgttggcctcgaccagatggctaagatgacggaatcaagtctaccctccgcctctaagaccaagaagggcatgtttaggacggtggggcaattgtataaagaacagctcgggaagttgatgacaaccctgcgtaataccaccccgaattttgtcaggtgcatcattcctaatcatgaaaagaggtcagggaaactggacgctttcctggtactggaacagttacgatgtaatggagtcctcgagggaataagaatttgtcgccagggatttcccaaccggatagtgttccaagagtttcgacagagatacgaaatactcgcagccaatgctattcctaaagggttcatggatggaaagcaggcatgcattcttatgatcaaagcgttggagctggatccaaatttgtacagaatcgggcagtcaaagattttcttcagaaccggtgtgctggcgcacttggaggaggaaagagatctgaaaattacagacgtgatcatggcatttcaggccatgtgcagggggtacctcgcacgcaaggcctttgccaagaggcaacagcaactgaccgccatgaaagtgattcagcgaaattgcgcagcttacttaaaacttcgcaattggcaatggtggagactgttcacaaaggttaagcctctgctccaggtgacacgccaagaagaggagatgcaggccaaggaggatgagctgcaaaaaactaaggagaggcagcaaaaggcagagaacgagctgaaagagctagaacaaaaacactcacagctgactgaagagaagaatctgctacaggaacagttgcaggctgaaacagagttgtacgccgaagctgaggaaatgagggttaggttggccgctaaaaagcaggagctagaagagatcctccacgagatggaagcccgcctcgaggaggaggaagacagggggcagcagttacaggccgagaggaaaaagatggcccaacagatgctcgatctggaagaacagctggaagaggaagaggccgctcggcaaaaactgcaactcgaaaaagtaaccgccgaggccaaaattaagaaactcgaagacgaaattctggtaatggatgaccagaacaacaagctgtccaaggagaggaagcttcttgaagagcgcataagcgatctcacaaccaatttggccgaggaagaagagaaggctaaaaatttaactaaactgaaaaacaagcacgaaagtatgatctcagagctcgaggttcggcttaagaaggaagagaagtcaaggcaggagttggaaaaactgaagaggaagcttgagggtgatgcttccgacttccatgagcaaatcgcagacctgcaggctcaaatagcagagctgaagatgcagctcgccaagaaagaggaagagctccaagccgctcttgctcgcctggacgacgaaatagcgcaaaagaataatgcactgaagaaaatacgcgagctggaaggtcacattagtgatctgcaggaagatctggactcagagcgcgccgcccgaaacaaagctgaaaagcaaaagagggaccttggggaggagcttgaggcgctcaagacagagctggaggatacattagactctacagctactcagcaggagctgcgcgccaaacgggagcaggaggtgaccgtgcttaaaaaagctctggacgaagagactcggtctcatgaagcccaagtgcaagagatgcgccagaagcacgctcaggctgtcgaggaactgacagagcagttggagcagttcaagcgggctaaggccaacctggacaaaaacaaacagactctggagaaagaaaatgccgatttggccggagagttgagggtgctcggccaggccaagcaggaggttgaacacaaaaaaaagaagctagaagcccaggtccaggaattacagtcgaaatgcagcgacggcgagcgggcccgtgctgagctgaacgacaaggtgcataaactgcaaaatgaggttgagagcgtgaccggcatgctgaacgaggctgaaggcaaggctattaagttggcgaaagacgttgcttctctgtcatcccagcttcaggatacgcaggaactcctccaggaggaaaccagacaaaagctgaatgtttccaccaagctccggcaattagaagaggaaaggaactccttacaggaccagctcgatgaggagatggaagccaagcagaatttggaaaggcacatctccacattgaacatacagctgagcgattccaagaagaagctgcaggacttcgcaagtactgtggaggcactggaggagggaaagaaaagattccaaaaggaaattgaaaacctgacgcagcaatatgaggaaaaggccgccgcgtacgataagttggagaagactaagaacagactccaacaggagctggatgacctggttgtggatctggacaaccagcgtcagctagtcagtaacctggagaaaaaacaaaggaagtttgaccagttgcttgccgaagagaaaaatatttctagcaagtacgccgacgagcgggaccgggctgaggccgaggcgcgagagaaagaaacgaaggctctcagcctggccagagctctggaagaggctttggaagctaaagaagaactagagaggaccaataaaatgttaaaggcagaaatggaagatctggtcagttcaaaggatgacgtgggcaaaaatgtgcatgaacttgaaaagagcaaacgcgcacttgagacgcaaatggaggaaatgaaaacacagttggaagagctggaggacgaactgcaggcaaccgaggacgccaaacttagactggaagtgaacatgcaggcgttgaaggggcagttcgagcgggaccttcaagctcgcgatgagcagaacgaggaaaaacggagacagctccagcggcagctgcacgaatacgaaactgaactcgaggatgagagaaaacagcgggcattagctgcggctgccaagaagaagctggaaggagacttgaaagacctggagctacaggccgattctgctataaagggccgggaggaagcaattaaacagctgcgtaagcttcaggcgcagatgaaggactttcagcgagaactcgaagatgcccgggctagtcgtgacgaaatttttgccaccgctaaagaaaatgagaagaaagctaagtccttagaagcggaccttatgcagctgcaggaagacctcgctgcagccgagagagcccgaaagcaggccgaccttgaaaaagaggagctcgctgaagagctggcctcctcactgtcagggcgcaatgcactacaggacgaaaaacggcgcctggaagcccgcatcgctcagctggaagaagaacttgaagaggagcagggcaacatggaggctatgagcgatagggttcgcaaggctacacagcaggcagaacagctgtcaaacgagcttgccactgagcggagcaccgctcagaaaaacgagtccgccagacagcagcttgagcggcaaaacaaggaactgcgatcgaaattgcatgagatggaaggagctgtgaaatcgaagttcaaatcaaccatcgcagcccttgaggccaaaattgcccaattagaagagcaggtcgagcaggaggcccgcgagaagcaggcggccaccaaatctctcaaacagaaagacaaaaagctaaaggagatactgttgcaggtcgaggatgaacgaaaaatggcggagcagtataaggaacaggctgagaaggggaatgctcgcgtcaaacaactcaagcggcagttagaggaggcggaggaggaatctcagagaatcaatgccaatcgaagaaagctgcagcgcgaactcgacgaggccaccgagagtaatgaggccatggggcgcgaggtgaatgctctaaaatccaaattgcggcgagggaatgaaacctcctttgttccttcacgacgaagtggcggccgccgagtgattgagaatgctgacgggagcgaggaggaaacagataccagggatgcagactttaatgggacaaaagcctcagagtag

SEQ ID NO: 125498 - DNA, 5838 bp, synthetic construct
  misc_feature 1..5838: note = Description of Artificial Sequence: Synthetic coding sequence
  source 1..5838: mol_type = other DNA
atggcacagaaaggccagcttagcgatgacgagaaattcttgttcgtagataaaaatttcatcaacagccctgtcgcacaggccgattgggccgctaaaagattagtgtgggttccaagtgagaagcaggggttcgaggcggcgtcaatcaaggaggagaaaggagacgaagtggtggtcgagcttgttgagaatggcaagaaagtgacagttggtaaggatgacatacagaaaatgaaccccccaaagttctctaaagtggaggatatggccgagttaacctgtctgaacgaagcatcagttttacacaatttgagagagagatacttttccggcctcatctatacgtattctgggcttttttgcgtggttgtgaacccatacaaacacctgcctatttacagcgaaaagattgtcgacatgtataaagggaaaaagaggcacgagatgcctccacatatttacgccattgctgacactgcatatcgaagcatgctgcaggaccgcgaagaccagagcattctgtgtaccggcgaatcaggggccggaaaaacagagaatacaaagaaggttattcagtacttggctgtggttgcctcaagccataagggtaaaaaggacacgagcatcactcaggggccatctttcgcttatggtgaattggagaagcaattgctgcaggctaatccaattctagaggctttcggcaacgctaagaccgtaaagaatgacaattcttcccggtttggaaagtttatcagaataaatttcgacgtgacagggtacattgtgggggcgaacatcgagacatacctgttggagaaatcgagggctatcaggcaagcccgcgacgagaggactttccatattttttattatatgatcgccggggccaaagaaaagatgagatccgatctcttgcttgagggattcaataattacacttttcttagcaacggctttgtccctattcccgctgcacaagacgatgagatgttccaagaaaccgtggaagccatggccatcatgggattttctgaagaagagcagctctcaatcctcaaagtggtaagctcagtgctacagctcggcaatatcgtattcaaaaaggagaggaataccgaccaggcatcaatgcccgacaataccgccgcccaaaaagtctgccacctcatggggataaatgtcacagacttcactcggtctattttaacacctaggatcaaagtgggccgtgacgtcgtgcagaaagcacagacaaaggaacaagccgattttgcagtggaggctttagccaaggcaacttatgaacggctttttagatggattctgaccagagtgaataaagctctcgacaagacccacagacaaggtgcaagtttcctcggcatcttggacatagccggcttcgagatatttgaggttaactcctttgagcaactgtgtatcaattatactaacgaaaagctgcagcagctgtttaatcataccatgtttattctggaacaggaagaatatcagagggaaggcatcgagtggaatttcatcgactttggccttgaccttcagccatgtattgagctgattgagcgccctaacaatccccctggggttctggccctcctggacgaggaatgctggtttcccaaggccactgataagagtttcgtcgagaaactgtgtactgaacaaggatcacaccccaagtttcaaaagcccaaacagttaaaggacaagaccgagtttagcatcattcattacgccggcaaagtggattacaatgcatccgcttggctcactaagaatatggatccactgaatgataatgtgaccagtctgctgaatgctagtagcgacaaattcgtcgccgacctttggaaggatgtggataggatcgtaggcctagaccagatggcaaagatgacggagtcctctctgccaagcgcttctaagaccaagaaggggatgttcagaaccgtaggacaactctataaggagcagcttggcaaactaatgaccactcttcgcaacactactccgaatttcgttcgttgcattattcctaaccacgagaagaggtcaggtaaattagatgcctttctcgttctggagcaactgcgatgcaatggagttttggagggtatcagaatttgcaggcaggggttccccaatcggatcgtgtttcaggaattccgacagcgctatgagatcctggcggctaacgctatccctaaaggcttcatggatgggaagcaggcatgtattttgatgatcaaagcacttgaattggaccctaacctttatcgcatagggcaatccaaaatttttttccgtacgggagtgctggcgcatcttgaagaggagcgggacttgaagatcaccgacgttataatggcctttcaggccatgtgtagggggtacctcgctcgcaaagcatttgccaagcgccagcaacagctgacagccatgaaggtaatccagcgaaactgcgcagcttatctgaagctgcgtaactggcaatggtggagactgtttaccaaggtgaagccgttactccaagtgacccgacaggaggaggagatgcaagctaaggaagacgagctgcagaaaaccaaagagagacaacagaaagcggagaacgaactgaaggagctggaacagaaacactcccagctgacagaagaaaaaaatcttcttcaggaacaattacaggcagagactgagctgtacgccgaggctgaggagatgcgcgtgcgcctggccgccaagaaacaggagctggaggaaatcttgcacgagatggaagcccggttggaagaggaagaggatcgcggccagcagttacaagcagaacgcaaaaagatggctcagcaaatgctcgacctggaagaacagttggaagaagaggaggcggcccgacagaagctgcaactggaaaaggtcactgccgaggcaaagatcaaaaagcttgaggatgaaattttggtgatggacgaccagaataataagttgagcaaagagcggaaattattggaggagcgaatctcagacctgactacaaatcttgccgaggaggaggagaaagcaaaaaatttgaccaaactgaaaaataagcacgagtctatgatctccgagcttgaggtgcggttgaagaaggaagagaagagtcgacaggagctcgaaaaactgaagagaaaactcgagggggacgcatcagattttcatgaacagattgcagatctgcaggctcagattgccgagcttaaaatgcaacttgctaagaaagaggaggagctgcaagccgcacttgcccgactggatgacgagattgctcagaaaaacaacgcattgaagaaaatcagagagctggaaggacacataagcgacctacaggaggacctcgattccgagcgcgccgcccgcaacaaagcagaaaagcaaaaacgagatctgggtgaagaactagaagctcttaagaccgaacttgaggatacacttgactccacagccacacagcaggagttgagggctaagagagagcaggaggtcacggtacttaaaaaggctctggacgaggaaacaagatcccacgaggcgcaggtgcaggaaatgcggcagaaacatgcccaggccgtggaagagctgacagagcagttggaacaattcaagagagctaaagccaatctagataaaaataagcagactctggaaaaggaaaatgcagatctggccggcgagttgagagttttagggcaggctaaacaggaagtcgagcacaagaagaaaaaactcgaagcccaggtccaggagctgcaatccaaatgctccgatggcgaaagggcgagagcggagctcaatgataaggtgcacaaactgcagaatgaggtggaatccgtgaccggcatgctcaatgaagccgaaggaaaggctatcaaactggccaaggacgtggcctccctctcctctcagcttcaggacacccaggaactgctacaggaggaaacccggcaaaaactcaatgtgagtactaagttgcgacagctggaggaggagagaaattctttgcaggaccagctagatgaggaaatggaagcaaagcaaaacctggaacgccacatttcaaccctgaacatacagctgagtgactctaagaaaaagctgcaggacttcgcctccactgttgaagccttggaagaaggaaaaaaacgattccagaaggagatcgaaaatctgacccaacagtacgaggagaaggccgcagcttacgataagctggaaaaaactaaaaatcgcctgcagcaggagctggatgaccttgtggtggaccttgataaccagagacagttggtgtccaatcttgagaaaaagcaaaggaagtttgaccagctcctggccgaagaaaagaacatctctagcaaatacgctgacgagcgggatcgagcagaagcagaggccagagagaaggaaaccaaagccctgtccttggctcgggctctggaagaagcccttgaggcgaaggaggaactggaaagaaccaataaaatgttgaaggccgaaatggaggatctagtgagttccaaggacgacgtggggaaaaatgtgcatgagttggaaaagtctaaacgcgctctggaaacacaaatggaggagatgaagacgcagctggaagagttggaggatgagctacaggccactgaagacgctaagttacggctcgaagtgaacatgcaggcccttaaagggcagtttgagcgagacctgcaggctcgagatgagcagaatgaggagaagagaagacagcttcagcgtcagctccatgaatatgagaccgagttggaggacgaacggaagcagagagcattagcggccgccgccaagaagaagctggaaggcgatctcaaggaccttgaactgcaggccgacagcgcaattaagggaagagaggaggcgattaagcaactgcggaagttgcaggcccagatgaaggacttccagcgcgaactggaggatgccagggccagccgcgatgaaatcttcgctaccgcaaaagagaatgagaagaaggccaagtctctggaagccgatctgatgcaactgcaggaggacctggccgctgcggaaagggcccgcaaacaggctgatctggaaaaagaagagctggcagaggaattggcatcctcgctttccggacgtaatgccctccaggacgagaagcgaaggttagaggctcgaatcgcccaacttgaggaggagctggaagaggaacagggcaacatggaggcaatgtccgacagagtcaggaaagccacacaacaggctgagcaactgtccaatgaactggctacggagcgctcaaccgcgcagaaaaacgagagtgcacgacagcaacttgagagacagaataaggagttgcgctctaaactacacgagatggagggtgccgtgaagtccaaattcaagtccacaatcgctgccctggaagccaagatcgcacagctggaggaacaggtcgaacaagaggcccgggaaaaacaggccgccaccaagagcctgaaacaaaaggacaaaaagctaaaggagatcctgctgcaggtggaagatgagagaaagatggccgaacagtataaggaacaagccgaaaagggaaatgcccgggtgaagcaacttaagcgccagttggaggaggcggaagaggaatcccaacgcattaacgctaacaggcggaaattgcagcgtgagctcgatgaggcaacggaaagtaatgaggctatgggcagggaggtcaatgctctcaaaagcaagcttcggggcccaccaccccaggagacatcacagtag

SEQ ID NO: 125499 - DNA, 5817 bp, synthetic construct
  misc_feature 1..5817: note = Description of Artificial Sequence: Synthetic coding sequence
  source 1..5817: mol_type = other DNA
atgagttcagatgccgagatggccatttttggagaggccgccccatacctgcgcaaacctgagaaagagcgcatagaggcccaaaataggccattcgactccaaaaaagcatgtttcgttgcggataacaaggagatgtatgtgaaaggcatgatccagacccgggaaaacgacaaagtgatcgtcaagaccctggatgaccgcatgctgaccctgaacaatgatcaggtgttccccatgaatcctcccaagttcgataagatagaagatatggcaatgatgacccatctgcacgagcctgctgtcctttacaacctcaaagaacgctatgctgcctggatgatttatacttactcggggctgttctgcgtcactgtcaatccttacaagtggctacctgtttataagcctgaggtcgtagcggcttaccggggcaaaaaacgccaggaagcgcctccccacattttcagcatatctgataacgcataccagtttatgttgaccgacagggacaaccagagcatccttatcacaggagagtcaggagccggaaaaacagttaacacgaaacgtgtcatccaatattttgcaacaatcgccgtaaccggcgataaaaaaaaggagacgcaaccgggtaagatgcaaggaaccttagaggatcagatcatccaggccaatccactcttggaggccttcggcaacgcaaagactgtacgcaatgacaactctagtcggtttggcaaattcatcagaattcactttggagccaccggcaaactcgcgagtgcagacatcgaaacttatctcctcgaaaagagtagagtgacattccagctcagcagcgagcgctcttaccacattttttaccagataatgtccaacaaaaagccagaactgattgatctattgctgatttctacaaacccatttgacttcccatttgttagccagggagaggttaccgtggccagcatcgatgactcggaggagctgcttgctaccgataatgccattgacatcctgggctttagttcagaggaaaaggtaggtatctacaagctaaccggcgcagtgatgcattacgggaatatgaagttcaaacagaaacagcgggaggagcaggccgagcctgacggcaccgaagtggcggacaaagccggatacctgatggggttgaacagtgccgaaatgctgaaaggtttgtgttgccctagagttaaggtggggaacgagtacgtgaccaaggggcagaatgtccagcaggtcactaattccgtcggcgcgctcgccaaagccgtgtatgaaaaaatgttcttgtggatggtgacccggatcaatcagcagctggacactaagcagcctaggcaatactttataggagtgcttgacattgccggcttcgagatctttgactttaattccctcgaacagctctgcatcaatttcaccaacgaaaaactccagcaattttttaaccatcatatgtttgtcttggaacaggaggaatacaagaaggaggggatagagtgggaattcattgatttcggcatggatcttgcagcctgtatcgagcttattgagaagcctatggggattttctccatccttgaagaagagtgtatgtttccaaaagccacagatacatcgtttaaaaataagctctacgaccagcatttgggtaaaagcaataattttcagaaacccaagccggcgaaaggcaaagcagaggcccacttctcactggtgcattatgctgggacagtggattataatatcgccggctggctagataaaaacaaagatcctctcaatgaaacagtggtgggcttgtatcagaaaagctccctgaagcttctaagcttcttgtttagcaactatgcaggcgccgagaccggcgactccggtgggtccaagaagggagggaaaaagaaagggagtagctttcagaccgttagtgcagtatttagagagaacctgaacaaattgatgaccaacttacggagcacccatccacatttcgtcaggtgcttgattccaaacgagacaaagacccccggtgtgatggaccactacctggtcatgcatcagctacggtgcaacggggtcttagaaggcattcgcatatgccgcaagggttttccttcaagaattctctatgcggacttcaaacagcgctaccggatcctgaatgccagtgccatacctgaaggccagttcatagatagcaagaatgcaagtgagaaacttctgaattccattgatgtggatcgcgagcaattcaggttcggcaataccaaagttttttttaaagccggcctactgggtctactcgaagagatgagggacgagaaactggtcacgttgatgactagcacgcaggccgtttgccgtggctacctgatgcgcgtagagttcaagaaaatgatggagcggcgggactccatcttttgcatccagtataacattagatccttcatgaatgtgaaacattggccttggatgaacctcttctttaaaattaagccgctgctgaaatcagccgaggcagagaaggagatggctaccatgaaggaagatttcgagcgaacgaaagaagaattggcgagaagcgaggcccgcagaaaggagcttgaggagaagatggtcagcctattgcaggagaaaaacgaccttcagcttcaggttcaatctgagacagaaaacctaatggatgccgaggaaaggtgcgaaggacttattaaatcaaagattctgctggaggctaaggtgaaggaattaaccgaaaggctggaagaggaggaagagatgaattccgaactcgtggctaagaaacggaatcttgaggataaatgctcctctttaaagcgtgatattgacgacctggagttaaccctcaccaaggtcgagaaagagaagcacgcaacagaaaataaggtaaagaatctctcggaggagatgacggcgctggaggagaatattagtaagctgaccaaggaaaagaagtctctgcaggaagcccatcagcagacgctcgacgatctccaagttgaggaagacaaggtgaacggcttgataaagattaatgcaaagctggagcagcagactgatgacttggagggctccctggaacaggagaaaaagttgagagcagacttggagcgcgctaaaagaaagctggagggcgacttaaagatgtctcaggaatccataatggaccttgagaacgataaacaacagatagaagaaaaactaaagaagaaagaatttgagttatctcagctccaggcaaagattgacgatgaacaggtccactcactccagtttcagaaaaaaattaaagagctgcaggctaggatcgaggagctcgaggaggagatcgaggccgagcacacgctcagagcgaagatcgagaaacagcggtctgacctggctcgcgaactggaagagattagcgagcggctcgaagaggcaagtggagccactagcgcgcagatagaaatgaacaaaaagagagaagctgagttccaaaagatgcgccgagatttagaagaggcgaccttgcagcacgaggccacagctgctactcttaggaagaagcaggccgatagcgtggccgagctcggagagcagatcgacaatctccagcgggtcaagcagaaattagagaaggagaagtccgagctgaagatggagatcgacgatatggcatctaatatcgaggccctctccaaatcgaaatccaatattgagcggacatgcagaacagtggaggatcagttttcagagattaaagcaaaagacgagcagcagacccaattaattcatgacctgaacatgcagaaagctagactgcaaacccaaaatggggaactttcacacagagtggaggaaaaggagagcctgatcagtcagctgacaaagagcaagcaggcactgactcagcagctcgaagaactgaaaagacagatggaagaggagaccaaagctaaaaatgccatggctcacgccctacaatctagcaggcacgactgtgacctgctaagggagcagtacgaggaggagcaggaggcaaaggctgagctgcagagagcgctgtccaaagcgaactccgaggtggcccaatggcggaccaaatacgagactgatgctatccagaggactgaggagctcgaggaagctaaaaagaaattggctcagcggctgcaggaagccgaggagaacactgagacagctaactctaagtgcgcgtcattggagaaaacaaagcagcgtttgcagggagaagttgaggatctgatgagggacctcgagcgcagccacacagcatgcgctacactggataaaaagcagaggaactttgacaaagtcctagccgagtggaagcaaaaactcgatgagagccaggccgagcttgaggcggcacagaaggagtcccgcagcttaagtaccgaactgttcaaaatgcgtaacgcatacgaggaagtagtagaccagctggagactttgcggcgggaaaacaaaaacctccaggaggaaattagtgatttaacagagcagatagctgaaacaggaaaaaacttgcaggaggccgagaagacaaagaagctggtggaacaggaaaaatccgatctccaggtggcgctagaggaggtggagggctccctggagcacgaggaaagtaaaattctccgtgttcaactggagctgtcccaggttaaatctgagcttgaccggaaagttatcgagaaagatgaggagatcgagcagcttaagcgtaatagtcagagggctgccgaggcactccagtcagttttggatgccgaaatccgttctcgcaatgatgcattgcgcttgaaaaagaagatggaaggcgacctgaacgaaatggagattcagttgggacattccaaccggcaaatggcagaaacacagaagcatctcaggacagtacagggacagttgaaggacagtcagctgcaccttgatgacgcgctgcgatcaaacgaagacctcaaagagcaattggccatcgtggagcgcaggaatgggctgctgcttgaggagctggaagagatgaaggtggcccttgaacagacagagagaactaggcggttgtcagaacaggagcttttggacgcctctgaccgggttcagctcttgcactcccagaacaccagcttaattaatactaagaaaaagctcgaggccgacatagcccagtgtcaggcagaagtcgaaaacagcattcaagaatctcggaatgcggaagagaaggccaagaaggcaataaccgatgccgcgatgatggctgaagaacttaagaaagaacaagatacatccgcccacctggaaaggatgaagaaaaaccttgagcaaacagtcaaggacctgcagcatagacttgacgaggccgagcagctggccctgaaaggaggaaagaaacagattcagaaacttgagaaccgggttcgagaactagaaaacgaattggacgttgagcaaaagcgtggggcagaggccctaaagggcgcccacaaatacgagcgcaaggtgaaagagatgacctaccaagccgaggaggaccacaagaacattctgcgtcttcaggatctcgtggataaactgcaggccaaagttaagtcctacaagcgccaagccgaggaagccgaggaacaggcgaacacccagctgtcccgctgtagaagggtccaacacgaactggaagaagctgcggagcgggccgatattgccgaatcccaggtgaacaagctgagagctaaaagtagggatgttggttcccagaagatggaagagtag

SEQ ID NO: 125500 - DNA, 2001 bp, synthetic construct
  misc_feature 1..2001: note = Description of Artificial Sequence: Synthetic coding sequence
  source 1..2001: mol_type = other DNA
atgttgtctcatatgttgtacaagaaggagaacgccatcgatattctgggattttcgagtgaggagaaggtagggatatacaagctgactggggcagtgatgcactacggaaacatgaaattcaagcagaagcaaagagaggagcaggcagaacctgacggcacggaagttgcagacaaggccggatatctgatgggcctaaactccgccgaaatgctgaaaggattgtgctgccctagggtcaaggttgggaacgaatacgttacgaagggccaaaatgtgcagcaggtcactaattctgtcggcgccttggcaaaagctgtctatgagaaaatgttcctgtggatggtgacacggataaatcagcagctggatacaaagcagcctaggcagtactttataggcgtgctcgacatcgccggtttcgaaatctttgacttcaatagcctggaacaactttgcatcaattttactaacgagaagctgcagcagtttttcaaccatcacatgttcgttctagagcaggaagagtacaagaaggaaggaatcgagtgggagtttattgattttggcatggatctagccgcgtgcattgagttgatcgagaaacccatggggattttttccatacttgaggaagagtgcatgttcccaaaagcaaccgacacaagttttaagaataaactgtacgaccaacacttgggcaagtcaaataattttcaaaaacctaaacccgccaagggcaaggcggaggcccacttctctctagtgcattacgccggcactgtggactacaatatagcaggctggctggataaaaataaagatcccctcaatgaaacagtggttggcctctatcaaaagtcaagtcttaaattgctgagcttcctattttccaattatgcaggagccgagaccggagacagcggcgggtccaaaaagggcggcaagaagaaggggagttcttttcagacggtgagtgctgtgtttagagaaaatcttaacaagctgatgacaaatttacggtccacccacccgcatttcgttcggtgcctgattccaaacgaaaccaaaacccccggtgtgatggaccactaccttgttatgcaccagctccgctgcaatggcgtgttagagggtatccgtatctgtcgcaagggattcccaagtcggatcctgtacgcggacttcaagcagagatatcgcatcttaaacgcctctgctatccctgagggtcaattcatcgactctaagaacgcctctgagaaacttctcaacagtattgatgtggatcgggagcaattccggtttgggaacactaaagtattctttaaagcgggcctgctgggcctactggaagaaatgcgggatgaaaaattggtgacactgatgactagcactcaggccgtctgtaggggctatctgatgagagtggaattcaaaaaaatgatggagagacgtgatagtatattttgtattcagtacaacattcgtagtttcatgaacgtgaagcattggccctggatgaacctctttttcaagatcaagcctttgctgaaaagtgccgaagccgagaaagaaatggccaccatgaaagaagacttcgagcgaactaaggaggaactggcacgctctgaggcgcggagaaaagaactgaccgagaggctggaggaagaggaagaaatgaactcggagcttgtcgccaagaagaggaatctggaggacaagtgttccagcctcaagagggatattgacgacctggagctgactctgactaaggtcgagaaagaaaagcacgccacggaaaataaagtgaaaaacttgagtgaagaaatgacagcacttgaggaaaacatttctaaactcaccaaggagaaaaaatccttgcaggaagcccaccagcaaacattggatgatttacaagtggaggaggacaaggtgaacggattgattaaaataaacgctaaacttgaacagcagacagacgacgagggcgtgtag

SEQ ID NO: 125501 - DNA, 6111 bp, synthetic construct
  misc_feature 1..6111: note = Description of Artificial Sequence: Synthetic coding sequence
  source 1..6111: mol_type = other DNA
atggcagccgtgacaatgagcgtgcctgggaggaaggcgccaccaaggcctggaccagtgccagaagccgctcagccttttctatttactcctcggggccccagcgccggaggcggaccaggaagtgggacatccccccaggttgagtggacggcccggcggcttgtctgggtgccctctgaattacacggattcgaagccgctgccctcagggatgagggggaggaagaggcagaggtggaactagccgaatcaggaagacgtctgaggctgcccagggaccaaatacaacgcatgaatccaccaaaattcagtaaggctgaggacatggccgagctgacatgtctgaacgaagcttctgttctgcacaacctgcgggaacggtattactcgggcctcatctacacctactctggactgttctgtgttgtgataaacccatataaacaactccccatttatacagaggccattgtcgaaatgtaccgtgggaagaagaggcacgaagtccccccacatgtgtatgccgtgaccgaaggggcctaccgttctatgctgcaggatcgagaagatcagagtattctgtgcaccggggaatcgggcgccggaaagaccgaaaacactaaaaaagtcattcagtacttagcgcacgtggcttcgtctccaaagggtagaaaggagcctggcgtccctgcatcagtctccaccgtcagctatggcgagcttgagcggcagctgctgcaggctaaccccatccttgaagcgtttggaaacgccaagacagttaaaaacgataattcttctcggttcggaaaattcattcggattaactttgatgttgccggctatatagtaggcgctaacatcgaaacctatctgctagagaaaagcagagctatccggcaggccaaagatgagtgtagtttccacattttctaccagctgctaggcggagccggcgaacagttaaaagccgacctgctgctggaaccttgtagccactatagatttctcacaaatgggcctagttctagcccaggccaggaacgggaactattccaagagaccctagaatctttgagagtcctgggattttcccacgaggagattatatctatgctgcgtatggtctccgccgtgctgcagttcggcaacatcgctctgaaacgtgagcggaacacagatcaggctaccatgccagataatactgcagcccaaaagttgtgccgcctcctagggttgggagtgaccgacttctcaagagcccttctcacgccaagaatcaaggtggggcgcgattatgttcagaaggcccagaccaaggaacaagcagactttgcgctggaagctctggcaaaggcaacatacgaacgccttttccggtggctcgtactcaggctcaatagggccctggaccgaagcccacggcagggggcctccttccttggaatcttagatattgctggctttgagatctttcagttaaattcattcgagcagctatgtatcaactacactaatgaaaagcttcaacagctctttaatcacacaatgttcgttctagaacaagaagaataccagagagagggcattccctggacctttctcgatttcggtctggacttacagccgtgtattgacttaatcgagaggccggcgaatccccccggcctactggccctgcttgatgaagagtgttggttcccgaaagctacggacaagagtttcgtggaaaaagttgcccaagagcaaggcggccacccaaagttccagagacccagacacctcagggatcaggccgatttctccgtgctgcactacgccggcaaagtggactataaggccaatgagtggctgatgaagaatatggatcctctgaacgataatgttgcggcactgctacaccagtcgacagatagactgaccgcagagatctggaaagatgagcacgggggcttccagcagttttccttcctgggcagctttcctcctagccccccgggcagtgcagagcgctgctcgtcagctatctcaccacctggcgtagagggcattgtgggacttgagcaggtgtcttccctcggcgatggcccccccggaggacgaccccgcaggggaatgttccggaccgtgggtcagctttataaggagagcctcagcagactgatggcaactttgtctaacaccaatcccagctttgttcgctgtattgtgcctaaccacgaaaaaagagccggaaaattggagccccggcttgtcctcgaccagttgaggtgtaatggagttctcgaggggatacgcatttgcaggcaagggttccccaatcgtatactgtttcaggaattcagacagaggtacgagattttaaccccaaacgcaattcccaaagggttcatggacggcaaacaggcttgcgagaaaatgattcaggcattggaacttgatcctaatctatacagagtgggacaatccaagattttcttcagggccggcgtgttagctcaactggaagaagaacgggacttgaaagtcaccgacatcatcgtgtctttccaggcagctgctaggggctaccttgcccgacgcgcattccagaagcgacagcagcagcagagtgcactgagggtgatgcagagaaactgtgccgcttatctcaagctgaggcactggcagtggtggcggttatttacgaaagttaagccactgctccaggtcactcggcaggatgaggtgttacaggcccgggctcaggagttgcaaaaagtccaggagctccagcagcagtccgccagagaagttggcgagttacaagggagagtcgcgcagctcgaggaggagagagccaggcttgctgaacagctgagagcagaggccgagctctgcgcagaggctgaggaaacaaggggccggctggctgctcgtaagcaagagctggaattagtggtgtcagagctggaggcccgcgttggcgaggaagaagaatgcagccgacagatgcagacagagaagaagaggctccagcaacacattcaggagctagaggctcatctggaagccgaagagggtgctcgacagaagctccagctggagaaggttactactgaggctaagatgaaaaagttcgaagaggacctgctgctgctggaggatcagaactccaagctgtccaaggaaagaaaactgcttgaggaccggctggccgaattctcatcacaagcagcagaagaggaggagaaggtgaagagtttgaataagttacgcctgaaatacgaagctacgatagctgacatggaggaccgattaaggaaggaagagaagggcagacaggagctggaaaagctgaaacgacggctagatggggaatcatctgaacttcaggagcagatggtcgagcagcagcaaagggccgaagaactcagggctcagctgggccgcaaggaggaggagctgcaggcagctctcgctagagctgaggacgaaggaggcgctcgtgctcagttactgaagagcctccgcgaggcacaagccgcactggccgaggcccaggaagacctcgaaagcgagagagtggccaggacaaaagcagagaaacagagacgcgacttaggagaggaacttgaagccttacgaggtgagctggaagacactttggattccactaatgctcagcaagagctgcgctccaagcgcgaacaggaggtgaccgagctgaagaaaacattagaggaggagaccagaatccacgaggctgctgtccaggagctgaggcagagacacggtcaagcccttggagagttggccgagcaattagaacaagcccgcagagggaaaggtgcgtgggagaagactcgcctggcactggaggctgaggtttcagagctgcgagcagaactgagttccttgcagaccgcacgccaagagggggagcaacgccggcggcgacttgaactccagttgcaggaagtccaaggccgcgctggtgatggggaacgagcccgcgcggaggcggccgaaaagctgcaaagagctcaggccgagctggagaacgtgagcggggcattgaacgaggccgagtcaaaaactatacgactctctaaggagctgagcagcacagaggcgcagcttcacgatgcccaggagctgttacaggaagagacccgagcaaaactcgctctaggatcaagggtgcgggctatggaggcagaggcagctgggttgcgcgagcagttagaagaggaggcagctgcccgagaacgcgctggacgcgagctgcagacagcccaggctcagctgtcagaatggcgacggaggcaggaagaggaggccggtgcgctggaagctggcgaggaggctcgacgccgagcagccagagaagctgaggcactaacacagcggctcgctgaaaaaacagagaccgtcgataggctggaacgcggcaggaggcgccttcagcaagagctggatgacgccaccatggacctggaacagcaacggcaacttgtctcgacattggaaaaaaagcagaggaagtttgaccagctcctggccgaagagaaggctgccgtactgcgcgctgtcgaggagagggaacgggcagaggcagagggtcgggaaagagaggcccgagccctgagcctgacccgcgcgctagaggaggagcaggaagctagggaggagctagaaaggcagaacagggctcttagggccgaacttgaagctttgcttagtagtaaggatgacgtgggtaagtcagtgcatgagctggagcgggcgtgtcgcgttgctgagcaggcagccaatgacctcagagcccaggtcaccgaactggaggatgagctgactgccgcagaagatgccaagctgaggctggaagttactgtgcaagctctgaagacacagcatgaacgagatctacaggggagagatgaggcaggagaggagcgcaggcgccaacttgctaaacagcttcgagacgccgaagtcgagagggacgaggaaaggaagcagagaactctagcagtagctgcgcgtaagaagctggagggggaactggaggagctcaaggcgcagatggcctctgctggccagggaaaggaagaagcagtgaagcagctgcgtaaaatgcaagctcagatgaaagaactttggcgcgaggtagaagagacacgcactagccgagaggaaatctttagccagaaccgcgagagcgaaaagcgtctgaaagggctggaagcagaagtgctccggttgcaggaggaactggctgcatcggaccgagcccggagacaagcacaacaggaccgcgacgaaatggccgatgaggtggccaacggtaacttgtctaaggccgcaattctggaggaaaaacgtcagctcgagggacgcttaggccagttggaggaagaacttgaggaggagcagtcaaacagcgagcttcttaatgataggtataggaagctcctcttgcaggtcgaatctcttactacggaactgtctgccgagcgatccttctccgcaaaagccgaaagtggacggcaacagctagaacggcaaattcaggaattacgcgggcgtctcggcgaggaagatgctggcgctcgagctaggcataaaatgacaatcgctgccctcgaaagtaagctggcccaggctgaagaacaattggagcaggagacgagagaaagaattctgagcggaaagcttgtccgaagagccgaaaagcgcctcaaggaggtggtattgcaggtagaggaagagaggcgagtagccgaccaactgcgggatcagcttgaaaaggggaatctcagagtcaagcagctaaaaagacagctggaggaggccgaggaagaggcttcccgggctcaggccggaaggcgccgcttacagcgcgaattagaagatgtaacagagtcagctgagagcatgaatagagaagtcacaacacttcgcaataggctgcggcggggtccactgaccttcactacccgcactgttagacaggttttccggctggaggagggtgtggcgtccgacgaagaggccgaggaagctcaacctggctcaggacccagccctgaacccgaaggctcaccccccgcccatccccaatag

SEQ ID NO: 125502 - DNA, 4437 bp, synthetic construct
  misc_feature 1..4437: note = Description of Artificial Sequence: Synthetic coding sequence
  source 1..4437: mol_type = other DNA
atggctgcggtgactatgagtgtgccaggccgtaaggcccccccacgaccagggcccgtgcctgaagccgcccagcctttcctgtttacaccccgggggccctcagcgggaggcggcccagggtccggtacctcccctcaggtggagtggactgcaaggcgccttgtgtgggtgccaagcgaacttcatggattcgaggccgcagcattgagggatgagggcgaggaagaggcagaggtcgaactggccgagtcaggacggcgtctgcgtctgcctcgggaccaaatacagcgcatgaatccccctaaattttcgaaagctgaagacatggccgagctaacgtgtcttaatgaagcaagcgtgttgcataacctccgcgagcgatattatagtggcttgatatacacatattccgggctgttctgcgttgtgataaatccttacaagcagcttcccatctacactgaagccattgtggaaatgtatcgcggcaagaagaggcacgaagtccctccacatgtgtatgctgtcacggagggcgcctatcgaagtatgttacaggacagggaagatcagagcatcctctgcaccggagaaagtggagccgggaagaccgagaacactaagaaagtgattcagtacctagcccatgtggcttccagccctaaggggaggaaagaacctggggtaccaggcgagttggagagacagttactgcaggcaaaccctattctggaggccttcggtaatgctaaaacagtgaaaaatgacaattcgagccgcttcggtaaattcattcggataaattttgatgtagctggatacatcgtgggggccaatattgaaacatacctgcttgagaagagtagggctatcaggcaagctaaggatgaatgctccttccatatattctatcaacttttgggcggggccggagagcagctgaaagccgatctgctgctagaaccctgttcccattacagatttctgactaatggtcctagcagctcaccaggccaagaacgggagctgttccaggagacactggagtctcttagagtgctgggattcagtcacgaggaaattatctctatgcttcggatggtgtccgccgtcttacagtttggaaacatcgccttaaaacgcgaacgtaacactgatcaggccaccatgcctgacaatacagcggctcagaaactctgtcggctactgggcctgggtgtgaccgatttcagtcgcgcgctgctcaccccgcggatcaaagtcgggagggactatgtgcagaaagcacaaacaaaggaacaggctgacttcgccctcgaagctcttgcaaaagcaacctatgaaaggctttttaggtggttagtgctccgtcttaatcgggcccttgatcgctctcctagacagggcgctagtttccttggaatccttgatatcgctggtttcgagatttttcagttgaactccttcgaacagctatgcattaattacacaaacgagaaactgcaacagctgttcaaccatacaatgtttgtcttggagcaggaggaatatcagcgcgaaggaatcccctggacattcctggactttggactagacctacaaccttgtatagatctgatcgagcggccagcaaatcctcccggtcttctggcgctcctcgacgaggagtgctggttccctaaggcgacggataagtcattcgttgagaaagtggctcaggagcagggtggacacccgaagtttcaacgacctaggcacttacgggaccaagccgacttctcggtactgcattatgctggtaaagtagactacaaagccaatgagtggctgatgaagaacatggatcccctgaatgacaacgtcgcagcactgctgcatcagagcaccgatcgcctcactgccgagatttggaaggatgtcgaaggcatagtagggctggagcaagtcagctcattgggggacggacctcctggcggtcgtccacggcggggaatgttcaggactgtgggtcaactctataaggaatcgctctcacggcttatggccaccctgtctaacaccaacccaagctttgtgcgttgtatagtgccaaatcatgagaagcgggcgggcaagctcgagccacgactggtgttagaccagcttaggtgtaatggggtgttagaaggcattcgaatatgccggcagggattccctaatcggatcctattccaagagttccgccagcggtatgagatcctaacacccaatgctattcctaaagggttcatggatggcaagcaggcttgtgaaaaaatgatccaggcactggagctggaccctaacctataccgcgtggggcagtcaaaaattttctttcgagccggcgtgctggcacagctggaggaagagcgcgacctcaaagttaccgatatcattgtgagcttccaggctgctgcaagaggctacctggctcggcgggctttccagaagaggcaacagcagcagtctgctctccgtgtaatgcagagaaattgtgctgcataccttaaattgaggcactggcaatggtggagattgtttacaaaagtgaagccactcctgcaggtgacaaggcaggacgaagtgttgcaagccagggcccaggagctgcagaaagttcaggaactgcagcagcagtctgcccgtgaagtgggcgaactccagggccgcgtggcacagttggaggaggaacgggcccggttggcggagcaactgcgggccgaagccgagctatgtgcggaagcagaggaaactcgtggccgactggcggctcggaagcaggaattagagctggtggtttcagaactggaagcacgtgtcggggaagaagaagagtgctctcgtcagatgcagacagaaaagaagaggctccagcagcatatccaagagttggaggcgcacctggaggcagaagaaggcgcgagacaaaaactgcaacttgagaaagtcaccactgaggccaagatgaaaaaatttgaagaggaccttttactgctggaggaccagaactccaagctgtctaagagcggctcttgttggaagatagtgtggccaagctcccacccaaggcagttgagaagaaggaggcgctctcgggcaagtatttcatatggtagtaacatgaggccccagtcccagacttggagggaccggttacgaaaggaggagaaaggccggcaggaactcgaaaagctgaagcgacggctggacggagaaagcagcgagcttcaggaacagatggtcgaacagcaacaaagggctgaggagctgagagctcaactcggccgcaaggaagaggagctgcaggctgcgctcgcgcgagcagaggatgaggggggcgctcgtgcccaactgctgaaatcactacgggaggcccaggctgctctggctgaggcacaggaagatctggagtccgagcgggttgccaggacaaaagccgaaaagcagcggagagacctgggcgaagagttagaggcactgaggggagagctcgaggatacactggattctactaacgcccagcaagagctgaggagcaaaagagaacaagaggtcaccgaactcaagaaaaccctagaagaggagactagaatacacgaagctgccgtacaggagctgaggcaaagacacggacaggctctcggcgagctcgctgagcagcttgagcaagcccggaggggaaagggcgcttgggaaaaaacgaggctggccctggaggcggaggtgtccgaattgcgcgccgaactatcaagccttcagactgctcgccaggagggggaacaaaggcggcgcagattggaactgcagctgcaggaagtgcagggcagggcgggagatggagagagagcgcgcgcggaggctgcagagaaactgcagagagcgcaggctgaactagaaaacgtatctggggctctgaacgaggcagaatctaagaccatacgattgtctaaagagttgtcatccaccgaggcccagctgcacgatgcacaggaacttttgcaggaggaaacaagggccaagcttgctttagggtccagagttcgggcgatggaggcagaagccgccggcctgcgagaacagctggaagaggaggcagctgcccgcgaaagagcgggaagggagctgcagaccgctcaggctcaacttagcgagtggaggagacggcaggaagaggaagctggcgctctagaggcgggggaagaagcccgtaggagagccgcacgcgaggctgaggctctcactcaaagactggcggaaaaaacagagaccgtagacagactggagcgcgggcgtcgtagactccagcaggaactggatgatgccacactgtcacctgacgctctgactgacggagctcaacccccgtcctcacttgacccgacaggtccatgccctcgcaatcctgcactttag

SEQ ID NO: 125503 - DNA, 5340 bp, synthetic construct
  misc_feature 1..5340: note = Description of Artificial Sequence: Synthetic coding sequence
  source 1..5340: mol_type = other DNA
atggctgccgtaaccatgagcgtccccggaagaaaggctccacctcgacccggccctgtcccagaagcagctcagcccttcctattcactccaaggggaccttcggcaggcgggggtccgggttctggaacttccccccaagtagagtggaccgctaggcgtctcgtttgggtcccgagcgaacttcacggatttgaagccgcagccctccgggacgagggcgaagaagaagcagaggtggagttggccgagagcgggcgccgcctgcgattaccccgggaccagatccagaggatgaaccctcctaaatttagtaaggctgaggatatggccgagcttacctgcctgaatgaggcttccgtgctccacaatcttagggaaagatattactccggtctcatttacacttatagcggtctcttctgtgtggtcataaacccctataagcagttaccgatctacaccgaagccattgtggaaatgtataggggcaagaagcggcacgaagtcccccctcacgtctatgccgtaacagagggggcatacaggagtatgctgcaggaccgagaagatcagagcatcctatgcactggagagtccggtgcagggaagactgaaaataccaagaaggtcatccaatatttggcccatgtggcatccagcccaaagggccgtaaagaacccggcgttccgggagaattggaacggcaattgttacaagccaatcctatcctggaggcgttcggaaatgcaaagacagtgaaaaatgacaatagtagccgcttcgggaagttcattcgcattaatttcgacgttgcaggctatattgtaggggctaatattgagacttatttacttgagaagagccgagccatcagacaagccaaggacgagtgcagtttccatatcttctaccagctgctgggtggggccggtgagcagcttaaggccgacctcctgctcgagccatgtagccactaccgatttctgaccaacgggccatcctcaagccccggtcaggagcgcgaactatttcaggagaccttagaaagcctcagagtgctgggcttttcccatgaagagatcatttctatgctgagaatggtgtccgctgtgctacaatttggtaacatcgcattaaaacgtgagcggaacacagaccaggctactatgccagacaataccgcagctcagaagctgtgccggctcttaggtctaggcgtgactgatttttcgagggctctgcttacaccccgaatcaaggtagggagggattatgtgcagaaggcgcagactaaggagcaagccgactttgccctcgaagcgctagctaaagctacttatgagcgtctgtttcgatggctggtcctgagactcaatagagccctcgataggagcccccggcagggtgcctcttttctgggcatactggacattgcaggctttgagatctttcagctgaattcttttgagcaactgtgtataaattacacaaacgagaagctccaacagctctttaaccatacaatgttcgtcttggaacaggaggaataccaacgagaggggataccttggactttcctcgattttgggctggatctgcagccctgtatagatctgattgaacggcccgctaatcccccaggactgctggcactgcttgacgaagagtgctggttcccgaaggccacagataaatccttcgtggagaaggtagctcaggagcaaggcgggcatcccaagttccagcgacccagacacctgcgagaccaggcggatttcagtgtcctacattatgccggaaaagtggactacaaggctaacgagtggttgatgaagaacatggaccctctcaacgacaacgtggcagccttgctccaccagtcaacggaccgattgaccgccgaaatctggaaggacgtggaaggcattgtaggactcgagcaggtctctagcttgggagacggtccaccgggtgggagaccacgacgtggaatgtttcgtactgttggacagctgtataaggagtctctctctcgcctcatggccactcttagcaatacaaatccctcctttgtgaggtgcatcgtgcccaatcacgaaaagcgggctgggaagctcgagccgaggctggtgctggatcagttgaggtgtaacggcgtcctggaaggtatccggatctgtaggcagggatttccgaaccggatcctgtttcaggaatttaggcagagatacgaaatactcactcccaacgcaatcccaaaaggttttatggatggcaaacaagcctgcgagaagatgattcaagcgctagagcttgatcctaacctctaccgagtgggccaaagtaaaattttcttcagagccggcgtattagcccagctggaggaggagagggatttgaaagtgacggacattattgtgtcttttcaagccgccgccagagggtatctggcccggagggctttccagaaacgacagcagcagcaaagcgccctcagagtcatgcagaggaattgcgccgcctacctgaagctcaggcactggcagtggtggcgcctgttcactaaagtcaagccgctgctccaggttacccgccaagacgaagtgctacaagccagagcgcaggaactgcagaaggtccaggagctgcagcagcagagtgcccgcgaagtcggagaactccaaggacgagttgctcagttagaagaagagagagctcgcctggccgaacaactacgggccgaagctgagctgtgcgccgaagctgaagagacacgcgggcgtttagccgcccgaaagcaggaattagagctagtcgtgagcgagctggaagcccgcgtcggagaggaggaagaatgttccaggcagatgcagacagagaagaagcggctgcagcagcacatacaagagctcgaggctcatctagaggccgaggagggtgctcgccagaagctgcagctcgagaaggtaacaaccgaggcaaaaatgaagaagttcgaagaggatttactgcttctagaagaccagaatagtaaactaagcaagtctggtagctgctggaagatcgtgtggccttcttcccacccccgccaacttcgaagacgccggaggagtagggcctcaatttcttacgggtccaacatgaggccccagtcccagacatggcgagacaggttgcgcaaggaggaaaagggtaggcaggagctggaaaagctgaaacggcggctggatggcgagtcttccgaactccaggagcagatggtcgagcagcagcaacgcgccgaagagctaagagcacagctgggcagaaaggaggaagagcttcaggctgccctcgctagagcagaggacgaagggggtgcacgggctcagctgctgaagtccttacgcgaggcccaggcagccctggcagaagcccaagaagatctggagtcagagcgggtggctcggactaaagcggaaaaacagcgaagggacttaggcgaagagttggaagccttacggggagaactggaggatactctcgattcgaccaacgcccagcaggaactccgaagcaagcgcgagcaggaggtgactgagttaaaaaaaacgctcgaagaggaaacgaggatccacgaagctgctgttcaagagctaagacagagacacggccaggccctaggagaactggccgaacagctggagcaggcaaggagaggcaagggagcgtgggagaagactcgactggccctggaagcagaagtttcagagcttcgtgccgaactgagtagtttgcagaccgccaggcaagagggtgagcagagacgccgccggttggaactacagctgcaggaggtgcagggcagggcaggggacggggagagagcacgggccgaagccgccgaaaagctccagcgagctcaagcagagctagaaaatgtgtctggagccctcaacgaggctctgttgtcttcgaaagacgatgtaggaaaaagcgtgcacgagctagagcgcgcttgtagggtggccgagcaggccgctaatgatctgcgcgcccaagtgaccgagctagaagatgagctgaccgctgccgaggatgccaaactccgactggaagtgacagtccaggctctgaaaactcaacatgaaagagatctgcagggacgggacgaggccggtgaggagcggcgcaggcagctagccaaacagctgcgggacgcagaggtggaacgggatgaagaaaggaaacaaaggactctggccgtggccgcccgcaagaaactggagggcgaactggaagaattgaaggcccagatggctagtgccggacagggaaaggaggaggccgtgaagcaactgaggaaaatgcaggctcaaatgaaagagctgtggcgagaggtcgaggaaacccggacatcaagggaagaaatcttctctcaaaaccgcgagagcgaaaagcggctgaaggggttggaggccgaggtccttaggctccaggaagagctcgcagctagtgacagggccaggcggcaggcacagcaagatcgggacgagatggcggacgaggttgccaacgggaacctttctaaagcagctattcttgaggaaaagagacaactggaaggtagactgggacagctcgaggaagagcttgaggaggaacagagcaatagcgaactactgaacgatagatatagaaaactgctccttcaggtggaatccctgactacagagctgagcgctgagcggagcttttccgctaaggcagaaagtggcagacagcaattagaacggcagatccaagagctgagaggacggctgggcgaagaggatgcaggcgctcgcgcccggcataagatgacaatcgcagctctggaatctaagttggcgcaggctgaggagcagctggaacaggaaacccgtgagcgcattctctctggcaaactggtgagacgggccgagaagcgcctgaaggaagtcgtgttacaagtggaagaagaacggcgagttgcagatcagcttcgggatcagcttgagaaggggaacttacgggttaagcagcttaagcggcagctggaggaggctgaggaggaagcgtctagggcacaggcaggacgccgccggctgcagagggagctcgaggacgttaccgaatccgccgagtcaatgaaccgagaggttaccactctccgcaataggctgaggagagggccccttacatttactaccaggactgtgcgacaggtgttcaggctggaagagggggtcgctagtgacgaggaagctgaggaggcacagccagggagtgggccatcgccggaacctgaaggcagtcctcctgctcacccccagtag

SEQ ID NO: 125504 - DNA, 6087 bp, synthetic construct
  misc_feature 1..6087: note = Description of Artificial Sequence: Synthetic coding sequence
  source 1..6087: mol_type = other DNA
atggcagccgtcaccatgtccgtccctggcaggaaagcacccccaaggcctggaccagttcccgaggccgcccagccttttctattcacccccaggggcccttctgctggaggaggacctggctccggaacgtccccacaggtggagtggactgcgcgtcgtttggtttgggtgcccagtgaactgcacggtttcgaagcagccgccctgagagacgagggggaggaggaagctgaggtcgagctggccgaaagcggacgccgcctccgcctccctcgtgatcagatccaaaggatgaacccacctaagttttcaaaggctgaggatatggccgagctcacatgccttaacgaagcctcagttctgcacaacttgcgcgaacggtattactctggcctcatctacacatactctggcctcttttgtgtagtcataaatccatataagcagctgcctatctatacagaggcaatcgtcgagatgtacagaggcaaaaaaaggcacgaggttcctccgcatgtctacgctgtaaccgagggagcataccgctctatgctccaggaccgagaagaccagtctattctatgtactggcgagtctggcgctggaaagacagaaaacaccaagaaagttatccagtacctggcgcatgtcgcttcatcacctaagggaagaaaggagcctggcgtgcccggggagttagagaggcaactcctgcaggccaatcccattttagaggcctttgggaacgccaaaaccgtgaagaacgataattcatcaagatttggcaaatttatccggatcaacttcgacgtggctgggtacattgttggtgctaacatagagacctatcttctagagaagtcaagagctatcagacaggccaaggacgaatgttcgttccatatcttttatcagctactcggtggcgcgggagagcaattgaaagcagatctgttacttgaaccatgctcgcactataggttcctgacgaacggacctagttcatcccctggccaggagcgcgagctgttccaggaaactcttgagagtctgcgggtcttggggttctctcatgaggagatcataagcatgcttaggatggtgtccgccgtcctgcagttcggaaatatcgcgttgaagcgcgagagaaatacagaccaggccaccatgccggataacaccgcggcgcagaagctgtgtaggctactggggctgggagtgactgatttctctagggctctgctgactcctaggatcaaagtgggaagggactacgttcagaaagcgcagacaaaagagcaggcagattttgcattggaggctctcgctaaagccacgtatgaacgcctgttcaggtggctggtgcttcggctgaatcgggcgctggatcggtccccccgtcagggggcttcctttcttgggatacttgatattgcagggttcgaaattttccagttaaattcattcgaacagctctgcatcaactacactaatgaaaagctgcagcagcttttcaatcacactatgttcgtgctagaacaggaagaataccaacgtgaagggattccatggacttttttggattttggactggatctccagccatgcattgatctgattgagcggcctgcgaaccctccaggcctgcttgctctgctagacgaggagtgttggttccctaaggccactgataagtctttcgtggagaaagtggcccaggagcaaggggggcatcccaagtttcagcggccccggcacctcagggatcaggccgattttagtgtgctacactatgctgggaaagtggactataaggcaaatgagtggctcatgaaaaacatggaccctctcaacgacaacgtcgcagcactcctccatcagagtacagacagacttactgccgagatttggaaagatgagcacggcggcttccagcaattttccttcctgggttccttccctccttcccccccaggctccgctgagcggtgctctagtgcgatctccccaccaggagtggagggaattgtagggctggagcaagtctcaagcttgggtgatggtcctcctggagggagacctcggcgaggcatgtttaggaccgtgggccagctctataaagaatcactcagtagactcatggcaacgctgtctaacactaacccatctttcgttcgctgcatcgtgccaaatcatgagaagagagcagggaagctggagccccgcttggttctggatcagctgcgctgcaatggagtgctggagggaatcaggatctgcaggcaggggtttccaaaccgtatcctgttccaagaattcagacagcgatatgagatcctcaccccaaatgccatccctaaagggttcatggacggcaagcaggcttgtgagaagatgatccaggctctggagctcgaccccaatctttacagagttggacagtctaaaatcttttttagagccggcgtcctcgcccagctggaagaagagcgagatctaaaagtaaccgatattattgtttcctttcaggccgcagcacggggataccttgcacgaagagccttccagaaacggcagcagcaacagagtgctttgcgggtgatgcagagaaattgcgccgcttacctgaagctgaggcactggcagtggtggagattattcaccaaagtgaagcccctcctgcaggtgacacggcaggacgaggtccttcaggctcgagctcaggaattacaaaaggtgcaagaactgcagcagcaatccgcccgcgaggttggggaacttcagggtcgagtggctcagttggaggaagaacgggcgaggctcgcagaacagctgagagctgaggcggagctgtgtgccgaggccgaggaaactcggggcagactcgccgccaggaaacaggagttggagctggtggtgagcgaactagaggctcgcgttggggaggaagaggagtgttcccggcagatgcagactgaaaagaaaaggctgcaacagcatatacaggagcttgaagcgcacttggaggctgaggagggcgccagacagaagcttcagctcgagaaggtcactacagaggccaagatgaagaagttcgaagaggacctcttgctgttggaggatcaaaattccaaactcagcaaagagcgtaaactgcttgaggatcggctggccgaattctcttcacaggcggcggaggaagaggagaaagtgaagagtctaaacaaactgaggctcaagtacgaagcaactatagccgatatggaagaccgtttaagaaaggaagagaagggaagacaggagcttgaaaagctgaagcggaggctcgatggagagagttcagaactgcaggagcagatggtggagcagcagcagagagcagaggaactgcgtgcacagttgggtcgcaaggaggaagagcttcaggctgccctcgcaagagcagaagatgagggtggtgcccgagcgcaactgctcaagtcgctgcgggaggcccaggctgccctggcagaggctcaagaggatcttgagtccgagcgcgtagctcgcaccaaagcagaaaagcagcgtagagacttaggagaggaactggaggcattaaggggagagctcgaagatacgctggactccaccaatgctcagcaggagttgaggagcaaacgtgagcaggaggtaaccgagctgaagaagaccctggaagaggaaacgagaatacacgaggccgctgtgcaggagctgagacagcgacacgggcaggcgttgggcgagctggctgaacagctggagcaggcccggaggggcaagggcgcttgggaaaaaacaaggctcgcactcgaagcggaagtgagtgagctcagagcagagctcagttccctgcagaccgccagacaggaaggagaacaaaggagaagaagactggagcttcaactccaggaagttcaaggtcgggccggggatggggaaagagcgcgagctgaagccgctgaaaagctgcagagggcacaagccgagctggaaaacgtctctggggcactgaatgaagctgaatcaaagacgatcaggctctctaaagaactgagttcaacggaagcccaactgcatgacgctcaagagttgctccaagaggaaacaagagctaagcttgccctgggctcccgcgtccgggcaatggaggcagaggccgcaggtctgagagaacagctggaagaagaagcagccgcacgtgagcgagcgggtagggagcttcaaaccgcacaggcacagctgagtgagtggcggaggcgccaggaggaagaggcaggcgccctggaggcgggagaagaagcccgcaggcgtgccgctcgagaggccgaggcgctgacccagaggctcgccgaaaagaccgagacagtagaccgcctggaaagaggtcggcgcaggctgcagcaggaactggacgatgccactatggacctggaacagcagcggcagctggtctccaccctggagaagaagcagaggaaatttgaccagttgttagccgaggagaaggctgctgtgctccgggccgtggaagaaagagagcgggccgaagctgaggggcgggaaagggaagcacgggctttgtctctgacaagggcactagaggaggaacaggaagctagagaggaactggagcgccagaaccgcgccttgcgtgccgagcttgaggctctcttaagttctaaggatgacgtgggtaagtcagtacatgagctcgagcgagcgtgtagagtcgcagagcaggccgctaacgatcttcgggctcaggtcacagagctggaggatgagctcactgccgcagaggatgccaaactccggctcgaggtgaccgtgcaggcactgaagacccagcacgaacgcgatttgcaggggagggacgaggctggagaggagcgcaggcgacagctcgccaagcagttgcgggatgccgaagtggaaagagacgaggagcgcaagcagagaaccctagccgtagccgccaggaaaaaactggagggggaactggaggaactaaaggcgcagatggcttcggcaggacagggaaaagaggaagctgtaaaacagctgcgcaaaatgcaggcgcagatgaaggagctctggcgagaggtcgaagagacccggacatcgagggaggaaattttttcacagaatagggagagcgagaaacgcctgaagggactcgaagcggaagtgctccggctgcaggaagaattggctgctagcgacagggccagacggcaggcccagcaggacagggatgagatggctgatgaagtcgcaaatggcaatctgagcaaagcagcaatcctggaggagaagaggcaactggaagggcgactgggccagctggaagaggagctcgaagaggagcagtctaactctgaactcctgaacgaccgttataggaagctactcctgcaggtcgaaagtctcacaaccgaactttctgctgagaggagtttttccgccaaggctgagtctggcagacagcagcttgagcgacagatacaagaactgcggggacgcctaggtgaagaagacgccggggccagagccagacacaagatgacaatcgccgctctggagtctaagctggcacaggccgaggagcagctcgagcaggaaactagagaacggatccttagtggtaagctcgttcgaagagctgaaaaacggctgaaagaagtagtgttgcaggtggaggaggaacgcagggtagctgaccagttgagagatcagctggagaagggcaatctccgggtgaagcagctgaaaaggcagctggaggaagccgaagaagaagcgtccagagcgcaggccggaagaagacgtctccagcgagagttagaggacgtgactgaaagtgcagagagtatgaatagggaagtgacaacacttagaaatcgccttcgccgcggtcccttaacttttacaacccgtactgtgagacaggttttcagactggaggagggcgtggcttccgatgaggaagccgaggaagcgcagccaggtagcggaccatcccctgagccagaggggtcacccccagcacaccctcagtag

SEQ ID NO: 125505 - DNA, 6012 bp, synthetic construct
  misc_feature 1..6012: note = Description of Artificial Sequence: Synthetic coding sequence
  source 1..6012: mol_type = other DNA
atggctgctgtcacaatgtcagtccccggccggaaagcaccacctaggcccggcccggttcccgaggcggcccaacctttcctattcaccccccgtggacccagcgcgggcggtgggccaggtagcggcacatctcctcaagtcgagtggaccgccagacggctggtctgggttccaagtgaactccacggatttgaagctgccgctctgcgagatgagggcgaagaggaggccgaagtagagctggccgaatccgggcggcggctccgtctgccgcgggatcagattcagcgcatgaatccccccaagttcagcaaagccgaagacatggccgagctgacttgcctgaacgaagcgtccgtgttgcataatctccgggaaagatactactccggtttaatttacacatacagcggactgttttgcgtggtgatcaacccttataaacagctgcccatctacaccgaagcgatcgtggagatgtatcggggaaaaaagcggcatgaagtgccaccccacgtgtacgcggtgacggagggtgcttatagatccatgctacaggaccgcgaggaccagtcgattttatgcacgggggaatctggcgcgggcaagacagaaaacacaaagaaggtgattcagtacctggcgcacgttgcttccagtccgaagggaaggaaagaaccaggagtaccggcatctgtgagtacagtttcctatggagagcttgagcgccagctgttgcaagctaacccgatcctcgaggcctttggaaacgccaagactgtaaaaaacgacaatagttcccgcttcggcaaatttatacgcatcaattttgatgttgccgggtatatcgtcggggcgaacatcgagacatatctcctggagaaatcacgggcaataaggcaggccaaagacgaatgttcgtttcatatcttctaccagctgctggggggcgcgggagaacaactcaaggcagatctccttctggaaccttgtagtcattaccgcttcctgaccaacggtccaagctcctcccctggccaggaaagggagctgttccaagaaacacttgagagtctgcgcgtactaggcttcagtcatgaggagatcataagtatgctccggatggtgagcgccgtgctgcagttcggtaacatcgccctgaagcgtgagcggaataccgaccaggccaccatgccagacaatacagctgcccaaaagctttgcaggctcttgggtctgggcgtgaccgattttagtagggcccttctgacccctagaatcaaggtcggacgcgactacgtgcagaaagcccaaacaaaagagcaagcagatttcgcattggaggccttggccaaggccacatacgaacgcctgtttcgttggctagtgctgaggttaaatagggcactcgatcgttctcccaggcagggtgcatctttcctgggaatcctggatatcgccggcttcgagatatttcagctgaattcatttgagcagctgtgcatcaactacactaacgagaagctacaacagcttttcaaccatactatgttcgtgctcgagcaagaggagtaccagcgcgaggggatcccttggacctttcttgatttcggattggatctccaaccgtgcatagatttaatagaaagacccgctaatccgcccgggttgctggctctactggatgaggagtgctggttccccaaggctacagacaaatcatttgttgaaaaagtggcgcaagaacagggggggcatcctaagtttcagagaccgagacatttgagagaccaagctgatttttcagtcctgcactacgccgggaaagtagactacaaggctaatgaatggttgatgaagaatatggaccccctgaatgacaacgtggctgctctactgcatcagtctacagaccgccttactgctgaaatttggaaagacgttgaaggcatcgtgggactggaacaggtgagttcactaggcgacggccctccaggggggaggccccgaaggggcatgttcagaaccgtgggccagctctacaaggagagtctctcccgtctgatggccaccctgtcaaataccaacccttcatttgtaaggtgcattgtgccaaaccacgaaaaaagagccgggaagttagagcctcggctggtccttgaccagctacgctgtaacggcgtgctggaagggatccgcatatgtagacaagggtttcccaaccgaatcctttttcaggagtttagacagagatatgagatcctgacccccaacgccatccctaagggattcatggacggaaagcaggcgtgtgagaaaatgatccaggccctggagcttgaccccaatttgtatcgggtagggcagagtaaaatctttttccgggccggcgtattggctcagttagaagaagaaagggatctgaaggtgacagatattatcgtgtcctttcaagctgcagcccggggttatcttgcccgacgcgcttttcagaagagacagcagcagcagtctgctctgagagtaatgcagaggaactgtgctgcatacctcaagttaagacattggcagtggtggcgtttgttcacgaaggtcaaacccctgctgcaagtcaccagacaggatgaggttctacaggcacgcgctcaagagctccagaaggtgcaagagctgcagcagcagagtgcccgagaggtgggcgagctccaaggccgagtggcccagcttgaagaggagcgagcgcgactggcagagcagttgcgcgcagaggccgagttatgtgccgaagctgaggaaacccgcgggcgactcgctgcgaggaagcaagaactcgagctcgtggtcagcgagctcgaggctcgggtcggcgaggaggaggagtgttcccggcaaatgcaaactgaaaagaaaagactgcagcaacacatccaggaacttgaggctcacctcgaagcggaggagggagcccggcaaaagctgcagctggaaaaggtcacgacggaagccaagatgaaaaaatttgaagaggacttgttgcttttggaagaccaaaattcgaagctctccaaggaacggaagctgctcgaagaccgcctggcagagttctccagccaggctgctgaggaggaagaaaaagtaaaaagtctcaataaactgaggcttaaatacgaggctactattgcagatatggaggaccggctgaggaaagaagagaaagggcgtcaggagctagagaaactgaaaaggcgacttgatggcgagtctagtgagctgcaggaacagatggttgagcagcagcaaagagctgaggagctgagggcccaactcggacgaaaagaggaggagctccaagcggcactagcaagggcagaggacgaagggggagctcgtgcgcaactgcttaagtctctgcgtgaagcacaagcagccctggccgaggctcaagaggacttagaatctgaacgggtagcccgcaccaaagccgagaaacagaggcgagacctgggggaggagctggaagctctacgcggggagctggaggatacactagacagtactaacgcccagcaggaactccgatcaaaaagagaacaggaggtgaccgagctgaagaagacattggaagaggaaactagaatccatgaagccgccgttcaggagctcagacagcggcacgggcaagcactcggagaactcgccgaacagctggagcaagctaggcgaggaaagggcgcatgggagaagactcggctggctctggaggcggaagttagcgagctgagggcagaactctccagtttgcagaccgcccgccaggagggcgagcagcgaaggcggagactggagttgcaattgcaggaagtccagggccgcgccggtgacggcgaacgtgcgcgcgctgaggcagctgagaaactgcagcgagcgcaggctgaattagaaaacgtgagtggagccctgaatgaagccgagagcaagacaattcgactatctaaggagctgtcatctacggaagcccaactgcatgatgcacaggagctcctgcaagaagagactcgcgctaaactcgcacttgggtcgcgggtgagagccatggaggcagaggctgcagggttgcgagagcaactcgaagaggaagcggctgccagggagagggcgggcagagagttgcaaacagcccaggctcagttatctgaatggcgacgccgacaagaagaagaagctggcgctctggaggcgggggaggaagctcgccgccgcgcagcccgagaggccgaggcgctgactcagaggttggcagaaaagacggagacagtggatcgactggaacgcggtcgccgcagacttcaacaggagctagatgacgccacaatggaccttgagcagcagcgccagttggtgagcaccctcgagaaaaagcaaaggaaattcgatcagttgctcgctgaggaaaaagcggcggtgctgagggcagtagaggagcgcgagagagctgaggcagagggaagggagcgggaagcaagggccttgagtttgacccgggctctggaggaagagcaagaggcgagggaagagctggagagacaaaatagggctttgcgggctgagctggaagcgctgttgtcctcaaaggatgatgtcgggaagagtgtccacgagctcgagcgggcttgccgcgtcgcggaacaagctgctaacgacttgcgtgcacaagttacagaactggaggacgagctgactgctgctgaggatgcgaaacttaggctagaggttaccgtccaggcactcaagacacagcatgagcgcgacttgcaaggacgggatgaagctggtgaggaaaggaggcggcagttggccaagcagctgcgagacgccgaggttgagcgagacgaggaaagaaagcagcgcaccctcgctgtggccgcccgcaaaaagctggagggggagctcgaggaactgaaggctcagatggccagtgctgggcagggcaaggaagaagcagttaagcagctccgcaagatgcaggcacagatgaaggagctatggcgtgaagtcgaagaaacaaggacttctagagaggagatcttttcgcagaacagagagagcgaaaagagactcaaggggctcgaagccgaagtgttgcgtctgcaggaagagctggcagctagtgatcgcgctagacgccaggcccagcaagatagggatgaaatggctgacgaggtggctaatggcaatttaagcaaagctgcaatcttggaggaaaagaggcaactcgaaggccggctgggccagctcgaagaagagctggaggaagagcagtccaatagtgagctgttaaacgatcgatatcggaagctgctcctacaagttgaatctctgacgaccgagttgagtgccgagcggtctttctcagccaaagccgagtccggtcgacagcagctggagcgccagatccaagaattgcgaggccgtctgggagaagaggatgccggagcccgggccagacataaaatgacgattgcagccttagaaagtaaactggctcaggctgaagagcagctggaacaggagacgcgagagcgtatcctgagtgggaagctggttcgtcgtgctgaaaaaaggcttaaagaggtggtcctccaggtggaagaggaaagacgagtggccgatcaacttagggatcagctggagaagggaaatctgcgtgtcaagcagctgaagcggcagctagaagaggccgaggaggaagcctctagagcccaggctggtcggcgccggctccaacgcgagctcgaggacgtcaccgagagcgcggagtctatgaaccgagaggtaaccacgctaaggaaccgcctaaggaggggacctctgacatttaccacaaggacagtgaggcaggtgttccgtctcgaggagggtgtggcaagtgacgaagaggcagaggaggctcaacccggcagcggcccttcaccagagcctgagggcagcccccctgcccacccccagtag

SEQ ID NO: 125506 - DNA, 6111 bp, synthetic construct
  misc_feature 1..6111: note = Description of Artificial Sequence: Synthetic coding sequence
  source 1..6111: mol_type = other DNA
atggcagctgtgactatgtcggtccctggacggaaagcaccacctcgtccagggcccgtgcccgaggctgcacagccctttctgtttacccccaggggcccctcggcgggtggaggccccggctccggtacatctccccaagtggaatggactgccagaaggctcgtttgggtgccatctgagctacacggcttcgaggcggctgctcttagagatgaaggggaggaggaggcagaggtggaactggctgaatcaggaaggcgcctgcgattgcccagggatcaaattcagagaatgaaccctcccaaattctcaaaagcagaagatatggcggaactgacgtgtttaaacgaggcatctgtactccacaatctccgcgaaaggtactacagtgggctcatttacacttactcaggtctattttgtgtcgtgattaacccatacaaacaactgcctatctataccgaggcaattgtagagatgtataggggcaagaaacggcacgaggtgccaccacatgtgtacgctgtgactgagggcgcttaccgctctatgctgcaggaccgcgaggaccagagcatcctgtgcactggggaatccggagctggcaaaaccgaaaataccaaaaaggtgattcaatacctcgcccacgtcgccagctcaccgaaaggtagaaaggagccaggagtgccggtcagcaaccctgctctgggatggggagagcttgaaagacagctgctgcaggccaaccccattttggaggctttcgggaatgcaaaaacagttaagaatgacaactcctcgcggttcggcaaattcatccggataaactttgatgtggctgggtacattgtgggagccaatattgagacctacctgctcgagaaaagtagggcaatccggcaggcaaaggacgagtgttcctttcatatattttatcagctcctgggcggtgcgggcgaacagctgaaagcggatctccttttggagccttgttcacactacaggtttcttactaacggcccttcttcctcacccggacaggagcgggaactgttccaggagactctcgagagcctgagagtactggggttttcccatgaagaaatcatttcgatgctccggatggtttctgcggtccttcagttcggcaatatagcactaaagcgggaacgaaacaccgaccaggcaacaatgccagataataccgcagcacaaaaactctgcagacttctaggtctgggcgtcaccgatttctctcgcgcccttctaacgcctaggattaaagtggggcgcgactacgtgcagaaagcccagacgaaggagcaggctgattttgccctcgaggcactggcaaaggctacatatgagcgtctctttcgctggctcgttcttcggctaaacagagcactggaccgctctcccagacagggggcatctttccttggaattctcgatattgcaggctttgagatttttcagctgaacagtttcgagcagttatgcattaactacactaatgagaaactgcaacagttgttcaaccatactatgtttgtgctggagcaagaggagtaccagagagagggaataccatggaccttcctcgactttggcctcgatttacagccttgcatcgatttgattgagagacctgctaacccgcctgggcttcttgcacttctcgacgaagagtgttggttcccaaaagcaacggacaaatcattcgtcgaaaaagtagcccaagagcaagggggccatccaaaattccagcggcctcgacacttacgtgatcaagctgatttctcagttctgcactatgcaggaaaagtagattacaaagccaatgagtggcttatgaagaatatggacccgctcaatgacaacgtcgccgctctcctgcaccagtccactgacagactcaccgccgaaatctggaaggacgaacatggtgggtttcagcaattttccttcttgggctccttcccgccttctccacccggcagcgcagaacgatgctccagcgctatatccccgcctggcgtggagggcattgtgggcctggagcaggtgtcaagtctgggtgatggaccccctggcgggaggccgagacggggcatgttccgcacggtgggacaactctataaggagagcctgtctaggctcatggccactctcagtaacaccaatccaagctttgtcagatgcatcgtgccgaaccacgagaaacgggctggcaaacttgagcccagactggtgctcgaccagcttagatgcaatggtgtgcttgagggaatacggatttgccgccaaggattccccaataggatactgtttcaagagttccgccagcggtacgaaatattgacccccaatgcgattcccaaggggttcatggatggcaagcaagcatgtgagaagatgatccaagcccttgagcttgaccctaacctttatcgcgtgggtcaatccaagatttttttccgtgccggcgtactggcccagctcgaggaggaacgcgacctgaaagtgactgacattattgtatccttccaagcagctgcccgaggatacctggccaggagagcattccagaagcggcagcagcagcagagcgcccttcgagttatgcagcgcaactgcgccgcatatctcaaactgcgccattggcagtggtggaggcttttcactaaggtaaaacctctcctccaggtgacacggcaggatgaagtgcttcaagctagagcccaggagctgcagaaggttcaggagcttcagcagcagtcagccagagaagtcggcgaactccaggggcgcgttgcacagctcgaggaagagcgggcgcggctggccgagcagttacgtgccgaggccgaattgtgtgcagaagccgaagagacccgagggcgcctggctgcacgcaagcaggagctggaacttgtggttagtgagctcgaagctagagtgggcgaggaagaggagtgtagcagacagatgcagactgagaagaaaagattgcagcaacacatccaggagctagaggctcatttagaggctgaggaaggagccagacagaagctgcagctcgagaaggtcaccaccgaggctaagatgaaaaagtttgaggaagacttgctgctgcttgaagaccaaaattctaagctttctaaagaaaggaagctactggaggatcgtctcgcggaattcagcagtcaagccgccgaagaggaagaaaaggtgaaaagtttgaacaagctgcggcttaagtacgaagctacaatcgcggatatggaggacagactacgtaaagaggagaagggaagacaggagttggagaaactcaaacgaagactggacggggagtcttcagaattacaggagcagatggtggaacagcagcagagagctgaggagctgagggcgcagctcggtagaaaggaggaggagttgcaagcggctctggcgagagccgaggacgaaggcggcgctcgcgcacagcttctgaagtcccttagagaagcccaggccgctctggccgaggcccaggaagacctcgagtcggaaagagtcgcaagaacgaaggctgagaaacagcggagagacctcggcgaggagttagaggccctgcgtggtgagctggaggacactctcgacagcacgaacgcacagcaggagctgcgaagcaaacgagaacaggaggtgaccgagcttaaaaaaactctggaggaggaaacaagaatccacgaggctgccgtacaagaactcagacagagacacggacaggccctgggggaactagcggaacagctagagcaggccagaaggggcaaaggcgcgtgggagaagactcgattggcactggaagcagaggtgtctgagttgcgggccgaactttcgagcctgcagactgctcggcaggagggagagcaaagacgccgaagacttgagctacaattgcaggaagtacagggtcgggctggggatggagagagagctagagcagaggctgcagaaaaactgcagcgagcccaggcagagctcgagaacgtgagcggagcactgaacgaggccgagtctaagaccatacgcttgtctaaggagctcagcagcacggaggcacagctccatgacgcccaggagctgctgcaggaggaaaccagggctaagctggctcttggtagccgagtgcgggcaatggaagcagaagccgccgggctgagagaacagctggaagaggaggccgccgctagagaaagagctggaagggagcttcaaaccgctcaggcgcaactgagcgagtggcgccgacgacaggaggaagaagcgggcgccctggaagccggggaggaggccagacggagagccgcacgggaggcggaggcgcttacgcagcgcttagctgagaaaacagaaacagtcgatcgccttgaacgcggcagacgccggctgcagcaggaactggatgacgctacaatggacctcgaacagcaacggcagctggtttctaccttggaaaagaagcagagaaagtttgatcagcttctggcggaggaaaaagctgccgtccttcgggccgtcgaagagagagaacgggcagaggctgaaggcagggagcgcgaagcacgagcactgagtctgactagggcgctagaggaagagcaagaggctagagaagagctggagaggcagaaccgcgctctgcgggctgaactagaggctcttttgtcgtccaaagacgatgtcggcaagtcagtgcatgaactggaaagagcctgccgggtagccgagcaagctgctaacgatctgagagcgcaggtcacagaattagaggatgaattaactgcagccgaagatgccaagctgagacttgaggtgaccgtccaggctctgaagacccagcacgagcgggacttacaagggcgcgacgaggctggcgaggaacgccgtcgacagctagcaaaacagctaagggacgcagaggtggagagggatgaggaacgtaagcagagaacactggccgtggcagctcggaaaaagttggagggggaactggaagagctgaaggctcaaatggcatccgcagggcaaggcaaggaggaagcggttaaacagcttcggaaaatgcaggcacagatgaaagaattgtggagagaggtggaagagacccggacaagccgggaggagatcttcagtcagaatagggagagtgagaagaggctgaaaggcctcgaggcagaggtactccgccttcaggaagaacttgccgcatctgatagagcaaggaggcaagctcagcaggaccgggatgagatggctgacgaagtcgcaaatggcaatctttcgaaggccgcaatccttgaggagaagcgtcagctggaaggccgactgggccaactcgaagaagagctggaggaagagcagagcaattctgagctcttgaacgataggtacaggaaactcctgctgcaggtggagagcttgactacagaactgagcgccgagaggagctttagtgctaaggccgaatcaggccggcagcagctggagagacagattcaggaactgaggggacgcttgggagaggaggacgcgggggccagagccagacacaagatgacaatagccgcccttgagtctaagctcgcacaggctgaagaacagctggagcaggaaaccagggagcgaattctatccggcaagttggtgagacgggccgaaaagagactaaaagaagtagtgctccaagtggaggaggagcgtcgcgttgccgaccaactccgtgatcaactggaaaaaggcaacctgcgtgtgaagcagctcaaaagacagctggaggaggcagaggaagaggcctccagggctcaggcaggcaggagacggctgcagagagaactggaggatgtgactgagagcgctgagtccatgaaccgcgaggtgaccactcttaggaaccgactccgaagaggacccctcaccttcaccactcgcactgtgcgacaagtctttagactggaggagggcgtagcatccgacgaggaggcagaagaagcccagccgggtagtggacctagccctgaaccggaaggctctcccccagctcatccccagtag

SEQ ID NO: 125507 - DNA, 5841 bp, synthetic construct
  misc_feature 1..5841: note = Description of Artificial Sequence: Synthetic coding sequence
  source 1..5841: mol_type = other DNA
atggtcgaatcctgcctgcttacttttcgcgccttcttttggtggattgcactgatcaagatggatctgtctgatcttggtgaggcggccgcctttctacgcagatccgaggcagaactgcttttgctgcaagctacagcactggacggtaaaaaaaagtgctggatccccgacggcgagaacgcctatatagaggcagaggtcaaggggagcgaagacgacggtactgtgattgtcgaaactgctgacggggaatccctgtctatcaaggaggacaaaatccagcagatgaaccccccagagtttgaaatgatcgaagacatggctatgctcacccacctcaatgaagcttccgtcctgcacacgttgaagagacgatatgggcagtggatgatctacacctactccgggttgttctgtgtcactataaacccttataagtggctccctgtgtaccagaaggaggttatggctgcttacaaggggaagcggaggagcgaggcccctccccacatattcgccgtggccaataacgccttccaggatatgctgcacaatcgagaaaaccagtccatcttgttcaccggggaatccggcgctggaaaaacggtcaattctaagcacattattcagtatttcgcaaccatcgctgctatgatcgagtcaaggaaaaagcagggagctctggaggaccagatcatgcaggccaatactatattggaagctttcggtaatgcaaagaccctccgcaatgacaatagttcgcgttttggaaagttcatccggatgcattttggtgctcgaggaatgctaagtagtgttgacatcgatatctacctcctcgaaaagtccagagttattttccaacaggcgggagaaaggaactatcacatcttctaccagattttgagcggccagaaggaacttcacgatctgctgctcgtgtcggcaaacccaagcgatttccacttctgtagctgcggagcagtgaccgtcgaatcactggatgatgctgaggagttattggccacagagcaggctatggacattcttggctttcttccggatgaaaagtacgggtgttacaagctgacaggggccattatgcatttcgggaatatgaagttcaagcaaaaaccgcgggaggagcagctcgaagctgatggcactgagaatgcagataaggctgctttcctgatgggtattaactcaagtgagctcgtaaagtgtttaattcacccgaggattaaggtgggtaatgagtacgttacacgcggtcagacaattgaacaggtgacctgcgctgtgggtgccctctcaaagagtatgtacgagcgaatgttcaaatggcttgtggcgaggatcaaccgcgcactggacgccaagctgtctaggcagttcttcatcggcatcctcgacatcactgggttcgagattcttgagtacaactcgttggaacagctctgtatcaattttactaacgaaaagctccaacagttctttaactggcacatgtttgtattagagcaggaggagtacaaaaaggagtcgatcgagtgggtcagcataggtttcggtcttgatcttcaggcgtgtatcgacttaatcgagaaacccatggggatcctgagcattctcgaggaggaatgcatgttcccaaaggccacagatttgacattcaagactaagcttttcgataatcactttgggaagagcgtgcacctgcaaaaacccaagccagacaagaaaaagtttgaggcccattttgagctcgtgcattacgccggagtcgtcccctacaatatatcaggatggcttgaaaagaataaggatttgctgaatgagaccgtggtggcagttttccagaaatcgtcgaacagactcctggcgtccttattcgagaattacatgagtacagattctgccatcccctttggagaaaaaaagcggaaaaaaggagccagctttcagacagttgccagtctgcacaaggagaatctaaataagctgatgactaacctaaagtctaccgcaccccattttgtcaggtgtatcaaccccaacgtgaataagattccgggcatcctagacccatacctggtcctgcaacagctgcgatgtaacggggtgctagaaggcacacgtatctgtcgcgaaggctttccgaatcggctgcaatacgccgatttcaaacaacgctactgcattctcaatcccaggacctttcccaagagtaagtttgtgtcctctcgcaaagcagcagaggagctgctcgggtcccttgagatagatcacacacaatacaggttcggcatcacgaaggttttcttcaaggccggattcttaggacagctggaagccatccgcgacgagagattatcaaaggtgtttacacttttccaggcccgagcccagggcaaattgatgaggattaagttccagaaaatcctggaggaaagggacgctctgattcttatccaatggaacatccgtgccttcatggctgtcaagaactggccctggatgcgcctattcttcaagatcaagcctctcgttaagtcatcagaggtaggggaagaggtggctgggcttaaagaagagtgcgctcagctgcagaaagccctggagaaatccgagttccagagggaagaactgaaggcaaagcaggtcagcttgactcaggagaagaacgacctgatcctgcaacttcaggctgagcaagagactcttgctaatgtggaggagcagtgtgaatggttgattaagagcaaaatccagctggaggctagagtcaaagaactgtctgagcgggtggaagaggaggaggagataaactctgagttgacagctcgcggccgaaaactcgaggacgagtgtttcgagctgaaaaaagaaatagatgatctggaaacaatgctggtgaagtcagagaaggagaaaagaacaaccgagcacaaggttaagaatctgaccgaggaagtcgagttccttaatgaagatatcagtaagctgaacagagcagctaaagttgtccaggaggcacaccaacagacactagacgacctgcacatggaggaagagaaacttagctctctgtccaaagcaaatcttaagttggagcagcaggtggacgagctagagggagcactcgagcaggaacggaaggcgaggatgaactgtgaacgcgaacttcataaattagaaggaaacctgaagctgaatagagaaagcatggagaatttggaatcttcacagcgccacctggcagaagaactgcgcaaaaaggaattggagctgtcgcagatgaactctaaagtggagaacgaaaaaggactcgtggcccagttgcagaaaaccgtgaaggaactccaaactcagatcaaagacttgaaagagaaactggaagctgagcgcaccacaagggcgaagatggaaagagaaagagctgatttgacccaggatttggcagacttgaacgagcggctggaagaggtaggtggctcttcccttgcgcagctcgaaattactaagaaacaagaaaccaaattccagaagctgcaccgcgatatggaggaagctactcttcactttgaaaccacaagcgccagtttgaagaagaggcatgcagattccctggccgagctggagggtcaagtagaaaatttacagcaagttaagcagaagctagagaaggataagtcagatttacagctcgaggtcgacgatctcctgactcgggtcgagcagatgacacgcgctaaagctaacgccgagaaactttgcaccctgtacgaggaacgtttacacgaagcaactgccaaactggataaagttacgcagctcgccaacgacttggcagcgcagaagaccaagctctggagtgagagtggcgagttcctgagaagactggaggaaaaggaggcactcataaaccaattgtctagagaaaaatccaacttcactcgtcaaatcgaagacctcaggggccagctggagaaagaaacaaagagccaatctgctctcgctcatgccttgcagaaggcacagcgtgactgtgacctcctccgcgaacagtatgaagaggaacaggaggtgaaggctgaactacatcggacactcagtaaggtcaacgccgagatggtacagtggcgcatgaaatacgagaataacgttatacaaagaaccgaagatctggaggatgctaaaaaggaactggccatacggctgcaggaagccgccgaggccatgggagttgccaatgctagaaacgcaagcttggagagggccaggcaccagttacagttggagctgggtgacgccctgtctgacctgggaaaggtccgctccgccgccgctagactggatcagaagcagctgcagtcaggtaaggccctggctgattggaaacagaaacacgaagaaagtcaggctctcctggacgcgtcccaaaaggaggtacaggccctgtccacagagcttcttaaactaaagaatacatatgaagaatcaattgtcggtcaggagaccctgcgccgcgagaataagaacttgcaggaagagatttcgaatctcactaatcaggtgagagagggaacgaaaaacttaaccgaaatggaaaaggtgaaaaagttgattgaggaagagaagactgaagtccaagtaactctcgaggagactgagggggccttggaacggaacgaatccaaaatcctgcacttccaattagaactcctggaggcaaaggccgagctagagcgtaagcttagcgagaaggacgaagagatcgaaaacttccggcggaagcagcagtgcaccatcgacagcctgcagtcgagcctggattccgaggccaaaagtaggatcgaggtgactcgtctaaagaaaaagatggaggaagatttaaatgagatggagctgcagctaagctgcgcaaaccgccaggtcagcgaggcgacaaaaagcttggggcagctccagattcaaattaaggatctccagatgcagctggacgacagtacccaactgaatagcgacctgaaggagcaggtcgctgtggctgagcggaggaattccctccttcagtccgaactggaagatcttcgttctctacaggagcagacagaacggggacggcgtttaagtgaggaggaactactggaggctactgagcgcattaacctgttttacacacagaacactagcttactgtcccagaagaagaagttggaagcagatgtagcaaggatgcagaaagaggctgaagaagtcgtgcaggagtgccaaaatgctgaggagaaagctaaaaaggccgctattgaggctgctaacctctccgaagagttaaagaaaaaacaggacacgatagctcatctcgagaggacccgtgagaacatggaacaaactatcacagacctacagaaacggctcgccgaagctgagcagatggccctaatgggctctaggaaacagattcagaaactggaaagcagagtccgcgaattggagggggagctggagggggagattaggagatcagcggaagcgcagcggggtgcacgaagactcgaacggtgcatcaaggaacttacctatcaggccgaggaggataagaaaaacctgagtcgcatgcagacccagatggacaagcttcagctgaaagtgcagaattataagcagcaggttgaggtggccgaaacccaagctaatcagtacctcagtaaatacaaaaaacaacagcacgagttgaacgaggtgaaggagagggccgaggtagctgaatcacaggttaataagctgaagataaaagcaagagagtttggcaagaaggtacaggaggaatag

SEQ ID NO: 125508 - DNA, 5826 bp, synthetic construct
  misc_feature 1..5826: note = Description of Artificial Sequence: Synthetic coding sequence
  source 1..5826: mol_type = other DNA
atgagctccgacagtgagttggctgtcttcggtgaagctgcgcctttcctacgtaaatcagagagggagagaatcgaagcccaaaacagaccatttgatgccaaaacatctgtttttgtggccgaaccaaaggagagctttgtgaaaggtacaatccaaagccgagaaggggggaaagttactgtcaaaaccgagggaggcgcgactctgactgtgaaagatgatcaggtgtttcctatgaaccctcctaagtatgataagattgaagacatggccatgatgacccaccttcacgagccagcggtgctgtacaatcttaaagagcgttatgctgcctggatgatctacacttattccgggctcttctgtgtcaccgtgaatccttacaaatggttgcctgtgtacaagccggaggtcgtgactgcctatcgaggcaagaagaggcaggaggcacccccgcacattttcagcatatccgacaatgcgtatcaatttatgctcaccgaccgcgaaaatcagagcattttgattactggggaatccggtgctggcaagacagtcaataccaaacgtgtgatacagtactttgccacaatcgcagtcacaggcgagaagaaaaaagaggagatcacaagcggcaagatacaggggactctcgaagaccagattatctccgcaaaccccctccttgaggcctttggtaacgccaagactgtccgaaatgacaacagttcaagattcggaaagttcatccggattcactttggaacaacaggaaagcttgccagcgctgatatcgagacctacctgctggaaaagagtagggtagtctttcaacttaaggccgaacgcagctaccacattttttaccagattacgtcgaacaagaaaccagaattgattgaaatgctgctgataaccaccaacccctacgactaccccttcgtctcccagggagaaatttccgttgcctctattgacgaccaagaagagctgatggccacggatagcgccattgacatcctcggtttcacaaacgaagaaaaggtgtccatctacaagctgacgggggcggtgatgcattacggaaatctcaaattcaagcagaagcagcgggaagaacaggcagaacctgatggaactgaggtggctgacaaggctgcttatctgcagtcgctgaattcagccgatctgctaaaagccttatgctaccccagggtcaaagtgggaaatgagtacgtgacaaaaggccagacggtggagcaggtatctaacgctgtgggcgcgttggctaaagctgtatatgaaaagatgtttctgtggatggttgcgcgaattaaccaacagctcgataccaagcaaccccgccagtacttcattggagtgctggatattgccgggttcgaaatcttcgatttcaactccctggagcaactgtgtatcaatttcaccaatgagaaactgcagcagttctttaaccaccacatgttcgtccttgagcaggaagagtacaagaaggagggtattgagtggacctttatcgatttcggaatggacctggccgcatgcatcgagctgattgaaaagccaatgggcatattctcaatcctggaagaagagtgcatgttccccaaggccactgatacttccttcaagaataaactgtacgaccagcaccttgggaaaagcgcgaacttccaaaagcccaaggtggtcaaagggaaagctgaggcgcactttgcactcatccactatgccggcgtggttgactacaatataactggttggcttgagaagaacaaggatccgctaaacgaaactgtcgtagggctctatcaaaagagcgcaatgaaaacactagcccaactgttctccggcgcacagaccgccgagggcgaaggtgccggcggcggtgctaagaagggaggcaagaagaagggtagctccttccaaacagtatccgctctgttcagagagaatcttaataaactgatgacgaaccttagaagcacccacccccacttcgtaaggtgcatcattccaaacgaaacgaagaccccaggggctatggagcacgaattagttcttcatcagcttcgctgcaacggtgtgctagaaggtattcgcatctgtaggaaaggtttcccatctagaatactgtatgccgacttcaagcagcgctacaaggtgctcaacgctagcgccatccctgagggtcagtttatcgacagcaagaaagccagtgagaaactgctcgcatccattgatatagatcacactcagtataagttcggacacacgaaagtatttttcaaggcaggactgcttgggctcctagaggagatgcgggacgataagttggcgcagctgatcacaaggacgcaggccaggtgtcgagggttcctcgcccgcgtggagtaccaaagaatggtcgaaagacgcgaagcaatcttctgcatccagtacaacatccggtcttttatgaatgtgaagcattggccatggatgaaattgtttttcaagataaaacccttacttaagtcggctgaaacagaaaaggagatggctacaatgaaggaagagttccaaaaaattaaggacgagctcgcgaaaagcgaggcaaagcgtaaggagttagaggaaaagatggtaacccttttaaaagaaaaaaatgatctccagctgcaggttcaagccgaggctgaagggctagcagatgccgaagaaagatgcgaccaacttatcaagaccaaaatccagttagaggcaaaaattaaggaagttaccgagcgagccgaggacgaagaggaaatcaatgccgaactgacggcaaaaaaacgcaagctagaagacgaatgtagcgagctgaagaaagacatcgatgacctggaactcactctcgctaaagtcgagaaggagaagcacgcaacggagaataaagttaagaacctgaccgaggagatggccggacttgatgaaacgatcgctaaattaacaaaagagaagaaggccctccaggaagcccatcagcaaactctcgatgatctccaggccgaggaggataaggtgaatactcttaccaaggcaaaaattaagttggaacagcaggtagacgatctcgagggctcactggagcaagagaagaaactgcggatggatctcgagagagcaaaacgcaaactagaaggagacctcaagctggcacaggagtccatcatggacatagaaaatgaaaagcaacagctcgatgagaagctgaagaagaaagagtttgaaatctcaaacctgcagagcaagatcgaagacgaacaagcgctggggatacagctgcagaaaaagatcaaagagttacaggctcgcattgaagaactggaggaggaaatcgaggccgagagggcctctcgcgcaaaggcagaaaaacagcgcagcgacttaagccgcgaactcgaggagatctctgagagactggaagaggcgggcggtgcaacaagtgcgcagattgaaatgaacaagaagagagaagccgagtttcaaaagatgcgcagggatctggaggaggctaccttgcagcatgaagcaaccgctgcgacgctgaggaagaagcatgcagattctgtggcagaactgggagaacaaatagacaacctgcagcgggtaaaacaaaaactggagaaggaaaagtccgagatgaaaatggaaatcgacgacctggcttctaatgtggagacagtgagtaaagccaaaggcaacctggaaaagatgtgcagaactttggaagaccagctcagtgagttaaagtcgaaggaagaggaacagcagcgccttatcaatgacctgacagcccagcgggggcggcttcagaccgaaagcggcgagttttctcggcagctggacgagaaagaagcactggtgtcgcagctgtctcggggaaaacaggcattcactcagcaaattgaggaactgaaacggcagctggaagaggagatcaaggcaaagaacgccctggctcatgcactgcagtcatcgcggcacgactgcgacttactccgcgagcagtatgaagaggaacaggaatcaaaagccgagctgcagagggccctcagtaaggccaacaccgaagttgctcagtggcgtactaaatacgaaaccgacgccatccaacgcacagaggagcttgaggaagcgaaaaagaagctggcacaacgactccaagcagccgaggagcatgttgaggccgttaacgcgaaatgtgcctccctagagaaaaccaaacagcggttgcagaatgaggtggaagacttaatgctcgatgtggagcggactaatgcggcctgcgcagccctggacaagaagcagagaaattttgacaagatccttgccgagtggaagcaaaaatgcgaggagacccacgctgagttagaggcttctcaaaaagaagcccgctccctggggacggaactctttaagatcaaaaatgcctatgaagagtccctggatcagctcgagactctcaagcgcgagaacaagaatttgcagcaggaaatctccgatctcaccgagcaaatagcagaaggtgggaaacgcatccatgagctcgaaaagataaagaaacaggtggagcaggagaagtgtgagctacaggcagcactggaagaagccgaggcctccttggaacacgaggaagggaaaatcctccggatacagttggaactcaatcaggtcaagtctgaggtggatcgaaaaatcgcggagaaagatgaggagatcgatcagctgaagaggaaccacatccggatagtcgaaagtatgcaatccacgctcgacgctgagatccgctccaggaatgacgcgatcagactcaaaaaaaaaatggaaggcgacctgaatgagatggagatccagctgaaccacgcgaatcgcatggcggcagaggcactccggaactaccggaatacccaaggcatccttaaggatacccagatccatttggacgacgccctgcggtcccaggaggatctgaaggagcagctcgccatggtggagcgcagagctaaccttttgcaagctgagatcgaagagcttcgcgctacccttgaacaaaccgaacgatccagaaaaatagccgagcaagagctgcttgacgcgtcagagagagtccagctcctccatacacagaataccagcctcataaatacaaaaaagaagctggaaactgacatttctcagatgcaaggagaaatggaggacattctgcaggaagctcggaacgccgaggaaaaggctaagaaagctatcacagatgccgcaatgatggctgaggaactgaagaaggagcaggacacctcagctcacttggaacgtatgaaaaaaaatatggagcagaccgtaaaggacctccagttgcgattggacgaagctgaacagctggctcttaagggtggcaagaagcaaattcaaaaattagaggctcgcgtgcgtgagctagagggggaagtggagtcggagcaaaagcgaaacgcggaagctgtcaagggattaagaaagcatgaacgtcgagtaaaagagctcacatatcagactgaggaagataggaagaatatactccgcctgcaggatctggtggacaagctacaggcaaaagtgaagtcgtacaaacgacaggctgaggaagcagaggaacagagcaacactaatttagcaaaattccggaagctgcagcatgaactggaagaggccgaagagagggctgacattgccgaatctcaggtcaataagttgcgagtgaaatctagggaggtgcacacaaaagttatttccgaggagtag

SEQ ID NO: 125509 - DNA, 5826 bp, synthetic construct
  misc_feature 1..5826: note = Description of Artificial Sequence: Synthetic coding sequence
  source 1..5826: mol_type = other DNA
atgtcatccgactctgagttggctgttttcggcgaggccgctccttttctaagaaagtctgagcgcgaacgcattgaagcacagaaccggccatttgacgcaaagacctctgtcttcgtcgcagaacccaaggaatctttcgtcaagggtactattcagtcacgggagggcggcaaggtgacagtcaagacagaaggaggagctacactgacggttaaagatgaccaggtgttccccatgaacccccccaaatatgataaaattgaagacatggctatgatgacccatttgcatgagccggctgtactatacaatctcaaggaacgttacgcggcctggatgatctatacctacagcggattattttgtgtgacagtgaacccatataagtggttgccggtgtacaaacctgaggtggtgacggcttaccgcggaaagaaacgtcaagaggcaccccctcatatcttctctattagcgacaatgcctaccaattcatgcttacagatcgggaaaaccagagcatactcattacaggtgaatccggcgccggtaagaccgtgaataccaaaagagtaatacagtattttgctacaattgctgtcactggcgagaaaaaaaaagaagaaattacctccggcaagatccagggaaccctggaagatcagataatttccgcaaatcccctgctcgaggcatttggcaacgccaaaactgtgcgcaacgacaattcttcacggttcggcaaattcatccgcatccattttggaaccactggaaagttggcctcagccgatatcgaaacttaccttctggaaaaaagcagagttgtgtttcaactcaaagccgaacggtcataccatatcttttaccagattacaagcaataaaaagcccgagttaatcgagatgctactgataactactaacccttacgactacccttttgtgtctcaaggcgaaatctctgtggccagtattgacgaccaggaagagctgatggcaaccgactcagccatcgacattttgggattcaccaacgaagagaaagtcagtatttacaaactgacaggcgccgtgatgcattacggcaacttgaagttcaagcagaaacagcgggaggagcaggcggaaccagatggcaccgaggtggccgataaagctgcctacctgcaatccttgaactcggcagacttactaaaagccctctgctatcctagggtcaaggtgggaaacgaatacgtgaccaaggggcagaccgtggaacaagtcagcaacgcagtgggcgccttggctaaggccgtctacgagaaaatgttcctgtggatggtggctagaatcaaccagcagctcgacaccaaacagcccaggcaatacttcatcggagtgctggatattgccggatttgagatattcgacttcaactctttggagcagctgtgcatcaacttcactaacgagaagctccagcaatttttcaatcatcatatgtttgtcctagaacaggaggagtacaagaaggagggaatcgaatggacattcattgattttggcatggatctggcggcatgcatcgagctcattgaaaaacctatgggcattttttccatcctagaggaagagtgtatgttccccaaggctaccgatactagtttcaagaacaaactctatgaccagcaccttggcaaaagcgccaactttcagaaaccaaaagtagtaaaaggaaaggcggaggcccattttgctttgatccactatgcgggcgtcgtggactacaatatcacaggttggcttgagaaaaacaaggaccctctgaacgagaccgtcgtgggcctgtatcagaaatcagcaatgaagacactcgcccagcttttctctggggcgcagaccgcagaaggtgagggcgccgggggtggagccaagaaggggggcaagaaaaaggggtcatcattccagactgttagcgctctcttcagggagaacctgaacaagcttatgactaatctccgatccacccacccccatttcgtgaggtgcatcattcccaatgagactaaaaccccaggtgcaatggaacacgagctggtgctgcaccagctgcgttgtaatggtgttctggaagggattcgaatctgtcgaaagggttttccgtctcggatcttatatgctgatttcaagcagcgttataaggtcctgaatgcttcagccatcccagaaggacagtttatcgattcaaagaaggccagtgaaaaattgttagcatctattgacatagatcacacccagtacaagttcggacacacaaaagtattctttaaagccggtctgctcggcctgttggaagaaatgcgtgatgataagctcgcacaactgattacgagaacgcaggcacggtgtcgaggattcctcgcccgtgtggagtaccagcgcatggtggagagaagagaggctattttttgcatccagtacaacataagatcattcatgaatgtgaaacactggccatggatgaaattattcttcaagattaaacctttgcttaaatccgccgagacggagaaagaaatggccacaatgaaggaagagtttcaaaaaatcaaagatgagctggctaagagcgaagccaagaggaaggagctcgaagagaagatggtgacgctgttgaaggaaaagaatgacctgcagcttcaagtgcaagctgaggccgaaggcttggccgacgcagaggaacgctgtgatcagctaataaagaccaagatccagcttgaagctaagatcaaagaagtgactgagcgggctgaggatgaggaggagattaatgcagagctgacagcgaaaaaaagaaagctcgaggatgagtgttcagaactgaagaaggacatcgacgacctcgaactcacgttagcaaaagtagagaaggagaagcacgccacggaaaataaggtcaagaatctcacagaggagatggcaggcctggacgagaccatcgccaaactgactaaagagaaaaaggcactccaggaggcccatcagcagaccctggacgatctccaggccgaggaggacaaagttaacacactgaccaaggccaaaatcaagctggagcagcaggtggatgatttggagggctccttggagcaggagaagaagctgcgaatggatttggagcgggctaaaagaaaactcgaaggtgatctaaaactggcccaggaaagtataatggacattgagaatgaaaaacagcaactagacgaaaagcttaaaaagaaagagtttgagatctctaatctacagagtaaaatcgaagacgaacaggccctgggtatccagctgcagaaaaagattaaagagctgcaggcacgaatcgaggagctggaggaagaaatcgaagcagaacgagctagtagagctaaggccgagaagcagaggagtgatctgtcaagagagctggaggaaatttctgaaagattggaagaagcagggggggcaacctcggctcagattgagatgaataagaagcgggaggctgaattccaaaagatgaggagagacttggaagaagccacgttgcagcacgaggccaccgcggccaccctgcgtaagaagcacgccgacagcgtggccgagctgggtgagcaaattgacaatttacagagagtgaagcaaaagctggagaaggaaaagtccgaaatgaaaatggagatcgacgatctggcaagtaatgtagagaccgtgtccaaagcaaagggaaaccttgaaaagatgtgccgcaccctcgaggaccagctgagcgagctcaaatctaaggaggaagagcagcagcgtcttatcaatgatcttacggcccagcgcggacggctccaaaccgagagcggggagttcagccggcagctggatgaaaaagaggcactggttagccagctcagcagagggaaacaagcttttactcagcagattgaggagcttaagcgtcagctggaggaggagatcaaggctaaaaatgcactggcccacgctttgcagtcatcgcgccatgactgtgatctcctgcgggagcagtacgaggaagagcaggaatctaaggcggagctccagagggcactgtctaaagccaataccgaggtggctcagtggcgaaccaaatatgaaactgacgcaattcagcgaaccgaagagttagaggaggccaagaaaaagcttgcccagagactgcaagccgcagaggaacacgttgaagccgttaatgcaaaatgcgcaagtctcgaaaaaactaaacaaagactgcaaaacgaagtcgaagatctgatgctagatgtggaaaggacaaacgccgcctgcgccgctctggacaagaaacaacgcaacttcgataagatccttgccgaatggaagcagaagtgcgaagaaacccacgctgagttagaagcctctcaaaaagaggcccgatcccttggtactgagctcttcaagataaagaacgcctatgaggagtcgttggaccaactagagacgctgaaaagagagaataaaaacctccaacaggaaatctcagatctgaccgaacagattgcggaggggggcaagcgcatccacgagttggaaaaaatcaagaaacaggtcgaacaggagaagtgtgaactccaggctgctttggaagaggcagaggcaagtttggaacacgaagaggggaagatcctgcggatccagcttgaactgaatcaggttaagagcgaagttgaccgcaaaatcgctgaaaaagatgaagagatcgaccagctgaagagaaatcacatacgcattgtggaatccatgcagtctaccttggatgcggagattagatcaaggaatgatgcaatcaggctgaaaaaaaagatggaaggtgatctcaatgagatggagatacagttgaatcacgccaatcgaatggccgccgaggctttaaggaactatcgaaacactcaggggatcttaaaggatacgcaaatccacctggatgacgccttgcgatcccaggaagacttaaaggaacagctcgccatggtggagcggcgagcaaacctgctgcaggccgagatcgaagaactcagagccacattagagcagaccgagagatctcgaaaaatcgcagaacaagagctcctggatgcctctgaaagagttcagctcctgcatacgcaaaatacttctctgattaataccaagaagaaactcgagaccgatatctcacagatgcaaggtgagatggaagatattttgcaggaagcgcggaatgccgaagaaaaggccaaaaaagccatcaccgacgctgccatgatggccgaagaactcaagaaggagcaggacactagtgcgcacttggaacggatgaaaaaaaacatggagcagaccgtgaaggacctgcagctcagactggatgaggccgagcagctcgccctcaaaggggggaaaaagcagatccagaaactcgaagcccgcgtgcgcgagttagaaggcgaggttgaaagtgaacagaagcgtaatgctgaagctgtgaagggccttagaaaacacgagcgaagagtgaaagagcttacttaccagactgaggaggataggaaaaatatcctgcgcctgcaggacctcgtggacaagctgcaggccaaagtaaaatcctataaacgccaggctgaagaggccgaggagcagagtaacactaatctggcaaagttcagaaaactgcagcacgaactagaagaagccgaagaaagagctgatatcgccgaatcgcaggtgaataagctgagagtgaaaagtcgggaggtccacactaaagtaatttcggaggagtag

SEQ ID NO: 125510 - DNA, 549 bp, synthetic construct
  misc_feature 1..549: note = Description of Artificial Sequence: Synthetic coding sequence
  source 1..549: mol_type = other DNA
atgagttcagactcggaattggcagtgtttggggaggcagctccgtttctacgcaagagtgagcgagaacggattgaggcccagaaccggccctttgacgccaaaacctctgtcttcgtggccgaaccgaaagagtcctttgttaagggcactatacagtctagagagggtgggaaagtgaccgtcaaaacagagggaggagctaccctcactgtgaaggatgatcaagtttttcctatgaacccaccgaaatacgacaagatcgaggatatggccatgatgactcacttgcacgaaccagccgtcctatataacctgaaggagcgctatgccgcctggatgatttatacgtatagcggactgttctgcgtcacagtgaacccatacaagtggttacctgtgtacaagcctgaggtcgttacagcctaccggggaaagaaacgccaagaagccccaccccacatctttagtattagtgacaacgcttatcagtttatgctgacagacagagagaaccaatcaattctgatcacaggtgaaagcgggtag

SEQ ID NO: 125511 - DNA, 405 bp, synthetic construct
  misc_feature 1..405: note = Description of Artificial Sequence: Synthetic coding sequence
  source 1..405: mol_type = other DNA
atgagctctgattccgagcttgctgtgtttggagaagccgcccccttcctcagaaagtcagagagagaacgaatcgaggctcagaatcggccgttcgacgccaaaacctccgtgtttgtagcagaaccgaaggagagctttgttaagggcactattcaaagtagggagggaggaaaggtgactgtcaaaactgaaggtggcgcgaccctcaccgtcaaggatgaccaggtcttccccatgaatccccccaaatacgataaaatagaggatatggctatgatgacccacctgcatgaacctgccgttctgtataatcttaaggaaagatacgcggcttggatgatttacacctatagcggactcttctgcgtcaccgttaacccctataaatggctccccgtttag

SEQ ID NO: 125512 - DNA, 2127 bp, synthetic construct
  misc_feature 1..2127: note = Description of Artificial Sequence: Synthetic coding sequence
  source 1..2127: mol_type = other DNA
atgtccagcgattcagaactagcagtgtttggggaagccgcaccctttctgcgaaaatccgagcgagaacggatcgaagcccagaatcgcccattcgatgctaaaaccagcgtctttgtggcggagcctaaggaaagtttcgttaaaggaacaattcagtcaagggaggggggaaaggtcactgtgaaaaccgaaggcggggccacccttactgtcaaagacgaccaagtgtttcccatgaaccctcccaaatacgacaagatagaagatatggcaatgatgacacatcttcatgaaccagcagtcctgtataacctgaaggaacgttacgcagcctggatgatatacacttactcaggcctgttttgcgttaccgtcaatccttataagtggctgccggtgtacaagcctgaggtcgttacagcatatcggggcaagaagcgccaagaagccccaccacatatctttagcatcagcgacaatgcctatcagtttatgctgacagaccgcgagaaccagtctatccttatcacaggggagagcggtgcaggcaagactgtcaacaccaagagagtaattcagtactttgccaccatcgccgtaacgggcgagaaaaaaaaagaggaaatcactagcgggaagatccaaggcaccctcgaggaccagatcatctccgcgaatcctctgctggaagccttcggtaatgctaaaactgtccgcaatgacaattccagtaggtttgggaagttcatcagaatccatttcggcactacgggcaagttggcatcagctgacattgaaacgtacctgctcgaaaaatctcgggtagtgttccagctgaaggccgagagaagttatcacattttttatcagattacctctaataaaaagcccgagctaattgagatgctgctgatcacaactaatccatacgactaccctttcgtgtctcagggcgagatttcagtcgcatccatcgatgatcaggaggagctgatggcaaccgactctgccattgatatcctgggatttacaaatgaagagaaggtgtcgatctataaacttacaggcgcagtgatgcattatggcaacctgaaattcaagcagaaacagcgagaggagcaggctgaacccgatggcacagaggtggcagataaagcagcttatcttcagagtcttaactctgccgatctactcaaagccctgtgttacccgagggtaaaggttggcaatgagtatgtgaccaagggccagacagtcgaacaggtgagcaacgccgtgggtgccttagctaaggctgtttatgaaaaaatgtttctatggatggtggccagaataaaccagcagctggataccaaacagccaaggcagtacttcatcggagtgctagatatagcagggttcgagatcttcgactttaactcgcttgaacagctttgtatcaatttcacaaacgagaagctgcagcagttcttcaaccatcacatgtttgtgctcgaacaggaagagtataagaaggaggggattgagtggaccttcattgacttcgggatggaccttgctgcttgtatcgagttgatcgaaaagcccatgggaatatttagcatccttgaggaggagtgcatgttccccaaggcgacagacacaagttttaagaacaagctgtacgatcagcatctcgggaagtccgctaacttccaaaagccaaaagttgtgaaagggaaggccgaagcgcacttcgctttaatccattacgcaggggtggtagactacaacatcaccggttggttagagaaaaataaggatcctctgaacgagaccgtggtggggctttaccagaaaagcgcaatgaagacgttggcgcagctcttttctggagcccagaccgctgagggcgagggtgccggcggcggagcaaaaaaaggcggcaagaagaagggctctagtttccaaaccgtctctgccctgttcagagaggaacagagtaacaccaatctggcaaaattcagaaagctgcagcatgaactggaagaggccgaggaaagggcagatattgcagaatcgcaggtaaacaaactgagggttaaaagtcgggaggtacacaccaaggtgatttcagaggaatag

SEQ ID NO: 125513 - DNA, 5820 bp, synthetic construct
  misc_feature 1..5820: note = Description of Artificial Sequence: Synthetic coding sequence
  source 1..5820: mol_type = other DNA
atgtcttcagacagcgagatggccattttcggcgaggccgccccttttctgcgcaagtcggagagagaaagaattgaagcccaaaacaagccctttgacgccaagacatcagtcttcgtcgtcgatcctaaggagagttttgtcaaagctactgtgcaatcacgggaaggcgggaaagtcacggcaaaaacagaagctggagcaacagtcaccgttaaagatgaccaggtcttccccatgaacccgcctaagtacgataaaattgaggatatggccatgatgacccacctccacgagcctgctgtcctctacaatttaaaagaaaggtacgcagcctggatgatttatacctatagcggcttgttctgcgtgaccgtgaatccctacaaatggttgcctgtgtacaatgccgaagtggtcaccgcctacaggggcaaaaaaaggcaagaagcccctccccatatcttttctatctccgacaatgcataccagtttatgcttacagacagagaaaaccaatccattctgattaccggcgagtccggcgcagggaaaacggtaaacacaaaaagagtaatccaatactttgctacaattgcggtcactggggagaagaaaaaagaagaggtgacttctgggaagatgcaggggacactagaggatcagattatttctgctaacccccttctggaggcgttcggcaatgccaaaaccgttcgcaatgacaatagtagtcgcttcggcaaattcataagaatccatttcggtactacggggaagttagccagcgcagatatagagacatacttgctcgagaagagccgagtgacctttcaactgaaagccgaaaggagctaccatatcttctatcaaattatgagcaataagaaaccagaccttatagaaatgctgctgatcacaactaatccatatgattacgcgttcgttagccagggagaaattacggtgccgagtattgacgatcaggaagaattaatggcaactgactccgcaatagagattttgggatttaccagcgacgaacgcgtgtccatctataaattgaccggcgctgtgatgcactatggcaacatgaagtttaaacagaagcagcgggaggaacaggccgagccagatggcaccgaggtggcggacaaagccgcctacctgcagaacctgaattcagcagatctgttgaaggccctgtgctatcctcgcgttaaagtcgggaacgagtatgtcacgaagggccagacggttcagcaggtgtacaatgccgttggtgctctggctaaagctgtctacgataagatgttcctatggatggttacacggatcaaccagcaactcgacaccaagcagccacgccagtattttattggcgtgctggacatcgctggcttcgagattttcgattttaattccttagagcaactgtgcatcaacttcacaaatgaaaaactgcagcagttttttaatcatcacatgtttgtgctggaacaggaggaatacaagaaggagggtattgagtggaccttcatcgatttcgggatggacctagccgcatgcatcgaacttattgagaagccaatggggattttctccattctggaggaagaatgcatgttcccaaaggccaccgacacgtctttcaagaataagctatacgagcaacatctcggcaaaagcaacaacttccagaagccgaagcctgccaagggaaagccagaggctcacttctccctgatccactatgccgggaccgtggactacaacatagccgggtggttggacaagaataaagatcccctgaacgaaactgtggtgggcctttatcagaaaagtgccatgaaaaccctggccctacttttcgtgggcgccacaggtgctgaggcagaagccggcggggggaagaagggcggtaagaagaagggctcatcctttcagaccgtttcagcccttttcagagagaaccttaataagctgatgacgaatcttagatcgacccaccctcacttcgtgagatgtatcatacctaatgagaccaaaacacccggcgccatggaacacgaactggttctccatcagctgcggtgtaacggtgtgttggaggggatcaggatttgtcgaaaaggcttccccagcaggatactgtatgctgatttcaagcaaagatacaaagtgctcaacgcctctgctatccccgaagggcagtttattgactcaaagaaggcaagtgaaaagctcttaggctctattgatatagatcatacacagtacaagtttgggcacaccaaggtgttctttaaggcagggctcctgggtctgttagaagagatgagagatgagaagctcgcgcagcttattacgcgaacacaggcgatgtgccggggctttctagcccgagtagagtatcagaagatggtggagaggcgcgagagcatcttctgcatccagtacaacgtgcgagcctttatgaatgtgaaacattggccatggatgaagctatattttaaaatcaaacccctgctgaagtccgccgagacagaaaaggagatggccaacatgaaggaagaattcgagaaaaccaaagaggagctggcgaagactgaagccaagcgcaaagaactcgaggaaaaaatggtcaccttaatgcaagaaaagaatgatttgcagttacaagtccaggcagaggccgactctctggccgatgccgaggagcgctgcgatcaactgattaagaccaaaattcagttagaagcaaagattaaagaagtaacagagagggcagaggatgaagaggagatcaatgccgagctaacagccaagaagaggaagcttgaggacgagtgttccgagttgaaaaaagacattgacgacctcgagctgaccctggctaaagtggaaaaggaaaagcacgcgacagagaataaggtaaagaatctgaccgaagaaatggctggactggacgaaacaatagccaagctcactaaagaaaaaaaagcattacaggaggcccaccaacagactctggatgatttacaggcggaagaggataaggtgaacacgctcactaaagctaagatcaaattagagcagcaggtcgatgacttagagggaagcctggaacaagagaaaaaaatcaggatggacctggagagagctaagcgcaaactcgagggggacctgaaactcgcccaggaaagtactatggacattgaaaacgataagcagcagctcgacgagaaactgaagaaaaaagagttcgagatgagcggactgcagtcaaaaattgaagacgagcaggccctgggaatgcagctgcagaagaagataaaagagctgcaagccagaatcgaggaattggaggaagaaatcgaagccgaacgtgcaagcagggcgaaagctgaaaaacagagatcagatcttagccgggagctcgaggagatctcggagcgattggaagaggcgggcggcgcgacatccgctcagatcgagatgaacaagaagcgcgaggccgaattccagaagatgagaagagacttagaggaagccaccctgcagcacgaggccactgctgcgacgctgcggaagaaacatgccgacagcgtcgccgagttgggggaacagatcgacaatctgcaacgagtgaagcagaaactcgaaaaggaaaagtccgagatgaaaatggaaatagacgatctggcttccaatatggagactgtgagcaaggccaagggcaatctcgagaagatgtgtcgcgcgctggaagaccaactaagcgagatcaaaaccaaggaggaggagcaacaacgcctgatcaacgaccttactgcccagagagcccggctccagaccgagtcaggcgaatactctcgccagctcgacgaaaaagatacattggtttcccagttgagccgcggaaaacaggctttcacccagcagatcgaggagctaaagcgccagttggaagaagaaatcaaagccaagtcagctcttgcacacgctctccaatcaagtcgacatgattgtgacctgttgagggaacagtatgaggaggagcaggaggccaaggccgagctgcaaagggccatgagcaaggcaaacagtgaggtcgcacagtggaggactaagtatgagactgatgccatccagcggacggaagagctggaagaggcaaaaaagaagcttgcccagcgactccaagacgcagaagagcatgttgaagccgtaaatgctaagtgcgcgagtttagagaagacgaaacagcgcctgcagaatgaggtggaggatctgatgatcgacgtggaaagaacaaatgctgcatgcgcagcattagacaagaaacagcgtaacttcgataaaatcctcgcggaatggaaacagaagtgcgaggagacccacgcagaattggaagcttcgcagaaggaatcccggagcctgtccacagagctgtttaaaattaagaacgcatacgaagagtcactcgatcaattggagaccctgaagcgggagaataagaacttgcagcaagaaattagtgacctgacagagcagatcgctgaaggtggaaagcgtattcacgaactagagaagatcaagaagcaggtagagcaggaaaaaagtgaacttcaagccgctctggaggaggccgaagccagcctcgagcacgaagagggtaagatcctgaggatccaactggaactgaaccaagttaaaagcgaagtggacaggaagatagcagagaaggacgaagagattgatcagatgaagcgcaatcatatccggattgtcgagtcgatgcaatctacacttgacgcggagatccgctcacggaatgatgcgattaggttgaagaaaaaaatggagggggatctaaatgagatggaaatacagctgaaccacgctaacagaatggcagccgaggcgctgaggaactacaggaacacccaggcaatccttaaagatacacaacttcatctcgacgacgcactgcggtctcaggaagatcttaaggagcaactcgccatggtggagcgccgggcaaatttactgcaggccgagatagaagagctacgggccacgctcgagcagacagagagaagccgcaaaatcgccgaacaggagctcctggatgcaagcgaacgggtgcagctgttgcatacacaaaatacttcactgatcaataccaaaaaaaaacttgagacagacatatcacagatccagggcgagatggaagacattatccaggaggcaaggaacgcggaggaaaaggccaaaaaggcgatcaccgacgctgccatgatggccgaggagctgaaaaaggagcaggatacttctgctcacttggagcgcatgaagaaaaatctggaacagacagtcaaggacctgcagcacagactcgacgaggctgagcagctggctttaaaaggaggcaagaagcagatccagaaactggaagcgcgggttagagagctggagggagaagtggagtctgagcagaagaggaacgtcgaggctgtgaaagggctgcggaagcatgagcgaaaggtgaaagaacttacctaccagactgaagaggatcggaagaacattcttagactacaagacttggttgacaagctgcaggccaaagtgaagtcctacaagagacaagccgaagaggctgaggaacagagcaacgttaaccttagcaagttcagaaggatccaacacgaattagaagaggcggaagaacgggccgatattgcggagtctcaggtaaacaagttgagagtcaagagccgagaagttcataccaaaattatttcagaggagtag

SEQ ID NO: 125514 - DNA, 5820 bp, synthetic construct
  misc_feature 1..5820: note = Description of Artificial Sequence: Synthetic coding sequence
  source 1..5820: mol_type = other DNA
atgtcctctgatagcgagatggctatttttggtgaagccgctcctttccttaggaagtcagagaaggagcgaatcgaagcacaaaacaagccttttgacgccaagacgtccgtgttcgtagtggaccctaaagaatcctatgttaaagcaatagtgcagtctcgggaggggggaaaagtcaccgccaagaccgaggcaggagccacagtcactgtgaaggaggatcaggtcttcagcatgaatcccccaaaatacgacaagatcgaggacatggccatgatgacccacctgcatgaaccggcagtcttgtacaatctgaaggaaagatacgcagcctggatgatatatacatacagcggtttattttgtgtcaccgttaatccttacaagtggctcccagtgtataatccagaagtggttaccgcgtataggggcaagaagagacaggaggcacccccccacatattcagcataagcgataacgcgtaccagttcatgttaaccgacagagagaaccaaagtatattgattaccggtgaatcgggtgctggtaagaccgtgaataccaaacgtgtcatccagtactttgctacgatcgccgtgaccggagaaaaaaagaaagaggagccagcctccggcaaaatgcagggcactctggaagaccaaattatttctgccaatcctctcctcgaagcatttgggaacgccaagaccgtgcggaatgataatagcagtcggttcggcaagtttatccggatacattttggagctacagggaagcttgcctcggctgacattgagacatatctgctcgagaaaagccgcgtgacttttcagttgaaggcagagaggagctaccacatcttctaccaaatactgtcaaataagaagcctgagctgatcgagatgttactgatcaccaccaacccttatgattttgccttcgtgtcccaaggagagattacggtgccctctattgatgatcaggaagagctcatggcgacagattcagctgtggacatcctggggtttacggccgacgaaaaggtggctatctacaagttgactggtgcagtgatgcactatggaaacatgaagtttaaacagaagcagagagaggagcaggccgagccagatggaaccgaggtggcagataaagccgcatacctcacttccttaaactctgcagatctgttgaagtcactctgctacccaagagttaaggtgggaaacgagtttgtgacgaagggtcagaccgtccagcaggtatataatgctgtgggggccctcgccaaagctatctacgaaaagatgttcctgtggatggtcactcggattaaccagcagttagatactaagcagcccaggcagtactttatcggggtcttagatatcgccgggttcgaaattttcgatttcaacagcctggaacagctgtgcattaattttactaatgaaaagctccagcagttttttaatcaccatatgttcgtgctggagcaggaagaatacaagaaggagggcattgaatgggagttcatcgacttcggtatggacctcgctgcttgcatcgagttgatcgaaaaaccgatgggtattttttctattttagaagaggagtgcatgttccccaaggcgaccgacacgtcattcaagaacaagctgtacgagcagcatttggggaagtccaataatttccagaagcctaagcctgccaaagggaaacctgaagcgcactttagcttagtgcactacgccgggaccgtggattacaatattgcgggatggctggacaaaaataaagatcccctgaatgaaaccgtggtaggtttgtatcagaagagtgcgatgaagaccttggcgttcctcttcagcggggctcagactgcagaagcggagggcggtggaggaaagaagggcggaaaaaagaagggaagctcgtttcagactgtgagcgcgctcttcagagagaatctgaacaaactaatgactaatttgcgctccacccatccacacttcgtgcggtgtatcattcccaacgagaccaagacccctggtgccatggagcacgaactggtgctgcaccaattgcgctgtaacggcgtactggagggtattcgtatctgtcgaaagggattcccttcacggatcctttacgcggatttcaaacagcgatacaaagtgctcaacgcctctgctataccagaggggcagttcatcgactccaaaaaagccagtgaaaagttgctcggaagcatcgaaatcgatcacactcaatacaagttcgggcatacaaaagtattcttcaaagcaggtctccttggcactctagaggaaatgcgcgacgaaaagctcgcccagctcatcactcggacccaggccatttgtagagggtttttaatgagggtggagtttcgcaaaatgatggagaggcgagagagcatattttgcattcaatataacatccgagcctttatgaatgtcaaacactggccctggatgaaactgtattttaaaattaaaccgcttctcaagagcgccgaaactgagaaggagatggcgaacatgaaggaggaattcgagaaaaccaaggaagagttggctaagactgaagctaagcgcaaagaacttgaagagaagatggtcactctgatgcaggagaaaaacgatctgcagctgcaggtgcaggccgaagctgatgctctggcagacgcggaggaaagatgtgaccaactcataaaaactaaaatccagctggaggcgaagataaaggaggtcaccgaaagagccgaagatgaggaggaaattaacgctgagttgacagccaaaaagaggaagctagaggatgagtgttcagagctgaaaaaggacattgatgacctggagttgactttggccaaagtggagaaggagaagcacgccacggaaaacaaagtaaagaatcttacagaggaaatggccggcttggatgaaaccatcgcaaagttgacgaaggagaaaaaggctctacaggaagcacaccagcagacattggacgacctccaaatggaggaggataaggtcaataccctgaccaaggcaaaaactaaactcgagcagcaggttgacgacctggaaggaagcctcgaacaggagaagaagctgtgtatggatttagaaagggccaaacgaaagctggaaggggatctgaagctggcacaagagagcacaatggacactgagaacgacaagcagcagctgaacgaaaagttaaagaaaaaagagtttgagatgagtaacctccaaggaaagattgaggacgaacaggctctagctatacaactacaaaaaaagatcaaggagctgcaagccagaattgaggagttagaggaggagattgaagcagaacgagctagtcgggctaaggcagagaagcaaaggagcgaccttagccgggaacttgaggagataagtgagagactggaggaggcagggggcgccacaagcgcacagatcgaaatgaataagaaaagagaggctgagttccagaaaatgcggcgggatttagaagagtccactctccagcacgaggccaccgcagcagcccttagaaagaagcacgcggattccgtggccgaactgggggaacagatcgatagcctgcagagagtgaagcagaagcttgagaaggagaagagtgagctgaaaatggagattaacgacctggcgtccaatatggagaccgtatctaaggctaaagctaacttcgagaagatgtgccggacacttgaagatcagctgtctgagattaagacaaaggaggaggagcagcaacgacttatcaatgaactgtccgcccaaaaagcccgactccacacggagagtggagagtttagccgtcagctggacgagaaggacgccatggtgtctcaactgagccgggggaaacaggccttcactcagcagattgaagagcttaagaggcaattggaggaggaaactaaggccaaatccaccctcgcccatgccctgcagtcagcccgccatgattgtgacctgctcagggagcaatacgaagaagagcaggaggcaaaggcggaattacagaggggtatgagcaaagcaaatagcgaggtggcccagtggcgaactaaatatgaaacagatgccattcagaggacggaagaactggaagaggcaaaaaaaaagctggcacagaggctccaggacgcagaggaacatgtcgaagccgtgaatagcaagtgtgctagcctcgagaagaccaagcaacggctgcagaacgaggtcgaggatcttatgattgacgtcgagagatctaacgctgcttgcattgccctggacaaaaagcagcgtaactttgacaaggtgctggccgagtggaaacagaagtatgaagagactcaggctgagctggaggcatcacagaaggagagtcgcagtcttagcactgagttattcaaggttaagaatgcttacgaggagtctttggaccacctcgagactctgaaacgcgaaaacaagaacctgcagcaagagatttcagacctaaccgaacagatcgcagagggaggaaaacacatccatgagctggagaaggtgaagaagcagctggatcacgaaaagtcagaactgcagacatctcttgaggaggccgaagctagcctcgagcacgaagagggtaaaatcctgagaatccagctggaactgaatcaggtgaaatctgagattgaccgcaaaattgccgagaaagatgaggaacttgaccagctgaagcgcaaccacttacgagtcgtggaatccatgcagagcacactggatgcagagatccgctctcgcaatgacgctctgcggataaaaaaaaagatggaaggcgatctaaatgagatggagatacagctcaatcacgccaaccggcaggctgctgaggctctgagaaatctccgaaacacacagggaattttgaaagacacccagttgcatttggacgacgccattcgtggtcaggacgatctgaaggagcagctggctatggtagagaggcgcgcaaacctaatgcaggctgaggtagaggagctccgagccagcctggaaaggaccgaaagaggcaggaagatggccgagcaagaactgctcgatgctagcgaacgggtgcagcttttgcacacacagaacacaagtttaatcaatacgaagaagaaacttgagaccgacatcagccaaatccaaggtgaaatggaagacatagtccaggaagcaaggaacgcagaggaaaaagcaaagaaggctatcactgatgccgctatgatggcggaagagctcaagaaggagcaggacacctcagcacaccttgaaagaatgaagaagaacatggaacagacggtgaaagacctgcagctcaggctggatgaggctgagcaactcgcacttaaaggcggtaagaagcagattcagaagctggaggctcgggtgagagaactggaatcagaagtagagagcgaacagaaacataatgtggaggcggtgaagggactgcgaaaacacgagcggagagtaaaggaactgacctaccaaactgaagaggaccgcaaaaatatcttgaggcttcaggacctggtggataagcttcagacaaaagtaaaagcctataagcggcaggctgaagaggccgaagagcagagcaatgtgaacctggccaaattcagaaagttgcaacatgagctcgaagaggccaaagagagagcagacattgcagaaagccaggtgaacaagctcagagtgaaaagccgcgaagtgcatacaaaagtcatatcagaagaatag

SEQ ID NO: 125515 - DNA, 5820 bp, synthetic construct
  misc_feature 1..5820: note = Description of Artificial Sequence: Synthetic coding sequence
  source 1..5820: mol_type = other DNA
atgacagatgcacagatggctgatttcggcgccgcagctcaatacctccgcaagagcgaaaaggagcgcttagaggcacagacacgcccattcgacatcagaaccgagtgttttgtgccagacgataaggaagagttcgttaaagctaaaattctgtctcgcgaaggtggcaaggtcattgccgaaaccgagaacgggaagacagtcacggttaaggaagaccaggttctccaacaaaaccccccaaagttcgataaaatcgaggacatggcaatgctcacattccttcacgaaccagccgtgctctttaacttaaaagagagatatgcagcatggatgatctatacttattccggactcttttgtgtgactgtaaatccttataaatggcttcctgtgtataacgccgaagtcgttgctgcttaccgggggaaaaagcgttccgaagccccgccacacattttcagcatatcagataacgcctaccagtacatgctgacagaccgggagaatcagagtatcctgatcactggggaatcaggggcaggtaaaacagtcaatactaagagggtgatacagtattttgcaagtatcgcagccattggggatcggggaaaaaaggacaatgctaacgccaacaaaggcaccttggaagaccagatcattcaggccaacccagccctggaggcattcggcaatgctaagaccgtgaggaatgacaactcctcccggttcggcaaattcatcagaattcatttcggagccactgggaagctggcgtcggccgacatcgaaacatacctcttggaaaagtctcgagtgatttttcagttgaaggccgaaagaaactaccacatcttctaccagatcctgtctaacaagaaacccgagctcttagatatgctcctggtgactaataacccctatgattatgcctttgtatcccagggtgaggtgtcggttgcaagtatcgacgactccgaggagctgatggcaacagactctgccttcgatgttctgggttttacatcagaggaaaaagcaggagtgtacaagcttaccggagcgattatgcattatggcaacatgaagttcaagcagaaacagcgcgaagagcaagccgagccggatgggacagaggatgccgacaagtccgcctacctaatgggtttgaattcagcagatctgctaaagggcttgtgtcacccccgcgtgaaggtcgggaatgagtacgtgaccaaagggcaatccgttcagcaggtctactactctatcggggctcttgccaaggctgtgtacgagaagatgttcaactggatggtgacccgtataaatgcgaccctggagactaaacagcctaggcagtatttcatcggtgtcctggatatagccggcttcgagatttttgacttcaattctttcgagcagttatgcattaatttcacaaacgagaaattacagcagtttttcaaccatcacatgtttgtgctggagcaggaagaatataagaaggagggcatcgagtggacattcatcgacttcgggatggacttgcaggcctgcatcgatctgatcgagaaacccatgggaattatgtcaatattggaagaggaatgtatgtttcctaaggctacagatatgaccttcaaagcaaaattgtacgataaccatcttggaaagtccaacaattttcagaaaccacgaaacatcaaggggaagcaggaggcacatttctctctgatacattatgcgggtactgtggactacaacattctgggatggttggagaaaaacaaagatcccctcaatgagactgtggtcgccctatatcaaaagtcttccctaaaattgatggctacactgttctctagctacgccacagccgacacgggcgattcaggtaagtcaaaaggtggcaagaaaaagggaagctcttttcaaactgtgtccgcactgcacagagagaatcttaacaaactgatgaccaacctccgaactacacatccccattttgtgcgttgtataatccctaatgaacggaaggccccaggggttatggataatcctctggtcatgcatcagctacgctgcaatggcgtgctcgagggtatccgaatatgccgaaaggggttcccgaacaggatcctatacggcgacttccggcagcggtatcgaattctcaaccccgttgccatcccagagggccaatttatcgacagtcgcaaaggcactgagaagctcctgtcatcactggatatcgatcacaatcaatataaattcggacacactaaggtgttcttcaaggccggtctgttaggactactggaggagatgagagatgaaagactctcccgcatcatcacccgcatgcaggctcaagcccgaggccagctcatgcgcatcgagttcaagaagatagtggaaagacgggacgctcttttggtgatccagtggaacatccgcgccttcatgggtgttaagaattggccatggatgaagctttactttaaaattaagcctctactcaagagcgcagagaccgagaaggaaatggcaaccatgaaggaggagttcggaaggatcaaggagactctggagaaaagcgaagccaggcggaaagaactagaagaaaagatggtatcactccttcaggagaaaaacgacctgcaactacaagtgcaggccgaacaggacaacctgaacgatgctgaggagcgctgcgaccaacttattaagaataagattcagttggaggctaaggtgaaagagatgaacgagcgccttgaagacgaagaagaaatgaacgccgagctgacagcaaagaagcgaaagctggaggatgagtgctccgagcttaagaaggacatcgatgatcttgagttaactctcgccaaagtagaaaaagaaaaacacgcgactgagaacaaggtgaagaatttgactgaagaaatggcagggcttgatgagattattgccaaactcacaaaggagaaaaaggctttgcaagaggctcaccagcaggcactggatgacctgcaggtcgaagaagacaaagtcaatagtctgtccaagtcaaaggtcaagctcgaacagcaggtcgacgatctcgagggctcccttgagcaggagaagaaagtgagaatggacttggaaagagcaaaacgtaagcttgagggggacctgaagttgacccaagagtctatcatggaccttgagaacgacaagctgcagttggaggaaaagctgaaaaaaaaggagttcgatatcaaccagcagaatagcaagatcgaagatgaacaggtcttggctctccagttacagaagaaattaaaggagaaccaggccaggattgaggagctagaggaggagttggaagcagaacgtaccgcccgtgctaaagtagaaaagctgcgctccgacctgagtagagagctggaggagatttctgagagactggaggaagctggaggagccacgtcagtgcaaatcgagatgaataaaaaaagagaagccgagtttcagaaaatgagaagggacctggaggaggctacactgcaacatgaggctactgctgccgcattacgcaaaaagcacgctgattccgtggcggagctgggagagcaaatcgacaacctgcagcgcgtgaagcagaaactggagaaagagaaaagcgaatttaagctggagctggacgatgttacgagtaatatggagcagataattaaagccaaagcgaatctggagaaagtatctaggacgctggaggaccaggccaatgaataccgggtgaagctggaggaagcccagcgctccttaaacgacttcacaacccagagagcaaagctccagaccgagaacggagagctagctcggcagcttgaggaaaaagaggcactaatcagccagctgaccagaggcaagcttagctacactcagcagatggaagatctgaaacgccagttggaagaagagggaaaggccaaaaacgcactggcacatgccttacaatctgctcggcacgactgtgacctccttagggaacagtacgaagaggagacagaagccaaagctgaactccagagagtattatctaaagctaacagtgaggtcgcgcagtggcggacaaagtacgaaacggatgcaatccagaggactgaggagttagaggaagctaaaaagaagctcgctcagcggctgcaggacgccgaggaggctgtagaggctgttaatgcgaaatgttcctcactcgaaaaaaccaaacatcgcctgcagaacgaaattgaggacctgatggtcgatgtggagcgttctaacgctgccgctgccgccctagacaagaaacagcgcaactttgataagatcttagccgagtggaagcagaagtatgaggagtcccagtccgagctggagtcatcccagaaagaggcacgcagtctgtctacagaactgttcaaattgaagaatgcctatgaagagtccttggagcatctggagacttttaagcgggagaataaaaacctacaggaggaaataagtgatcttacagagcagctgggggaaggcgggaagaacgtgcacgagttagaaaaagtccggaaacaattggaagtggagaagctcgaactgcaatcagcccttgaggaggcagaagcctcactggagcacgaagaaggtaaaatcctaagagcccagttggaattcaaccaaattaaggctgaaattgagaggaagctggccgagaaggacgaggagatggaacaggccaagcgaaaccaccagagagtggttgacagtctgcaaaccagcctggacgcagagacccggagccgcaacgaggtcctccgcgtgaagaaaaagatggagggcgacctgaatgagatggaaattcagcttagccacgcgaaccgaatggccgcagaagctcagaagcaggtcaagagtctacagagtctgttaaaagatacccaaattcaactggatgatgccgttcgggccaatgacgatctcaaggaaaatatcgccatcgtagagaggaggaacaatctgctccaagccgagcttgaggagttaagagctgtggtggagcagactgaaaggagcaggaagctggccgaacaggaattgatagagacgagtgaacgagtgcaacttctgcactcacaaaatacgtcgctcattaaccagaagaagaaaatggagtcggacctcacccagctgcaatccgaggtggaggaagcagtacaagagtgtaggaacgcagaggagaaggctaagaaagcaatcaccgacgctgctatgatggctgaggagctgaagaaggaacaggacacatcagcccatttggaacggatgaaaaaaaacatggagcaaacaatcaaagatctgcagcatcggttggacgaagccgaacagatcgctttgaaaggtggaaagaaacagttgcaaaagctggaggcaagagtcagagaactcgaaggtgagctggaagcggagcagaaacgcaacgctgagtctgtgaagggaatgcggaaatccgagcgtagaatcaaggaacttacctatcagaccgaggaagacaagaagaacctcctgaggttgcaggatctggttgacaagctacagttaaaggtgaaagcttataagcgccaggcagaagaggctgaagagcaagccaataccaacctctctaagtttcgtaaggtgcaacatgagttggacgaggccgaagagcgcgctgacatcgcagaatctcaggtcaacaagttgcgggccaagagccgcgacattggggctaagcagaagatgcacgatgaggagtag

SEQ ID NO: 125516 - DNA, 5820 bp, synthetic construct
  misc_feature 1..5820: note = Description of Artificial Sequence: Synthetic coding sequence
  source 1..5820: mol_type = other DNA
atgacagatgcccagatggccgattttggagcagccgcccagtacctgaggaagtctgagaaagagagactggaagctcagacgagaccgttcgatattagaacagaatgtttcgtaccagatgataaagaggaattcgtgaaggctaagatccttagtagggaaggtggcaaagtcatcgcagagactgagaatggcaagacagttactgtcaaagaagaccaagtgctgcagcagaacccgccaaaatttgacaagattgaagacatggccatgctcacctttctgcacgaacctgctgtcctctttaatctgaaggaaaggtatgcagcttggatgatctacacgtacagtggcctgttctgcgtcacagtaaacccgtataagtggctgcccgtgtacaacgccgaggtcgttgccgcatatcgtggcaagaaaaggtctgaagctcccccacacatattcagcatttctgataatgcctatcaatacatgttgaccgacagggaaaaccagagtattctgatcaccggagaatccggggccggaaagaccgtcaacaccaagcgtgtaatccagtatttcgcaagtattgccgccattggggaccgaggaaagaaagacaatgccaacgccaataagggaacccttgaggaccagattatacaggcaaacccagccctagaagcattcgggaatgctaagaccgtgaggaatgacaactctagccgattcggcaaattcatcaggattcacttcggtgctaccggaaagttggcctcagctgacatcgagacgtatctgcttgaaaaaagccgagttatctttcaactgaaggccgagcgaaactatcacatcttctaccagattctgagcaacaagaagccggaactgctagatatgttgcttgtaaccaataatccatatgattatgcttttgtgtctcagggcgaagtctccgtggcctctatcgacgatagcgaggaactcatggccacagacagtgcgtttgacgtgctgggtttcactagcgaggagaaagccggtgtgtataagctaacaggggccattatgcattacgggaacatgaagttcaagcagaagcagcgggaagaacaggccgaacctgacggcactgaagatgccgacaaatcagcctatctcatgggtcttaatagcgccgatctgctgaaggggttgtgtcaccccagagtgaaagtgggaaacgagtacgtgaccaagggacagtcagtccagcaggtttattacagtatcggagctcttgctaaggctgtgtatgagaagatgtttaattggatggtgacacgtattaacgcgactctggaaactaaacaacccaggcagtactttatcggtgtgctggatatcgcgggcttcgaaattttcgactttaactctttcgaacagctgtgcatcaacttcaccaacgagaagttgcaacagttttttaaccaccacatgtttgtcctggagcaggaagagtataaaaaggaggggatcgaatggacttttatcgattttgggatggatttgcaggcctgtatcgatctcatcgaaaagccaatgggtattatgtccatcctagaagaggagtgtatgttcccgaaagccacagacatgacttttaaagcgaaactctatgataatcacctggggaaatccaacaattttcagaaacccagaaacatcaaaggcaaacaggaagctcatttctccttgatacactacgctggcactgtggactacaacatcctcggatggttggaaaaaaataaagatccgctgaatgagacagtcgtggctctgtatcagaagagttccctgaaacttatggccaccctgttttcttcttatgccactgctgacacgggagacagtggaaagtcaaagggagggaaaaaaaaaggctcgtctttccagacagtaagcgccctgcaccgcgagaacctgaataagctgatgactaaccttagaacaacacacccccattttgtgcggtgcataatcccaaacgagcgcaaggccccaggcgtgatggataaccccctagtcatgcaccagttgagatgcaatggcgtgctggagggcattaggatttgtaggaaggggttcccaaatcgcatactgtacggggactttcgccagcggtatagaattctgaatccagtcgctatccccgaaggacagtttatagacagtcggaaaggaactgagaaattgctctcatctctcgacatcgaccataaccagtataagtttgggcataccaaagtattctttaaagccggactgctgggactgttggaagagatgcgcgatgagcgcctatcccgcatcataactcgcatgcaggcccaggcgcgcggtcagctgatgagaatcgaatttaaaaaaatcgtagaaaggcgggacgccctcttggtaatacagtggaatatccgtgcattcatgggtgtaaagaattggccgtggatgaagctgtacttcaagattaagcctttgctgaagtccgctgaaacggagaaagaaatggcgactatgaaggaagaatttggccggatcaaggagaccttggagaagtctgaggccaggcgtaaggaactcgaggaaaagatggtttcgcttctgcaggagaagaatgatcttcagctgcaggtccaggccgagcaagataacctgaatgatgcagaggaacgatgtgaccagttgattaagaataagattcagctcgaggccaaagtcaaggaaatgaatgaacggctggaggacgaggaggagatgaacgcagagctgacagctaagaagaggaagctcgaagacgagtgctccgaactgaagaaggatatcgacgatctggaactgactctggcaaaggttgagaaggaaaagcatgccactgagaataaggtgaagaatcttacggaggaaatggccgggttagatgaaattatcgctaagctcaccaaggaaaaaaaagcgctgcaggaagctcatcagcaggctctcgacgatttgcaggttgaggaggacaaggtgaactcgctgtccaagtcgaaagtcaaactagaacagcaagtggatgacctggagggctcactggaacaggagaaaaaggtgcgtatggatcttgagagggccaaacgtaaactggaaggtgatttgaagctgacccaggaaagcatcatggacctggagaacgacaaattacagctggaggaaaagctcaaaaaaaaggagtttgacattaatcagcaaaatagtaagatcgaggacgaacaagtgctggctctgcaactccagaagaaattaaaggagaatcaggctaggatcgaggaattagaagaggaactcgaagcagagaggacagctagagctaaggtggagaagcttaggagcgacctctctcgtgagttagaggagatcagtgagagactcgaggaggctggcggcgccacctccgtacagatcgaaatgaataaaaaacgcgaagccgaattccagaagatgaggcgcgatctggaagaggctactctgcaacacgaagccacggcagcagccctaaggaaaaagcacgccgactccgtggccgaactcggcgagcagatcgacaatttgcaaagggtcaaacagaagttggaaaaggagaagtccgagttcaaactcgaattggatgacgtgacttccaacatggaacagattattaaagccaaggccaacctagagaaggtttctaggactttagaggatcaagctaatgagtacagggtaaagctggaagaggcgcaacgaagtctcaacgattttacaacccaacgcgcgaaactgcagaccgaaaatggagagctggccaggcagctggaagaaaaggaggcactaatttcccagctgacacggggaaaactatcttatacacagcagatggaagacttgaagagacagctggaggaggagggaaaggccaaaaatgctctggctcatgctctgcaaagtgccagacacgactgcgacttattgagagagcagtatgaggaagagaccgaggcaaaagccgaactccagagagtactctctaaggccaattccgaggtagcccagtggcgaaccaagtacgagactgacgctattcagcgtaccgaagaattggaagaagctaagaaaaagctagcccagcgcctgcaggatgctgaagaggctgttgaagctgtgaatgcgaagtgttcctcactcgaaaaaaccaagcataggctgcagaacgaaatcgaagacctcatggttgacgtggagcgcagtaatgctgctgcggcagccctcgataagaagcagcggaactttgacaagattctagcagaatggaagcagaaatatgaagagagccagagtgagctagagtcatctcaaaaagaggcgagaagcctttcaaccgaactgtttaaattgaagaatgcatatgaagaaagtctggagcacctggagacattcaaaagagaaaacaaaaacctgcaggaggagatttctgatcttactgagcagctcggggagggagggaagaacgttcacgaactcgagaaagtgaggaaacagctggaggtcgaaaaactggagcttcaaagtgccctggaggaagccgaggcatccctggaacacgaggagggcaagattctgcgtgcccagctggaattcaaccagattaaagctgagattgagcggaaactggctgagaaagacgaggagatggagcaggccaaacgaaaccaccagagagtggtcgacagcctgcagacgtcactagacgcagagacaagatccaggaatgaagtgctccgtgtgaaaaaaaaaatggaaggagatctcaacgaaatggagatacagctgtcacacgctaatagaatggccgcagaggcacaaaaacaggtgaagtctttgcaaagcctcttgaaagatacccaaattcagctcgacgatgcagttagagccaatgacgacctcaaggagaacatcgctatagtcgaaagacggaacaacctgctacaggcggaacttgaagaactgcgagctgtcgttgagcaaaccgaacggagtcgcaagctcgctgaacaggaattgattgagacttctgagagagttcagctactgcacagtcagaacacctctctgatcaatcagaagaagaaaatggaatccgacctgacccagctccaatcagaggtggaggaagccgtacaggagtgccggaatgcggaagagaaagcaaagaaggccattacggatgccgccatgatggccgaagaactcaagaaagagcaggacacctcagcccatctcgagagaatgaagaaaaacatggagcagacaatcaaagatctacaacaccgcctggatgaggccgagcagatcgcccttaagggcggcaaaaaacagctgcagaagctcgaagccagggttcgagagctcgagggtgagctggaggctgaacagaaacggaatgcagaatcagtcaagggaatgcggaagtccgagagacggatcaaagagctgacatatcaaactgaggaggataagaaaaacctgttgcgactgcaagatctggtggacaagttacagctgaaggttaaagcgtataagagacaggctgaagaggcagaagaacaggccaacacaaacctgtctaagtttagaaaagttcagcatgagcttgacgaagccgaggaacgggctgacattgctgaatcccaggtgaataaactgagggctaaaagccgggacatcggggctaaacagaagatgcacgatgaggagtag

SEQ ID NO: 125517 - DNA, 5808 bp, synthetic construct
  misc_feature 1..5808: note = Description of Artificial Sequence: Synthetic coding sequence
  source 1..5808: mol_type = other DNA
atgggcgattcggaaatggccgtatttggggcagctgcaccttatctgcgaaagagtgaaaaggaaaggcttgaagctcagactaggccgtttgacctcaaaaaagatgtgttcgtgccagacgacaagcaagagttcgtcaaagcgaagatcgtgagcagggagggcggtaaggttaccgccgaaactgagtatgggaaaaccgtcactgtcaaggaagaccaggtgatgcagcaaaatccacccaaatttgacaagattgaggacatggctatgctgacatttctgcacgaacccgcagtcctttacaatctaaaagaccgatatggctcttggatgatctacacatacagcggcctgttttgtgtgacagttaacccctacaaatggctccccgtatatactccagaagtagtggcagcctatagggggaaaaagaggtccgaagcccccccgcatattttttctattagcgacaatgcatatcagtacatgttgaccgaccgtgaaaatcagtcgatcttaattaccggcgagtcgggtgcaggaaagaccgtaaacaccaagagggttattcagtattttgctgtcatcgctgctataggcgaccgttccaagaaggatcagtctccgggcaagggcaccttagaggaccagatcattcaagccaacccggctcttgaggcgtttgggaatgccaagactgtgaggaacgataacagctcacggtttggcaaatttatccgtattcacttcggcgctactggaaaattagccagtgcagatatcgagacgtatctgctggagaagagccgagtgatattccagttgaaagctgagagggactatcatatcttctatcagattttgtcaaataaaaaaccagaacttttggacatgttgctgattacaaacaacccatatgactatgcctttatctcccagggcgagactacagtggcgtcaatcgatgatgccgaggaattaatggcaacggacaacgcctttgacgtcctcgggtttacctccgaagagaagaactcaatgtacaagctaaccggcgctataatgcactttggtaatatgaaatttaagcttaagcaaagggaagaacaggcagagcctgatggaactgaagaagcagacaagagcgcctaccttatgggactgaattcagccgacctgctcaaaggcctatgtcatccccgggtgaaagtcggcaatgaatatgtgactaaagggcaaaacgtgcaacaggtgatctacgcgacaggggccctcgccaaggcagtgtatgagaggatgtttaactggatggtgacaaggataaacgcgaccctcgagactaagcaacctaggcagtattttatcggagttctggatattgccggcttcgagatttttgattttaattcattcgagcagttgtgcattaactttaccaatgagaagctacagcagttttttaaccaccacatgtttgtattggagcaggaagagtataaaaaagaggggatcgagtggacattcatagattttggtatggacctacaggcctgcatcgacctgatagaaaagccaatggggatcatgagtattctagaagaggagtgcatgttccctaaagcaaccgatatgacctttaaagctaagttattcgacaatcatctcggaaagtcagctaattttcagaagccacgcaacatcaaaggaaaacctgaagcacacttcagcctgattcattacgcagggatagtggactataatattatcggctggctccagaaaaataaagacccactgaatgagactgttgtgggcttataccagaagtcgagcttaaagctcctcagtacactattcgctaactatgccggagctgacgcccctatcgaaaaaggtaaggggaaggccaaaaagggaagcagttttcagacagtgagcgctttgcatcgagagaatctgaacaaactgatgactaatctgcgcagcacacatccccattttgtacgatgcatcattccgaatgaaacaaagagccccggcgtcatggataaccctcttgtcatgcaccagctgcgttgtaatggggtacttgagggcatccggatatgccggaagggcttcccaaatagaattctgtacggagattttaggcaacggtatcgaattttgaatcccgccgctatccctgaagggcaattcatcgatagcaggaaaggtgctgaaaaactactgtccagccttgatatcgatcataaccagtataaatttggacatacgaaggtattcttcaaagcggggctccttggactgctggaagagatgcgggacgagcggctatcacgcattatcacccgcatccaagcgcaatcaagaggcgtcttagcgaggatggagtacaagaagcttttggagcgcagagacagtctccttgtgatccagtggaacatacgagctttcatgggtgtgaaaaactggccatggatgaagttgtatttcaaaatcaagcccctcctgaaatccgcagagagggagaaggaaatggcatcaatgaaggaagagttcacacgactaaaggaggctctcgaaaagtcagaggcaagacgcaaagaattggaagaaaaaatggtttctttactccaggagaaaaacgatttacagctacaagtgcaggcggagcaggataatttggcagacgctgaagagcgatgcgatcagctgatcaagaataagatacaattagaggctaaggtcaaagagatgaacgaaagacttgaagacgaagaggaaatgaacgccgaacttaccgctaagaagagaaagctcgaggacgagtgcagcgagctgaagagggatatagatgatctggagctgacgcttgccaaggtcgaaaaagagaagcacgctactgaaaataaagtcaaaaatctaacggaggagatggctggcctggacgagatcatagccaagttgactaaagaaaagaaggctttacaggaagcccaccagcaggcactcgacgacctgcaggcagaagaggataaagttaacaccctgaccaaggctaaagtgaagctcgagcagcaggttgacgacctcgaagggagcctcgaacaggagaaaaaggtcaggatggatctggagagagccaagcgcaagctagaaggtgatctgaagctcacccaggaaagcataatggatttagagaacgacaaacagcagcttgacgagaggctcaagaagaaagatttcgaactcaatgctcttaacgcacgtattgaagatgaacaggccctcggtagccagctccagaaaaagctgaaagaacttcaggcacgcattgaagaacttgaagaggaactagaagcagagcgtacagcaagagctaaggtagaaaagctcaggtctgacctctcacgcgagttggaggagattagtgaacggttagaagaagctggtggcgccacatcagtccaaattgaaatgaataagaaacgagaagccgagtttcagaagatgcgcagagacctagaagaggctaccctgcagcatgaagctaccgccgccgccctcaggaaaaagcatgccgacagtgtcgcagagcttggggagcaaatcgacaatctccagagggttaaacagaagcttgagaaggagaaaagcgaattcaaacttgaactagacgatgtgacctccaacatggaacaaatcattaaggcaaaggccaatctggagaaaatgtgccgcacactcgaggaccagatgaacgagcatcgttccaaggccgaagaaacccagcgcagcgttaatgacctcacttctcagcgggctaagcttcaaactgaaaacggtgagctgagtaggcagctggatgaaaaagaagcactgatctcccagttgactagaggtaagcttacctacacccagcagctggaggatttaaaacgccagctagaggaggaggtaaaggcaaagaacgccctggcgcacgccctccagtccgccaggcacgactgcgatctgctacgggagcagtatgaggaggagacagaagctaaggcagaactgcaaagagtgctgtctaaggcgaatagtgaggttgcacagtggcgtaccaagtatgagaccgatgcgattcagagaaccgaggaactggaagaagccaagaaaaagctggctcagaggctccaggaggcagaagaggcagtggaggcagtgaacgccaagtgttcaagcctggagaagaccaaacaccgtttacagaacgagattgaagacctgatggtcgatgtggaacgaagtaacgccgctgccgcagctttggataaaaagcagcgtaacttcgataagatattggcggagtggaagcagaagtacgaggaatcacagtcagagctggagagctcgcagaaagaagcacggagtctgtctactgaactgtttaaactgaaaaacgcgtacgaggagtcactagaacacttggagacatttaagcgagagaataagaatctccaggaagagatctcagacctcactgaacagttgggtagttccggcaaaacaatccacgagcttgagaaggttcgcaaacaacttgaagccgaaaagatggaactccagagcgctttggaagaagcggaggccagccttgaacacgaggaggggaaaattcttagagctcagttagaattcaaccaaattaaggctgagatagaaaggaaattggctgagaaggacgaggaaatggagcaggctaagcgcaaccatctgagggtagtggattccctccagacttcactcgacgcagagactcgttcccgaaatgaggctctgcgtgtgaaaaagaagatggaaggagacctgaacgagatggagattcagctgagccacgctaacagaatggccgccgaagcccagaagcaggtaaaatcattacagtcattgctcaaggacacccaaattcagcttgatgatgctgtgcgcgcgaatgacgatcttaaggagaacattgccattgtggagcggagaaacaatctgttgcaggctgagctggaggaactgcgcgccgtcgtagaacagaccgagcggtcccgaaaattggctgagcaggaactgatcgaaacctccgaacgcgttcagctgttacatagtcagaacacctccctgatcaaccagaagaaaaagatggacgctgacctttcacaactgcagaccgaagttgaggaagccgtgcaggagtgccgaaatgcagaggaaaaagctaagaaggctattacagacgccgccatgatggccgaggaactcaaaaaggagcaagatacatcagcgcatttggaaagaatgaagaagaacatggagcaaactatcaaagacctgcagcaccggcttgatgaagccgaacagattgctttgaaaggtgggaaaaagcagctgcagaaattagaggcccgggtgcgagagctagagaatgagctggaagccgaacagaaacggaacgctgagagtgtgaagggcatgaggaagtccgaacgcagaatcaaggaactgacatatcaaacagaagaggatcgaaagaatttgctccgacttcaagaccttgtagacaaactccaactgaaagtaaaagcctataagcgccaggcggaggaggcagaagagcaagctaacactaacttgtccaagttcagaaaggttcagcatgagcttgacgaggccgaagagagagccgatattgccgagagccaggttaataaactgcgtgcaaaaagccgggatattggcacaaaggggcttaacgaggagtag

SEQ ID NO: 125518 - DNA, 5823 bp, synthetic construct
  misc_feature 1..5823: note = Description of Artificial Sequence: Synthetic coding sequence
  source 1..5823: mol_type = other DNA
atgggcgattctgagatggccgtgttcggcgctgccgccccttacctccgcaagagcgagaaagaaagactggaggcacagactagacctttcgacctgaagaaagatgtgttcgtacccgatgataaacaggagttcgtgaaagcgaagattgtctcgcgagaggggggaaaggtaaccgcagagaccgaatatggaaaaaccgtcaccgttaaggaggaccaggtcatgcaacagaacccacctaagtttgataagattgaagatatggcgatgctaacgttcttacacgaacctgccgtgctctacaatttgaaagatcgctatggttcctggatgatctacacctattctgggttgttctgcgtcaccgtgaacccttataagtggttgccggtgtacacacctgaggtcgtcgccgcgtaccgggggaagaagcgtagtgaagccccgccacatatatttagtatttccgataatgcgtaccagtacatgctgacagatagagaaaatcagtcaatcttaatcaccggcgaaagcggggccggcaagaccgttaacactaagcgagtcattcaatattttgccgtcattgccgctatcggcgatcggtctaagaaagatcagtctccggggaaagggacgctcgaagaccagatcattcaggctaacccagccctggaagccttcggcaatgcaaaaacagtccgcaatgacaacagttcccggtttgggaaatttatccggattcacttcggggctactgggaagctggcatctgcagacatcgaaacgtatctactggaaaagtccagggtgatctttcagctcaaggcagaaagagactaccatatcttttaccagatactgagtaacaaaaaacccgagctgctggacatgctgctgataaccaataacccatatgattacgcattcatctctcagggagagacgacggtcgccagtatcgacgatgcagaggagctgatggctaccgacaatgccttcgacgttttgggcttcacctctgaagagaagaacagcatgtacaaattgacaggagccatcatgcattttggcaatatgaagtttaagctcaagcagcgcgaagaacaagccgagcctgatgggaccgaagaagctgataaatccgcttatctgatgggcttaaattctgccgacctgctgaaaggtttgtgccaccccagggtcaaggtagggaatgagtatgtgactaaaggacagaatgttcagcaagtgatttacgctactggagcactcgctaaagccgtgtacgaaagaatgttcaactggatggtcacacgcattaacgcgacactggaaacgaaacagccccgtcagtatttcattggagttttggatatcgctggctttgagatttttgactttaactcttttgagcagctttgcatcaactttaccaatgaaaaattgcagcagttcttcaatcaccacatgttcgtgttggaacaggaggagtataaaaaggaggggattgagtggacttttattgactttggcatggatctgcaagcttgcatcgaccttatagagaagcccatggggatcatgtctatcctcgaggaggaatgtatgtttcctaaggcaacggacatgactttcaaggctaagctatttgataaccacttgggaaaatctgccaatttccagaaaccacgtaacatcaaaggcaaacctgaagctcactttagcctcatccattacgcaggaatagttgactacaatattatcgggtggctccagaagaataaagaccccttaaacgagactgtggtgggtctctaccagaaatcttccttgaaactgctgtccaccctcttcgccaattatgcgggcgccgacgcccccattgaaaaagggaagggtaaagccaagaagggctcctctttccagactgtgtcagccctgcacagagaaaatctcaacaagcttatgactaacctaaggtcaacacaccctcactttgttcggtgcatcattcctaacgagactaagtccccaggagtaatggacaacccattagtcatgcaccagttaagatgcaacggagtcctggagggaatccgtatttgccgcaaggggtttcccaatcgtatcctctacggagacttcagacagcggtatcgaattctgaacccagcggcaatccctgaagggcagttcatcgactctagaaagggggctgaaaagctcttaagcagtcttgatattgatcacaaccagtacaagtttggacataccaaggtctttttcaaggcgggtctacttggattgttagaggagatgagggatgaaagattgagccgaatcatcacacgaattcaggcccagtcgaggggggtattagcaagaatggaatacaagaagctgctagagcgacgagatagtctgctggtgattcagtggaatattcgcgcctttatgggggtcaaaaattggccatggatgaagctttacttcaaaatcaaaccactgctgaagagcgccgaacgggaaaaggagatggcatctatgaaagaagagttcacccgcctgaaggaagccctggaaaagtccgaggcaagaagaaaagagctggaggagaagatggtaagtcttttgcaggagaagaatgaccttcaactgcaagtgcaggccgagcaggacaacttagcagacgctgaggaaagatgtgaccaactaatcaagaacaaaatccaactcgaagccaaggtcaaagagatgaacgaacggctggaagatgaagaagaaatgaatgctgaactgacggcgaaaaaaagaaaactggaggacgaatgtagtgagctcaaaagagacatcgatgacctggagctaaccttagcaaaggtcgaaaaagagaaacacgccacggagaacaaagtcaaaaaccttaccgaggagatggctggcctggacgagattatagccaagctgaccaaggaaaaaaaggccttgcaggaagcacaccagcaggctctggatgatctacaggctgaagaggataaagtgaataccctcactaaagccaaagtcaagctcgagcagcaggtggatgatctggaaggtagtttagaacaggagaagaaggtgagaatggaccttgagcgcgcaaaaaggaagctggaaggggatctgaagctgacccaggagtccattatggatctggaaaatgacaaacagcagcttgacgagcgtctcaagaagaaggatttcgagctgaacgctctgaacgcacgcatagaagacgaacaagcgctgggtagccagcttcagaagaaactcaaggagctgcaggcgagaatagaggagctggaggaggaacttgaagccgaacgaacggctagagcaaaagtagagaaactcaggagtgatctttctcgcgaacttgaggagataagtgaacggctggaagaggcaggaggagcaacgagcgttcagatcgaaatgaacaaaaagagagaggcagagttccagaaaatgcgacgggatctcgaggaggccaccctgcagcatgaggccactgctgcagctctccggaaaaagcacgcagactcggtagcagagctgggggagcagattgataatttgcaaagggtgaaacagaagctggagaaagaaaaatctgagttcaagttggaactcgatgatgctctcctcggactgccaagctcaaactttctcctgcccccaccattgtccgccaacctagagaaaatgtgcaggacactggaagatcaaatgaacgagcaccgctcaaaggccgaagagacacaacggagtgtgaacgatctcacttcacagcgcgctaaacttcagaccgagaatggcgaacttagccgacaactggacgagaaagaggccttaatttcccagctgacgcgtgggaaactgacctatactcaacagctggaagacctgaagcggcagcttgaggaggaggttaaagccaaaaatgccctggcacacgctttacaatcggcacgccatgactgtgacctgctgcgggagcagtacgaggaggagacagaagccaaggccgaattgcagcgggtgctgtccaaagccaatagtgaagtcgcgcagtggcggacaaagtacgagaccgacgcgatccagcggactgaggaactcgaggaggctaagaagaagctggcccaaagactccaggaggcagaagaagctgttgaggctgttaatgctaagtgtagctccctcgagaagacgaagcatcgcctccagaacgaaatcgaggatctaatggtggatgtggaacgcagcaacgctgcagccgccgcgctggacaaaaagcagaggaactttgataagattcttgctgagtggaaacagaaatacgaggagtcccagtcggaactggaatcatcccagaaggaggcgcggtctttgtccactgagctgttcaagttgaagaacgcttatgaagaaagtttagagcatctcgaaactttcaaaagggaaaacaagaacctgcaggaagagatttcggacctgactgagcaacttgggagctcgggtaaaaccattcatgagctggagaaggtgaggaagcagttggaggctgagaagatggagctccagtcagcactggaagaggcagaagcatctctggaacatgaagaagggaagatcctcagggcgcagctggaattcaatcagattaaggcagaaattgaaaggaaactggcagaaaaagacgaggagatggagcaggccaagcggaaccacctgcgagtggtggattccttgcagacaagtcttgatgccgagacccggagtaggaatgaagccctccgggtgaaaaagaaaatggagggagacctcaacgagatggagattcagttgagtcacgctaaccgaatggcggccgaagcccagaagcaagtcaagtcactgcagtcactcctaaaggacactcaaattcagttagatgatgccgttcgtgccaacgacgacctgaaagaaaatatcgcgatcgtggagaggcgtaacaacctgttgcaagccgagctcgaagaactgagggcggtggtggagcaaaccgaacgcagcagaaagctcgcggaacaggagctgattgaaacatccgaacgggtgcagctgctgcatagccagaatacaagtttgattaaccaaaagaaaaaaatggatgccgatctgtcacagctgcagacagaagtggaggaagctgttcaagagtgcagaaatgccgaagagaaagccaagaaggccattaccgatgctgctatgatggctgaggagctgaaaaaggagcaggacaccagcgcccacctggagcggatgaagaagaatatggagcagactatcaaggatctccagcaccggctcgatgaagcagaacagatagccctgaaagggggaaagaaacaactgcagaagctcgaagccagagtaagggaactggaaaatgagcttgaggccgagcagaaacgcaacgcagagagtgtgaaggggatgcggaaaagcgagcgaagaattaaggagctgacataccagaccgaagaggaccgcaaaaaccttctaaggcttcaggacttggtagacaaactgcagctgaaagtcaaggcttataagaggcaagctgaggaagccgaggaacaggctaatactaatctgagcaaattcagaaaagtacagcacgagctggacgaggctgaggagcgtgctgatattgctgagtctcaggtgaacaagctgcgcgctaaaagtcgggacatcggaaccaaaggtctgaatgaagaatag

SEQ ID NO: 125519 - DNA, 5814 bp, synthetic construct
  misc_feature 1..5814: note = Description of Artificial Sequence: Synthetic coding sequence
  source 1..5814: mol_type = other DNA
atgtcagccagctcggatgccgaaatggcagtgttcggcgaagccgcgccttatctcagaaaaagcgagaaggagcggattgaggcacagaataaaccattcgatgccaaaacgtctgtgttcgtagcggagcccaaagaatcctatgttaagtccactattcagtctaaggagggcggcaaggtcacagtcaagactgaagggggggctactctcaccgttcgggaggatcaggtattcccaatgaatccaccaaaatacgacaaaatcgaagacatggccatgatgacccacctacatgaaccaggcgttctttacaacctaaaggaacgctacgcggcctggatgatttatacctattcaggcctcttctgtgtgactgtcaatccctacaaatggcttcccgtatacaaacctgaagtggtggcagcttatcgaggaaagaaacgccaggaggctcctcctcatatcttcagtataagcgacaacgcttatcagtttatgcttactgaccgcgagaaccaatccatcctcatcactggggagtctggagccggtaagacagtaaatacaaagcgagttattcagtacttcgccactatcgccgtgacgggagagaaaaagaaggatgaaagcgggaaaatgcaggggacactagaagatcagataatatccgccaatcctctgctcgaagccttcggtaatgctaaaaccgtcaggaacgataatagctcgcggtttgggaagtttataagaattcatttcggaaccactggcaagcttgcttcagccgacatcgaaacctatctcttggaaaagtcccgtgttacctttcaattgaaagccgagcgctcttatcacattttttaccagatcaccagcaataaaaaacccgatctaattgagatgttgctgataactacaaacccctacgactatgcctttgtgtctcaaggcgaaattaccgtgccatcaattgacgatcaggaggaactcatggccaccgactctgctatagacatcttggggttcactcctgaagagaaggtttctatttataagctcactggtgccgtaatgcattatggtaatatgaaatttaaacagaaacagagagaggagcaagctgaaccagacggcacggaggttgcggataaagccgcgtacctgcagtcactcaattccgccgacttactgaaagccttatgttatccccgcgtgaaggtaggaaacgaatatgtgacgaaaggtcaaacagtccagcaggtgtataacgctgtgggcgccctggctaaggcagtgtacgaaaagatgtttttgtggatggtgactcgcatcaaccagcagctagatactaagcagcccaggcaatacttcatcggtgtgctagatatcgccggatttgagatttttgatttcaactccctcgaacagctgtgcatcaacttcacaaacgagaagctccaacaatttttcaatcatcatatgtttgtactcgaacaggaggagtacaagaaagaaggaattgagtggacattcatcgatttcggaatggatctggccgcttgcattgagttgattgaaaagcctctgggaatctttagtattctcgaagaggaatgcatgtttcctaaggctaccgacactagcttcaagaataagctgtacgatcaacacttggggaagagcgccaattttcagaagcccaaggtcgtgaaaggaaaggcagaggcccacttctctttaattcactacgccggtaccgtggactataatatcaccggttggttggataaaaacaaggaccccctgaatgacacagtcgtgggcctctatcagaagagcgccatgaagactctggcctcactgttctccacctacgcatccgctgaagctgatagctcggccaagaagggcgcgaaaaaaaagggaagtagcttccaaaccgtgagcgctctgttcagggagaatcttaataaacttatgacaaaccttcgctctacccatccacatttcgtgaggtgtattattcccaacgaaaccaagacccccggagccatggagcatgagctcgtgctacatcagctgcgctgtaacggtgtgctggaaggtatccgcatttgccggaagggctttccatccaggattctctatggtgactttaaacagagatacaaggtgctcaacgcttctgccataccggaaggccagttcattgattcaaagaaagccagcgaaaagctgctcgcgtccattgacatagaccatacacaatacaagtttggacataccaaggtcttctttaaggcaggcctccttgggctgctggaggaaatgcgggacgaaaagctcgcccagatcatcacccggacgcaggcagtttgccggggcttcttaatgcgggttgaatatcaaaaaatgttacagcggcgggaggcccttttctgcatccagtataacgtcagggccttcatgaatgtgaagcattggccatggatgaagctgttctttaagatcaagcctcttctgaaaagcgcagaaactgaaaaggaaatggcaaccatgaaagaggagttccagaagacaaaggacgagcttgccaagtcggaggctaaacggaaggaattggaggagaagatggtaactctcctcaaggaaaaaaacgatctacagctgcaagtccagagtgaggcagattccctggccgatgccgaagaaaggtgcgagcagctaatcaaaaacaagatccaattagaggctaaaataaaggaggtgactgagcgggccgaggaggaggaggaaatcaacgcagagcttacggccaaaaagaggaagctggaggacgaatgctccgagctgaagaaagacatagatgacctggagttgactctcgcgaaggttgagaaggagaagcacgccaccgaaaacaaggtaaagaatctcaccgaggagatggcagggctggatgaaactatcgctaaactctctaaggagaaaaaagccttgcaggagacccaccagcaaaccctagacgatctgcaagccgaggaggacaaggtgaacatcctgaccaaggctaaaaccaagttagagcagcaagtggatgatctcgagggaagtctggagcaggaaaaaaagctgagaatggacttagagagggctaaaaggaagctagaaggagacttgaagttggcacaagagagcacgatggatatggagaacgacaaacagcagctcgatgaaaagctcgagaagaaggaattcgagatctcaaacctgatttccaagatcgaagatgagcaagcggttgagatccagttacagaagaagatcaaggagttacaagccagaatagaggagctgggggaagagatagaggccgagagggcatctcgggccaaggctgaaaaacagcgctcggacttgagccgggaacttgaagagatcagcgaaagactagaggaggccgggggcgccacctctgcccaggtggagcttaacaaaaagcgcgaagctgaatttcagaagctcaggcgagatctcgaggaggcgacattgcagcatgaagccatggtggctgctttgcggaaaaagcacgccgactcaatggctgaactgggcgaacagatcgataatctgcagagggttaaacagaagttggaaaaagaaaagtccgagttgaagatggaaacagatgacctttcctccaatgccgaagctattagtaaggcgaaaggcaacctcgagaagatgtgtcgaagcctggaagaccaggtgtccgaacttaagaccaaggaagaggaacaacagcgcctgatcaacgatcttacagcccagcgcgcaaggctacaaaccgaggctggcgaatacagtcgccaactcgatgagaaggacgccctggtcagccaactctcgcgttcaaaacaggccagcacgcagcaaatagaggagctgaaacatcagttggaagaggaaactaaggctaagaacgccctagcccacgctctccagtcgtcccggcacgactgcgatcttctgcgggaacagtacgaagaggagcaggaaggaaaggctgagctgcaacgggccctgagcaaggccaactcagaagtggcccagtggcgcactaagtacgagacagatgcaattcagcgtaccgaagaactcgaggaggctaagaagaagctagcccaaaggttgcaggaggccgaagagcacgtcgaggccgtcaatgcaaagtgtgccagcctggaaaagacaaagcaacggttacagaacgaagtagaagacctcatgttggacgttgaacgatccaatgctgcttgtgctgccctggacaagaaacagcgtaatttcgataaagtgctttccgaatggaaacagaagtatgaggagactcaggccgaacttgaagcttcccagaaagagtcccgctcgttgagtacagagctgttcaaggtgaagaacgtgtacgaggaaagcctggaccagctagaaaccctgaggcgggagaataagaatcttcagcaagagattagcgatctgaccgagcagatcgctgaagggggcaaacagattcacgaactggagaagattaaaaagcaggtggagcaagaaaaatgcgaaatacaagccgccttggaggaggcggaggcctccctggaacacgaggaaggcaaaatcctgcggatccaacttgaattaaaccaagtgaaaagcgaggtcgacaggaaaatcgctgaaaaggatgaggaaatagatcagctgaagcgcaatcatacaagggtcgtggagacgatgcaaagtaccctggacgcagaaatacgatctcgaaacgacgcgcttagagtgaagaaaaaaatggagggggatctgaacgagatggagatacagctgaaccacgcgaaccggctggcagcagagtccctaaggaattacaggaatacccagggaattctcaaggagacacaactgcacctggacgatgctttacgggggcaagaggacttgaaagagcaactagccatagtggagcgacgagctaacctgctgcaggccgagatcgaggagctatgggctacactggagcagacagagcgctctagaaagatcgctgaacaggagttactggacgcatcagaacgagtgcagctcttacacacccagaacacctctctgattaacacgaaaaaaaagttggagaatgatgtgtcccagctccagagcgaagtcgaggaggtgatccaggagagcaggaacgcagaggaaaaagcaaaaaaggccattacggacgctgctatgatggctgaggagctgaagaaagagcaggatacaagcgcccacctggaacgcatgaagaagaatctggagcagactgtgaaggacttgcaacaccggttggacgaagcagagcaacttgcgttaaaaggtggaaagaaacagatccagaagctggaagcacgcgtacgcgaactcgagggcgaagtagaaaacgaacagaagcggaacgcagaggctgttaaaggtcttaggaaacatgagagaagggtcaaggaactcacataccagacagaggaagaccgcaaaaacgtgttgcgacttcaagacttagtggataagttacaagccaaggttaagtcgtataaacggcaggccgaggaggctgaggaacagtctaacgccaacctatctaagtttaggaaattgcagcacgaactcgaggaggctgaggaaagagccgatattgctgagtcacaagtcaacaagctgagagtcaagtctcgggaggtgcacaccaagatttctgccgagtag

SEQ ID NO: 125520 - DNA, 5814 bp, synthetic construct
  misc_feature 1..5814: note = Description of Artificial Sequence: Synthetic coding sequence
  source 1..5814: mol_type = other DNA
atgtccgcttcttccgacgctgagatggcagtgtttggtgaggcggccccatacctgcgcaagtccgaaaaggaaaggatcgaagcccagaataagccctttgacgccaagacatccgtatttgtggccgagcccaaggagagctatgtgaaaagtactattcaaagcaaagaaggtggtaaagtgacagtgaaaactgaagggggggctaccttaactgtgcgtgaggatcaggtgttccctatgaacccaccaaagtatgataagatagaggatatggctatgatgacgcatctccacgagcctggagttctgtataaccttaaggagcgttacgccgcatggatgatttatacctatagtggcctgttttgcgtgaccgtgaacccctataagtggttgcccgtctacaagccggaggtggttgccgcgtatcgaggcaaaaaaagacaggaggcccctccccatatcttctccattagcgacaatgcttatcaatttatgttaacagacagggaaaaccaatcaatcctgatcaccggcgagtcaggcgctggtaaaacagtcaatacaaaaagggtcatccaatatttcgctactatagccgtcactggcgagaaaaaaaaagatgaaagcggtaaaatgcagggtacactggaggaccagattatctcggctaatccactactggaggctttcggcaatgctaaaacggtgagaaatgacaactccagccgatttggaaaattcattaggatccatttcggaacaacagggaagctggcatctgccgacatagagacctacctcctcgaaaaatcgagagttacgttccagttaaaagccgagcgcagctatcacatcttctaccagatcacttccaacaagaagcctgatctcattgaaatgctgcttatcaccactaacccatacgattatgcctttgtgagtcagggggaaatcacagtgccatctatcgatgaccaggaggagcttatggctactgatagtgctatcgacattttagggtttacccctgaggaaaaggtttccatctacaaactcacgggggccgttatgcactacggaaatatgaagttcaagcagaaacaaagagaagagcaagccgaaccggatggaaccgaggttgctgataaggcggcttatctccagtcgctgaatagcgcggacctcctgaaggcgctctgttacccccgggtcaaagtaggtaatgagtatgtgacgaaaggccagacggttcagcaggtctataatgcagttggcgcgctcgccaaggctgtgtatgagaagatgttcctgtggatggtgacccgcatcaatcagcagttggatacaaaacagcctaggcagtacttcattggcgtacttgatattgcaggtttcgagatatttgattttaactcactggaacagctgtgcatcaactttacaaacgaaaaattgcagcagttcttcaatcatcacatgttcgttcttgagcaggaagaatacaagaaggagggcatcgagtggaccttcattgacttcggcatggatctggcagcttgcatcgagctcatcgagaagcccctggggatctttagtatcctggaagaagaatgtatgttcccgaaggctaccgatacaagcttcaagaacaagttatatgatcagcacttgggaaagtctgccaattttcagaagcctaaagtggtgaagggtaaggcggaagcacatttttcacttattcactacgcaggcaccgtcgattacaacataaccggatggctggataaaaataaagaccccctgaatgatacagtagtaggactgtaccaaaaaagcgctatgaagaccctcgcctccctgtttagcacttacgcatcagcagaggccgactcgagcgccaagaagggagcaaagaaaaaggggtcatcattccaaacagtgtcagctctgttcagggaaaaccttaataaattaatgactaacctgcgatccacacatcctcatttcgtgcggtgcattattccaaatgaaaccaagacaccaggtgcaatggagcacgagttagtgctacaccagctgcgatgcaacggagtattggagggaatccgtatatgccgcaagggtttcccatcaagaatactgtacggagactttaagcagcgatataaggttctcaacgcgagcgcaattcctgagggccaatttattgactccaagaaagcttctgagaagctgctggcttcaattgatattgaccacacccagtacaagttcggccatacaaaggtgtttttcaaagccggactgttgggtctgctggaggaaatgcgagacgagaagttagcgcagattatcactagaacgcaggctgtatgtcgggggtttctgatgagggtggagtatcagaagatgctgcagaggcgagaggccctgttttgcattcagtataacgtgcgtgccttcatgaacgtgaaacactggccgtggatgaagttgttttttaagatcaagccgctcttaaaatctgctgagactgaaaaggagatggctaccatgaaggaggagttccagaaaacaaaggatgagctagccaagagcgaggctaaaagaaaagaactggaggagaaaatggtgactctgctcaaagaaaaaaatgacttacaactgcaagttcagtccgaggctgatagtttggccgacgccgaagagcgatgcgagcagctcattaagaataagatacaactggaagccaaaattaaggaggtgaccgaaagggccgaagaagaggaggagattaatgccgaactgacagccaagaagcggaagttggaggacgaatgttcagaactaaagaaggacatcgacgacttggaacttacactggctaaggtcgaaaaagaaaagcatgccactgagaacaaagtgaagaacctgaccgaagagatggctggcctcgatgagaccattgccaagttgagcaaagagaaaaaagctcttcaggaaacccaccaacagaccctagatgatctgcaagccgaggaagacaaggtcaacattctgaccaaagccaagactaagctggaacagcaagtcgacgacctcgagggcagtttggagcaggagaaaaagctgaggatggatctcgagcgggcaaaacgcaaactggagggggatctcaagctagctcaggagtccaccatggacatggagaacgataagcagcaactggacgagaaattggagaagaaggaatttgagatctctaatttgatctcaaaaatcgaagatgaacaagcggtagaaattcagctgcagaagaaaataaaggagctgcaggctcgcatcgaggagctcggggaggagatcgaggctgaaagagctagtagagctaaagctgagaagcaaaggtccgacttgagccgtgagcttgaggagatctccgagcgcctcgaggaagcagggggcgccactagtgcccaggtagaacttaataagaagcgcgaggccgaatttcaaaagttgagacgggacctggaggaggctaccctccagcacgaagcaatggtagcggcgctaagaaaaaagcatgccgacagcatggctgagctcggagagcaaattgataacctccagagggttaaacagaaactggagaaagaaaaaagcgaacttaagatggaaaccgacgacttatcgtccaacgcagaggcgataagtaaggcaaagggaaacctggaaaaaatgtgccgtagtctcgaggaccaggtcagtgaactaaagactaaggaggaagagcaacagagattaattaacgaccttacagcacagagagctaggctccaaacagaggccggcgagtattcccggcagctcgacgaaaaagatgcactggtgtcacaactctctagatcaaagcaagcatctacgcagcagatcgaggaactgaagcatcagctcgaggaggagaccaaggcgaagaacgcattagcgcatgcccttcagtccagtcgacacgactgcgatctgctgcgggaacagtatgaggaggagcaagagggaaaagcagaattgcagagagctctcagtaaagctaactctgaagtggctcagtggcgaacgaagtatgagaccgatgcaattcagcgcaccgaagagctcgaagaggctaagaagaagctcgcccaacgcttgcaggaagctgaagagcatgtggaggcagtgaatgcaaagtgtgcttccctagaaaagacaaagcaacggttgcagaatgaggttgaggatctgatgttggacgtggagagatcaaacgccgcttgtgctgcccttgataaaaaacagcgtaactttgataaggtactctcagaatggaaacagaagtacgaagagacgcaggccgagctcgaggctagccagaaagagtcccgatctctgagcactgaactgtttaaagtcaagaacgtctatgaagaatcactggatcagctggagactttgaggcgcgagaataagaatctccaacaggagatctccgatctgaccgagcagatcgctgaaggtggcaagcagatacacgagcttgagaagatcaagaaacaagtggaacaggagaagtgcgagatccaagcggcgctggaggaggctgaggccagcttggaacacgaggaggggaaaatattgagaatccaactcgagttaaaccaggtaaaaagtgaagtggataggaaaatcgcggagaaggatgaggaaattgatcagctgaagcgcaatcacacgagggtggtggagaccatgcagtccaccctggatgccgaaattcggtccagaaacgacgccctgcgcgttaagaaaaagatggagggggacttgaacgagatggaaatccagctgaaccacgcgaataggctagccgccgaatctctccgtaattataggaacacgcaggggatactgaaggagacccagctgcacctggacgacgcacttcgcggtcaggaagacctaaaggaacagcttgccatagtcgaacgtagggcgaacctcctccaggccgagatagaagaactgtgggcaacactggagcaaaccgaacggtctaggaaaatcgcggagcaagagcttctagacgcttccgagcgcgttcagctgctccacacccaaaacacctcactgataaatactaagaagaaactggagaatgatgtatcccaactacagtccgaggtggaggaagtgattcaagagtctcgcaacgcagaagagaaggccaaaaaggcgatcactgacgctgccatgatggccgaggaactgaagaaggaacaggacacctcagcccacctagagaggatgaaaaaaaatctcgaacaaactgtgaaggacctgcagcaccgcttggatgaagccgagcagctggctcttaagggcggtaagaaacagatccagaaactggaggctagagtcagggagctcgaaggcgaggtggagaatgagcagaaaaggaatgcggaagctgtgaaaggcctccggaagcacgaacgcagggtgaaagaactaacatatcaaaccgaggaagaccgtaagaatgttttacgattgcaagacctggtggacaagctacaggcgaaggttaaatcctacaagcgacaggctgaggaagctgaggagcagtccaatgctaatttgagcaaattccggaagctgcagcacgagctagaagaagccgaggaacgggccgatatcgcagagtcacaggtcaacaaattaagggttaagtcacgtgaggtgcatacaaaaatttcagccgagtag

SEQ ID NO: 125521 - DNA, 453 bp, synthetic construct
  misc_feature 1..453: note = Description of Artificial Sequence: Synthetic coding sequence
  source 1..453: mol_type = other DNA
atgtctttttctgcagatcagattgcggaattcaaagaggcgttcctactgttcgatagaaccggagatagcaaaatcaccctcagccaggtaggggatgtgctgcgggctctcgggaccaatcccacaaacgcagaagttagaaaggtccttgggaaccctagcaatgaagaacttaacgctaagaagatcgaattcgaacagttcctgcccatgatgcaggcaatatcaaataataaagatcaagcgacctatgaggactttgtagaaggtttacgtgtgttcgataaggagggcaacggtacggtaatgggggctgaactccggcacgtgctcgccaccctgggcgagaaaatgaaggaggaggaagtagaggctcttatggctgggcaagaggactctaatgggtgcatcaactacgaggctttcgtgaaacacattatgtctatttag

SEQ ID NO: 125522 - DNA, 585 bp, synthetic construct
  misc_feature 1..585: note = Description of Artificial Sequence: Synthetic coding sequence
  source 1..585: mol_type = other DNA
atggctcccaaaaaagatgtcaaaaaacccgtagccgctgccgccgccgccccagcgcctgccccagcccccgccccagctccagctcctgcaaagccaaaggaggaaaagatcgatttatcagcgatcaaaatcgaattttccaaagagcagcaggacgaatttaaagaggcttttctgctattcgacagaaccggcgattccaagattacgttatcacaagttggggacgtgcttcgtgccttaggtactaaccccaccaatgcagaagtgcgcaaggtgctggggaatcctagcaacgaggagctcaatgcgaaaaaaattgaattcgagcaattcctaccgatgatgcaggccatctccaacaataaggaccaggcaacctatgaggacttcgtggagggacttagagtcttcgataaggaggggaatgggacggttatgggagccgagctgcggcacgtgctagccactctgggggaaaaaatgaaagaggaagaggtcgaagctttgatggccgggcaggaggactccaacggttgcattaactacgaggcctttgtaaaacatatcatgtctatctag

SEQ ID NO: 125523 - DNA, 519 bp, synthetic construct
  misc_feature 1..519: note = Description of Artificial Sequence: Synthetic coding sequence
  source 1..519: mol_type = other DNA
atgtcatccaagaaggcaaaaacaaaaactaccaagaagaggcctcagagagctacatctaacgtgtttgccatgtttgaccagtcacagatccaggaattcaaagaagctttcaatatgatcgatcagaaccgggacggatttatcgacaaagaggatcttcacgacatgctggcctctcttggaaaaaaccctacagatgcttacctggatgcaatgatgaacgaagctcctggtccaatcaattttaccatgtttttgaccatgtttggggaaaaactgaacggaacagatccagaagatgttatccgtaatgcgttcgcttgttttgatgaggaagcaacaggaaccatccaggaagactacctgcgcgaactgctgacaacaatgggcgatagatttaccgacgaggaggtggatgagctctacagagaagctcctattgacaaaaaggggaatttcaactacattgaattcaccaggatcctgaagcacggcgccaaggacaaggatgattag

SEQ ID NO: 125524 - DNA, 519 bp, synthetic construct
  misc_feature 1..519: note = Description of Artificial Sequence: Synthetic coding sequence
  source 1..519: mol_type = other DNA
atgtcctctaaaaaggccaagactaagactaccaaaaagagacctcagcgggccacttccaatgtatttgctatgtttgatcaatcccagatccaagagtttaaggaggcctttaacatgatcgatcagaatcgagacggattcatcgacaaagaggacctgcacgacatgttagcctcccttgggaaaaaccctacagacgcctaccttgacgcaatgatgaacgaagctcccggtcccattaactttacaatgttcctcacaatgttcggcgaaaaactaaacggaacagatcccgaggatgtgatacggaacgcattcgcatgcttcgacgaggaagccaccggcacaattcaggaggattatcttagggagctgctgaccacaatgggtgacaggttcacagacgaagaagttgacgaactctaccgagaagcccccatcgataaaaaagggaactttaattatatcgagtttacaaggatcctgaagcatggtgccaaagataaagatgattag

SEQ ID NO: 125525 - DNA, 519 bp, synthetic construct
  misc_feature 1..519: note = Description of Artificial Sequence: Synthetic coding sequence
  source 1..519: mol_type = other DNA
atgtcatccaaaaaagctaaaacaaaaaccacaaagaaacgcccgcaaagagctacttcgaatgtcttcgctatgttcgatcagagccagatccaggagttcaaagaggcgttcaacatgatagaccagaatcgggatggctttatagataaggaagacctccatgatatgcttgccagcctgggcaagaaccctaccgatgcttacctggatgctatgatgaacgaggccccagggccaataaacttcactatgtttcttacaatgttcggtgaaaaactcaacggcacagatcccgaagatgtgattcggaacgccttcgcttgctttgacgaggaggccaccggaacaatacaggaggactacttgcgggagctgcttacaacaatgggcgaccggtttactgatgaagaagtagacgaactgtaccgggaagcacctatcgacaagaaaggtaattttaactacattgagttcactcgtattctcaagcatggagccaaggataaagacgactag

SEQ ID NO: 125526 - DNA, 519 bp, synthetic construct
  misc_feature 1..519: note = Description of Artificial Sequence: Synthetic coding sequence
  source 1..519: mol_type = other DNA
atgtcctccaaaaaggctaaaactaaaactaccaagaaaagaccacagcgcgcaacttcgaatgttttcgcaatgttcgatcaaagtcagatacaggaattcaaggaggcatttaatatgattgaccagaacagggatggttttattgataaggaggacctacatgatatgctcgccagccttggtaagaatcctacggatgcctatctcgatgcgatgatgaatgaggcccctgggccaatcaatttcaccatgttcttaacaatgtttggtgagaagcttaacggaacagacccggaggacgtgattagaaacgcattcgcctgcttcgacgaagaagccaccggtacaattcaggaggactatctgagggaacttctcaccacaatgggagaccggtttacggatgaagaagttgacgagttgtatagggaggctcccattgacaaaaaaggaaatttcaactatattgaatttacaaggatcctcaaacatggagccaaagacaaagatgactag

SEQ ID NO: 125527 - DNA, 627 bp, synthetic construct
  misc_feature 1..627: note = Description of Artificial Sequence: Synthetic coding sequence
  source 1..627: mol_type = other DNA
atggcactggggcagaaactgttcataacgatgagtagaggggccggccgtctccagggcactctatgggccctcgtcttcttaggtatcctggttggaatggtcgttccttctcccgcagggacaagggccaacaatacactgttagatagcaggggctggggcacgctcctcagccggtctcgggccgggctggcaggagaaatcgcaggcgtgaactgggagtccgggtacctcgtgggcatcaagagacagagaagactatactgcaatgtgggaatcggattccaccttcaggtcctgcctgatggccggatctctggaacccatgaagagaatccatacagcttgcttgagatctctacagttgaacgcggggtcgtgtcattgttcggtgtcagatcagcgttgttcgtggcaatgaattctaagggtcgtctgtatgccactcccagcttccaggaggagtgtaaattccgagagacactccttcccaataattacaacgcatatgaatcagatctgtaccagggcacctatatcgctctgagcaaatacggccgcgttaaacggggctcaaaggtaagcccaatcatgaccgtgacccacttcctgccacggatctag

SEQ ID NO: 125528 - DNA, 588 bp, synthetic construct
  misc_feature 1..588: note = Description of Artificial Sequence: Synthetic coding sequence
  source 1..588: mol_type = other DNA
atggcccctaaaaaaccagagcccaagaaagacgacgctaaggccgcgccgaaagccgccccggctcctgctcctccgcccgaaccagaacggccaaaggaagtggaatttgatgccagcaaaatcaagattgagtttactcctgaacagattgaagagttcaaggaggccttcatgctgttcgacagaactccgaaatgcgaaatgaaaattacttatgggcagtgtggggacgtgctcagagctctcggtcagaacccgactcaggccgaggtcctgcgagtgctgggcaagccacggcaggaggagcttaacacgaaaatgatggatttcgaaaccttcttgcccatgctccagcatatcagcaagaataaagacacagggacttatgaggattttgtagaagggctgcgtgtcttcgacaaggaggggaacggcaccgttatgggggctgaactccgccacgtgctggccacgctcggcgagcgcctgaccgaggatgaggtcgagaagctgatggccggtcaggaggactctaatggatgtatcaactatgaagcgtttgttaagcacattatgagcagctag

SEQ ID NO: 125529 - DNA, 588 bp, synthetic construct
  misc_feature 1..588: note = Description of Artificial Sequence: Synthetic coding sequence
  source 1..588: mol_type = other DNA
atggccccaaagaagcccgagccaaaaaaagacgatgctaaagccgcaccaaaagccgcccccgccccagcaccaccccctgagcctgagagacccaaggaggtcgagttcgacgcctccaagatcaaaattgagtttacccctgagcagattgaagagttcaaggaagccttcatgctgttcgatcgcacaccaaagtgcgagatgaagatcacatacgggcaatgtggcgatgtgttgcgagccctgggtcagaaccccacacaggccgaagtgctgcgcgtgctcggaaaacctcggcaggaagaactcaataccaaaatgatggattttgagactttcttgccgatgctgcagcatattagtaaaaataaagacaccggcacatatgaggactttgtcgagggcttaagagtgtttgataaagaggggaacggaaccgtcatgggagccgagctgcgccatgtgctggcaaccctcggcgaacgcttgaccgaggatgaggttgagaaactgatggccggccaggaggattcaaacgggtgcataaattatgaggctttcgttaagcatatcatgtcaagctag

SEQ ID NO: 125530 - DNA, 141 bp, synthetic construct
  misc_feature 1..141: note = Description of Artificial Sequence: Synthetic coding sequence
  source 1..141: mol_type = other DNA
atggccccaaagaaaccggagcctaagaaagacgacgctaaagctgcaccaaaggcggctccagcccctgcgccccctcctgagccggagcggccgaaggaggtggaatttgatgcttcgaaaataaagatcgaattctag

SEQ ID NO: 125531 - DNA, 594 bp, synthetic construct
  misc_feature 1..594: note = Description of Artificial Sequence: Synthetic coding sequence
  source 1..594: mol_type = other DNA
atggcacctaaaaaacctgagccgaagaaagaagcagcaaagcctgccccagctcccgcccccgcccccgctccagcccccgcccccgcaccagaagctccgaaagaacctgcatttgaccctaagtccgtcaagatcgattttaccgccgaccaaatcgaggagtttaaggaggctttttctctttttgacagaacaccaacaggagaaatgaaaattacctatggacaatgcggagatgtgctgcgggcactcggtcagaatccgacaaacgctgaagtgttgagagtgttgggcaaaccaaagcctgaagagatgaacgtgaagatgttggatttcgagacattcctgccaattttacagcatataagtaggaataaggaacaggggacctacgaagacttcgtggaaggtctgcgtgtgtttgacaaggaaagcaacggaactgtgatgggtgcggaactgaggcacgtgctcgcaaccttaggcgagaagatgacagaagctgaagtggagcagttgctcgccggccaggaggacgctaatggttgcattaattacgaagcttttgttaagcatatcatgagcgggtag

SEQ ID NO: 125532 - DNA, 594 bp, synthetic construct
  misc_feature 1..594: note = Description of Artificial Sequence: Synthetic coding sequence
  source 1..594: mol_type = other DNA
atggcaccaaagaagccagaacctaagaaagaggccgctaaacccgcacctgctcccgcacccgcccccgctccagcgcctgctccggccccggaggcacccaaagaacccgccttcgatccaaaatctgtgaagattgattttaccgctgatcaaatagaagagtttaaggaggcgtttagcctgttcgatcgaacccccactggagagatgaagatcacttacggccagtgcggggatgtactgcgcgcccttggccaaaatccaacaaacgcagaggtccttagggttttaggaaaaccaaaaccagaagaaatgaatgtgaagatgttagatttcgagacgttcctgccgattttgcaacatatcagccgaaacaaggaacagggcacgtacgaggacttcgtcgaagggctgagggtttttgacaaggaatctaacggtactgtgatgggtgccgagctgaggcatgtgctggccacccttggcgaaaagatgaccgaggccgaggttgagcagctcctggctggccaagaggacgcgaacggatgcattaactacgaggcctttgtgaaacatatcatgtccggatag

SEQ ID NO: 125533 - DNA, 264 bp, synthetic construct
  misc_feature 1..264: note = Description of Artificial Sequence: Synthetic coding sequence
  source 1..264: mol_type = other DNA
ccagaggctcccaaggagccagcattcgatccaaaaagcgtgaaagttattggatgtccctgtccccgctctcagtctcatggggctgtgatcgacttcacagctgaccagatcgaagagttcaaggaagccttcatgggagctgagctcaggcacgtgctggcaaccctggtcattaagtcagctcctccgcctaaaccaaccgccggagagaagatgaccgaggcagaagtggaacagttgctggctggacaggaagattag

SEQ ID NO: 125534 - DNA, 522 bp, synthetic construct
  misc_feature 1..522: note = Description of Artificial Sequence: Synthetic coding sequence
  source 1..522: mol_type = other DNA
atggcaagccgaaaaacaaagaagaaagagggcggcgctctgagggcccaaagagcctcatccaatgtgttctctaactttgagcaaacacagatccaagaattcaaagaggctttcaccctcatggatcagaatcgggatggcttcattgacaaagaggatttgaaggatacttacgccagtctcgggaaaaccaacgtgaaagacgatgaactggacgccatgttaaaggaggcctctggaccaataaatttcacgatgttccttaatctgtttggggaaaaacttagcggtacagacgctgaagagactattctgaatgcgttcaagatgttagaccctgacgggaagggcaaaataaataaggaatacattaaaaggcttcttatgtcccaggccgacaaaatgacagccgaagaagtagaccaaatgtttcagtttgcaagtattgacgtggcagggaacttggattacaaggcacttagctatgtaatcactcatggcgaagagaaggaggaatag

SEQ ID NO: 125535 - DNA, 399 bp, synthetic construct
  misc_feature 1..399: note = Description of Artificial Sequence: Synthetic coding sequence
  source 1..399: mol_type = other DNA
atggaccagaatcgggacgggttcatagataaggaggacctgaaggatacttacgcatctcttggcaagacaaatgttaaggatgacgagttggacgccatgctcaaggaggctagcggaccaatcaattttactatgttcctgaacttgtttggcgagaagttgtccggaacagacgccgaggagaccatcctgaatgccttcaagatgttggatcctgatgggaaagggaaaataaataaagagtatattaaacgacttttgatgtctcaggcagacaaaatgacagccgaagaagtagatcagatgttccagtttgcttctatcgacgtcgccggtaacctagattacaaagccttaagttacgtcatcacgcacggcgaagaaaaggaggagtag

SEQ ID NO: 125536 - DNA, 399 bp, synthetic construct
  misc_feature 1..399: note = Description of Artificial Sequence: Synthetic coding sequence
  source 1..399: mol_type = other DNA
atggatcagaatcgggatggcttcatcgataaggaggacctcaaggacacctacgcctcactgggcaagacaaacgtcaaagacgatgagttggatgcgatgctgaaggaggcgtctggtcctataaacttcaccatgtttcttaacctatttggggaaaagctctctggcactgacgccgaggagacaatcctaaacgcttttaagatgctggacccggacggtaaggggaaaattaataaggagtatatcaaaagactgctgatgtcacaggccgataagatgactgcagaggaggtagaccaaatgttccagttcgcctctatcgacgtggccgggaacctcgactacaaggcgttatcctatgtcatcactcacggggaagaaaaagaggagtag

SEQ ID NO: 125537 - DNA, 399 bp, synthetic construct
  misc_feature 1..399: note = Description of Artificial Sequence: Synthetic coding sequence
  source 1..399: mol_type = other DNA
atggatcagaatagggatgggttcatcgacaaggaagaccttaaagacacctacgcctctctggggaagacgaacgttaaggacgacgaactggatgccatgctgaaggaggcgtctggccccatcaattttaccatgtttctaaatctgtttggagagaagctatctggtacagacgctgaagaaaccatcctgaatgctttcaagatgcttgaccctgacggcaaaggcaaaattaataaagaatatattaagagactcctgatgtctcaggcggataaaatgaccgctgaagaggtagaccagatgttccagtttgcttctatcgacgtcgccggcaacctggactacaaggcccttagctatgtgattacccacggtgaagagaaagaagagtag

SEQ ID NO: 125538 - DNA, 456 bp, synthetic construct
  misc_feature 1..456: note = Description of Artificial Sequence: Synthetic coding sequence
  source 1..456: mol_type = other DNA
atgtgtgactttaccgaagatcagacggctgagtttaaggaagcattccagctctttgatcgtaccggcgacgggaaaatcttatatagtcagtgcggggatgtaatgagagctctcggtcagaatcctacaaatgccgaagttttgaaggtgctaggaaatcccaagtcagatgaaatgaatgtcaaggttctggacttcgagcacttcctccctatgctccagacagtggccaagaataaggaccaggggacttatgaagactacgtggaggggctcagggtgttcgacaaagaaggcaatggcacagtgatgggtgccgaaatcaggcacgttctagtgacactgggggagaaaatgacagaagaagaagtggagatgctggtggcggggcatgaagatagcaatggatgcatcaactacgaagagctcgtgcggatggtgctgaatggctag

SEQ ID NO: 125539 - DNA, 456 bp, synthetic construct
  misc_feature 1..456: note = Description of Artificial Sequence: Synthetic coding sequence
  source 1..456: mol_type = other DNA
atgtgcgacttcaccgaagaccaaaccgctgagtttaaggaggcctttcagctgtttgacagaacaggagatggcaaaatcctgtacagccagtgcggggacgtgatgcgcgctcttgggcagaaccctaccaacgccgaggttcttaaagtgctggggaaccctaaatctgatgagatgaacgtcaaggttctggatttcgaacactttctacccatgttgcaaactgtggccaagaacaaggatcagggcacctatgaggactatgttgagggcttacgggtttttgacaaagagggaaacgggactgtcatgggggccgagatccgccacgtcctggtgactctcggcgagaagatgacagaagaagaagtggaaatgctggtcgctggccatgaggacagtaatggatgtatcaactatgaagcctttgtccgtcacatattgagcggatag

SEQ ID NO: 125540 - DNA, 456 bp, synthetic construct
  misc_feature 1..456: note = Description of Artificial Sequence: Synthetic coding sequence
  source 1..456: mol_type = other DNA
atgtgtgactttacagaggaccagaccgctgagttcaaagaggcatttcagctgtttgacagaacaggcgatggtaagatactgtatagccagtgcggtgatgttatgcgtgccctcggccagaaccctaccaatgccgaggtgttaaaagtgttaggcaaccccaaaagcgatgagatgaacgttaaggttcttgacttcgagcacttcttacccatgctccaaactgtggccaagaataaggatcaagggacatacgaggattacgtggagggactgcgggtgttcgataaggagggcaatggaacagtcatgggcgccgaaatcaggcatgtactcgtgacgctcggtgagaagatgaccgaggaggaagtagaaatgctcgtggccggccatgaagattctaatggatgtatcaattacgaggctttcgttagacacatcctatccggatag

SEQ ID NO: 125541 - DNA, 1491 bp, synthetic construct
  misc_feature 1..1491: note = Description of Artificial Sequence: Synthetic coding sequence
  source 1..1491: mol_type = other DNA
atgtcatccatggaggaaatacaagtagaactgcaatgcgctgacttatggaaacggtttcacgacatcggcaccgaaatgatcattaccaaggctggacgccgcatgttcccagccatgcgggtgaagatcactggcttggacccccatcagcagtactatatcgctatggacatcgtacctgtagataacaaaagataccgctatgtgtaccacagtagtaagtggatggttgcaggaaatgccgactcccccgtcccgcctagggtttacatccatcccgactctctggctagtggagacacctggatgcgacaggtggtctccttcgataagctaaagttgacaaataacgagctcgatgaccaaggccacattatcttgcattccatgcataagtatcaacccagagttcatgtcattcgtaaggactttagttctgacctgagcccgacaaaacccgtccccgtcggggatggcgttaagacatttaactttccagaaaccgtattcactaccgtaacagcgtaccagaatcaacagataacccggctgaagatagataggaacccattcgccaaaggattccgggacagtggacgaaaccggacaggtctcgaagcaataatggagacttacgcattctggcgtcctccagtcaggactctgacatttgaggatttcactaccatgcaaaaacagcagggcgggtccactggtacctctcctacaacaagctccacaggaacgccctcgccgagtgcctcatctcacctactgagcccatcctgctcccccccaacattccacttagcaccaaacaccttcaatgtagggtgcagggagtctcagctgtgcaatctgaatctcagtgactaccctccttgtgcccggagcaacatggccgccctgcagagctatcctggcttatcagacagcggatacaacagactgcagtcagggactacatctgccacacagcccagtgagacgtttatgccccaaagaacgcctagcctgatctcagggattcccactcccccttcacttccagggaatagtaagatggaggcctatggaggccagctgggaagctttccgactagccagttccagtatgttatgcaggctgggaacgctgcgtccagctcctcatccccccacatgtttggcggcagccacatgcaacagtcatcttataacgcattttcacttcataacccttataacctgtacggctacaactttcctacgtcacccagactcgccgccagcccagagaagctgtctgcttctcagtccaccctgctgtgcagtagcccgagcaacggggcctttggggagcggcagtatctgccctcaggcatggaacactccatgcatatgatatccccatcacccaataaccagcaggcgaccaatacatgtgacggcaggcagtatggggctgtccccggctcaagcagccaaatgtccgttcacatggtctag

SEQ ID NO: 125542 - DNA, 627 bp, synthetic construct
  misc_feature 1..627: note = Description of Artificial Sequence: Synthetic coding sequence
  source 1..627: mol_type = other DNA
atgccccctaagaaggacgtgccagtgaagaaacccgcgggtccgtccatctccaaacctgcagccaagccggcggccgcaggcgcacctcccgcaaaaacaaaggcagaacctgccgtaccccaggctccgcagaaaacccaggagcccccagtggacttatcaaaagtagttattgaattcaataaggaccagcttgaggaatttaaggaggcatttgagctctttgatcgtgtgggggatggcaagatcctgtacagtcaatgcggcgatgtgatgcgcgccctcggacaaaatcctacaaacgcagaagtcctcaaagtcctgggcaatccaaaaagcgacgaactcaagagccgccgagttgacttcgagaccttcttacctatgctccaagctgtggccaagaaccgtggccaagggacctacgaagactacttggagggattcagagtcttcgataaggaaggaaatggcaaggttatgggggccgagctccgccacgtgctgacaactctaggagagaaaatgacggaagaggaagtggaaaccgttctggcaggccatgaggactcgaatggatgtattaattatgaggctttcctgaaacatatcttgtctgtgtag

SEQ ID NO: 125543 - DNA, 90 bp, synthetic construct
  misc_feature 1..90: note = Description of Artificial Sequence: Synthetic coding sequence
  source 1..90: mol_type = other DNA
atgccacccaagaaggacgtccccgtcaaaaaacctgccgggccttccattagcaagcctgcggctaagccagcagctgccggggcctag

SEQ ID NO: 125544 - DNA, 627 bp, synthetic construct
  misc_feature 1..627: note = Description of Artificial Sequence: Synthetic coding sequence
  source 1..627: mol_type = other DNA
atgccccccaagaaggacgttccagtcaagaagcccgcaggcccctcgatttccaaacctgcggccaagcctgcagccgcgggggcaccacccgccaagactaaggcagaaccggcggtgccacaagcaccacagaaaacccaggaacccccagtggatttgtccaaggtagtgatcgagttcaacaaagatcaactagaagaattcaaggaagccttcgaactgtttgaccgggttggtgatggtaaaattctatattcccagtgtggggatgtgatgcgcgccctggggcaaaatcctactaatgcagaggtgctcaaggtgcttggaaacccaaagagcgacgaacttaaatcccgccgagtcgattttgaaaccttcctgcctatgctccaggcagttgcgaaaaatcgcggacaaggcacatatgaggactatctggaggggttcagggtcttcgacaaagaggggaacggcaaagtgatgggtgcagagttgcgccacgtgctaacgacactgggcgagaaaatgactgaagaagaggttgagaccgttctagcgggccacgaagactccaatggctgcattaactatgaagcatttctcaagcacatcctgtctgtttag

SEQ ID NO: 125545 - DNA, 3477 bp, synthetic construct
  misc_feature 1..3477: note = Description of Artificial Sequence: Synthetic coding sequence
  source 1..3477: mol_type = other DNA
atggctgcagtccggggcgcccctttattgagctgcctgctcgcattgctcgctctgtgcccaggcggccgacctcagaccgttctcactgacgacgagattgaggagtttttggaaggctttctctcagaactggagccggagccccgggaggacgatgtagaagcaccaccaccacctgagcccactccccgggttagaaaagcacaggcaggaggaaagcctggcaaaaggccagggaccgcagccgaagtgccgccagaaaagactaaggacaaggggaagaagggcaagaaagataagggccctaaagttcctaaggagtctctcgaaggctcgccaagaccacctaagaaggggaaagaaaagcctccaaaggccacaaagaaaccgaaggaaaaaccgccaaaggcaacaaagaaacctaaggaaaaaccccctaaagcaaccaaaaagcctaaagaaaaacctcccaaagccacgaagaagccaccgtctggcaagaggcctcccatcctggccccctctgaaacccttgagtggccgctgcccccacctccgtcccctgggcccgaagagttacctcaggagggaggggccccactatcgaataactggcagaaccccggggaggaaactcacgtggaagcccgcgaacatcagcctgaacctgaggaagagaccgagcagcccaccctggactacaatgaccagatcgaacgtgaagattacgaggacttcgaatacatcagaagacagaagcagccacggccacccccaagcaggcggaggagaccggagcgagtatggcccgaacctccagaagaaaaggccccagcacccgcccccgaggagcgtatagaaccaccagtcaagcctctgctgcctcccctaccacccgattatggcgacgggtacgtgataccgaactacgatgatatggattactacttcggcccccctccaccacagaaaccagacgcagaacgacagacggatgaagagaaggaggagctgaagaagccaaagaaggaggactccagccctaaagaagagactgacaaatgggccgtcgagaagggcaaagatcacaaggagccccggaaaggagaagagctggaggaggaatggaccccaacagagaaggtgaaatgtccacccattggaatggagtcccatcgaatagaagacaatcagatacgcgcatcatccatgcttagacacggccttggggcgcaacgtggccgattgaacatgcagacaggcgcgactgaggacgactactacgacggtgcctggtgtgccgaggacgacgcaagaacccagtggatcgaggttgacaccagacgcacaacaagatttacgggggtcataactcagggcagagattcgtccattcacgacgattttgttaccacatttttcgtgggcttcagcaatgatagtcagacctgggtgatgtataccaacggttatgaagaaatgacttttcacgggaatgtcgataaagacacgcctgtgctgtcagagcttcctgaaccggtcgtcgctaggtttatccggatctatccactgacatggaatggcagtctttgcatgaggctggaggttctaggatgtagtgtggcacccgtgtactcttactacgcacagaacgaggttgtggccaccgatgacttagacttccggcatcatagttacaaagacatgcggcagcttatgaaggtggtgaatgaagagtgcccgactatcactaggacatacagtctggggaaaagctctcggggactcaaaatttacgcgatggagattagtgataacccaggagaacacgagctaggcgagcctgaattccggtacactgccggaattcatggaaacgaggttcttggcagggagctcctgctgctgctgatgcaatacttatgtcgagagtatagagatggcaatccacgggttcgcagcctggttcaggacacccgcatccatctagttcctagcctcaatccagatggctatgaagtcgcagcccagatggggagcgagtttggcaattgggcactgggtttatggactgaggagggatttgacatattcgaagacttcccagacttgaactctgtactgtggggcgcagaagaaaggaagtgggtcccctatagagtcccgaacaacaacctccccatccctgagaggtatttatcaccggatgccacagtcagcaccgaagtgcgtgccattattgcctggatggaaaagaaccctttcgttctcggggcaaacctgaacgggggggaaagattggtctcatacccttatgacatggccaggacaccaacacaggagcagttgttggcagcagcaatggccgcagccaggggggaagacgaagacgaggtcagcgaggcccaggagacccccgaccacgccatctttcgctggttagccattagctttgccagcgctcacctgactttaaccgaaccctaccgaggcggttgccaggctcaggactatacaggcggaatgggaatcgtgaatggggccaaatggaatccccgtacaggaaccatcaacgatttctcctatcttcatactaattgtctggagctgtccttttaccttggctgcgataagttcccccacgagagcgagctccctcgtgagtgggagaataacaaggaggctctgctcaccttcatggagcaggtgcaccgggggatcaagggagtggtgaccgacgagcaaggaattcccatcgccaatgctaccatatctgtgtccggtatcaatcacggcgttaaaacagcatcaggcggagattattggcgtatattgaaccctggcgaatatcgcgtaacagcccatgctgagggctatacaccgtccgctaagacctgtaatgtggattacgacattggagccactcagtgcaatttcattctggctaggagtaattggaagcggattcgcgaaattatggcaatgaatgggaatcgacctattccccatatcgatcccagccgaccgatgactccacagcaaaggcgtttgcaacaacggaggctgcagcatcggctcaggctgagggcacagatgagactccggagattgaatgcgactaccactttaggcccacacaccgtgccccctacgctccctcccgcacctgcgaccactctctctacaacgatcgagccctggggcctaatccccccgaccacagcagggtgggaggaaagcgaaaccgagacatatactgaagtggttacggagttcggaaccgaagtggaacctgaatttggaactaaggttgaacccgaattcgaaactcagttggagccagaattcgaaacccaactcgaacctgagttcgaggaagaagaggaagaggaaaaagaagaggagatagcaacgggccaagcattccccttcacaaccgttgaaacgtacaccgttaatttcggcgatttctag

SEQ ID NO: 125546 - DNA, 447 bp, synthetic construct
  misc_feature 1..447: note = Description of Artificial Sequence: Synthetic coding sequence
  source 1..447: mol_type = other DNA
atgttcgaacaggcccagatccaggagtttaaggaagcatttagttgcatcgatcagaatcgagatggcattatctgcaaggccgatttgcgcgaaacctatagtcagctgggcaaagtgagtgtgccagaagaggagctcgacgcaatgctgcaggaaggcaagggccccattaactttaccgtgttccttacgctgtttggagagaaactgaacgggaccgaccccgaggaagccatcctctccgccttccgcatgttcgaccctagcggaaagggcgtggtgaacaaggacgagttcaagcagctgttactcactcaggctgacaagttttccccagccgaggtcgaacagatgtttgcactgacacccatggatctggcgggtaatattgattacaagtctctttgctatatcatcactcacggagacgagaaagaagaatag

SEQ ID NO: 125547 - DNA, 1128 bp, synthetic construct
  misc_feature 1..1128: note = Description of Artificial Sequence: Synthetic coding sequence
  source 1..1128: mol_type = other DNA
atgcagaaactgcaactctgcgtgtacatctatctgttcatgcttatcgtggccggacccgtcgatttgaacgagaatagcgagcaaaaggaaaatgtcgagaaagaagggctctgcaatgcttgtacatggagacagaacacaaaatctagcagaattgaagccatcaaaatccagatattgtccaaactcaggcttgagacagcccctaatattagtaaagatgtcatcaggcagctcttacctaaggctccaccactccgggagctcatcgaccagtacgacgtccagcgcgacgattcatccgatggttcgctggaagacgatgactaccacgccaccaccgaaacaattatcaccatgcctacggagtccgattttcttatgcaggtggacggcaaacctaagtgctgctttttcaaattcagctctaaaattcagtataataaagtagtcaaggctcaactgtggatttatcttcggcctgtggagacgccaaccacagtgttcgtgcaaattcttcggcttattaaacctatgaaggacggcacaagatataccgggatcagatctctgaagctggatatgaaccccgggactgggatctggcagtctatcgacgttaagaccgtgctgcagaattggctcaagcagcctgagagcaaccttggaatagagatcaaggcgctggacgagaacgggcatgacctggctgtgacattccccgggcctggtgaggatggactgaatccgttcctggaggtcaaagtcaccgacaccccaaaacgctcacggcgggatttcggcttggactgcgatgaacacagcaccgagtcgcgctgttgccgttatcccctgaccgtagatttcgaggcatttggctgggactggatcatcgcgccaaaacgttacaaagccaattattgctccggagaatgcgaatttgtgtttctccagaagtatccacatactcatctggtgcaccaggccaacccaagaggatcagcaggcccttgctgtactcccacaaagatgtcacccatcaacatgctttacttcaacgggaaggagcagatcatctatggaaagattcccgctatggtggttgaccgatgcggctgttcctag

SEQ ID NO: 125548 - DNA, 1497 bp, synthetic construct
  misc_feature 1..1497: note = Description of Artificial Sequence: Synthetic coding sequence
  source 1..1497: mol_type = other DNA
atgttcaactacgaaagaccaaagcacttcatccagtcacagaatccctgtggttcaagattacaaccgcccggacccgagacgtcatccttttccagccaaaccaagcagtctagcatcataatccagccccggcaatgtaccgaacagcgcttcagcgcctccagcacactgagtagtcatatcaccatgtcttcctctgcttttcctgcaagtcccaaacagcacgccggcagcaacccgggacagcgcgtgactactacctacaaccaatcacccgcctcctttctcagtagcatccttccatcacagcctgattataattcgagcaagatcccttctgccatggattcaaactaccagcaatcctctgctgggcagccgatcaacgccaaaccaagtcagacagccaatgccaagcccatccctcgcactcctgaccatgagattcagggttccaaggaagctctgatacaggaccttgaaaggaaacttaaatgtaaggatacgctcctccataatgggaatcaacgcctgacatatgaggagaaaatggcccgccggttactcggcccccagaacgctgctgctgtcttccaggcgcaggacgacagtggggcccaggactctcagcagcataacagtgagcacgcgcgactacaagtccccacgagtcaggtgagatctcggagtacgtcccggggggacgtgaatgaccaggacgctatccaggagaaattttatcctcctaggtttattcaggtgccagagaatatgtccattgatgaagggcgcttttgccgaatggattttaaggtatctggtctccccgctcccgacgtgtcttggtatctaaacggccgcacagtgcagagtgatgacctccacaagatgattgtctcagaaaaaggtttacactcgctgatattcgaagtcgtaagagccagcgacgctggagcctacgcctgtgtggccaagaatagagccggtgaggccacctttacggtccaactggacgtccttgcaaaggagcataaacgggctcccatgtttatttacaaaccacagagtaaaaaagtcctggaaggcgattccgtaaagctcgaatgtcagattagcgctatcccacctcctaagttattttggaagcgcaacaatgaaatggtgcagttcaatacagatcgcatcagcctctatcaggataatactgggcgagtgactctcctaatcaaggacgtcaataaaaaggacgcaggttggtacaccgtttctgccgtgaacgaggcaggcgtaactacctgtaataccaggttagatgtgaccgctcgccccaatcagaccctacctgcacctaaacagctccgggtcaggccaacattcagcaaatatctggcactgaatggaaagggcctgaatgtgaagcaggccttcaacccagaaggcgaatttcagcgccttgccgcgcaatcgggcctatacgaatccgaggagctgtag

SEQ ID NO: 125549 - DNA, 945 bp, synthetic construct
  misc_feature 1..945: note = Description of Artificial Sequence: Synthetic coding sequence
  source 1..945: mol_type = other DNA
atggctcggagactgttaggcccccagaatgccgccgccgtttttcaagcacaggacgactccggagctcaagactcacagcagcacaacagcgagcatgcccgcctgcaggtgcccacgtctcaggttcggtctcgatctacctcacgaggagacgtgaatgatcaggacgccatccaagaaaaattctaccccccgcggttcattcaggtccccgaaaacatgtcaatagatgaggggaggttttgccgtatggactttaaagtgtcggggttgcctgccccagatgtctcttggtacctgaatggaagaacggtccaatcagatgacctgcacaagatgatcgtctcagagaaaggcctgcacagcctaattttcgaagtagtgagagcaagcgatgcgggcgcatacgcttgcgtagccaagaaccgggccggagaagccacttttaccgtgcagctcgatgtgctggcgaaagaacataagagggcccccatgttcatttacaagccccagtctaagaaagttctagagggagacagtgtcaagctggagtgccagatctctgcaattcctccccccaagttgttctggaaacgaaataacgaaatggtgcagttcaataccgaccgaatctccctttaccaagataacacagggcgggttacactgctcattaaagatgtgaataaaaaagacgcaggatggtataccgttagcgccgttaacgaggccggggtcaccacatgcaacacccgtctcgacgttaccgcccggcccaaccagaccctgcccgcaccgaagcagttgagggttcggcccacattctctaaatacctggccctcaatggcaagggattgaatgtaaaacaggcatttaatcctgaaggcgagttccaacgcctggccgctcagagtggattgtatgagagtgaggagctctag

SEQ ID NO: 125550 - DNA, 357 bp, synthetic construct
  misc_feature 1..357: note = Description of Artificial Sequence: Synthetic coding sequence
  source 1..357: mol_type = other DNA
atgtgtgataaagaatttatgtgggcgctgaagaatggagacttagatgaggtgaaggattatgttgccaagggagaggacgtgaaccggacactcgagggaggtcgcaagccactgcactacgccgcggactgtggacaattagagattcttgaattcctcctgttaaaaggcgctgacatcaacgctcctgacaagcatcacataacacccctgctgtccgccgtgtatgagggtcatgttagctgtgttaaattgctattatcaaagggggctgataagaccgttaaggggccggatggactaaccgcattcgaggcaacagacaatcaggcaattaaagctctgcttcagtag

SEQ ID NO: 125551 - DNA, 1812 bp, synthetic construct
  misc_feature 1..1812: note = Description of Artificial Sequence: Synthetic coding sequence
  source 1..1812: mol_type = other DNA
atggcatcagcctctacttccaaatacaacagccactctctcgagaacgagagcatcaaaagaacaagtcgtgacggtgtgaatcgcgacctcaccgaggccgtcccaagattacctggggagactctgataaccgacaaggaagtgatttacatctgcccgtttaatggaccaataaagggcagagtgtacattaccaactacaggctgtacttaaggagtctggaaactgacagctctctcattctcgacgtgcccctgggcgtcatttctagaattgagaaaatggggggggccacgagccggggtgaaaattcttacggtctcgatataacatgtaaggacatgaggaatctgcgcttcgccctgaaacaggaaggccattccagaagggatatgttcgagatactcacacggtacgcctttcctctggctcatagcttaccattattcgcctttctgaacgaggaaaaattcaatgttgacggctggactgtgtataaccccgtggaagaatacaggaggcagggccttcctaatcatcattggcgcattaccttcatcaataaatgttacgaactgtgcgacacctatccggctcttctcgtcgttccctaccgcgctagtgacgatgacctgaggagggtggccacctttcgatcccgcaatagaatcccagtgttgagctggattcaccctgagaataagactgttatcgtcagatgctcgcagcctctggtggggatgagcggcaagcgcaacaaagatgacgaaaagtatctggatgtaattagggagaccaataagcagatcagcaagttaacaatctatgatgctcggccatccgtcaacgctgtggccaataaggccactggaggcggatacgagagtgatgatgcttaccataacgccgaactgttttttctggatattcacaatattcatgtcatgcgggaatcacttaagaaggttaaagatatcgtctatcctaatgtcgaagagagtcactggcttagctcactcgaatctacgcactggctggagcacattaaattagtgctgaccggggccatacaggtggccgataaggtctcttctggcaaaagctctgtactggtgcactgttctgacggatgggaccgaacggcgcagctgacttccctagccatgttgatgttagattcgttctatcgcagcatcgagggctttgagatcctggtccagaaagagtggataagtttcggacacaagttcgcttctaggatcggacacggtgataagaatcacaccgacgcagaccgtagtcccatcttcttacagtttatagactgcgtctggcaaatgtctaaacagttcccgaccgccttcgagtttaacgaacaatttctcatcattattttagaccacctttactcctgccgattcgggacttttctctttaattgtgaaagtgctcgtgagagacaaaaggtgacagaacgcaccgttagcttatggagcctcattaatagcaacaaagagaagttcaagaatccgttctacaccaaggagattaaccgcgtgttgtaccctgtagcgtcaatgaggcacctggagctgtgggtgaactattatataaggtggaatcccagaattaagcagcagcagccaaatccagtagaacagcgctacatggaacttcttgccctgcgtgacgaatacatcaaacgcctggaagaactccaactcgctaactcagccaagctgtccgacccacctacaagtcccagtagccccagccaaatgatgcctcacgttcagacacacttctag

SEQ ID NO: 125552 - DNA, 1701 bp, synthetic construct
  misc_feature 1..1701: note = Description of Artificial Sequence: Synthetic coding sequence
  source 1..1701: mol_type = other DNA
atggctagtgcctcgacctctaagtacaacagtcattcgctggaaaatgaaagcattaagcgcacgtcccgggatggggttaaccgagatctcaccgaagctgttccccgcctccctggcgaaactcttatcaccgataaagaggtcatctatatatgtcctttcaatggaccaatcaagggcagggtgtacataactaactaccgcctttatctgagatccttggaaacagacatgcgcaacctcagattcgcactgaaacaggagggccacagccgaagagatatgttcgagattctcacaagatacgcattcccgcttgcccacagcctgcccctgtttgcttttctgaatgaggagaagttcaatgttgatggctggacagtctacaaccctgttgaggaatatcggcggcagggactccctaatcaccattggcgcataacgtttatcaacaaatgctacgagctatgtgatacttacccagccctcctcgttgtgccttacagagcttcagatgatgatctcagaagggttgctacttttagatcccgcaatcgaattccagtactgtcttggatacaccctgagaacaagaccgtaatcgtgagatgctcgcagccattggtggggatgtcaggaaagcgcaataaagatgacgaaaaatacctggacgtgattcgcgagactaacaagcagatctctaaattgactatttacgacgcaaggcccagcgtcaatgccgttgctaacaaggccaccggaggtggttacgagagcgatgatgcctatcataacgctgagctcttctttcttgacatccataacatacacgttatgcgcgaatccctcaagaaagttaaagatatcgtgtacccgaatgttgaggaatcacattggctttcttcactggaaagcacacactggctggagcatatcaaacttgtcctcacgggagctattcaagtggctgacaaggtgagctctggcaagtccagtgtgctagtgcactgcagcgacggctgggaccgcaccgctcaactgacgagtctagccatgctgatgctcgactctttttacaggagcatcgaaggttttgagatcctggtccagaaggagtggataagctttgggcataaatttgcatcccgtataggtcatggggacaagaaccatacggatgctgatcggagccctatcttcctccaatttattgattgcgtgtggcagatgtccaagcagttccctaccgccttcgagttcaacgagcagtttcttatcatcattcttgaccacctctatagctgccgctttggaacctttctgtttaattgcgaatcagcccgagaacggcagaaggtgaccgaacggacggtctcgctgtggtcactcatcaatagcaacaaggaaaaatttaaaaatccattctatacaaaagagatcaatcgagttctttaccccgtagcaagtatgagacacctggaactttgggttaattactatatcagatggaaccctaggatcaagcaacagcagcccaacccagtcgagcaaagatacatggagctgctggcgcttagagatgaatatatcaagaggcttgaggagctccaattggcaaatagtgccaaattgtcagacccccctacgtccccctccagtccttctcagatgatgcctcacgtgcagacccacttttag

SEQ ID NO: 125553 - DNA, 1251 bp, synthetic construct
  misc_feature 1..1251: note = Description of Artificial Sequence: Synthetic coding sequence
  source 1..1251: mol_type = other DNA
atgggtggcgccacttctaggggtgaaaattcctacgggctggacataacttgcaaagatatgcgcaacctgcgctttgcattgaagcaggagggccactcccggcgcgatatgttcgagatcctgacccggtacgcctttcccctggcgcatagcctacctctgtttgcttttctgaatgaggaaaagttcaacgtggacgggtggactgtctataacccagtagaggagtaccgtaggcaggggctccctaatcatcattggagaatcacatttatcaacaaatgctatgaactctgcgacacctaccccgctctcctggtcgtcccctatcgcgcctccgatgatgaccttaggagggtggccacattccgaagccgtaatcgaatccccgtcctgtcttggattcacccagaaaataaaacagtgattgtccgctgtagtcagccgctggtaggcatgagcggcaaaagaaataaggacgatgagaaatacctggatgtgatacgggagacgaacaagcagatcagcaagctgaccatttacgacgcccgcccatccgtcaatgctgttgcaaacaaggctacaggtggtggctatgaatccgatgatgcataccacaatgctgaactgttctttctcgacatccacaacatccacgtgatgcgggaatctctgaaaaaggtgaaagatattgtgtaccccaacgtggaggagtcacactggctgtccagcctggagtccacgcactggcttgaacacattaagctcgtgctcaccggtgccattcaggtggctgataaggtctcttccggaaagtcctctgtgctggtgcactgctctgatggctgggaccgcacagcccagctgacttccctggcaatgctgatgctggatagtttctacaggagcatcgaaggctttgagatcctcgtccagaaggagtggatcagcttcggacacaagtttgcaagtcggatcggccacggagacaaaaatcacaccgacgctgataggtccccaatattcctgcagttcattgattgtgtgtggcaaatgtccaagcagttccccactgcgtttgagttcaatgagcagttccttatcatcatcctagaccacttgtatagttgccgtttcggtacctttttgtttaattgcgagtccgctcgagaaaggcaggccctccacttcctgtctctgtcactctgtagacgcctacaaaaaggtctgtttctttacggccactag

SEQ ID NO: 125554 - DNA, 1467 bp, synthetic construct
  misc_feature 1..1467: note = Description of Artificial Sequence: Synthetic coding sequence
  source 1..1467: mol_type = other DNA
atgcgtaacctacgatttgcgctgaagcaggaaggtcattcccgccgggatatgtttgaaatactgacccgctacgcattccccctcgcccactccttgccattgttcgctttcctcaatgaagagaaatttaacgtggatgggtggaccgtgtataaccccgtggaggaatacagacgccagggtcttcccaaccaccattggagaatcacctttattaacaaatgttatgaactgtgcgacacttaccctgcattgttggtagtaccctaccgcgcatcagacgatgacctccgcagagtggctacatttaggagtaggaacagaatcccagtactctcatggatccatcccgaaaataaaacggtgatagtgcggtgctcgcagcctctcgtgggcatgagcggcaaaaggaataaagatgatgagaagtatctggacgttatcagagagacaaataaacaaatatcaaagctcacaatctacgatgcacgaccttctgtcaatgcggttgctaataaagcaacagggggaggttatgagagcgatgatgcataccacaacgcggagttattctttctagatatacacaacatccatgtgatgcgggagtctttgaaaaaggtcaaggacatcgtttaccctaatgtggaggagtcacactggctctcctcactagaatctactcactggctggaacacatcaagttggtgcttactggcgcaatccaggtggccgacaaggttagctccggtaagtcttccgtgctggtgcattgttccgacggctgggaccgaactgcccagctgacatccctcgcgatgctgatgttggatagcttctacagatcaattgaaggattcgagatcctggtccagaaggagtggatatcttttgggcacaaattcgccagcagaattggacacggagacaagaatcatacagacgccgaccggtcaccaatatttcttcagttcatcgattgcgtgtggcagatgtccaagcaattccccacagcattcgaatttaatgagcagttccttatcatcattctggatcacctttattcatgtaggttcggcactttcctctttaactgtgagagcgcccgtgagcggcaaaaggttacagagcgcacagtgtcgctgtggagcctcatcaatagtaacaaagagaaattcaagaaccccttctacactaaagagatcaatagggtgctgtatcctgtggctagcatgcggcacttggagctgtgggtgaattactacataagatggaacccccggatcaaacagcaacagcctaatcccgtagaacaacgatatatggaattgctggctctgcgcgatgagtacattaaaaggctcgaggaactacagttagctaactctgccaagctgtcggacccacccacgtcaccgtcctcacccagtcagatgatgccccacgttcagacccacttttag

SEQ ID NO: 125555 - DNA, 1998 bp, synthetic construct
  misc_feature 1..1998: note = Description of Artificial Sequence: Synthetic coding sequence
  source 1..1998: mol_type = other DNA
atggatcgccctgctgccgcagccgccgcaggctgtgaaggggggggcgggccaaatcctggccctgccggggggcggagacctccccgcgcagctggaggtgctaccgccggttcaagacagccctccgtggagacattggactctcctacaggatcacatgtggaatggtgcaagcaattaatcgccgcgacgatttccagtcagatctctggctctgtcacctccgaaaacgtgtccagggactataaggctctacgggacggtaataagctggctcagatggaagaagctcctctctttccaggtgagagtatcaaggccattgtcaaggacgtaatgtatatctgtcctttcatgggcgccgtgtccggaacccttacggtgaccgattttaagctgtattttaaaaatgtggaaagggatccacatttcatcctggatgtgccgctgggcgttatttcccgggttgagaagatcggagcccagtcccatggcgacaattcctgcggcatagaaattgtatgtaaagacatgcgcaacctcaggctcgcgtataaacaagaagaacagagtaaactaggaattttcgagaacctcaacaaacacgcattccctctgagcaatgggcaggctctgtttgcattttcttataaggagaaattccccattaacggctggaaggtgtacgatccagtgagtgagtacaagcgtcagggcctgcccaacgaaagctggaaaatcagtaaaattaacagtaactacgaattttgcgatacctatcccgctataattgtggtgcctactagcgtgaaagatgacgacttgtccaaagtggccgctttccgcgctaaggggagagtccccgtgctgagttggatccaccctgaaagccaggccacaataacccgttgttctcagcctttggtcggacccaatgacaaacggtgtaaagaggacgagaaatacctgcaaaccattatggatgcaaatgcgcagagtcataagctgattattttcgatgccagacaaaattcagtcgccgatacaaacaaaacgaaaggcggcgggtacgagtcagagtcggcttaccccaacgctgaactcgtcttcctcgagatccacaacatacacgtgatgcgagagagtcttcgcaagcttaaggagatcgtctatccctcaatagatgaggctaggtggctgagtaatgtggacggcacacactggctggagtatatcaggatgcttctggccggggcggtaaggattgccgataagattgagagcgggaagaccagtgtcgtggttcattgttctgacggctgggaccggactgcacaattgacatccctggctatgttaatgctcgactcatactatagaactattaaggggtttgaaactttggtcgagaaagagtggatctctttcgggcaccgcttcgccttaagggtaggtcatggcaacgataaccatgcagatgctgaccgatcaccaatttttcttcagtttgtcgattgtgtgtggcagatgacacggcaattcccctccgccttcgagttcaatgagctctttctcataaccatcttagatcacctatattcgtgtctgtttggcactttcttgtgcaattgtgagcagcagagatttaaagaagacgtctataccaagactataagcctgtggagttatattaattcacaactagatgaatttagtaatccattcttcgtgaattatgaaaatcacgtcctatatccggttgcgtcacttagccacctggaactttgggtgaactactacgtgcgctggaacccccgaatgcggccgcaaatgccaattcatcagaatctcaaggaattactagctgtaagggctgagttacagaaacgtgtcgaggggctgcagagggaggtggccacccgtgcggtctccagcagttccgagagaggaagctccccatcccattccgctacttcagtgcatacaagcgtctag

SEQ ID NO: 125556 - DNA, 264 bp, synthetic construct
  misc_feature 1..264: note = Description of Artificial Sequence: Synthetic coding sequence
  source 1..264: mol_type = other DNA
atggaggaggctcctctgttccccggtgaaagcattaaggcaatcgtcaaggatgtcatgtacatttgcccgtttatgggcgcagtgagtggtacccttaccgtgaccgattttaagctctatttcaaaaacgtggagcgggacccccactttatcctggatgtgcctctgggggttattagtagggtagaaaaaataggcgctcagagtcatggtgataactcttgcgggattgagatcgtttgtaaggatatgcgcaattag

SEQ ID NO: 125557 - DNA, 264 bp, synthetic construct
  misc_feature 1..264: note = Description of Artificial Sequence: Synthetic coding sequence
  source 1..264: mol_type = other DNA
atggaggaggcccctctttttccgggagagagcataaaggcgattgtaaaagacgtgatgtacatttgtccctttatgggagctgtgtctggcacgctgaccgtgacagactttaaactatactttaaaaacgtagaacgtgatccgcacttcatactcgacgtccccctgggtgtgatctctcgagtcgagaagattggcgcacagtcccacggagataactcctgcggtatcgagatcgtgtgtaaagacatgcggaactag

SEQ ID NO: 125558 - DNA, 273 bp, synthetic construct
  misc_feature 1..273: note = Description of Artificial Sequence: Synthetic coding sequence
  source 1..273: mol_type = other DNA
atggaggaggcccctctctttcctggggaatccatcaaggcgattgtgaaggacgtgatgtatatttgcccattcatgggggctgtctcaggtactctgacagtcactgactttaagctttatttcaagaacgtagagagggacccccactttatcttagatgtgcctctaggagttatctctcgcgtggaaaaaattggtgctcagagccacggtgacaattcctgcggtattgagattgtctgtaaggatatgcgaaacctgcgcctgtag

SEQ ID NO: 125559 - DNA, 2022 bp, synthetic construct
  misc_feature 1..2022: note = Description of Artificial Sequence: Synthetic coding sequence
  source 1..2022: mol_type = other DNA
atggaccggcccgccgcagctgcagccgccggctgtgagggaggcggaggcccaaacccgggccctgcaggtggacggcggcctccccgcgccgcggggggcgctaccgccggatccagacagcctagcgtagagacactggattcaccgacaggcagccacgtagagtggtgtaagcagctgattgccgccactattagcagtcaaatctctggcagtgtgacatccgagaatgttagccgcgattataaggtctttagaagacctgatcttcgcgctttgcgggatggcaacaaactcgctcagatggaggaagcaccactgttccctggggaatccatcaaagccatcgtgaaggatgtaatgtatatctgtccttttatgggcgcagtatcaggtactttgacggtaacggatttcaagctatactttaagaatgtggagcgtgatccgcattttatcctggacgtgccattgggcgtgatctcaagagttgaaaagatcggagcacaatcacacggggacaactcatgcggcatcgagatcgtgtgtaaggatatgaggaatttgaggctggcttacaaacaggaagagcagtctaagctcggtatattcgaaaatcttaataaacatgcttttcctctgagtaatggtcaggctttgtttgcttttagttacaaggaaaaattcccaatcaacgggtggaaagtgtacgatcctgtctccgaatataagcgccagggactgccaaacgaatcttggaaaatcagcaagatcaactctaactacgaattttgtgacacctacccagccattatcgttgtcccgactagcgttaaagatgacgacctctccaaagtggcagccttcagggccaagggcagggtgcccgttctcagctggatacacccggaaagccaggcgaccattactcgctgttcacagccattggtggggccaaacgacaagagatgcaaggaggacgaaaaatacctacagaccatcatggacgccaacgcccagagccataagctgataattttcgacgcaagacagaactctgtggctgatacgaataaaaccaagggaggtgggtatgagtcagagtcggcatacccaaacgccgaactagtgtttctcgagatccacaatattcacgtgatgcgcgaatctctccgtaagttgaaagagattgtgtatccctccatcgatgaggctcgatggctatcaaatgttgacgggacccactggctggaatacattagaatgctgctcgcgggcgctgtcagaatcgccgacaaaattgagtcaggtaagacgtccgtagtcgtccactgctccgatggctgggatcgcactgcccagctcaccagcctcgccatgctaatgctggactcatactacaggacgatcaagggtttcgagactttagtggagaaagaatggatctcctttgggcatcggtttgccctcagagtcggacacggcaacgataaccacgcagacgctgaccggagtcccattttcctgcagttcgtggactgcgtgtggcaaatgactcgacagtttccgagcgcctttgaatttaatgagctgttcctgatcactattctggatcatctatactcctgcctatttggtacattcctttgtaattgcgagcagcagcggttcaaagaagatgtctatacaaaaacaatttcactgtggtcttatatcaactcccagctggacgaattcagcaaccccttctttgttaactatgaaaaccacgtgttgtaccctgtggcttctctgtcccacttggagctgtgggtgaactactacgtgcgttggaatccccgtatgcgcccccaaatgcctatacatcagaatctgaaggagctattagctgtgagagcagagctccagaagagagttgagggactgcagcgtgaagttgccactcgagcggtgtcctcatcgtctgagagggggagttctccttcgcactccgccacttccgtccatacatccgtgtag

SEQ ID NO: 125560 - DNA, 1707 bp, synthetic construct
  misc_feature 1..1707: note = Description of Artificial Sequence: Synthetic coding sequence
  source 1..1707: mol_type = other DNA
atggacaggcccgccgccgccgctgccgccgggtgcgaggggggcgggggaccgaatcccggcccagccggggggcgccgacctccgcgcgctgctgggggagctacagccggatccagacagcccagcgtggaaaccctggacagtcccactggttctcatgtagagtggtgcaagcagctcatcgctgctactatctcatctcaaatcagcggatccgtgactagtgagaatgtcagtagagattataaagcgctccgcgacgggaacaaacttgctcagatggaagaagcacccctatttcccggcgagtctataaaggccatcgtgaaggatgtcatgtatatttgtcctttcatgggtgcagtgtccgggacactcactgtcacagatttcaaactgtatttcaaaaacgtggagcgtgaccctcatttcatccttgatgtaccactgggtgtcattagccgtgtggagaagattggagcccagtcacatggcgacaattcatgcggaatagaaatcgtgtgcaaggatatgagaaacctaaggttggcctacaagcaagaggaacagtccaagctggggatcttcgagaatctgaacaagcatgcattccccctgtcgaacggtcaagcattgtttgcatttagttataaggagaagtttccaataaatggctggaaagtgtacgaccctgtgtccgagtataagcggcagggacttcccaacgaatcatggaagatttctaagatcaactccaattatgaattctgcgatacttaccccgcaatcattgtcgttcctacgtctgtaaaggacgatgacttgtccaaagtggctgcttttagagcaaaaggcagggtcccggtgctgagctggatccatcccgaatcgcaggctacaattacacgatgtagccagcctttagttggccctaatgacaaacgatgcaaagaggatgaaaagtacctccagacaatcatggatgccaatgcccaaagccacaaactcatcatatttgatgcgcggcagaatagtgtggctgataccaataaaaccaaaggaggtgggtacgaaagtgagtctgcttaccccaatgctgagctggtgtttcttgagatacataacattcacgtcatgcgtgagtccctcagaaaactcaaggagattgtgtacccttccatcgacgaggcacggtggctgagcaatgtggatggcacccactggttagagtacattagaatgctcctggccggtgcggttcggatcgccgataaaattgagtcaggcaaaacaagcgtggtggtgcattgctcggatggatgggacaggactgcccagctaacctccttagctatgctgatgctggactcttactatcgaacgatcaaggggttcgaaacattggtagaaaaggagtggatatcgttcggtcacaggttcgcgctccgcgtgggacatggcaatgataaccatgcggacgccgacagatcgcccatatttctgcagttcgtagattgcgtctggcagatgacaagacaattccctagtgccttcgagtttaatgaactctttctgattactatccttgaccatctctactcctgccttttcggcacttttctgtgcaattgcgaacagcagcgctttaaggaggcatggggggccgggacccaacgggcccgtggtagtcttcggagtagatag

SEQ ID NO: 125561 - DNA, 444 bp, synthetic construct
  misc_feature 1..444: note = Description of Artificial Sequence: Synthetic coding sequence
  source 1..444: mol_type = other DNA
atggaagaagcaccgctctttcctggggaatcgataaaagcgattgtcaaagatgtgatgtatatctgtccttttatgggcgccgtgtccggcacgctgacggttacggatttcaagttgtactttaagaacgtagagcgtgaccctcattttatcctggacgtgcccttgggggtcatctctcgtgtagagaagataggggcccaatctcatggagataactcttgcggcatcgaaatagtctgcaaggatatgaggaatctaaggctggcatacaagcaggaggagcagagcaagctgggtatcttcgaaaacctaaacaagcacgcctttcctctgtcgaacggccaggctctgttcgctttcagctacaaagaaaaattccccattaatggctggaaggtgtacgatcccgtgagcgaatacaaacggcagggtctttag

SEQ ID NO: 125562 - DNA, 1182 bp, synthetic construct
  misc_feature 1..1182: note = Description of Artificial Sequence: Synthetic coding sequence
  source 1..1182: mol_type = other DNA
atgtatatctgccccttcatgggggccgtaagcggtaccctcacagtgacagattttaaactctatttcaaaaatgtcgaaagggacccacattttattctggacgtgcccctcggcgtgatttcccgagtagagaagatcggagcccagagtcatggagacaattcttgcgggattgagatcgtttgcaaggacatgcgaaaccttagacttgcatacaagcaagaagagcaatctaaacttgggatcttcgagaacctgaacaagcacgcttttcctttatctaatggccaggcgctcttcgcgttcagttacaaggagaaatttcccataaatgggtggaaagtgtatgacccagtgtccgagtataagcgacagggactgccaaatgagtcttggaaaatcagcaaaattaattcgaactatgagttttgcgacacatatccggctattatcgtcgttcctacttcggttaaagatgacgatctgtctaaagtggctgcgtttagagccaaaggccgtgtgccagtattgtcttggattcacccagagtcacaggccacaatcacaaggtgttctcagcccctggttggtcctaatgacaaaagatgtaaggaagacgaaaagtatctccagaccataatggacgcaaacgcccagtcccataaactaattatctttgatgccaggcagaattccgtcgctgacacaaacaaaatgttgctggcaggagcagtgagaattgctgacaagattgagtcagggaagaccagcgtcgtggtgcactgctcagacggatgggatagaactgcccagctaacctcccttgccatgctcatgctcgactcttattatcgaaccattaagggattcgagacactcgttgaaaaggagtggatttccttcggccataggttcgccctgagggtgggccacggcaacgataaccatgcagatgccgataggtcaccgatattcctacagttcgtggattgcgtttggcagatgaccaggcagttccccagcgctttcgagtttaatgaactctttctgatcacaatcctcgatcatttatactcctgtttatttggcacctttttgtgcaactgtgagcagcagcgattcaaggaggcatggggggctggaactcagagagcccgcggctccctgcggtcacggtag

SEQ ID NO: 125563 - DNA, 1716 bp, synthetic construct
  misc_feature 1..1716: note = Description of Artificial Sequence: Synthetic coding sequence
  source 1..1716: mol_type = other DNA
atggaagaggctcctctctttcctggagagtctatcaaggccatagtcaaggacgtgatgtatatctgcccttttatgggagccgtctcaggcacactcaccgtcaccgacttcaagctgtattttaagaatgttgagcgggatccccactttatactggacgtgccactgggagtgatctcgcgggtggagaagattggcgcccagagtcacggcgataatagctgtggcatcgaaattgtgtgcaaagacatgcggaacctgcggctggcctataagcaggaggagcagagcaaactgggtatattcgagaatcttaataagcacgcttttccgcttagtaatgggcaggcattgttcgcttttagttataaggagaagttcccaattaacgggtggaaggtctatgaccccgtcagcgagtataagcgccaggggctacccaacgagagctggaagatcagcaaaattaactcaaactacgagttctgtgatacctaccctgccatcatagtcgtccccactagcgtgaaggacgatgatctctccaaggtggcggccttccgggccaaggggagagtcccggtgctgtcatggatccacccagagagtcaggccactatcacacgatgttcccagcctcttgttggtcctaacgacaagcgatgtaaggaagacgagaagtatctccagaccattatggacgcaaacgcccagtcccacaaactcattatcttcgatgctagacagaactccgtagcagacacaaataagacaaagggcggaggctacgagtccgagtccgcctatccaaacgccgaactcgtgtttctcgagattcataatatacatgtgatgagggagtccctcaggaagcttaaagagatcgtttatccctccattgacgaggctcgatggctgagcaatgtggatggcactcactggctagagtacatcaggatgctgctagccggagccgtgcgcatagcagataaaatcgagagcggcaagacgtcggttgtggtgcattgtagcgatgggtgggacaggaccgcacagttgacatccttggcaatgctcatgctggattcatactataggactataaagggcttcgaaacgttggtggagaaggaatggataagctttgggcaccgctttgcattgcgggtcgggcacgggaacgataaccacgctgacgctgataggtctcctatattcctgcagttcgtggattgtgtttggcaaatgactaggcagttcccaagcgcttttgaattcaacgagctctttctgatcacaatcctcgaccacttgtacagctgtcttttcggtaccttcctctgtaactgtgaacaacagcgatttaaagaggatgtgtatactaagacaatcagcctctggagttatattaactcccagctggacgagtttagtaatcccttttttgttaactacgaaaaccatgtcctgtatcctgtcgccagcttgagtcatctggagctttgggtaaattactatgttcgctggaatcctaggatgaggccccagatgccaatacaccagaatctcaaggaactgttggccgttagagccgaactgcagaaaagggtcgaaggcttgcagcgtgaggtggctaccagagcagtgagtagctcaagcgagaggggatcctcgcccagccatagcgcgacctcggtgcatacaagcgtgtag

SEQ ID NO: 125564 - DNA, 1092 bp, synthetic construct
  misc_feature 1..1092: note = Description of Artificial Sequence: Synthetic coding sequence
  source 1..1092: mol_type = other DNA
atggatagaccagcagcagccgctgcggctggctgcgaaggcggcggcggaccaaatcccggccccgcaggcggaaggcgaccccctcgagcggcaggtggggccacagccggctcccggcaaccttctgtggagaccctggactcaccaacaggctcccatgtcgaatggtgcaagcagcttattgctgccacaatctcttcccagatatcaggctctgttaccagtgaaaacgtgtcccgggattataaggcactgagagatggcaacaagctggcacaaatggaagaggcccctctgttccccggcgaaagcattaaagccattgtgaaggacgtgatgtatatttgcccttttatgggcgctgtgtcaggaacattgacagtgactgacttcaaactctactttaaaaacgtagaacgggacccacactttatactggatgtcccgctgggagtgataagtcgcgtggagaagattggcgcacagtcacacggggataattcatgcggaatcgagatcgtgtgcaaagatatgcggaatctgcgactggcctacaaacaggaggaacaatcaaagttggggatcttcgagaatctcaacaagcatgccttccctctgtccaatggccaggccctgtttgctttttcgtataaggagaagttccctattaacgggtggaaagtgtacgaccccgtttccgagtataaacggcaggggctgcccaacgagagttggaagatcagcaaaattaactccaactatgagttttgcgatacttatcccgcaatcatagtggtgcctacatccgtgaaagacgacgatctctctaaggttgcagccttccgcgcaaagggtagagtgcctgttttgtcctggattcacccggaaagtcaggccactatcactcggtgctcacaaccactggtggggcctaacgacaagagatgtaaggaggatgaaaagtacttgcagactattatggacgctaatgcccagtctcataaactgattatattcgacgcacgacagaacagtgtggccgacacaaataaactgtggtatcaggacactgcaagcctgatggagtag

SEQ ID NO: 125565 - DNA, 1998 bp, synthetic construct
  misc_feature 1..1998: note = Description of Artificial Sequence: Synthetic coding sequence
  source 1..1998: mol_type = other DNA
atggaccggcccgcagctgctgcagcggctggctgcgaggggggcggcggtcctaaccccgggccggctggtggcaggagaccccctcgggccgcaggcggcgctaccgccggtagtaggcagccaagcgttgagaccctggactcccctacggggtcacatgtagaatggtgcaaacagttgattgcagctacaataagcagccagatctcaggctctgttactagcgagaatgtgtcacgcgactataaggcacttcgggacggcaacaagctcgcacagatggaagaagcaccattgtttccaggggaatcaatcaaggctatcgtcaaagacgtgatgtatatctgtcctttcatgggagccgtgtccggtacactgacagtgacagattttaaactctacttcaagaacgttgagagggaccctcatttcatactcgacgtccctttgggcgtgattagccgggtcgagaagattggagctcagtctcatggagacaacagctgcggaatcgagattgtgtgcaaggacatgaggaaccttcggctagcttacaagcaagaggaacagtcaaaacttggcatcttcgagaatctgaacaagcatgcttttcctttaagtaatggtcaggccctctttgcgttctcctataaagaaaaattcccgatcaacggctggaaagtgtatgacccagtctccgagtacaaacgccaggggctgcctaacgaatcgtggaagattagtaagatcaattccaactatgagttctgtgatacataccccgccatcattgtagtgcccaccagcgttaaagatgatgatcttagcaaagttgctgccttccgcgcaaaagggagagtgcccgttctgtcttggatccacccagaatcacaggctaccatcacacgctgctcacagcccttggtcggacctaatgacaaacgatgcaaagaagatgaaaagtatctgcagactatcatggacgccaatgcccagtcccacaagctcattatcttcgatgccagacagaacagcgtggctgataccaacaagaccaagggcggagggtacgaatctgaatctgcctacccaaatgccgagctcgtgtttctggagatacataatattcatgttatgagagaaagtcttagaaaacttaaggagatcgtgtatccaagcatagatgaggccaggtggttgtccaatgtggatggaactcactggctcgagtatattagaatgctcctcgccggcgcggtgaggatagctgataagatcgaaagtggaaagactagtgtagtggtccactgctctgatggctgggacagaactgcacagcttacaagcctggctatgctgatgcttgactcgtactataggactattaagggatttgagacgttggtggagaaggagtggataagcttcggtcatcgctttgcactcagggtgggccatggcaatgataaccacgcagacgctgatcgttctccaattttcctccagtttgtagattgtgtctggcaaatgacacggcagttccctagcgcgtttgaattcaatgagctatttctgattactattctcgatcatctgtattcctgtctgtttggaacttttctctgcaactgtgagcagcagcgtttcaaagaggacgtttacacaaagacgataagcttgtggagttacatcaattcgcagctcgacgaattctcaaacccattcttcgttaactacgagaaccatgtactatatcccgtcgcctctctttctcatcttgagctgtgggtgaactactacgtgcgttggaatcctagaatgaggccacagatgccaattcatcagaaccttaaagagttactggctgtgagggccgaactgcagaagcgggtcgaaggactgcagcgggaggtggccacccgggcagtttcaagttcctcagaaagaggatctagcccgtcgcattcggctacttctgtgcataccagcgtgtag

SEQ ID NO: 125566 - DNA, 1914 bp, synthetic construct
  misc_feature 1..1914: note = Description of Artificial Sequence: Synthetic coding sequence
  source 1..1914: mol_type = other DNA
atgttaggaaaaggggtggtgggtggtggtggtggcacaaaggccccaaaaccatctttcgtctcttacgtacggcctgaagaaatacatacaaatgaaaaggaggtgacggagaaggaggtgactctgcatctgttaccaggagagcagctgctgtgcgaggcctccactgtcctgaaatacgtgcaggaggactcttgtcagcacggggtgtacggccgtctggtctgcacagattttaagatcgcctttctaggcgatgacgaatcagccctggataacgatgagacccagtttaaaaacaaagtaatcggcgagaatgacatcactctacattgcgttgaccaaatatatggtgtctttgatgaaaagaagaaaacactttttgggcagctgaagaaatacccggaaaagcttattattcactgcaaggatctgagagtgttccagttttgtctgagatatacaaaagaggaggaggttaagaggatcgtgtcaggaattattcaccacacacaagctccaaagctcctcaagaggctgtttttgttttcgtatgccaccgctgcccaaaataataccgtaactgatccgaagaatcacaccgtgatgtttgacactctaaaagattggtgctgggagctggagcgtacaaaggggaacatgaagtataaagccgtgagcgtcaatgagggatacaaagtgtgtgaacggttgccggcttatttcgtcgtgccgacacccctgcctgaggagaatgtccaacggttccaggggcatggcattcccatttggtgctggtcttgccacaacgggagtgcccttctaaaaatgagcgcactcccaaaagaacaagacgacgggatccttcagatacaaaaaagctttctggatggtatatataagaccatccatcgtccaccctacgagattgtcaagaccgaagacttatcctccaatttcctgagccttcaggagattcagactgcatactccaagtttaagcagctctttctcatcgacaacagcacagaattctgggatacggatataaagtggttttccctgttggagagctctagctggttggatattatccgccggtgcctgaaaaaggccatcgagattaccgaatgcatggaagctcagaacatgaacgtgctgttgttggaagaaaatgccagcgacctctgctgcctgatttcctctctcgtgcagctgatgatggacccacattgtagaacccgaattggctttcagagcctcatccagaaagaatgggtgatgggtggacactgctttctggatagatgtaaccacctcagacagaatgacaaggaagagcatcagagacaacttagcttgccactgacccagagtaagagctcccccaaaaggggatttttcagggaggaaactgaccatctcatcaaaaacctgctcgggaagaggatatcgaagctcatcaattcttccgacgaacttcaggacaacttccgcgagttctacgattcctggcattccaaatcaacagactaccacgggcttctgctgcctcacatcgagggtcctgaaataaaggtctgggctcagaggtatcttcggtggatccctgaagcacaaattctggggggagggcaggtggcaaccttgtctaaactactggagatgatggaggaagtacagagcttgcaggagaaaatagatgaacggcatcacagtcaacaggctccccaggccgaagctccttgcctgctgagaaattctgcgcgcctgtcttcgctgttccccttcgcactcctacagcggcacagctcgaaacccgtgctccctacctccggctggaaggctctcggagatgaggatgatctggcgaagcgcgaggacgagttcgtcgacctgggggacgtgtag

SEQ ID NO: 125567 - DNA, 2082 bp, synthetic construct
  misc_feature 1..2082: note = Description of Artificial Sequence: Synthetic coding sequence
  source 1..2082: mol_type = other DNA
atgctgggcaagggcgttgtcggaggaggtgggggaaccaaagctccaaagccgtctttcgtatcctatgtgaggcccgaagaaatccacaccaacgaaaaagaggtgacggagaaggaggtaaccctccacttgcttccgggggaacagctcctctgcgaggcctctaccgtgctgaaatatgttcaggaggatagttgccagcacggtgtctacggcaggctagtgtgcacagattttaagatagcattcctgggtgacgacgaatcagcactggacaacgatgagacacagtttaagaacaaggttatcggagagaacgacatcaccctccactgtgtggaccaaatttatggagtctttgacgagaagaaaaagaccttgttcggtcagctgaaaaaatacccagagaaacttattatccattgcaaggacctcagggtttttcagttctgcttgcgatatacaaaagaagaggaggttaagcgaatcgtgagcggtattatccatcacacgcaggcaccaaagttgctgaagcgcttgttcctgttctcctatgctaccgctgcccagaataacaccgtaacggatcctaagaatcacactgtcatgttcgacaccctgaaggattggtgctgggagctcgaaaggacaaaaggcaatatgaagtataaggcagtctccgtcaacgagggctacaaagtgtgcgaacggcttcctgcgtatttcgtggtgcccaccccccttccggaagaaaatgttcagcgcttccagggccacgggatcccaatctggtgctggtcatgtcacaacggatctgccctgctcaagatgtctgcattacccaaggagcaggacgacggcattcttcagattcagaaatctttcctggacgggatctacaaaaccattcatcgaccaccttacgagatagtgaaaaccgaagacctaagttcaaattttctgtccctccaggagattcagaccgcttattctaagttcaagcagttgttcttgattgacaactcaactgagttttgggacacggatattaagtggttttccttgttagagtcttcatcctggctggatatcattagacgatgcctgaagaaagctatcgagatcaccgaatgtatggaggcacagaatatgaacgtgctccttcttgaagagaatgcctcggacctgtgctgcctgatctcttcgctggtgcagctgatgatggaccctcactgtcggaccagaatcggattccaaagtctgattcagaaggaatgggtgatgggtggacattgtttccttgataggtgcaatcatctacggcaaaacgacaaggaagaagtgccagtattcttgctctttctggattgcgtgtggcagctagtccaccagcacccccctgccttcgagtttactgagacctacttaaccgtgctgagcgactcactgtacatccctatctttagtacctttttctttaactcccctcaccagaaagacacaaacatgcaccaacgtcagctgagccttccactgacacagagtaaaagcagtcccaagcgtgggtttttccgggaggagacagatcacctgataaaaaacctgttgggcaagcggatctccaagctgataaattccagtgacgagctgcaggacaactttcgggagttctatgacagctggcatagtaaatccacagactaccatggcctgctgttaccccacattgagggcccagagatcaaagtttgggctcaacgctaccttcggtggattccagaagcgcagatattgggcggtgggcaggtggccacactctctaagctgctggaaatgatggaggaagtgcagagcctgcaggagaagatcgacgagcggcatcacagtcaacaggccccacaggcggaggctccttgtctattgcggaacagtgcccgactgtcatctctgtttccctttgcgctccttcagcgccatagttcaaagcccgtgcttccaacatcaggatggaaagccctgggcgatgaggacgacctcgcaaaacgcgaagacgagttcgtggacctgggggacgtgtag

SEQ ID NO: 125568 - DNA, 2244 bp, synthetic construct
  misc_feature 1..2244: note = Description of Artificial Sequence: Synthetic coding sequence
  source 1..2244: mol_type = other DNA
atgcttggaaagggtgttgtgggagggggagggggtacaaaggcaccaaaaccaagttttgtgtcctacgtgcggccagaagaaatccacacaaacgagaaggaggtcacagaaaaggaagtgaccctgcacttgctacccggcgagcagctcctgtgtgaggcatccacagtgcttaagtacgtgcaagaggattcttgccaacacggggtgtatggtaggctggtgtgtaccgacttcaaaatcgccttcttaggggacgacgagtcagcccttgacaacgacgagacccagttcaagaataaagtgatcggcgagaacgacatcacccttcattgcgtcgaccaaatttacggagtattcgatgaaaaaaagaagacactgtttggccaacttaaaaaatacccagagaaattgattatccattgcaaagacctgcgcgtgtttcaattctgcctgaggtatactaaggaggaggaggtaaagagaatcgtctctgggattatccatcacacacaggcccccaaattgcttaaacgactcttcttgttcagctacgccacagcggctcagaataatacagtgacagaccccaaaaatcacacggtgatgttcgacacgctcaaagattggtgctgggagctggaaagaacaaagggaaacatgaagtataaggcggtgtcagtgaatgaaggttataaggtgtgcgagcggttgccagcatactttgtagtgcctactcctcttcccgaagagaacgttcagcgatttcaagggcacggcattcctatatggtgttggagctgccataatggctctgccctgctgaagatgagcgccctccccaaagagcaggatgatggaatcctccagatccagaaatccttcctcgatggtatctacaaaacaatccaccggcctccctatgaaatcgtgaagaccgaggatcttagttctaacttcctgtctcttcaggagatccaaacagcctattcgaagttcaagcagcttttcctgattgacaacagtacagaattctgggataccgacataaaatggttctctttattggagtcctccagttggcttgacattatccgaaggtgcctcaaaaaggctatcgaaatcactgaatgtatggaagctcagaacatgaacgtgctgttgctggaagagaatgccagtgacctgtgctgtctcatctcatcgcttgttcagcttatgatggatccacactgtagaacaaggatcggattccaatccctgattcaaaaggagtgggtaatgggcgggcattgttttcttgatcggtgtaaccacttaaggcaaaacgataaggaggaggtgcccgttttcctgttattcctggattgcgtatggcaactcgtccatcaacaccccccggcttttgaattcacagaaacctacctcactgtcctttcagattccctttacatccccattttctcaacctttttttttaacagtccccaccagaaggataccaatatgggccgggagggccaggatacccaatccaagccacttaatctgctgaccgtgtgggactggtctgttcagtttgaaccaaaggcacagacgttgttgaaaaatccactgtacgtcgagaaaccaaagttggataagggacagaggaaggggatgcgtttcaaacatcagagacaactgtctcttcccttaacacagtccaagtcctcaccaaagcggggatttttcagagaggaaacagatcacctcattaaaaatctcttgggcaagagaatttctaaactgatcaacagttctgacgagctgcaggataattttagagagttctacgacagctggcactccaaatccactgattaccacggcctattattgcctcatattgagggtcctgaaattaaagtgtgggcccagcgctatttgcggtggattcccgaggctcagatcctcggcggggggcaggtggccacattatcgaagctgcttgagatgatggaagaggtgcagtccttacaggagaaaattgacgaaagacatcacagccagcaagccccacaggcagaggccccgtgcctgctgagaaatagtgcccgcctgagcagcctctttccattcgccctgctgcaacgtcactcttcgaagcctgtgctacctacgtccggctggaaggccctgggagacgaggacgatctggccaagcgggaggatgaattcgtggacctgggtgatgtatag

SEQ ID NO: 125569 - DNA, 1953 bp, synthetic construct
  misc_feature 1..1953: note = Description of Artificial Sequence: Synthetic coding sequence
  source 1..1953: mol_type = other DNA
atggccggagcgagagccgcagccgcagcagctagcgcaggatctagtgcatcgtctgggaaccagcccccgcaggagctagggctgggagagctgctggaagaattttctcgaacgcaatatcgtgctaaggacggctctggtaccgggggctcaaaggtggagcgcatcgagaagagatgccttgagctgttcggtcgcgattattgtttttcagttatccctaacacaaacggtgacatctgcggacactatccacggcatattgtcttcctggaatacgaaagctccgagaaagaaaaggatacctttgagtccaccgttcaggtcagtaagcttcaggatctgatccataggagcaaaatggctcgatgtcggggaaggttcgtatgccccgtcatcctgttcaagggcaagcacatctgtcgctcagcgactctggcagggtggggagaactgtacggtagatccggttacaattattttttcagcggcggggctgacgacgcctgggctgacgttgaggatgtgacggaggaagactgcgctctgcgctctggtgacactcacctattcgacaaggtgcgtgggtacgatattaagctcctgcgctacctgtcagttaaatacatttgtgacctgatggtggaaaacaaaaaagttaagtttgggatgaatgtcaccagttcggaaaaagtcgataaggcacagagatacgccgacttcacgctgctgtccattccctaccccggatgtgagttcttcaaggagtacaaagacagggactacatggctgagggccttatttttaattggaagcaagactatgtcgacgcacctctaagcattcctgattttcttacacatagccttaacattgactggagtcagtaccagtgctgggacctagtgcagcagacccagaattatctcaagctgttactgtcccttgttaactctgatgatgactcaggcctgctggtgcattgtatcagcgggtgggaccggacgccacttttcatatcgctgctgaggctgtcactctgggctgacggcctgatccatacgagtcttaagccaacagagatcctttatttgaccgtggcatatgactggtttttgtttggccacatgctagttgatcgcctgagtaaaggggaggaaatcttctttttttgcttcaattttcttaaacatatcacttctgaggagttcagcgccctgaaaacgcaaagaaggaagagtctacctgctcgcgatggtggctttactctggaggatatctgtatgctgagaagaaaggatagggggagcacgacatctctaggaagtgacttttcactggtcatggagtcttctcccggggctacaggctcatttacatacgaggccgtggaacttgtaccagcaggggcccccacccaggcagcatggagaaaatcccacagctcttccccccaatcagtcctgtggaaccgaccacagccatccgaagatcggctgccttcccagcaaggcctcgccgaggctcgttcgagcagttcgagcagctctaaccactcagacaattttttccgtatggggtcttcccccctcgaggtgcctaaaccacggagcgtggatcaccctctgcccggctccagtctgtcaaccgactatggttcgtggcagatggtgacggggtgtggatcaatacaggagagggccgtgttgcatacggacagttctctgccatttagttttccagatgagctgcccaacagctgtctcctggcagccctgtccgatagggaaacgaggctgcaagaagtgagaagcgcctttctcgcggcttactctagtacagttggtctgcgcgcggttgctccttcacctagcggcgccattggcggacttctagagcagtttgctcgaggggtgggcctgcgctccattagcagcaatgccttgtag

SEQ ID NO: 125570 - DNA, 1617 bp, synthetic construct
  misc_feature 1..1617: note = Description of Artificial Sequence: Synthetic coding sequence
  source 1..1617: mol_type = other DNA
atggcaggcgcccgagcagctgcagcggctgcatcagccggctcatctgctagtagtggcaaccagcctccgcaggaattgggattaggggagttactggaggagttctctcgtacgcaatatcgggcaaaggacggctcgggaacgggtggtagcaaggtcgagcgtatcgagaagaggtgcctcgaactgtttggacgggattactgtttcagcgtcatccctaataccaatggcgatatctgtggccattacccccgtcatatcgtttttctggaatatgaatcctctgagaaggagaaagatacatttgaaagcaccgtacaggtgtccaagttacaagacctgatccacaggtctaaaatggccaggtgtaggggccgattcgtgtgtccagttattctattcaaaggaaaacatatttgcaggtcggccaccttggctggttggggcgagttgtacggccggtccggctataactatttcttttccggaggcgcggacgatgcctgggccgacgtggaagatgtgacggaagaggactgcgccctgcgttcgggagacactcatctgtttgataaggtgcgcggctacgacatcaagctcctccggtatctctccgtcaaatacatctgcgacctcatggtcgagaataagaaagtcaaatttggcatgaatgtaacctcctccgagaaagtggataaggcccagcggtacgccgactttactctcctctcaataccataccctggatgcgaatttttcaaggagtacaaggatagagactacatggcagaaggattgatctttaattggaagcaggattatgtggatgcgccgttgagcatccctgactttctgacccactccctcaacattgattggagccagtatcagtgctgggaccttgtccagcagacgcagaactacctaaagctgctgctgtcactcgtaaactccgatgacgattccggcctgctagttcattgcatctccgggtgggaccggacacctttgttcatatctttgcttagactgagcctgtgggcggacggactcattcatactagcctgaagccgacagaaatcttgtacttgacagtggcatatgattggttcttgttcggccacatgctggttgacaggctcagcaaaggagaggaaatcttttttttttgctttaacttcttgaagcacataacctcagaggagttttccgccttgaagacacaaagacgcaaatccctcccagccagagatggtgggtttacgctggaagacatctgcatgcttcggcggaaggatcgtgggtctactacgagtctggggagcgattttagcctggttatggaatcttctcctggcgccaccggatcattcacatatgaagccgtcgaactggtgccagctggcgcacccacccaagccgcatggctagcagccttatccgaccgagagacccggctgcaagaggtcagaagtgcattcttagccgcttattcttcgacagttggcctgcgtgccgtggccccaagtcccagcggggcgattggtggcctgctggaacagtttgctagaggtgtcggtctaaggagtatcagctccaatgccctctag

SEQ ID NO: 125571 - DNA, 1797 bp, synthetic construct
  misc_feature 1..1797: note = Description of Artificial Sequence: Synthetic coding sequence
  source 1..1797: mol_type = other DNA
atggctggtgcccgggccgccgcggccgccgcttccgcaggatccagtgcctctagtgggaatcagcccccgcaagaactcggtctcggcgaactcctggaagaattctctcggacccaataccgcgcgaaggacggatctggtacaggcgggagtaaagtggaaagaattgagaaacggtgtctggagcttttcggcagggattattgcttttcagtcattccaaacacaaatggagatatctgtggccattatcctagacacatagtatttctcgaatacgagtcatctgagaaggaaaaggacacgtttgagagcacagtgcaggtgtccaagctacaggacttgatccaccgcagcaagatggcccggtgccgagggcgctttgtctgccctgtgattctgtttaaggggaagcacatctgtcgttcagccaccttggcggggtggggcgagctgtacgggagaagtgggtacaattatttcttttccggcggtgccgatgatgcttgggctgacgtggaggatgtgacggaggaggattgtgcattaaggtctggcgacactcatcttttcgataaggtgagaggatacgatataaaactcttgcgctacctttctgtaaaatacatctgtgatctgatggtggagaacaaaaaggttaaattcggaatgaacgtgacctcatctgaaaaggtggacaaagcgcagcgttacgctgacttcacattgctgtctattccctaccccggctgcgagttcttcaaggagtataaggatcgagattatatggcggagggcctaattttcaattggaaacaggattatgtcgatgccccactgtccattcctgactttctgacccactcactgaatatcgactggagtcagtatcagtgctgggacttagtgcagcagacacagaactatctgaagctactgctgtcgctagtcaactccgacgatgatagcggactgctggttcattgtattagcgggtgggaccgaaccccattgtttattagtctactgaggctctctctctgggctgacggacttatccacaccagcctaaaacccaccgaaattttgtatcttaccgtcgcctacgactggttcctcttcgggcatatgctggtagatagactgtctaagggagaagagatttttttcttttgcttcaacttcctgaaacacatcacatctgaggaattctcagcactcaaaacacagcgtaggaagagtctccccgctcgcgatggcggattcacactggaagacatttgtatgctccgccggaaggatagggggtcaactacttcgctaggctcagatttctccctggtgatggagagcagtcctggagccaccgggtcctttacctacgaagcagttgaactggtgccagcaggagccccaacacaggccgcttggaggaaatcccacagctcttcaccccaatccgtgctgtggaacaggccacagcccagcgaagaccggttaccaagtcagcaaggcctggcggaagccaggagttcctcctcttcctcctcgaatcattctgataactttttccggatgggatcctcacccttggaagtaccaaagccccggcttgccgccctgagcgacagagagacaagactgcaagaggtgagatcggcctttctggcggcttactcttctacagtcggacttagagccgtggccccttcaccatccggtgccataggcggcctcctcgagcaatttgctcgcggcgtcggactccgcagcatatctagtaacgcactgtag

SEQ ID NO: 125572 - DNA, 1563 bp, synthetic construct
  misc_feature 1..1563: note = Description of Artificial Sequence: Synthetic coding sequence
  source 1..1563: mol_type = other DNA
atggccggggcccgggctgcagcagcagccgcctctgcgggatcttctgcctcctccggcaatcaaccccctcaagagttggggctcggtgagctactggaggagttcagccgtacccagtatcgggccaaggatggatctggaaccgggggcagcaaagtcgaacggatcgaaaaaagatgcctggaactcttcggacgagattattgcttttctgtaattcccaacacaaacggagacatatgtggccactatccaaggcatattgtgttcctcgaatatgaatcgagcgaaaaggagaaggacacgtttgaatcaactgtgcaggtttcaaagctgcaagatcttatccataggagtaagatggcaagatgtcgggggaggttcgtttgcccagtgatccttttcaagggcaaacacatctgtagatccgcaacccttgccggctggggtgaactctacggtagatctgggtacaactattttttcagcggcggagccgacgatgcctgggccgacgtcgaagatgtcaccgaggaagattgtgccttgagatccggagacacgcacctctttgacaaggttcgggggtacgacatcaagcttctgaggtacctgtccgtcaaatatatttgcgacttgatggtcgagaacaaaaaagtgaagttcggaatgaacgtgacctcctcagagaaagttgataaggcgcagcggtacgctgattttacactgctttctatcccctaccctgggtgtgagttcttcaaagagtacaaggacagagattatatggcagaggggctgatctttaactggaaacaggactatgtcgatgctccacttagtattcccgactttttaacccacagccttaatatcgattggtctcagtatcagtgctgggatctggtgcagcagacacagaactatctgaaacttctactgtccttggtgaactccgacgacgatagcggtctgctcgtgcattgcatatcagggtgggatcgaacacctctctttatctcattattacggctgtctctctgggcagacgggctcatacatacgagtcttaagccaacggagattctgtacctgaccgtggcttatgactggtttttattcgggcatatgttagttgacaggctttcaaaaggagaagagatctttttcttctgcttcaattttcttaaacacatcacttccgaggaattctcagctctcaagacgcagaggagaaaatccctgccggccagagacggcgggtttacactggaagatatatgtatgctaagaagaaaggatcgagggtccaccacctcccttggctcagactttagcctcgtcatggagtcttcccctggcgccaccgggtcattcacatatgagcgcggcgcaggtccgtcccgtagcgcaaattccggatccttggaggaggagccactgatcctttctactgaatgtcctctagaacccgcaacaaccctgaggggtcctctggcctttcccgcaggtgctggaggatcccaagtatttcaactgctctttcttaaacctttctag

SEQ ID NO: 125573 - DNA, 1932 bp, synthetic construct
  misc_feature 1..1932: note = Description of Artificial Sequence: Synthetic coding sequence
  source 1..1932: mol_type = other DNA
atggagaagagcagctcttgcgaatctctcggcagccaaccagctgctgcccgccctcccagcgttgactcactcagttcagcttccacttcacatagcgaaaattcagtccacacaaagtccgcaagcgtggtctccagtgacagcatttctacatccgccgataatttctccccagacctgagagtgttgcgggagtctaacaagctagctgaaatggaggaaccgccactccttccaggagagaatatcaaagatatggctaaggacgtgacatatatttgtcccttcacaggcgccgtacgggggacactgacggtgacgaactatcgcttatatttcaagtccatggaacgagatcctccattcgtgctggatgcttccctgggcgtgatcaacagagtcgaaaagattggtggagcttcatctagaggcgagaacagttatgggctggagacagtgtgtaaagatatccgtaacctgcgctttgctcacaagcctgaaggccgtactcggaggtctatttttgaaaatcttatgaagtacgcctttcctgtgagtaacaatctgcccctgtttgcattcgaatataaggaagtgtttccggagaatgggtggaagctgtacgaccccttactggagtatagaagacaggggatcccgaacgaaagctggcggatcacgaagatcaatgaacgttatgaactgtgcgatacctacccagcattgctggtggtccctgccaacatcccagacgaagaactgaaacgggttgccagtttccgttcccgagggcgcattcccgttctgtcctggattcaccctgaaagccaggcgacaatcacaagatgctcccagcccatggttggtgtgtcagggaagaggtctaaggaggacgagaaataccttcaggcaataatggactccaacgcccagagccacaaaatcttcatctttgacgcccgcccttcggtgaatgctgtggccaataaggccaagggcggaggatacgaaagcgaggatgcataccagaacgccgagttggtctttctcgatattcataacatccatgtgatgcgggaatcactccgcaaactgaaagagattgtgtaccccaacatcgaagaaactcattggctgagtaacctcgagtccacccattggctggaacacatcaaactgattctggctggtgccctccggatcgccgataaagtggagagtggaaaaacctctgtggtggtccattgttccgacgggtgggatcgcactgcacagctgacttctcttgctatgctgatgcttgatggatattatagaaccatcagaggatttgaggtactggtggagaaagaatggctgtccttcggtcatagattccagctgcgggtgggtcacggcgataagaatcacgccgatgccgatcgaagcccagtctttctgcagttcatcgactgtgtgtggcagatgacacgacagtttcccacagcttttgaatttaatgaatatttcctgattaccattttggaccatctttacagttgtctctttggaacattcctgtgtaactccgaacaacagaggggaaaggagaacctgcccaaacgcacggtttctctgtggtcctacataaacagccagctggaggatttcaccaaccctctctatggctcatattcgaatcacgtcttgtatcctgtggcgagtatgcggcacctcgaactgtgggtggggtactacattagatggaacccacggatgaaaccccaagagcccatccataatcggtataaggagctgctcgcaaagcgtgctgaactgcagaaaaaagtggaagaattacagagagaaattagcaataggagtacctctagctccgaaagagcatcaagccccgcccaatgtgtgactcccgtacagactgtggtgtag

SEQ ID NO: 125574 - DNA, 1716 bp, synthetic construct
  misc_feature 1..1716: note = Description of Artificial Sequence: Synthetic coding sequence
  source 1..1716: mol_type = other DNA
atggaggagccacccctacttccaggagagaacatcaaagacatggcgaaagatgtaacctacatttgcccgttcactggggcggtgagaggaaccctgaccgtgaccaattatcgcctctattttaaatcgatggagcgggaccctccatttgtgctggacgcctctctcggcgtgatcaatagggttgagaagattggaggcgcttcttcccggggtgaaaacagctacgggttggaaacagtgtgtaaggacattagaaatttgaggtttgcacacaagcctgaagggcgcacaaggaggagcatctttgagaacttgatgaagtacgccttcccagtatctaataacctgcctcttttcgcctttgaatacaaagaggtttttccagagaatggatggaagttgtatgatccactgttggagtacagacgccagggtattcccaacgaatcctggagaatcaccaagatcaatgagaggtacgaattatgcgatacctacccagcactgctggtggtaccagccaatatccctgacgaggaactgaagagggtagcgagttttaggtcccgcggccggattccagtgttatcatggatccaccctgagagccaggctacaattacgcgctgcagccagcccatggtcggagtgtctgggaagagatcaaaggaggatgagaaatacttgcaagctatcatggattcaaacgcgcagagccataagatctttatttttgacgccaggccctccgtgaacgcagtagccaacaaggctaaaggaggcggatatgaatccgaagatgcctatcagaatgccgagctcgtgttcctggatattcataacatccatgtcatgcgcgaatccctgcgaaaactaaaagaaattgtgtatcccaatattgaagaaactcactggctctccaatctcgagtcaacccactggctggaacacataaaactcattctggcaggcgccctacggatagccgataaggttgagtccgggaagacatctgtggttgtgcactgctcagacgggtgggaccgaaccgcgcaactcacgagtttggcaatgctgatgctggatggctattacagaacaattcgcggcttcgaggttctagtggaaaaggaatggctcagctttggccacaggttccagcttagggtaggacacggggacaagaatcacgcagacgcggatcgctctcctgtgtttttgcaatttattgactgtgtttggcaaatgactcgtcagttccccaccgctttcgagttcaacgagtactttctaatcacaattctcgaccacctgtattcctgcctgttcggcaccttcctgtgcaattccgaacagcagaggggcaaggagaatctacccaagcgtacagtttccctgtggagttatattaattcccaactggaagactttactaaccccctgtacggttcttattccaaccacgtgctataccccgtggctagtatgcgccacctggagctgtgggtgggctattacatcaggtggaatcctagaatgaagccacaagaaccgattcataaccgctataaggagttgttggctaaacgcgcagaattgcagaagaaggttgaggagttacagagggagatcagcaaccgtagcacctctagtagcgagcgggcaagcagtccagctcagtgtgtaactccagttcagaccgtggtatag

SEQ ID NO: 125575 - DNA, 1716 bp, synthetic construct
  misc_feature 1..1716: note = Description of Artificial Sequence: Synthetic coding sequence
  source 1..1716: mol_type = other DNA
atggaggagccacccctgttgcctggcgagaacataaaggacatggcaaaggatgtcacatatatctgcccctttaccggcgccgtcaggggtaccctaactgttaccaactaccgactgtacttcaagtccatggaaagggacccaccgtttgtgctcgatgcatcactgggcgttataaatagggttgaaaagattgggggggcgagttcaaggggcgagaacagttatggtctggagacagtgtgcaaggacatccgcaatctcagatttgctcataagcccgagggaaggacacgaaggtcaatctttgagaatctgatgaaatatgcctttcctgtctcaaacaacctccctctttttgctttcgaatacaaggaagtgttccctgagaacggttggaagttgtatgacccgctgttggagtatcgtagacagggcataccaaacgagtcctggcggattaccaaaattaatgaaagatacgaattgtgcgatacataccccgccctgctcgtggttcccgcaaacataccggatgaagagctgaagcgtgtggcctccttcagatctaggggcaggatcccagtcctatcatggatccatcccgaatcccaagccacgattacccggtgctcccagcctatggtaggcgtgagcggcaagaggtcaaaggaggatgagaagtacctgcaagccataatggactcaaacgcgcagtctcacaagatcttcatattcgacgctcgccccagcgtcaacgcagtcgcgaacaaagcaaagggcggaggatacgagtcagaggacgcctatcagaacgctgagctggtcttcctggacatacacaacatacacgtaatgcgcgagagtctccgcaagctgaaggagattgtatatcccaatatcgaggagacgcactggttgagcaacctggaatccacccactggcttgaacatataaagctgatcctggccggtgcgctgcggattgccgacaaagtcgagtcagggaagaccagcgttgtagtgcactgcagtgatggctgggatagaaccgcccagcttacctctctcgcaatgctgatgctggacggttattaccggacaattcgcggttttgaggttctggtggagaaggagtggctctcattcggccatcgatttcaactgcgggtcggacacggagacaaaaaccatgctgatgccgatcgatcaccagtattcctgcaatttattgactgtgtttggcagatgacccggcaattcccaaccgcattcgaattcaacgagtattttctgattactatcctcgaccatctatactcttgtttattcggcacatttctttgcaactcagaacaacagaggggcaaggagaatctgcccaagagaactgtgtccttgtggtcttacattaactctcaacttgaagatttcaccaatccactttacggctcgtattccaaccacgtactgtatcccgtggcatcaatgcggcacctcgagctgtgggtggggtactatattaggtggaacccccggatgaaaccacaagaacccattcacaacagatataaagaactgctcgctaagcgggccgagttacaaaagaaggtggaagagcttcagagagaaatatcaaatcggagtacatcaagttctgaacgagcttcatcacctgcacagtgcgtcacacccgtgcaaactgttgtgtag

SEQ ID NO: 125576 - DNA, 1716 bp, synthetic construct
  misc_feature 1..1716: note = Description of Artificial Sequence: Synthetic coding sequence
  source 1..1716: mol_type = other DNA
atggaagaacctcctctgctcccgggagagaacatcaaggacatggctaaggatgtgacttacatttgccctttcacaggagcggtgcgcggcacgctgaccgtaacaaactaccgcctttattttaagtctatggagagagatccacccttcgttctggacgccagtcttggcgtcatcaaccgagtggagaagattggaggagcttcgagtagaggggagaattcttatgggctcgaaactgtatgtaaagacatcagaaatctgcgttttgctcataaaccagagggccgcacccgccgctctatctttgagaacctgatgaaatatgcctttccagtgtcaaacaacctgccactcttcgcatttgaatataaggaggtattccccgagaatggttggaagctgtacgacccattgctcgagtaccgcaggcaaggcataccgaacgagtcctggagaattaccaagatcaatgagcggtatgagctttgcgatacttaccctgccctgctcgttgtacctgcgaacatcccggacgaggagcttaagcgggttgcctcctttcgctctcggggccgcatccctgtgctgtcttggattcatcctgagagtcaagcaacgataactcggtgcagtcaacctatggtgggagtgagtggaaagcgcagcaaagaagatgaaaagtatcttcaggccatcatggattcaaatgcgcaatcacataagattttcatctttgatgctagacctagtgtgaacgccgtggccaataaagccaagggaggtggatacgagagcgaagacgcctatcagaatgctgaactggttttcctggatatccacaacattcacgtgatgagagagtctctacgcaaactgaaagaaatagtctatccaaatatcgaagagacacactggctaagtaacctggagtctacacattggctggagcacattaaactgatccttgcaggagccctgagaatcgccgacaaggtcgaatcagggaaaacctcagttgtagtgcactgttcagacggctgggatagaaccgctcagcttacctctctcgctatgctcatgctggacgggtactaccgtacgatcaggggcttcgaagttctcgtggagaaggaatggttgtcttttggtcacaggttccagcttagagtgggacatggagacaaaaatcacgctgatgcagacagatcaccggtcttcctgcaattcatcgactgcgtttggcagatgactcggcagtttcctacagcgttcgaatttaatgagtacttcctgattaccatcttggaccatctctacagttgtctgtttggtacgttcttatgcaactctgagcagcagcgtgggaaagagaacctgcctaagcggaccgtgtcactgtggagctacattaatagccagctagaagatttcactaatcctctgtacgggtcttattctaaccatgtgctttatccagtggcctcaatgcgccacctggaattgtgggtcggctactacatacgatggaacccccgcatgaaaccccaggaaccgattcataatagatacaaggaactgctggccaagagggctgaactgcagaagaaggtggaagagctccaaagagaaataagtaataggagcacctcaagctcagagagggctagctctcccgctcaatgcgtaacccccgtacaaaccgtggtttag

SEQ ID NO: 125577 - DNA, 981 bp, synthetic construct
  misc_feature 1..981: note = Description of Artificial Sequence: Synthetic coding sequence
  source 1..981: mol_type = other DNA
atgctggcggtcgccctgaccatcttgtctgctagtaccagtcatagcgaaaatagtgtccacactaagtccgcctcagtcgtctccagcgattcgattagtacttcagccgacaactttagcccggacctccgagtgctgagagagtctaacaagctggctgagatggaggagcccccgttgctgccaggggagaacatcaaagatatggccaaagatgtaacatatatctgtccattcactggagcagtgcgggggaccttgacggtcacaaactacagactgtacttcaaaagcatggaaagagaccccccatttgtcctcgatgcatccctgggcgtgatcaaccgggttgaaaagatcggaggggcttcaagtaggggcgagaactcttacggcttggaaaccgtgtgtaaagacattaggaacctacgatttgctcataaaccagagggccggactcgccgctcaatatttgaaaacctgatgaaatatgcctttcctgtcagcaacaacctgcctctcttcgcttttgaatataaagaggtttttccagagaacgggtggaaactgtacgaccccctgctggagtataggcggcagggcatccctaacgagtcttggaggatcactaaaataaacgaacgctatgaactgtgtgatacctacccagctctgctcgttgtgcccgccaacattccggacgaggagctcaagcgcgtggctagtttccgcagtcggggacgaattccagtcctctcctggatacaccccgagagtcaggcaacaattaccaggtgtagtcagccgatggttggtgtgtccgggaagcggtctaaagaggacgaaaagtacctccaggccattatggatagcaacgctcagagccacaaaatctttatctttgatgcccggccatctgttaatgcagtagccaacaaggcaaaaggaggcggctatgagagtgaggacgcctactag

SEQ ID NO: 125578 - DNA, 3513 bp, synthetic construct
  misc_feature 1..3513: note = Description of Artificial Sequence: Synthetic coding sequence
  source 1..3513: mol_type = other DNA
atggatgaagagactagacactcactcgagtgtatacaggcaaaccaaatctttccaagaaaacagctcatccgtgaggacgaaaatttacaggtccccttcctcgagctgcacggggagtccactgaatttgtgggcagggccgaagacgccatcattgccctgtccaactaccggctccacattaaatttaaagaaagtctggtgaatgtgcccctccagctgatcgagagcgtggagtgccgagacatcttccagctgcacctgacttgcaaggactgtaaagtaattaggtgccaattttctacttttgaacagtgccaagagtggttgaaaaggttaaacaatgccataaggccaccagccaagatcgaagacctcttttcctttgcctaccacgcttggtgtatggaagtgtatgcatctgagaaagagcagcacggggatttatgccggcctggcgagcacgtgacttcacgctttaaaaacgaagtggagaggatgggatttgatatgaacaacgcctggcgcatcagtaatattaacgagaagtataagctgtgtggcagctacccccaggaactcatagtgccagcttggattaccgataaagagctagagagcgtcagttcattcagaagctggaaacgtattccggccgtaatctaccgtcaccaaagtaacggtgccgtgattgcacggtgcgggcagccagaggtgtcatggtggggttggaggaatgccgacgacgaacatctggttcagtcagtggccaaggcgtgtgcctcagatagtaggagctccggttctaaattgtcaaccaggaatactagtagagattttcctaatggcggtgacctgtccgacgtggaattcgattcgagtctaagtaacgcctctggtgcggaatcccttgcaattcagccccaaaaactacttattctggacgcccgatcttacgccgccgctgtggccaacagagcaaagggcggagggtgtgaatgtcctgaatactatcccaattgcgaggtcgtgttcatgggtatggccaacatacacagtatccgtaggagcttccagagcttgcggcttctatgtacgcagatgccggatcccggcaattggttgtcagctctggagtcgactaaatggttacatcatcttagtgtccttcttaaatctgccctgctcgtcgtccacgccgtcgatcaggaccagaggccggttctagtgcactgttccgatggttgggatagaacaccacaaattgtggctctagccaaactgctgctcgacccttactatcggaccatcgaaggcttccaggtcctcgtagaaatggagtggctcgattttggccacaaattcgccgatcggtgcggacatggggaaaacagtgacgatctgaacgaaaggtgtcctgtgttccttcagtggctagactgtgtccatcagcttcagcgacagtttccttgctccttcgaatttaacgaggcctttcttgtcaagctagtacagcacacctacagctgtctgttcggcaccttcctgtgtaataacgccaaggaaaggggcgagaaacatacccaggagcgaacgtgtagcgtctggagcctgctgagagccggcaataaggcattcaagaatttactgtacagctctcaatcagaagccgtgctgtaccccgtatgccatgtaaggaatctcatgctttggagcgctgtgtacctcccgtgcccatcacccaccacccccgtggatgactcttgcgccccgtaccccgcccctggtaccagtcccgatgacccaccattgtctcggctgcctaaaacacggagttacgataacttgactacagcctgtgacaatactgtgcctttggcctctcgccgctgcagtgacccaagcttaaacgagaagtggcaagagcacagaaggtctctagaattgtcgtcattggccggcccaggcgaggaccctctaagcgccgacagcttgggcaaacccacgagggtgcctggcggagccgagctgagcgtcgccgccggcgttgccgagggacagatggagaatattctacaggaagccacaaaggaggagagcggtgtcgaggagcccgcgcaccgagccggcatcgaaatacaggagggcaaggaagatcctctgctggagaaggagtcaagacgaaagacacccgaagcatcagctatcggcctgcatcaggaccctgagttaggcgatgcagcccttcgatcacacctggatatgagttggcctctattctcacagggaattagtgagcaacagtctggactatccgtgctgttgtcctcccttcaggtcccaccaaggggggaagactcactggaggtgccggttgagcaattccgaatagaggagatcgctgaggggagggaagaagccgtcttaccgatcccagtcgacgccaaagtgggttacggaacatcacaaagttgttccctgctccccagccaggttccttttgagactcgaggacctaatgtggatagctctactgatatgcttgtggaggacaaagtcaaatccgtgtctggaccgcagggacaccaccgcagctgcctcgtgaactcgggtaaagaccgacttccccagacaatggaaccatcgccatccgagaccagcttagtggaacggccccaagttgggtcggtggtccatcgcaccagcctcggctccacgctgtccctcacccggtcaccgtgcgctctgccccttgctgaatgtaaggaaggactggtctgtaatggcgcaccagagacagagaatagagcctcagaacagccccccggcctgtcaaccctgcagatgtacccaacccccaatggtcattgcgccaatggagaggcggggcgcagtaaggattcactcagtcggcagctatccgccatgagctgctcgtcggctcacctgcactcccgcaacctgcatcacaagtggctgcacagccatagcggacgcccctcagccactagcagccccgatcaacccagccgtagtcacctcgacgatgatgggatgtcagtctataccgataccattcagcagcgacttcggcaaatcgagtcgggccaccagcaagaggtggagaccttaaaaaagcaggttcaagagctaaagtcaaggctcgaaagtcaataccttacaagtagtctgcactttaatggggattttggcgacgaagtgatgactcgatggctccccgaccacctggccgcccactgctacgcatgcgacagtgcattttggctcgcttcgcgtaagcaccactgtagggatacggaccgcgtggaccagacctggaactgcggtaacgtcttttgctctagctgctgcaaccagaaagtgccggtgccaagccagcagcttttcgagccatccagagtatgtaagagctgctacagctccctccacccaacaagtagcagcatcgatctggagctagataagccaattgcagccacctccaactag

SEQ ID NO: 125579 - DNA, 3486 bp, synthetic construct
  misc_feature 1..3486: note = Description of Artificial Sequence: Synthetic coding sequence
  source 1..3486: mol_type = other DNA
atggacgaagaaactcgacactccttggaatgcatccaggctaaccagatcttccccagaaaacaattgatccgagaagatgagaatctgcaggtgccttttttggaactgcacggtgagtcaacagagtttgtgggacgtgcagaagatgccattatcgccctgtcgaactatcgactgcacatcaaatttaaagagagccttgtcaatgttcctctccagctgatagagtctgtcgaatgtcgagatatcttccagctgcatctcacctgcaaggactgcaaagtcatcaggtgtcagttctccacattcgagcaatgtcaggagtggcttaaacgtctcaataacgccattaggcctccagctaagattgaggatctgttcagtttcgcctaccatgcatggtgtatggaagtgtacgcttccgagaaagagcagcacggtgatctctgcaggcccggcgagcacgtgacctctagattcaaaaacgaagtcgaacgtatgggctttgacatgaataatgcatggaggatcagtaatataaatgagaagtataaactttgtggcagctacccacaggaactgatagttcccgcttggatcacagacaaagagctggagtccgtcagctctttccgtagctggaaaagaatccccgccgtgatttatcggcaccagtctaacggagcagtaatcgctagatgtggccagcctgaggtctcctggtggggttggcggaatgctgacgatgaacatctagtgcagtccgttgccaaggcctgcgcctcggacagtaggagctcagggtcaaaactgagtaccaggaatacctcacgggactttccgaacggcggagacctcagtgatgtcgagttcgacagcagcctgtccaatgcaagcggggcggagtctctggctatacagccacagaaactactgattctggatgctcggtcttatgcagcggcagtggctaatcgcgcaaaagggggaggctgcgaatgtcccgagtattatccaaattgtgaggtggtttttatggggatggctaatattcacagcatacgtcgcagcttccaatcattgcggctgctctgcacccagatgcctgaccctggaaattggttaagcgccttagagtccacaaagtggctgcatcatttatccgtcctactgaaatcagcccttctcgttgtgcacgccgtggatcaggatcagagacctgtgcttgtccactgctcagacggttgggaccgcacgcctcagatcgtggctctagccaaactgctccttgatccgtattataggaccattgaagggtttcaggtgctggtcgagatggaatggctggattttggtcacaagttcgccgatcggtgtggccacggcgagaattctgacgacttgaatgaacgctgccccgtgtttctgcagtggcttgattgcgttcatcagctccagcgccagttcccttgtagctttgagtttaacgaggcattcctggtcaaattggttcagcacacctatagctgcctgttcggaacatttctttgtaataatgccaaggagcgaggtgaaaagcacactcaggagcgcacatgttctgtctggtcactcctacgcgctggcaataaggcgttcaagaatctgctttattcctctcaaagcgaagccgtgctatatcctgtctgccacgtgaggaatctgatgctgtggtcagccgtgtacctgccttgcccttccccaacaacgccggtggatgattcatgtgccccatacccagctcctgggacttctccggacgatccccctctgagccgtctgcccaagacgagatcctacgataatctcactacagcctgcgacaacaccgtgcctttagcctcccgcagatgcagcgatccaagcctgaacgagaagtggcaggaacaccgccggagcttagagctttcttctctggccggtccaggcgaagatccactgagcgcagactcgttaggaaaaccgacgagagtgcccggtggagctgagctctctgtcgccgccggtgtagcggaggggcaaatggagaatattctgcaggaagcaacaaaggaggaatccggcgtggaggaacccgcgcacagggccggaatcgaaattcaggagggaaaggaagacccactactagaaaaggaaagtagacggaagactcctgaggccagcgccatcggtctccaccaagacccagagttgggcgacgcagcgctcaggtcccacctggatatgtcttggcccctattctctcaaggcattagtgagcaacagtctggtctgtcggttctgctctcaagcctgcaagttcctcctcgtggcgaggatagcctggaagtccccgtggagcagtttcggatcgaggagatagctgagggcagagaagaagctgtccttccgattcctgtcgatgctaaggtgggctacggcacttctcagagttgttctcttttaccttctcaagtccccttcgaaaccagaggtcccaatgtcgactcctccaccgatatgctggtcgaagacaaagtgaagagtgtgtcaggcccacagggccatcatcggagttgtctagtgaatagtggcaaagacaggctgccccagacaatggaaccctccccttctgagacaagtctggtggagcggccccaggttggctccgtggtgcatcgaacatcactcggctcaaccctgtctctgactcgctcaccatgcgctctccccctggctgaatgcaaagaaggtttggtctgcaacggagcccccgagactgagaatcgggcttccgagcagccccccggcttgtcaacgttgcagatgtatcccacccctaatggacactgcgccaatggggaagccggaaggtctaaagatagcctctcacgccagctcagcgcgatgtcatgctctagcgcacacctgcacagcaggaacctgcaccataaatggctccactcacactcaggcagaccatcagctaccagcagcccagaccagcctagccgttcccacctggatgacgatggcatgtctgtgtacaccgataccatccagcagcggttacgacagattgaaagtggccatcagcaggaggtcgagacgttaaaaaagcaggtgcaggagctgaaatccaggcttgagtcccaatacctgacaagttccctgcactttaatggtgacttcggtgatgaggtgatgaccagatggctgcccgaccatttagccgctcattgctacgcctgcgactccgccttctggctagcttcacgtaagcaccattgtagaaactgtgggaatgtattttgctccagttgttgtaatcagaaggtgcctgtcccctcgcagcaactgtttgaaccttctcgggtttgcaaatcatgttattccagtctccaccccaccagtagcagcatagatttggagttggacaaacccatcgcagccacctcgaactag

SEQ ID NO: 125580 - DNA, 3597 bp, synthetic construct
  misc_feature 1..3597: note = Description of Artificial Sequence: Synthetic coding sequence
  source 1..3597: mol_type = other DNA
atggatgaggagacccggcactcactggaatgtatccaggccaatcagatcttccctaggaagcagcttattagagaagacgagaatctgcaggtgccattcctcgaactccatggtgaaagcactgagtttgtgggacgtgcagaggatgccatcatcgccctgtcaaattatcgtttacatatcaagttcaaggaatccctggtaaacgtgcctctccagctgatagaatctgtggagtgccgcgacatttttcagttacacctgacatgcaaggattgtaaagtcatacgttgccagttctccacattcgagcagtgtcaggagtggctgaagagactaaacaatgcaatccgacctccagcaaaaatcgaggacctgttttcattcgcttaccacgcttggtgcatggaggtatacgcctctgagaaggagcagcacggagacctctgtcggcccggggagcatgtaacttcccgattcaagaatgaggtggagcgaatggggtttgacatgaacaatgcctggcgaatttctaacattaacgagaaatataagttatgtggcagttatccccaggaactcatcgtgccagcttggatcacggacaaggagctggaaagcgtgagtagttttcggtcatggaaaaggattccagccgtcatttatagacatcagagcaacggcgcagtgatcgcccggtgcggccagcctgaggtgtcctggtggggctggcggaatgccgacgacgagcatctggtgcagtctgtggccaaggcctgcgcctctgactctcgctcgagcggttcgaagctgtcgactcggaacacatctcgggattttcctaatggcggagacttatccgacgtggagttcgacagctccttaagcaatgcatccggtgctgaatctcttgcaattcagccacaaaagctcctgatcttagacgctcggtcctacgctgccgccgtcgcgaaccgagctaagggcggcgggtgtgagtgtcccgaatactacccgaattgtgaagtggtgttcatgggcatggccaacatacactctatcagacgctccttccaaagcctgaggctgctttgcactcaaatgcccgaccctggtaactggctgtcagctttggagagcactaagtggctgcatcacttgagcgttcttcttaagtcagccttgctggtggtgcacgcagtagatcaagaccagcgccccgtgcttgtgcactgttccgatgggtgggatagaaccccacagatcgttgcattggcaaagttactgctggacccttattatcgcaccattgaggggttccaggtcttggtcgagatggagtggctggattttggacacaaatttgctgatagatgcggacatggggagaacagcgacgacctaaatgaaaggtgtccggttttcctccagtggctggattgcgtgcatcagttacagcgacagttcccctgttcttttgagttcaacgaggcattcctcgttaagttggtacaacatacatacagctgcctgttcggcacttttttgtgcaacaacgcaaaggagcgcggtgaaaagcatactcaggagcggacttgtagcgtgtggtctctgcttcgagcgggtaataaggctttcaaaaacttactctattcctcccagtcagaagcggtgctttacccagtttgtcacgttagaaatctgatgctttggtccgccgtttacctgccatgcccgagccccaccactcctgttgatgactcctgcgccccctaccccgcccccggcactagtccagatgatcctcccctgtcacggctcccaaaaaccaggtcttacgacaatctcacgactgcatgcgacaatactgtccccctcgcatcacgcagatgtagtgaccccagcctgaatgagaaatggcaggaacaccggagaagtctggaactttctagtttggccgggcccggggaagaccccctgtctgctgactccctaggcaaacccacacgggtacctggcggcgccgagctttccgtggctgcaggagtggctgaaggacagatggaaaatatactgcaggaggcaacaaaggaggaatccggggttgaggagccagcccacagggccggtatcgaaatccaggagggaaaagaggacccactgttggagaaggagagtcgacgtaagactccggaggccagcgccattgggctgcatcaggaccctgagcttggcgatgccgccttgcggtctcatctcgacatgagctggcctctgttttcccaaggaatatctgagcagcagtctggcctgtcagttctcctgtcatcactccaggtcccccctaggggtgaggactccctcgaggtgcccgtggagcagtttcggattgaagaaatagctgaaggcagggaggaggctgtcctgcctatccccgtggatgctaaggtgggatacggcacttcacagtcatgctcccttttgccctcccaggtgcccttcgagacccgcggccccaacgttgatagctccacagacatgctggtcgaagataaagtgaaatctgtgtcaggccctcagggacaccatagatcttgtctcgtgaactctggaaaggacagacttccccagacaatggaacccagtccgtcagagacttcattggtggagcgacctcaggtgggcagcgttgtgcatcggacaagcctgggctcaaccctcagtctgactcggtcaccatgcgccctcccccttgcagagtgtaaagaaggtttggtgtgcaacggggcgcctgagaccgagaatcgagcatcagagcagcctccaggcctcagcaccctgcagatgtaccctacgcccaacgggcactgcgcaaacggcgaagccggccgctctaaggattccctctctaggcagctctcggcgatgtcatgctcgtccgctcatctgcattctcgcaatctgcatcataaatggctgcatagtcactctggaagaccttctgcgaccagcagccccgatcagcccagcagatcccatctggacgacgatggaatgagcgtgtatacggatacaatacagcagcggctgcgccagatcgagtcaggtcaccagcaagaagtcgaaaccttgaaaaaacaggtgcaggagctgaagtccaggctcgagagccagtacctaacatcctccttgcatttcaatggggattttggggacgaagtaaccagcatccctgactctgaatctaacctggatcaaaattgtcttagcagatgtagcactgagatatttagcgaggcttcatgggaacaagtcgacaagcaggatactgagatgactcggtggttgcctgaccatctggctgcacactgctatgcctgcgacagcgccttttggcttgcaagcaggaaacaccactgtaggaactgtggaaacgtgttctgtagttcctgctgcaatcaaaaagtgcctgtgccgtcccagcagcttttcgaaccctccagagtgtgtaaatcttgctacagctccttgcatccaacttcctctagcattgatctggaattggataagccgatagcagccacaagtaactag

SEQ ID NO: 125581 - DNA, 3513 bp, synthetic construct
  misc_feature 1..3513: note = Description of Artificial Sequence: Synthetic coding sequence
  source 1..3513: mol_type = other DNA
atggacgaggagacccgccactctctggaatgcattcaggctaatcaaattttcccccgaaagcagctcattcgtgaggacgaaaacctccaggtcccattcctcgagctgcatggcgaatccacggagtttgtcggtcgtgctgaggatgcgattattgcattgtctaactacagacttcacatcaaattcaaggaatctctagtaaacgtgccgttacaattgatagaatctgttgagtgtcgtgatatcttccaactgcacctaacctgtaaggactgtaaagtgataaggtgccagttttctacttttgagcagtgtcaggaatggctgaaaagattaaataacgccattagaccgcccgccaaaatcgaggatctattctcttttgcttatcacgcttggtgcatggaagtctatgccagcgaaaaggagcagcacggcgatctctgccgacctggtgaacacgtcaccagccggtttaagaacgaagtcgagcgtatggggtttgatatgaacaatgcttggcggatatcgaatatcaacgaaaaatataagctttgcgggtcttatccccaggaattgattgttccagcgtggataactgataaggaactggagtccgtgagctccttcagaagctggaaaagaattccagccgtgatctaccgccaccagagcaatggagcagtgatcgcccggtgtggacagcctgaggtgagttggtggggatggcggaacgccgatgacgagcacctggtccagtcagtcgccaaggcatgtgcctcggatagtagaagttccggaagcaagttaagcacgcggaacacatcccgcgatttccctaacggaggagatctgagtgatgttgagtttgactcttcgcttagcaacgcctccggggctgagagcttggcaatccagccccagaagctactcattctcgacgctcgctcatatgcggctgccgtcgcaaaccgggcgaaaggaggcggctgtgagtgccccgagtattatcccaactgcgaggtggttttcatgggcatggcaaacatccacagcattcgtaggagtttccagtcgttaagacttctgtgtacccagatgccggatcccgggaattggctgtctgccttggagtcgacgaaatggttgcatcacctctccgttctattgaagagtgctctcctcgtggtgcacgcggttgatcaggatcagcgaccggtgctcgtgcactgctctgatggctgggacagaacgccacaaatagttgctctggccaagctgcttctcgatccctattaccgaactattgaggggttccaggtgctagtcgaaatggaatggctggacttcggacacaaatttgccgatcgctgtggccacggagagaacagtgacgacttgaacgagcgctgcccggtcttccttcagtggctagattgcgtacaccagctgcagcgccagttcccatgttctttcgagttcaatgaagcctttttagtgaagttggtccagcatacctactcatgcctgttcggtacattcctgtgcaataatgcgaaagaacggggagaaaaacacacccaggaacggacatgttccgtttggagcctgctgagagcaggaaacaaagcttttaagaatctgctctattccagccagagtgaagccgttctataccctgtatgccacgtacggaatctaatgctgtggtctgctgtctatttaccttgcccgtccccaacgactcccgtggacgatagttgcgccccataccccgcacctggaacctcacctgatgaccctcctctttccagacttcccaaaacaaggtcctacgataacctgacaaccgcctgtgataacaccgtccctttggcctccagaagatgtagtgatccatccctcaacgaaaagtggcaggagcatagacggagtttggagctctcctctctcgcgggacctggggaagatcccttgtcagccgattccctgggaaaacccactcgtgtgcccggcggcgctgaactgtcagtcgccgccggggtggctgagggccaaatggagaatattttacaggaggccaccaaagaagagtcgggggtcgaggagcctgctcaccgcgccggtattgaaattcaggaagggaaagaggatccactgctggagaaagagagtagacgaaagactccagaggcatctgcgatcgggcttcatcaggacccagaattgggtgatgccgccttgcgctctcacctcgacatgtcatggcccctgtttagtcaggggattagcgaacagcaatccgggttatccgtgctactgtcaagcttgcaggtccccccaagaggtgaagacagtctcgaggtaccggtcgaacagttccgcattgaagagatagccgagggacgcgaggaggccgtgctgcctatcccggtcgatgccaaagtgggatatggaacctcgcagtcatgctctctcctcccctctcaggtgcctttcgaaaccagagggcctaacgtggacagttcgacagacatgctggtggaggacaaggtgaagagcgtcagtggaccccagggccatcacagaagctgccttgtcaactctgggaaggatagactgcctcagactatggaaccatcacccagcgaaacctctctggtcgagcggcctcaggtgggctccgtagtacaccggacttcccttgggagtaccctgtcccttacacggtctccgtgcgccctccccctcgccgagtgtaaggaagggttggtgtgcaacggagccccagaaaccgagaatcgagccagcgagcagccaccgggcttgagcacccttcaaatgtaccccaccccaaatggccactgcgccaatggcgaagccggtcgctctaaggactccctgtccaggcaactcagcgctatgagctgttctagcgcccacctgcactcccgcaacctgcaccacaagtggctgcactcccactccggcaggccatccgccacttccagccctgaccagccaagccgctcccatctcgatgatgacggaatgagtgtgtacactgacactattcagcagcggttgagacaaatagagtcaggccaccagcaagaagtggagacccttaaaaagcaagttcaggagctcaaaagtcggctcgaatcccaatatttgacctcctccctgcactttaacggggacttcggcgatgaggtgatgacccgctggctcccagaccacttggctgctcactgttacgcctgtgactctgcgttctggctcgccagccggaagcatcactgcagagataccgatagagtggatcagacctggaattgcggcaatgttttttgttcttcttgctgtaaccagaaggtacccgtcccaagccaacagctctttgagcctagtcgggtgtgcaagagctgctatagcagcctgcaccctaccagctcctccatcgatttggagctggacaagccgattgcagctacttccaactag

SEQ ID NO: 125582 - DNA, 420 bp, synthetic construct
  misc_feature 1..420: note = Description of Artificial Sequence: Synthetic coding sequence
  source 1..420: mol_type = other DNA
atggacgaagagaccaggcactctctggaatgcatccaggcaaatcagatttttcccagaaagcagttaatacgggaagatgaaaatctgcaagtgcccttcctagaactacacggcgagtcaactgagttcgtcggccgagccgaggatgcaattattgccctgagcaattatcgtttgcacattaagtttaaagagagccttgtcaacgtgcctttgcagcttatagagagcgtagaatgccgagacatttttcagttacacctcacttgcaaggattgtaaggttatccgatgccagttcagcacctttgagcagtgccaggagtggctcaagcgattgaataacgcaatcagaccacccgccaaaatcgaagacttgtttagcttcgcctatcatgcttggtgtatggaggtttag

SEQ ID NO: 125583 - DNA, 3588 bp, synthetic construct
  misc_feature 1..3588: note = Description of Artificial Sequence: Synthetic coding sequence
  source 1..3588: mol_type = other DNA
atgggcgaagagggccccccttcgctggaatatatccaagctaaagaccttttcccccctaaggagctcgtgaaggaggaagagaatctgcaagtgccctttaccgtcctccagggagagggagtcgaatttctcggtcgcgccgcggacgcgctcatcgcgatttccaattaccgactgcatatcaaattcaaggactcagtcataaacgtgccattgcggatgatcgatagtgtagaatctcgagacatgtttcagctacatatttcctgcaaggatagcaaggtggttaggtgccactttagcacttttaagcagtgccaggagtggctatctcgcctaagccgcgccactgcccgaccagccaagccagaagatttgtttgcttttgcctaccatgcatggtgtctggggctgactgaagaagaccagcatactcatctctgccaacccggcgagcatatcaggtgtagacaagaagcagagttggcacgcatgggattcgacctgcagaatgtctggcgggtttcccacatcaattcaaattataaactttgccctagctatccacagaagctgctcgtccctgtgtggatcaccgataaggagctggaaaacgtggcttcctttagatcctggaaacggatcccagtggttgtctaccgccacttgaggaatggggctgctatcgccagatgtagtcaacctgagatttcatggtggggctggcggaatgctgacgacgagtatcttgtgacgtcaatcgccaaggcctgcgccctggaccctggcactagagcaacaggaggatccttgtctacaggaaataatgatactagcgaggcttgtgacgctgactttgactcctctttgacagcgtgttctggcgtggagtcgacagcagcacctcagaaactcctcatcctcgatgctcgctcttacaccgcagcggtggccaatcgggccaagggcggcggatgcgagtgtgaagagtactatccaaattgtgaagttgtattcatggggatggcgaatatccacgccattcgcaacagttttcagtacctccgggcagtgtgctcacagatgcccgacccatctaactggctttccgcgttggaatcaaccaagtggctgcagcacctctcagtgatgctgaaggccgctgtgcttgttgccaacaccgtcgatcgggagggccgcccggtactggttcactgctccgacgggtgggaccgcaccccgcagattgttgccctggcaaagatcctactggacccatactacagaacactggaaggtttccaggtcctggtggaaagcgactggctggatttcggccacaaattcggtgaccgctgtggtcatcaggagaacgtggaggatcagaacgaacagtgtcccgtctttttgcagtggttggactctgttcaccagctgctgaagcaatttccttgcctctttgagtttaatgaggctttcctagtgaagcttgtccagcatacttactcatgcctgtacgggacctttctcgccaacaacccctgcgagcgcgaaaagagaaacatatataaacgcacttgctccgtgtgggctcttctgagggctgggaacaaaaatttccacaattttctctacaccccttcttctgacatggtcctccatccagtgtgccatgtcagagcactccacctgtggactgccgtgtatttacctgcatcttccccatgcacacttggtgaggagaatatggatttatatctgtctcccgtggcccagtcccaggaattcagcggccggagcctcgatcggctccccaaaacgcgctccatggacgatctattgtctgcctgcgacacaagcagtcctttaactcgaacctcgagcgacccaaatttaaataaccattgccaagaggtccgggtcggcctcgagccctggcacagtaaccctgagggatctgaaaccagtttcgtcgattcgggcgtgggcgggcctcagcaaactgtaggggaagtaggactcccgccccctctgccttcatcacagaaggactacctaagcaataagcccttcaagtcacacaaatcttgctctcccagctacaagctgctgaatacggcagtgccccgcgagatgaagtctaatacttccgatcctgagatcaaggtcctcgaggagacaaaaggccccgctccagacccatctgcacaagatgaactgggacgaaccctcgatggcatcggggagccaccagaacactgcccagagacagaagctgtcagcgcacttagcaaggtgatcagcaataagtgcgacggagtttgcaattttcccgaaagctcgcagaacagtcccacaggaacacctcagcaggcgcagccggactctatgctcggagtgccgtcaaaatgcgttctggatcactctttgtcgactgtttgcaatccccccagcgcagcttgtcagaccccccttgatcctagtactgatttcctcaaccaggacccatcaggctctgtcgcatctatctctcaccaggagcagctgtcctccgtcccagatctgacccacggtgaggaggacattggaaagcgggggaacaataggaatggacagctattggagaatcccaggtttggcaagatgcctttggaattagtgcgaaaacctatttcccagtcccaaataagtgaatttagctttctcggaagcaactgggacagcttccagggtatggtcacttcattccccagcggggaggccactccaagaaggctgctgtcctatggctgttgttctaaacgcccgaatagcaaacagatgagagccaccggcccttgtttcggcgggcagtgggcccagcgagagggagtgaagtcacctgtatgcagttcacacagtaatgggcattgtacaggtcccgggggtaagaaccagatgtggttaagctctcaccctaagcaggtgagtagcacaaagcccgtgcctttgaattgcccctcgcctgtccctccactgtatctggacgatgatggactgccctttccaacagacgtcattcaacataggctgcgtcagatcgaagccggctataagcaggaggttgagcaactgcggcggcaagtgcgcgagctgcagatgagactcgacatccgccattgttgtgcccccccagctgagccccccatggattatgaggatgattttacatgtctgaaggagagtgatggtagcgatactgaggatttcggcagcgatcactcggaagactgtctgtcagaagccagctgggaaccagtcgacaaaaaagagacagaagtgacacgatgggtcccagaccatatggctagccattgctacaactgtgactgcgaattttggctggccaagcggcggcaccattgccggaactgtggtaacgtattttgtgctggctgttgccatttaaaactccctatccccgatcagcagttgtacgatcctgtcttggtttgtaattcctgttacgagcacatccaggtgagcagggctcgcgagttgatgtcccagcagctcaagaaaccaatcgcaacggcaagttcatag

SEQ ID NO: 125584 - DNA, 570 bp, synthetic construct
  misc_feature 1..570: note = Description of Artificial Sequence: Synthetic coding sequence
  source 1..570: mol_type = other DNA
atgcccgtatggaaactgccctggaagttaagcgagggcaaacgtagggcacaggtcgaaggtgaggacctctttcccgtggctatatcttttggaaggcccaaagaagtactccctctttactcgtctgagagccacagatttaccgtcctggaacccaatactgtctccttcaactttaagttctggaggaacatgtaccatcaatttgatagaacactgcacccccgacaaagtgtattcaatattatcatgaatatgaacgaacaaaataagcaacttgagaaagacatcaaggacttagagagtaaaataaaacagcggaaaaataaacaaactgacggaatactcactaaggagttgttgcactcagtgcacccagagtcgcctaatctgaaaactagtctgtgctttaaggaacagaccctcctgccagtgaatgacgctctaaggactatcgaaggatccagcccagccgataacagatatagcgagtacgctgaagaattctccaaatccgagccagcggtggtgtctctcgaatatggagtggcccgtatgacctgttag

SEQ ID NO: 125585 - DNA, 1866 bp, synthetic construct
  misc_feature 1..1866: note = Description of Artificial Sequence: Synthetic coding sequence
  source 1..1866: mol_type = other DNA
atggagcatattcgcactaccaaagttgagcaggtaaagctgctggatcgcttttctaccagtaacaaaagcctcaccggcacactgtacctcacagcgactcatctcctctttatcgatagtcaccagaaagagacctggatcctccaccatcatattgctagcgtagaaaaactggcactcacgacaagtggctgtccccttgtgatacagtgtaaaaactttcgaaccgtccactttatcgtcccaagagagagagattgccacgatatatataactcattgctacagctgtcgaagcaggcaaaatacgaagacctatacgcgttttcttataaccctaagcagaacgattccgaacgcctccaagggtggcagctgatcgacctcgccgaagagtataagaggatgggtgttccaaactcccactggcagctgtccgacgctaaccgtgattacaaaatttgtgagacctacccccgggaactctacgtgccccggattgcatcaaagccgatcatcgtgggttcctctaaattcagaagtaaaggaaggttccccgtgctgtcatactaccaccaggacaaggaggcagcgatctgtcgctgcagtcagccattgtcgggattcagcgcacgatgtttagaagatgagcatctgctccaggccatctcaaaagctaatccggtcaatagatacatgtatgtgatggatacccgacccaaactgaatgccatggccaatagggccgctgggaaaggctacgagaacgaggataactattctaatattagattccagtttgtcggcatcgaaaatattcacgtcatgaggtcatctctccagaagcttttggaagttaacggtaccaaaggcctatctgtgaatgacttttactcaggcttggaatccagtggttggctgagacacataaaggctgttatggacgctgccattttcctggccaaggccatcactgtggaaaatgccagcgtgctggtacactgctctgacggctgggacaggacatctcaggtgtgtagtcttggcagtcttttgcttgactcctactacagaactattaaagggtttatggtccttatagaaaaggattggatctccttcgggcacaaattcagtgaaaggtgtggtcagctagacggagatccaaaggaagtgtcgcctgtgtttacacagtttctggagtgcgtgtggcacctaacagagcagttcccacaggcattcgagttttcagaagccttcctattgcagattcatgaacacatccacagttgtcagtttggaaatttcctcggaaactgccagaaagagcgggaggaactgaaacttaaggaaaaaacctactctttgtggcccttcttgctcgaggaccagaaaaaatatctgaatccactttactccagcgaatctcatagattcacagtgcttgagcccaatacagtgagcttcaatttcaagttttggcggaacatgtaccatcagtttgataggacattacaccctcggcaaagcgtgttcaacatcataatgaacatgaatgaacaaaataagcagctggaaaaggacattaaggacttggagtctaaaattaagcagcgcaaaaataagcagacagatgggatcttgacaaaggagctgctgcactctgtgcatcccgagagcccaaacctgaagacctccctgtgtttcaaggagcagaccctgctcccggtgaacgacgccctcaggaccatagagggtagcagccctgctgacaatagatactctgaatatgccgaggaatttagcaaatctgagccagcggtcgtctcacttgagtacggcgtagcacgcatgacgtgctag

SEQ ID NO: 125586 - DNA, 1647 bp, synthetic construct
  misc_feature 1..1647: note = Description of Artificial Sequence: Synthetic coding sequence
  source 1..1647: mol_type = other DNA
atggagcacattcgtaccacaaaggtggagcaagttaaactgctagaccgcttttccacttccaacaagagcctgactgggaccctgtatctgacagcaacccatctcctgtttatcgatagccatcagaaagaaacatggatccttcatcaccatatcgcaagtgtcgaaaaactggccctgaccacaagcgggtgccccctggtgatccagtgtaagaattttcgaacggtgcacttcatcgtgcccagggaacgagattgtcatgatatctataatagcttgctccagctgtccaagcaagcgaaatacgaagatttgtacgcgttctcatataaccctaaacagaacgactcagagaggttacagggctggcagctgatcgatctggccgaggaatacaagcgtatgggggtccctaattctcactggcaactgtccgatgccaatagggactacaagatttgtgaaacatacccccgcgagctgtatgtcccccgaatcgcatctaagccgatcattgtgggctcgtcaaagtttagaagcaaggggcggttccccgtactgtcttactatcatcaagataaagaggccgccatttgcagatgctcccagccgctatccggcttctcagctaggtgccttgaagacgagcatctgctccaagccatcagcaaagctaaccctgttaacagatacatgtacgttatggacacaagacccaagctgaatgcaatggccaacagagcagccggaaagggatacgagaacgaagataactatagtaacattagatttcaattcgtagggatagagaatatccacgtcatgagatccagtctgcagaaactgctggaagttaatgggaccaagggactgagtgttaatgacttctattcaggcttggagtcctctgggtggctcaggcacatcaaagcagtaatggacgccgcaatctttctagccaaagctattaccgtggagaacgcctcagttcttgtgcactgtagcgacggatgggatcgtaccagccaggtatgttccctgggttctctgcttcttgatagctactaccggacaataaaaggattcatggtgctgatcgagaaggattggatatcgtttggccataaatttagcgagagatgtggtcagctggatggcgaccctaaggaagtgagccctgtgttcacccagttcctcgaatgcgtgtggcacctgaccgaacagtttcctcaagcatttgagttctctgaagctttcctactgcagattcacgagcacattcacagctgccagtttggtaattttcttggaaactgccagaaggaacgagaggagttaaaactcaaagagaagacatacagcctatggcccttcctgttggaggaccagaaaaaatatttgaaccctctctacagttccgaaagccaccgatttacggtcctcgagcccaataccgtttcctttaactttaaattctggcgaaatatgtatcatcaattcgacagaactcttcatccacgccagtctgttttcaatattatcatgaatatgaatgagcagaataagcagctggaaaaagacataaaggacttggaatctttgacctcctattccagtttcaaaatcatagtcggacagtag

SEQ ID NO: 125587 - DNA, 1647 bp, synthetic construct
  misc_feature 1..1647: note = Description of Artificial Sequence: Synthetic coding sequence
  source 1..1647: mol_type = other DNA
atggaacacattcgcaccaccaaggtggaacaggtgaagctgctggatcgattctctacgtccaataaaagcttgacggggaccttataccttacagccacgcatctgttatttatagactcccaccagaaagaaacctggatcctacatcatcacatcgcgtctgtggagaagttagcgctgaccaccagcggttgtccactggttatacaatgcaaaaactttcgaaccgttcacttcatcgtaccacgggaacgcgactgtcacgacatctataattccttgctgcaactgtctaaacaggcaaaatatgaggatctgtacgcctttagctacaaccccaagcagaatgatagcgagagacttcagggttggcaactgatagaccttgcagaggagtataaacggatgggcgtcccaaactcccattggcaactatcggacgctaaccgggattacaagatctgcgagacatatcccagagagctgtacgtgccgagaattgcctcaaagccaatcatcgtcggatcctcaaagtttagatcaaagggccgatttccagtattatcctattaccaccaggataaggaagctgccatctgtaggtgcagtcagccattgagcgggttctctgctaggtgcctcgaggacgagcaccttcttcaggcaatcagcaaagctaaccccgtgaatcgatatatgtacgtgatggatacgaggcccaaattaaatgcaatggcaaatcgggccgccggtaaggggtacgagaacgaagacaattattctaatataagattccaatttgtcggaatcgaaaatatccacgtgatgcgttcctctcttcaaaaactgctcgaagtcaatgggacgaaaggcctgagcgtgaatgatttctactcaggcctggaatccagtggctggctgcgacatatcaaagcggtcatggacgctgctatattcctcgccaaggcaatcaccgtggaaaatgcctcagtcctcgtgcactgcagtgacggctgggatagaaccagccaggtgtgctctctcgggtctctgctgttggattcatactaccgcacaattaaagggtttatggttctcattgagaaggactggattagcttcggccacaagttttcggagcgttgtggacaactggacggtgatccaaaggaagtttcaccagttttcacacagttcctggagtgtgtctggcaccttacggagcaattcccccaagcttttgaatttagtgaagccttcctattacagatacacgagcatattcatagctgtcagttcggcaattttttgggcaattgtcagaaggagagagaggagctcaagttaaaggaaaagacgtactccctgtggccttttttattggaagaccagaagaagtatctgaaccccctttactccagcgagtcgcaccgatttaccgtgttagaacccaataccgttagcttcaattttaagttttggcggaatatgtaccatcaattcgacaggaccttgcatcctagacaatctgtattcaacatcatcatgaatatgaacgaacagaacaaacagctggaaaaggacattaaggacttggagtcctttacaagtttcgccgcagcgagagtgatccagggacagtag

SEQ ID NO: 125588 - DNA, 1983 bp, synthetic construct
  misc_feature 1..1983: note = Description of Artificial Sequence: Synthetic coding sequence
  source 1..1983: mol_type = other DNA
atggagcatattagaacaccaaaagtagaaaatgtccgactcgtggatagagtatctcctaaaaaggccgcattagggacattgtatctcacagctacacacgtgatctttgtcgagaattcccctgaccccaggaaagagacttggattctgcactcccaaatctccacgatagagaagcaggctactaccgctacaggatgccccctgcttattcgatgtaagaacttccagattattcagttgatcataccccaggaacgagactgtcatgatgtctacatttcactgatccgcctcgcccgaccagtgaagtacgaggagttgtactgcttcagcttcaaccctatgcttgacaaagaggaaagagagcagggatgggtcctgatagatctctcagaagagtacacccgtatgggactccctaatcactactggcaactcagcgatgtgaacagagattatcgggtgtgtgacagctatcccacagagctttacgtgcctaaatccgccactgctcatattatcgtgggatcctcaaaatttaggtctcggagacgtttccctgtgttgtcctactattataaggacaatcatgcatccatttgtagatccagccagccgctctcaggtttcagcgctaggtgcctggaagacgaacagatgctccaggctataaggaaggccaaccccggtagcgattttgtgtacgtggtggatacacgacctaaactgaatgcaatggctaatcgcgctgctggtaaggggtacgagaatgaggacaactatagcaatattaagtttcaattcatcgggatcgaaaacatccacgtcatgcgtaatagcttgcagaagatgctggaggtgtgcgagctgaaaagcccctctatgtcggattttctgtggggcctggaaaactcaggctggctgcgccatattaaggcgatcatggacgccgggatattcatcgccaaagcagttagcgaggagggagctagtgtcctggtccactgctcagacggatgggatcgcaccgctcaggtttgttccgttgcctctcttttgctggacccacattatcgtactctgaaagggttcatggtcctgatagagaaagactggatcagttttggccacaagttcaatcataggtatggcaacctcgatggcgaccctaaggagataagtcccgttattgaccagtttattgaatgcgtctggcaactcatggaacagtttccatgcgcctttgaattcaatgaaagatttctcattcatattcaacaccatatctattcatgtcaatttggtaacttcttgtgtaattcacaaaaggagagacgggaacttaaaatacaagagcggacgtactctctgtgggcacacctgtggaagaatcgtgctgactacctgaaccccctgtttagagcagaccattcacaaacacaaggtactctccacctgccaacaaccccatgtaattttatgtataaattttggagcggaatgtacaatcgctttgagaagggtatgcagcctcggcagtccgttacggactatctgatggctgtgaaagaggagactcagcagctggaggaagaacttgaagccctagaagagagactggaaaaaatccaaaaagttcagttgaattgtaccaaggttaagtctaagcagtccgaacccagcaagcactctggctttagtacctccgacaacagcatcgcaaacacacctcaggactattccggcaatatgaaatcctttccaagcaggagcccatcacagggagacgaagactcagcgctgattttgacccaagataaccttaaatccagtgacccagacctgagcgccaatagcgatcaggaaagcggcgtcgaagacctgtcgtgtaggtcaccctctggcggcgagcatgccccaagcgaggatagtgggaaggatcgggactctgatgaggcggtctttcttaccgcttag

SEQ ID NO: 125589 - DNA, 756 bp, synthetic construct
  misc_feature 1..756: note = Description of Artificial Sequence: Synthetic coding sequence
  source 1..756: mol_type = other DNA
atggagcagtttccatgtgcattcgagttcaacgagaggttcttgatccacatccagcatcacatctacagctgtcaattcggaaacttcttgtgcaattcccagaaggagaggcgtgagcttaagatccaggagcgaacttacagtttgtgggcccatctgtggaagaatcgtgcagactatctgaatcctctgttcagggctgaccatagccaaacacagggaactctgcacttacccactaccccctgcaactttatgtacaaattctggtctggcatgtataaccggttcgagaaaggcatgcagccccgtcagtcagttacagactacttaatggcagtcaaggaagaaacccagcagctcgaggaggagctcgaagccctggaagaacgactcgagaagattcaaaaggtccaactgaactgcaccaaggtcaagagcaaacaatcggagccctccaagcactctggtttctccacatctgacaatagtattgctaacactcctcaagattacagcggcaacatgaaatctttccctagtaggtctccttcccagggcgacgaggactccgccttgattctgacccaagataatcttaaatccagcgaccctgacttaagcgcaaattccgaccaagaatccggcgtcgaggacctaagttgcagatctccctctggtggagaacacgcaccgtcagaagacagcggtaaggatcgggactctgatgaggcagtttttctgacagcttag

SEQ ID NO: 125590 - DNA, 1668 bp, synthetic construct
  misc_feature 1..1668: note = Description of Artificial Sequence: Synthetic coding sequence
  source 1..1668: mol_type = other DNA
atggagcatataaggacaccaaaagtcgagaacgtacgattggtggatcgagtgtccccaaagaaggccgctttaggaaccttgtaccttaccgctacacatgttatatttgtggagaattcccctgaccctaggaaagagacatggatcctccattcacagatcagtaccatcgaaaaacaggccacaactgcgaccggctgtccactgctgatccggtgtaaaaatttccagatcatccaactgataattccccaagaacgagattgccatgatgtttacatatctctcataagactggcgaggcccgtgaagtacgaggagttatattgtttctccttcaacccaatgctggataaggaggagcgtgaacagggctgggtgctgatagatctctctgaggaatacaccaggatgggtctgcctaatcactattggcagctctccgatgtgaaccgcgactaccgcgtgtgtgacagctatcccacggagctttacgtccccaagtctgctacggcccacataattgtgggcagtagcaaatttcgtagcaggcggcgcttccccgtgctgagctactattataaggataatcacgcttcaatatgtagatcctcccagcctttgtccggattcagcgctagatgtctggaggatgagcaaatgctccaggctatcaggaaggctaacccaggcagtgattttgtttatgtggtggacactcgcccgaaactgaatgctatggcaaacagagccgctgggaaaggttacgagaatgaggataactacagcaacataaagttccagttcatcggaatcgaaaacatccacgttatgagaaattctttacagaaaatgttggaggtctgtgaattgaagtcacctagtatgtctgatttcctgtgggggctggagaattctggatggctgcgccacatcaaggccatcatggatgccggcatttttattgcgaaagccgtgagcgaggagggggcaagcgtgttagtccattgttccgatggttgggataggaccgcccaggtctgttccgttgcctcgctcttgctggatcctcattatagaaccctgaagggattcatggtcctcatagaaaaggattggatttccttcgggcataaattcaaccaccggtacggaaatctcgatggggaccccaaggaaatttcacccgttatcgaccagtttattgaatgcgtctggcagttgatggaacaatttccatgcgcctttgaatttaatgagcgcttcttaatccacatccagcatcatatttactcttgtcagtttggcaactttctgtgcaacagtcagaaagaacggcgagagctgaagattcaggaacggacttattcattatgggcacacctttggaagaatagagctgattacctcaaccccctttttcgcgcggatcatagccaaacgcaaggtactctgcatctgcctacgacgccctgcaacttcatgtacaaattctggtcaggcatgtacaaccgttttgagaaggggatgcaaccgagacaatcagtgaccgattacctgatggccgtgaaagaagaaactcagcagttagaagaggaattggaggccctagaggaagttaggcacacatgctttgttaatttgttttctgtcctgattagctag

SEQ ID NO: 125591 - DNA, 1773 bp, synthetic construct
  misc_feature 1..1773: note = Description of Artificial Sequence: Synthetic coding sequence
  source 1..1773: mol_type = other DNA
ctcgatttactcgtgcctaaggtggagaatgtgaagctggtggatcggtatgtgtcgaagaaaccagccaacggcattttgtatcttactgccacccatttgatttacgtggaggctagcggagcagcccgcaaagagacatggatagctctccaccacatcgctaccgtggagaaattgccaatcacttcgctcggatgccctctcacactccggtgcaagaattttcgggtggcacactttgttctagacagcgatctggtgtgtcatgaagtttacatatcgctattaaagctctcccagccagccctgcccgaggatctgtatgccttcagctataatcctaagtcctcaaaggagatgagagaaagcggatggaaattgattgatcctattagtgactttggccgcatgggtattcctaacagaaattggaccattaccgacgctaacataaggtttcgatttatggggattgaaaatattcacgtaatgcggtcctctctccagaaactgttggaggtttgcgagctgaaaaccccgacgatgagcgaatttctgtccgggctggagagctctggctggctccgccacataaaggcaatcatggacgcaggtattttcatcaccaaggctgtgaaggtggagaaagccagcgtactggtccactgctcggatggctgggacaggactgcccaggtctgttcagtggcctcaatactgctggaccctttctatcggacattcaagggattgatgatactgattgaaaaggagtggatctccatgggacataaattcagccagagatgtggacatcttgatggagattccaaagaggtctctcccatatttactcagttccttgactgcatctggcagctgatggagcaattcccttgtgcattcgagtttaacgaaaacttcttgctggagatccacgatcacgttttcagttgccagttcggcaactttttgggcaattgtcaaaaggatcgggaggaccttcgagtgtatgaaaaaacccactctgtatggcccttcttggtccagcgcaagcctgactttagaaatcctttgtataaggggttcaccatgtacggggtattgaacccctcgaccgtaccctacaatatccagttttggtgcggtatgtataacaggttcgacaagggcctgcagcctaagcagtcaatgttagagagcctgctggagatcaaaaaacagcgtgctatgttggagaccgacgtacacgaactcgaaaagaaattgaaagtgcgggacgagcctcccgaggagatttgcacttgctcccaactgggtaacattttgtcccagcacctcggaagccctctaaccaaccctctgggcttcatggggatcaatggcgatctgaacacactaatggagaatggcacactctcaagagaaggagggctgcgtgcacaaatggaccaggtgaagtctcagggtgccgacctacatcataactgttgtgaaatagtagggagtcttcgggcaatcaacatctctggagacgtgggcatttcggaggccatgggcatcagcggagacatgtgcacatttgaggcaaccggctttagcaaggacctgggtatctgtggagcgatggatatcagtgaggccaccggtatatcgggtaacctggggatctccgaagcccgaggattttccggcgatatgggtatcctgggtgatactggaattagtaaggcctccactaaagaagccgactactctaagcatcaatag

SEQ ID NO: 125592 - DNA, 2115 bp, synthetic construct
  misc_feature 1..2115: note = Description of Artificial Sequence: Synthetic coding sequence
  source 1..2115: mol_type = other DNA
atggaccacattaccgtaccgaaggtggagaacgtcaagctagtcgataggtacgtctctaaaaagccagccaatggaatcctgtatctcacagccacccacctgatctatgttgaggcttcaggggcagccaggaaagagacctggattgcactccatcacattgcaaccgtggagaagttgccaattaccagtcttggttgtcccctgacgctgcggtgtaagaacttcagggtagcccactttgttctggattcagatttggtatgccatgaggtctatatatctctgttgaagctgtctcagccagccctgcccgaggatctatacgctttcagctataatcccaagtcttccaaggagatgagagagtcgggctggaaactgatcgacccaatctcggattttgggcgcatgggcatacctaataggaactggaccatcacagatgccaaccgcaactacgaaatatgttccacctatccacccgagattgtcgttccaaagtcagtcaccctcggcactgtggtgggttccagcaagttccggagcaaagagcgggtcccagtgctgtcatatttatacaaagagaataacgccgctatttgtcgttgcagtcagcctcttagcggattctatacccggtgcgttgacgacgagttgttgctcgaagctatctcccagacaaaccccgggagccagttcatgtatgtagtggataccagacccaagctgaatgctatggctaatcgcgccgcgggcaaaggctacgaaaacgaggacaattacgccaacatcagattcagattcatggggatcgaaaatatccacgttatgcgctccagcctgcaaaagttattggaagtctgtgagctcaaaactcccaccatgtccgaatttctttctggactcgagagctctggctggctccgccatatcaaagccataatggacgctggcatcttcattacgaaagccgttaaggtggaaaaagcatccgtcttggtacactgtagcgacggatgggatcggaccgctcaggtatgttccgtggccagtatactgctcgaccccttctatcgtacttttaaaggactgatgatacttatcgaaaaggagtggatttccatgggccataaattctctcagaggtgcggacatctggatggggatagtaaggaagtgtccccaattttcacacagtttctcgactgtatttggcaactcatggaacaatttccatgcgcctttgagtttaatgagaacttcctactcgaaattcatgatcacgtgttcagttgtcagttcgggaactttctgggcaactgccagaaagatcgcgaagatctgagggtgtacgaaaagactcattcggtgtggccgtttttggtacagcgaaagccagactttcgcaaccctctgtataagggcttcaccatgtatggcgtgctgaacccctcaaccgtcccctataatatccagttttggtgcggcatgtacaataggtttgacaaggggctccagcccaaacagagcatgttggaatcgctgctagagatcaagaaacagagggccatgttggagaccgatgtccacgagcttgagaagaaactgaaagtccgggacgaacccccggaggagatttgcacctgctctcagctgggcaatattttgagtcagcaccttggatctcccctgacaaaccctctgggattcatgggcatcaatggcgacctcaacaccctgatggaaaatggtaccctttcaagagagggcgggttgcgcgcacagatggaccaggtcaagtctcagggagcggatctgcatcacaactgctgcgaaattgtggggagtctgcgggccatcaacattagcggtgacgttggcatctccgaagctatgggtataagcggcgatatgtgtacgttcgaagctacaggattcagcaaagatcttggcatatgcggggccatggatatctccgaagccaccgggatttctgggaacttaggcatttccgaagctcgcggttttagtggagacatggggatcctgggcgacactggtattagcaaggcaagcacaaaagaggccgactacagcaagcaccagtag

SEQ ID NO: 125593 - DNA, 1527 bp, synthetic construct
  misc_feature 1..1527: note = Description of Artificial Sequence: Synthetic coding sequence
  source 1..1527: mol_type = other DNA
tgagattcagatttggtgtgccatgaggtgtacatttctctccttaaactgtcacaacctgctctaccagaggacctttacgccttctcatacaatcccaagtccagtaaggaaatgagggaaagcggatggaaattaatcgatccaatttccgacttcggtcgtatgggcatcccaaaccggaactggaccatcaccgatgccaatattcgctttcggttcatgggaatcgagaacatccatgtgatgcgcagctccctccaaaagctactggaggtctgcgagctcaaaacccctactatgagcgagtttctatcagggctggagtcttcaggatggctcaggcacattaaagcaatcatggatgcaggaatttttattaccaaggcagtgaaggtggaaaaggcctccgtgctggttcactgcagcgatggatgggaccggaccgcccaggtgtgtagcgttgcttcaattctcctcgacccattttatcgtaccttcaagggcctgatgatcctgatcgagaaggaatggatttccatgggacacaagttttctcagcgctgcggccacctggacggggatagcaaagaggtgagcccaatttttacacagttcttggactgtatctggcaactgatggagcagttcccttgtgcattcgagtttaatgagaactttctgctggagattcatgatcacgttttctcctgccaatttggtaactttttgggaaactgccagaaggatcgcgaggacttacgcgtctacgagaagactcactctgtgtggccattcctggttcagcgaaagccggatttccgcaatcccctatacaagggattcactatgtacggagtgcttaatccctcaacagtgccttacaatattcagttctggtgcggaatgtataatcggtttgataagggactgcagcccaaacaaagcatgctggaaagcttgctggaaattaaaaaacagcgggctatgcttgagacagacgtgcatgaactggagaaaaaattaaaggtcagagatgagccaccagaggaaatatgtacttgtagccaactaggcaacatattgagtcagcacttaggtagccccttaaccaacccgctgggtttcatgggaattaatggggatttaaacacgctgatggagaacggaaccctgtcacgagaaggtggtctcagggcccagatggaccaggtgaaatcgcagggcgccgatctgcaccataattgttgcgagattgtggggagtcttcgtgctattaacatctcaggagatgttgggatcagcgaagctatgggcatcagcggcgatatgtgtactttcgaggccaccggattttctaaggacttaggaatctgtggcgccatggacataagcgaggcgactggcatttctgggaatcttggtatatccgaagctagaggcttctccggagatatgggcatcctcggagataccggcatctctaaggcctccacaaaggaagcagactactcaaagcatcagtag

SEQ ID NO: 125594 - DNA, 2082 bp, synthetic construct
  misc_feature 1..2082: note = Description of Artificial Sequence: Synthetic coding sequence
  source 1..2082: mol_type = other DNA
atggatcacataaccgtcccaaaagtggagaatgtgaagcttgtggatcggtacgtgtccaagaagccagcgaacgggattctctacttgaccgctactcatctcatttatgtcgaggcctctggcgccgctaggaaagagacatggatagccctccaccatattgcaacggttgagaaattgcccattacatcactggggtgcccactgaccttgaggtgcaaaaacttcagggtggctcacttcgtgctggattcagaccttgtctgccacgaagtttacattagcttgctgaagctctctcagccagcccttcccgaagatctgtacgcctttagttataaccctaaaagcagcaaggaaatgagagaaagcgggtggaaactgattgatcctattagcgacttcggaagaatgggtattccaaatcgtaattggaccattaccgacgccaatcgaaattacgagatctgttccacctatccacctgagattgttgttccgaagagtgtgaccttgggcacagtggtgggaagctcaaagtttagatcaaaggagagagtcccagttctgtcatatttatataaggagaataacgcagccatatgtcggtgcagtcagcccttgtcaggcttctatacacggtgcgtcgatgatgagctgttgctggaagccatatcccaaaccaatcctggcagccagttcatgtatgtggttgacactagacccaagctcaacgccatggcaaaccgggctgccgggaaggggtacgaaaatgaggacaattacgcaaacatccggttcaggtttatgggcatagaaaatatccacgtgatgagatcctcgctacagaagctgttagaagtgtgcgagctgaaaacaccaacaatgagtgagttcctttcaggccttgagtccagtggctggctgcggcacatcaaagctatcatggacgctggaattttcattacaaaggccgtaaaggtggagaaggcctccgtgctggttcactgttccgacggatgggaccgaacggcacaggtttgttccgtggcatctatacttttggacccattttacagaacctttaaagggctaatgatttggcactttttagtgctgatcatgcgcatagtgctgcagctggccaaaatgaatctgatggacattacaaagatattttccctattgcagccagacaaagaggaagaggacactgacacggaagagaaacaggctcttaatcaggcagtctatgataacgactcctacacactcgaccagctgctgcggcaggagcgctacaagcggtttatcaattctagatccgggtggggagtgcccgggacccctctgagactcgctgcttcttatggacacctttcgtgtcttcaagtgctccttgcccatggggccgatgttgatagtctggatgtgaaggcacaaaccccactgtttaccgccgtttcgcacggtcacctggactgcgtgcgcgtcttgctggaggctggggcatcccctggaggcagcatctataacaattgttcgccggtgttaaccgcagcacgcgatggcgctgtagcaatccttcaggagctgctagatcacggagcagaagccaacgtcaaggcaaagttaccagtctgggcctcaaatatagcctcctgcagtggacccctgtatctggctgccgtttatggtcacctcgattgctttcggctgttactgctccatggagcagaccccgattacaattgcactgaccagggtcttctggccagggtcccgagaccaaggaccctgctcgagatctgccttcaccacaactgtgaaccggagtatattcaattgttaattgatttcggtgcgaatatctacctcccgtccttgagtctggatttaaccagtcaagatgataaggggattgcactgttactccaggcccgggctacgccaagatcattgctgtcccaggtccgactggtcgtgcggcgcgccctctgccaagcgggccaacctcaggcaattaaccaactagacatacccccgatgctcataagttaccttaaacaccagctgtag

SEQ ID NO: 125595 - DNA, 861 bp, synthetic construct
  misc_feature 1..861: note = Description of Artificial Sequence: Synthetic coding sequence
  source 1..861: mol_type = other DNA
atgggcggtgagcgctcaggggtgcgaggcaacaagatggcggccgcagagccttcgcctcgaagagttggctttgttggagcaggtcggatggccggagcaattgcacaaggattgattcgtgccggaaaggttgaggcacagcacattctggcaagcgcccctacagaccgaaatctttgtcacttccaggcccttggctgccgaaccactcactccaaccaggaagttctgcagtcctgcttgctggtcatctttgcaaccaaaccgcacgtgcttcctgcggtactggccgaggtagcgcctgttgtcactacagagcatatcctggtgtctgtcgctgccggcgtgtcattgagtacacttgaagagctcctgccacctaacaccagagtactacgggtgcttcccaacctcccatgcgtggtgcaggagggggccattgtaatggcccgcggtcgtcacgtaggctccagcgaaaccaaactgcttcagcacttactcgaggcctgcggacgttgcgaggaagttcccgaggcctacgtcgatatccacactggcctgtccgggagtggggtcgcgtttgtgtgtgccttcagtgaagctctcgccgagggcgccgtcaagatgggtatgcctagcagcctggcacacagaattgcagctcagacactgttggggaccgcaaagatgttgctgcacgagggccagcacccagcccaacttcggagtgatgtgtgcacacccgggggtaccactatttacggactgcacgctctggagcagggcggcctgcgcgccgcgaccatgagcgcagttgaggccgcaacatgtagagcaaaggagctgagcaggaagtag

SEQ ID NO: 125596 - DNA, 900 bp, synthetic construct
  misc_feature 1..900: note = Description of Artificial Sequence: Synthetic coding sequence
  source 1..900: mol_type = other DNA
atgcccctgtcaggcacaccggccccaaacaagaagcgcaaatcgtctaagctcattatggagctgacaggggggggtcaagagtcctccgggctcaaccttggcaaaaagatatctgtgccacgggacgtgatgctcgaggagctgtcgctcctcaccaaccgcggatcaaaaatgttcaaacttcggcaaatgcgggttgagaaattcatttatgagaaccaccccgacgtattctccgatagttccatggatcacttccagaagttcctgcccacagtggggggccagctcggcacggcaggtcaaggtttctcctattctaagagcaacggcagggggggctctcaggccggagggagcggcagtgccgggcaatacggatctgatcaacagcaccatttgggctccggttcaggcgcgggcggcaccggcggacctgcggggcaggccgggcggggaggcgccgctggcacggctggggtgggggaaacaggaagcggggatcaggcggggggcgaaggcaaacacatcaccgttttcaaaacttacatttccccttgggaacgggccatgggcgtcgatccccagcagaagatggagctaggtatcgaccttttagcctacggcgcaaaagcagaattgcccaaatacaaatcattcaataggacagccatgccctatggtggatacgagaaagcctcgaagagaatgacgttccaaatgccaaagttcgatctaggcccacttctctccgagccattggttctgtacaaccaaaatctctctaatcgaccctcatttaatcggacacccatcccatggctgtcatccggcgaaccagtggattataatgtcgacattggaataccgctcgacggtgaaaccgaagaactctag

SEQ ID NO: 125597 - DNA, 795 bp, synthetic construct
  misc_feature 1..795: note = Description of Artificial Sequence: Synthetic coding sequence
  source 1..795: mol_type = other DNA
atgctttctcacaatacgatgatgaagcagcgcaagcagcaggcgacagccataatgaaggaagtgcacggcaatgacgtggacggcatggatctggggaagaaggtgtcaataccccgcgacataatgctggaagaactaagccacctgtctaatcgcggggctaggctgttcaagatgcgccagagacgtagtgataaatataccttcgaaaattttcagtatcaatcccgcgcacagatcaatcactctattgctatgcaaaacggaaaggtagatggaagcaatcttgaggggggttcccagcaagccccactgacccccccaaatacaccagatccacgatcccctcccaaccccgacaacatcgcaccagggtatagcggccccctaaaggaaattccacctgagaagttcaacacgacagcagttcctaaatactatcagtccccatgggagcaggccataagcaacgaccccgaactgctggaagccctgtacccaaagctgtttaagccagagggcaaggccgaattgcccgattacaggagctttaatagagtagccactcctttcgggggctttgagaaagcaagcaggatggtgaagttcaaagttcccgacttcgagcttttactgctgaccgaccctcggtttatgagctttgttaacccactcagcggccgaaggtcttttaaccggaccccaaagggctggatctcagagaatatccccattgtcatcaccactgagccaacagacgataccaccgttcccgaaagcgaggacctttag

SEQ ID NO: 125598 - DNA, 756 bp, synthetic construct
  misc_feature 1..756: note = Description of Artificial Sequence: Synthetic coding sequence
  source 1..756: mol_type = other DNA
atgattcctaaggaacaaaaaggacctgtcatggcagccatgggggacctgacagaacccgtgcctacattggacttgggcaagaaactgtcagtgcctcaggatctgatgatggaggagctttccctccggaacaataggggttctttactatttcaaaaacgtcaacggcgagttcagaagttcacattcgaactggcagccagtcaaagggctatgctggccgggtcagctagaaggaaggtaactggtacggctgagtcaggaaccgtggccaacgcaaacggtcctgaggggcctaactaccggagtgagctgcacatcttccccgctagtccaggagccagccttggcggacctgaaggggctcaccccgccgctgctcccgcgggctgcgtgcccagcccgagtgccctggctccgggatacgctgaacccttgaagggagtgcccccggagaaattcaatcacactgccattagtaaggggtaccgctgcccctggcaggaatttgtgtcatacagagactaccagtcagacggacgctcccatacaccatctcccaacgactacaggaacttcaacaagaccccagttcccttcggtggcccccttgtcgggggcactttcccccgtcccggaactccttttatccctgagccgctgagtggcctcgagctactgcgcctgagaccctccttcaatagggtggcccaaggttgggtgcgcaaccttccggaatcagaggaactgtag

SEQ ID NO: 125599 - DNA, 756 bp, synthetic construct
  misc_feature 1..756: note = Description of Artificial Sequence: Synthetic coding sequence
  source 1..756: mol_type = other DNA
atgatccccaaggagcagaaaggcccggttatggccgccatgggcgatcttactgaacctgtgccaactctcgacctggggaagaaactctcggtcccgcaggacctgatgatggaggagctttcactgaggaacaatcgcgggtctctgctgtttcagaagaggcagaggagggtgcagaaattcacttttgaattggccgcatctcaacgtgctatgttagcgggatcagctagacgcaaggttacaggcacagctgagagtggtactgttgccaacgcaaatggtcctgaaggtcccaactataggtccgagctccacatcttcccagcttcgcccggggccagtctcggcggtcccgagggcgcgcacccggccgccgcacccgccggctgcgtcccttccccaagcgctctcgccccaggctacgcagagccccttaaaggagtcccccctgagaaatttaaccacactgccatcagcaaaggctatcgctgtccttggcaggagttcgtcagctatagagattaccagtctgacggacgttcccacactccaagcccaaatgactaccgcaattttaacaagacacctgttcccttcggtggtccgctggttggcggcacctttccacggccgggcaccccctttatcccggagccactctccgggctggagttgttacgattgagaccttccttcaaccgagtggcccagggatgggtgcgcaacctgcctgaaagtgaagaattgtag

SEQ ID NO: 125600 - DNA, 1989 bp, synthetic construct
  misc_feature 1..1989: note = Description of Artificial Sequence: Synthetic coding sequence
  source 1..1989: mol_type = other DNA
atggtggtgtcagaggtggacatcgctaaggccgacccggcggccgccagccatcctctgctgctgaacggtgacgctactgttgcacagaaaaatcctggatctgtggctgagaataatctgtgcagccaatacgaagagaaagtacgcccttgtattgatcttatcgattccctgcgggccctgggcgttgagcaggacttagcactcccggctatcgctgtcatcggcgaccaatcatctggaaaaagcagtgtgcttgaagctctgagcggtgtcgctctgccacgtggaagcgggattgtcacccggtgccccttggtgttaaaactgaagaaattagtgaatgaggacaagtggagaggtaaggtgagctatcaggattatgaaatcgagatctccgacgcatcggaggtcgagaaggagataaataaagctcaaaatgccatcgcgggcgaaggcatggggatttctcatgaactcataaccctggagatttccagccgcgatgtgccagacctgacgcttattgacctgccgggcatcacccgggtcgccgtgggcaaccagccggccgacattgggtacaagatcaaaacactgatcaagaaatacattcagaggcaggagacaattagcctcgtggtcgtgcccagcaacgtcgatatagccactacagaggcgctgtctatggcccaagaagtggacccggaaggcgatagaactatcggaattttgactaagcccgatctggttgataagggcaccgaagacaaagtcgtggacgtagtcaggaatttagtttttcatctgaagaaagggtatatgattgttaagtgtcgagggcagcaagaaatacaagatcagctctctctgagtgaggctctgcagcgcgagaagattttcttcgagaaccatccgtactttcgagaccttctggaggaaggaaaagcaaccgttccctgcctggctgaaaagcttacctccgagcttatcactcacatctgtaaatccctcccattattggagaaccaaattaaggagacccatcagcgcattaccgaggagctgcagaagtatggagtagacatcccagaggatgagaatgagaagatgttctttttaatagacaaagtgaacgcgtttaatcaggatataacagctctgatgcaaggcgaagagactgttggcgaggaagacatcaggctttttacgagacttcgccatgagttccacaagtggtccactattatcgagaacaacttccaggagggtcacaagatcctcagcagaaaaatacagaaattcgagaaccagtatcggggaagggaactgccagggttcgttaactatcgcacctttgagactattgtgaagcagcaaattaaggccctggaggagccggcagtggacatgctgcatacagtaaccgatatggtgcggcttgcatttactgacgtttccatcaagaattttgaagaattcttcaaccttcaccggactgctaagtccaagatcgaagatatccgcgccgagcaggaacgagaaggggaaaagctgattagattgcactttcagatggagcagatcgtatattgccaggaccaggtgtatcgaggagccctccagaaggtcagggaaaaagagttagaggaggaaaaaaagaagaagagttgggacttcggagcattccagtcctcttctgccacagatagctctatggaggagattttccagcatcttatggcctaccatcaagaggccagcaagagaatttccagccacatcccactgattatccaattctttatgcttcagacatatggtcagcagctccagaaagcgatgctgcagcttctgcaggataaggatacctattcctggttgctgaaagaacggagcgacacgagcgataagcgtaagttcctaaaggagaggctagctcgactgacgcaggcccgtcgacgactggctcaattccctggatag

SEQ ID NO: 125601 - DNA, 1989 bp, synthetic construct
  misc_feature 1..1989: note = Description of Artificial Sequence: Synthetic coding sequence
  source 1..1989: mol_type = other DNA
atggtggtgagcgaagtagatatcgcaaaagccgacccagcagccgcttctcatccattgctgctcaacggggatgctacagtcgctcagaagaacccagggtccgtcgcagagaataacctgtgttcacaatacgaagagaaggtgcgcccttgcattgacctcattgattcacttagagcactgggagtcgagcaggatctggcactgcctgccatcgccgttattggggaccaaagtagcggcaagtctagtgtgttggaggctcttagcggagtggccctgcctcgcgggtccggcattgtcacgcggtgccccttagtattgaaactcaagaaacttgtaaacgaagataaatggcgcggtaaagtgagttatcaggattatgagatcgagatctccgatgcaagcgaggtcgaaaaggagattaataaagcacagaatgcaattgctggggagggtatgggtatctctcatgagctcatcactcttgagatcagctctagagatgtgcccgatctaaccctgatagacttacccgggattaccagggtcgccgtggggaatcagccagctgacattgggtacaagattaagacactcatcaaaaaatacatacagcggcaggagactatttctctcgtggtcgttcctagcaatgttgatattgctactactgaggccctgtccatggcacaggaggtggacccagaaggggatcggaccatcggcattctgacgaaaccagacctggttgacaaaggtaccgaagataaggtcgtcgacgttgtaagaaaccttgtttttcacctaaaaaaaggctatatgattgtgaagtgtagggggcagcaagagatacaagatcagctgtccctgagtgaagccttacagcgtgagaaaattttttttgagaaccacccttacttcagagatctcctcgaggagggtaaggcgaccgttccatgcttagccgagaaactgacctctgagcttatcacccatatatgtaagagcctgccgttacttgagaaccagatcaaagagacccaccaaaggatcaccgaggagttgcagaaatacggggtggatattccagaagatgaaaacgaaaagatgtttttcctgatcgacaaagtaaacgcatttaaccaagacatcaccgcactgatgcagggagaagaaacagtgggcgaggaagatatccgcctgtttacgaggctgcggcacgagtttcataagtggtctactattatcgaaaataactttcaggagggtcacaagatcttatctagaaagattcagaagtttgaaaaccaataccgaggcagggagctacctgggttcgtgaattaccggacgtttgaaactatcgttaagcaacagattaaggccctcgaagaaccggctgttgacatgctccacaccgtgacagacatggtgcgactcgcctttaccgacgtgtccatcaagaattttgaagaattttttaacctccaccggaccgctaaatcgaagatagaagacattagggccgaacaagaacgagagggggaaaaactcattcgactacactttcaaatggagcagattgtgtactgtcaggaccaagtgtatcgcggggcgttgcagaaggtgcgagagaaagagttggaggaggagaagaagaagaaaagctgggacttcggggcatttcaatcttccagtgcaacggatagctccatggaggagattttccagcacttaatggcataccatcaagaagcctcaaaacgcattagcagccacatccctctgatcatccagtttttcatgttgcagacatatggacagcagcttcagaaagctatgctgcagttgttgcaggacaaagatacttatagttggctgttgaaggagcgctccgacaccagcgataaaagaaagttcttgaaggagagattggcgagacttacacaggcccgtagacgccttgctcagtttcccgggtag

SEQ ID NO: 125602 - DNA, 207 bp, synthetic construct
  misc_feature 1..207: note = Description of Artificial Sequence: Synthetic coding sequence
  source 1..207: mol_type = other DNA
atggttgtgagtgaagtcgacatcgctaaggctgatcccgcggccgcttcccatcccctgttgctgaacggagatgccacagtggcccaaaagaacccagggagtgtcgccgagaacaacctgtgtagtcagtatgaagagaaggtgaggccctgtatcgacctcatagacagcttgcgggcgttaggtgtagaacaggatctctag

SEQ ID NO: 125603 - DNA, 606 bp, synthetic construct
  misc_feature 1..606: note = Description of Artificial Sequence: Synthetic coding sequence
  source 1..606: mol_type = other DNA
atggtggtgagcgaggtcgatatcgcaaaggcagatcccgccgccgccagccaccctctcctgctaaatggcgatgccacggtggcccagaagaacccagggtcagtggctgagaacaacctgtgctcacagtatgaggaaaaggtgagaccgtgcatcgacctcatagacagcttacgcgccctcggagtcgagcaggacctcgccctgcctgcgattgctgttataggcgaccagagttcaggcaagtcctctgtgttggaagctttgagtggcgtggcgctacctagggggtcaggaatcgtaacgagatgtcccctcgtcctcaagttgaaaaagctggtcaatgaggataagtggcgggggaaggtgtcttatcaggactacgaaatcgaaattagcgacgcctctgaggtggagaaagagatcaataaagcccaaaatgccatcgcaggcgaggggatgggcatctctcacgaattaatcaccctggagatctccagcagggacgtgcccgatctaacacttattgatctccctgggatcacccgcgtcgccgtgggtaaccagccggccgatattggctataagattaagaccctctag

SEQ ID NO: 125604 - DNA, 81 bp, synthetic construct
  misc_feature 1..81: note = Description of Artificial Sequence: Synthetic coding sequence
  source 1..81: mol_type = other DNA
atggttgtctctgaggtggatatagcgaaagccgaccctgctgcagccagtcacccactcttgttgaacggcgatgcgtag

SEQ ID NO: 125605 - DNA, 594 bp, synthetic construct
  misc_feature 1..594: note = Description of Artificial Sequence: Synthetic coding sequence
  source 1..594: mol_type = other DNA
atggtggtttccgaggtagacatcgctaaggccgatccagccgcagcaagtcatcccctactgttgaacggagatgccactgtggcgcaaaagaatcctggaagtgtggctgaaaataacctttgctcccagtacgaagagaaggtgcggccatgcattgatcttatcgacagtctgagagccctcggcgtagagcaggacctggctttgcctgccatcgccgtcatcggcgaccaaagcagcggaaagtcctctgttctggaggccctcagtggagtggcgcttcctcgcggctcaggcatcgttacacggtgcccactggtgctcaagctgaaaaagctagtgaatgaggataaatggcgcggcaaagtctcataccaggactatgagatcgagatttcggacgcctctgaggtggagaaggagatcaataaggcgcagaacgctatcgcaggcgaaggaatgggcatctcacatgagctaattacacttgaaatttcatcaagggatgtgccagacctgacactgatcgatctacctggcatcacgcgggtggctgtgggcaatcaacctgccgacataggatataaatag

SEQ ID NO: 125606 - DNA, 108 bp, synthetic construct
  misc_feature 1..108: note = Description of Artificial Sequence: Synthetic coding sequence
  source 1..108: mol_type = other DNA
atggtagtcagcgaagttgatatcgccaaggccgaccccgcagcggcctcccaccctctgttgttgaatggagacgctactgttgctcaaaagaatccaggttcatag

SEQ ID NO: 125607 - DNA, 234 bp, synthetic construct
  misc_feature 1..234: note = Description of Artificial Sequence: Synthetic coding sequence
  source 1..234: mol_type = other DNA
atggtggtgtccgaggtcgacatcgccaaagcagaccccgccgcggcttcacacccattgttactcaacggtgacgccacagtcgctcaaaaaaatcctgggtctgtcgcagagaacaacttgtgtagccagtatgaggaaaaagtccgtccttgtatcgatctgatcgatagcttgcgggctctgggcgtggaacaggacctggctctccctgctatagccgtcatcgggtag

SEQ ID NO: 125608 - DNA, 1989 bp, synthetic construct
  misc_feature 1..1989: note = Description of Artificial Sequence: Synthetic coding sequence
  source 1..1989: mol_type = other DNA
atggtggtatccgaagtggatatcgcaaaagccgacccggcagcagcatcacatccgctgctcctgaatggtgacgcgacagtggcgcagaagaaccccggaagcgttgctgaaaacaatctgtgcagtcaatacgaagagaaagttcggccatgtattgatttgatcgactccctacgtgccctgggggtcgagcaggatcttgccctgccagctatcgcggtgatcggcgaccagagcagcgggaagagctcagtgctggaagcactgtctggagtcgctcttcctagaggcagtggaattgttacaaggtgcccccttgtgttgaagctgaaaaagcttgtaaacgaagataaatggcgcggcaaggtgtcttatcaggactatgaaattgagatttccgatgctagcgaagttgagaaggagattaacaaggctcaaaatgctatagctggtgaaggcatgggaatttcgcatgagctgattacactggagatcagcagcagggatgttcccgatctgactctgatcgatttgcctggcataactagggtcgccgtcggaaatcagccggctgacatcggatacaagataaagactcttatcaaaaaatacattcaacgacaggaaacaatcagcttagtcgtggtgccatctaacgtcgacatagccactacggaggccctgtctatggcccaggaagttgatcctgagggagaccgcactattggcatccttacaaagcctgatctggttgacaagggtactgaagataaggtggttgatgtcgttaggaatcttgtttttcaccttaagaaaggctacatgattgtgaaatgcaggggacaacaagaaatccaggaccagctttctctgagtgaagctttgcagcgtgagaagatcttctttgagaatcacccttattttagagatctcttggaagaaggaaaggcaacagtgccctgcctggcggagaaacttacctccgaactaatcacacacatatgtaagagccttcctctcttagaaaaccagatcaaagaaacacaccagcgtattacagaagagctccagaaatacggggtggacattcctgaagacgaaaatgagaaaatgttctttctcattgacaaggtgaacgcatttaaccaggacataacagctctaatgcagggcgaggaaacagtgggcgaagaagatatcaggctgttcacaagactacgacatgaattccacaaatggtctacaataatcgaaaataatttccaagaagggcacaaaatcttgagtaggaaaatccagaagttcgaaaaccagtacagaggacgggaactaccagggttcgtcaattaccgaacatttgagacaatcgttaaacagcaaataaaagccctggaagaacccgcagtggatatgctccatacagtcaccgatatggtgagactggcctttacggacgtgagtattaaaaactttgaggagttcttcaaccttcatcgaaccgccaaaagtaagattgaagatattagggccgagcaagaaagggaaggcgagaagcttataaggttgcacttccagatggagcagattgtttactgtcaagaccaggtataccgaggcgccctgcagaaggttagggagaaagagctcgaagaggaaaagaaaaagaagtcttgggacttcggagcgtttcagtcatcttccgccaccgactcaagcatggaagaaatatttcagcatctgatggcttatcaccaggaagctagtaagcgcatctcgtcgcacattcccctcatcatccaattcttcatgctgcaaacctatggccaacaacttcagaaggctatgctgcagttgctacaggacaaagacacgtacagttggcttctgaaggaaagatctgacacgagcgacaaacgcaagttcctgaaggagagattagccagattgactcaggcacggcgacgcctcgcccagttccccggttag

SEQ ID NO: 125609 - DNA, 2148 bp, synthetic construct
  misc_feature 1..2148: note = Description of Artificial Sequence: Synthetic coding sequence
  source 1..2148: mol_type = other DNA
atgagtaaggcacataagccttggccctaccgcaggaggagccaattctcaagcagaaaatacctgaagaaggaaatgaatagttttcaacagcaaccaccaccctttgggactgtgcctccacagatgatgtttcctccaaattggcaaggcgccgagaaggacgccgcgttcctggctaaggattttaacttccttactctgaataatcagcccccccctggtaatagatcccagcctcgagccatggggcccgagaacaacctgtacagtcagtacgagcagaaggtcaggccttgcatcgatcttatcgattcattgagagccctcggcgttgagcaggaccttgcgcttcctgctattgctgtcatcggggaccagtcctccggcaaatcttcagtcttagaagccctgtccggagtcgcccttcctcgcgggagcgggattgtaacaaggtgtcccctggtcctcaaacttaaaaaacagccttgtgaggcttgggccgggcgcatttcatatcgaaataccgagctggagttacaagacccaggccaagttgagaaggaaatacacaaagcccaaaacgtcatggctgggaacgggaggggcatctcccatgagctgatcagccttgagataacaagcccagaagtaccggacctgaccattatcgaccttcccgggattacccgggttgccgtagacaatcaaccaagagacattggcttacagatcaaagccttaataaagaagtacattcaacggcaacagaccattaatttagtggtggtgccatgcaacgttgacattgctacgaccgaggccctatccatggctcatgaggtcgaccctgaaggagacagaacaatcggaatactaacaaagcctgatctcatggatcggggcaccgagaaaagcgtgatgaacgtggtgcgaaacctcacctacccgcttaagaaaggatacatgattgtgaaatgccgggggcagcaggaaatcacaaatagactgagtctcgcagaagccaccaagaaggaaatcactttctttcagacacacccctattttagagtgcttctggaagaaggatccgctactgtaccacgacttgccgagcggctgaccacagagctaattatgcatatccagaagagcctgccccttctcgagggtcaaatccgggagagtcaccagaaggcaacggaggagctacggcgctgcggggccgatatccctagtcaagaggcagataaaatgtttttcctgatcgaaaagataaagatgttcaaccaggacattgaaaagctcgttgagggagaagaggtggtgcgcgagaatgaaaccaggctgtacaacaagattcgcgaagactttaaaaattgggttggaatcctcgccactaatacccaaaaggtcaagaatatcattcacgaagaggtcgagaagtacgagaagcagtatcggggtaaagagttattgggatttgttaactacaagaccttcgaaattattgtgcatcaatatatccagcaactcgtcgagcccgctctgtctatgctccaaaaagccatggaaatcattcagcaggccttcattaacgtcgctaagaaacatttcggggaatttttcaacctgaaccagactgtgcagagcactattgaagatattaaagttaagcacaccgcgaaggccgagaacatgatccagcttcaatttcggatggaacagatggtattttgccaggatcagatatacagcgtggtgttaaaaaaagtgagggaggaaatctttaaccctctgggcacaccctctcagaatatgaagctcaatagccacttcccgtccaatgagagcagtgttagtagttttacagaaattggcatccatctcaatgcttactttctggaaacctctaaaaggttggctaatcagattccttttataattcagtatttcatgctgagagagaatggcgactccctgcagaaagctatgatgcaaatcttgcaggagaagaacagatattcttggctgctgcaggagcagagcgagaccgccaccaagcgccgtattttgaaagaaagaatataccgtcttactcaggctcgccacgccctctgtcagttttcatccaaagaaatccattag

SEQ ID NO: 125610 - DNA, 45 bp, synthetic construct
  misc_feature 1..45: note = Description of Artificial Sequence: Synthetic coding sequence
  source 1..45: mol_type = other DNA
atgtccaaggcccacaaaccctggccgtacaggcgcaggagttag

SEQ ID NO: 125611 - DNA, 405 bp, synthetic construct
  misc_feature 1..405: note = Description of Artificial Sequence: Synthetic coding sequence
  source 1..405: mol_type = other DNA
atgtctaaggctcataagccctggccatatagaagacggtctcagttctcatcaaggaaatacctgaaaaaggaaatgaatagcttccagcagcaaccgcccccatttgggacggtgccccctcaaatgatgtttccaccaaattggcaaggagccgaaaaggatgctgcattcctggccaaggactttaattttttgacgctcaacaaccagccaccgccagggaatcggagccagccccgggctatgggtcctgaaaataacctgtattcccagtatgagcagaaggttaggccctgcattgaccttatcgattctctgcgcgccctgggggtggaacaggatctcgccctgccagctatagctgtgatcggcgaccagtcttctgggaaaagttcagtgtag

SEQ ID NO: 125612 - DNA, 378 bp, synthetic construct
  misc_feature 1..378: note = Description of Artificial Sequence: Synthetic coding sequence
  source 1..378: mol_type = other DNA
atgagtaaagcccacaagccttggccatacaggagacgtagtcagtttagctcgcgcaaatatctgaaaaaagagatgaactccttccagcagcagcctcctcctttcggaacggttcccccacaaatgatgttccctcccaactggcagggcgcagagaaggatgcagcgttcctggccaaagactttaacttcttgacactcaacaatcagcctccacctgggaatcggtcacaacctagagccatgggcccagagaacaacttatacagccagtacgaacagaaggttcggccttgtatcgacttgattgattccctgcgggccttgggcgtggagcaggacctcgccctcccggccatcgccgttatcggttag

SEQ ID NO: 125613 - DNA, 390 bp, synthetic construct
  misc_feature 1..390: note = Description of Artificial Sequence: Synthetic coding sequence
  source 1..390: mol_type = other DNA
atgtctaaagcgcataagccttggccgtaccggagacggagtcagttcagctcccggaagtacctcaagaaggagatgaatagcttccagcaacagcctccacccttcggcacggtgccaccacagatgatgttcccaccgaattggcagggtgcggagaaggatgccgcctttctggccaaagacttcaattttcttactttgaacaatcagccgcctccagggaaccgaagtcaaccaagggccatggggccagagaataacctgtacagccagtacgagcagaaagttagaccatgtatcgatcttattgacagtctacgagctctcggggtagagcaagatctggctcttcccgctattgccgtgattggagatcagtccagttag

SEQ ID NO: 125614 - DNA, 606 bp, synthetic construct
  misc_feature 1..606: note = Description of Artificial Sequence: Synthetic coding sequence
  source 1..606: mol_type = other DNA
atgagtaaagcccacaagccatggccttaccgccgccggtcacagttctcatctcggaagtacctcaaaaaggagatgaattcctttcaacaacagccccctcccttcggtacggtccccccccaaatgatgttccctcccaattggcagggtgccgaaaaggacgcggccttcttagctaaagactttaatttcttaaccctgaataaccagccaccaccagggaacaggagccagccaagggccatgggacccgaaaataatctctatagtcagtacgagcagaaagtccggccatgtattgatctgatagactcactacgggccttgggggtggaacaggacttagctctgcctgcgatcgcggtaatcggggaccagagtagcggcaagagcagcgtgctcgaagctctttcaggcgtggccttacctcgcggctccgcccagaacgtgatggcaggcaacgggcggggtatcagccacgagcttatcagtttggagattacatcgcccgaagtacctgatctcaccatcattgacctccccggcataacaagagtggccgtcgataatcaacccagggacatcggcttacaggtctcctag

SEQ ID NO: 125615 - DNA, 663 bp, synthetic construct
  misc_feature 1..663: note = Description of Artificial Sequence: Synthetic coding sequence
  source 1..663: mol_type = other DNA
atgaacatccgcaacgccagacctgaggatctgatgaatatgcagcattgcaatctgctgtgcctgccagaaaattaccagatgaaatactacttctatcatgggctgagctggccacagctgtcttacatagccgaagacgaaaacggaaaaatcgttggatatgtattggccaaaatggaggaagatccagacgatgtgccgcacgggcacatcacttcacttgcggtcaagcgttctcatcgacgcttagggctggcccaaaagcttatggatcaggcctccagggccatgatcgaaaactttaatgccaaatacgtttccctacacgtgcgcaaacggattagtgaggtcgagcccaagtactacgccgatggagaggacgcatatgctatgaaacgcgacctgacccaaatggctgacgaattacggcgccatttggagttgaaggaaaaagggaggcacgtagtgctgggcgccatcgagaacaaagtagagtctaagggtaattctccacccagctcaggagaagcctgtagggaagagaaaggccttgctgctgaagattccggtggggactcaaaggacctgagcgaagtatcggaaactaccgagtcaacggacgtgaaggactcctctgaagcaagtgactcagcatcctag

SEQ ID NO: 125616 - DNA, 708 bp, synthetic construct
  misc_feature 1..708: note = Description of Artificial Sequence: Synthetic coding sequence
  source 1..708: mol_type = other DNA
atgaatatacgaaacgctcgccctgaagatttgatgaacatgcagcactgtaatttgctttgcctacccgagaactaccagatgaagtattatttctatcatgggttgtcctggccccaactaagctatatcgctgaagatgagaatggcaagatcgtcgggtacgtactggctaaaatggaagaggaccccgacgacgtgccccatggtcacattacgtcactcgccgttaagcggagtcataggcggttgggactggctcagaagttgatggaccaggcatccagagctatgatcgagaactttaacgctaaatatgtcagcttgcacgttaggaagtccaatcgagccgcgctccatctatattcgaatacactgaactttcagatctccgaggtcgaacccaagtactacgctgacggtgaagatgcttacgcgatgaagagggatctgacccagatggccgatgagctgcggcgacatcttgagctgaaagagaaggggcggcacgtagttctgggggcaattgagaacaaggtcgagagtaagggcaactcacccccgagttccggcgaagcatgccgtgaggagaaaggtttggcagctgaggactcgggtggagactcaaaggacctgtcagaggttagcgagactactgagtccacagacgtgaaggatagttcagaagcctccgactccgccagctag

SEQ ID NO: 125617 - DNA, 396 bp, synthetic construct
  misc_feature 1..396: note = Description of Artificial Sequence: Synthetic coding sequence
  source 1..396: mol_type = other DNA
atgaatatcaggaacgcgaggcctgaagatctgatgaatatgcagcactgtaatttgttgtgcctacccgaaaattaccaaatgaaatactacttttatcatggattgtcttggccacagctttcctatatagctgaggacgagaatggtaagatagttggttatgtcctggctaagatggaagaggatcctgatgacgttcctcatggacatatcaccagtctggcagtcaaacgatcgcatcgcaggctgggccttgcccagaagctgatggaccaggcctctcgggcaatgatcgaaaacttcaacgccaagtacgtgagcctgcacgtgaggaaacggtctgtaaaatggagccctaataccatgcaaatgggccggactccaatgccttag

SEQ ID NO: 125618 - DNA, 534 bp, synthetic construct
  misc_feature 1..534: note = Description of Artificial Sequence: Synthetic coding sequence
  source 1..534: mol_type = other DNA
atgattgtagcagaaattaagaatcgaaccaagatccataaggaagacggcgacattctggcctctaactttagcgttgacacccaggttgcctacattctgtctcttggcgtcgtcaaagagttccggaagcacggcatagggagccttctattagaatccttgaaagaccacatcagcactactgcccaggatcactgcaaggctatttaccttcacgtgctgactaccaacaataccgcaatcaacttctatgagaatcgggattttaaacaacaccattatcttccctactattatagcattcggggagtccttaaagatggcttcacatacgtgctctacatcaacgggggtcaccctccgtggaccatcttggattacatccagcacctcgggtccgccctcgcgtctttaagtccatgctccatcccacatcgcgtgtatcgtcaagctcactcgctcctatgctcatttctcccttggtccggcatctctagcaagtctggaatcgaatattcaaggacaatgtag

SEQ ID NO: 125619 - DNA, 729 bp, synthetic construct
  misc_feature 1..729: note = Description of Artificial Sequence: Synthetic coding sequence
  source 1..729: mol_type = other DNA
atgaccgaagttgtcccatcctctgctctgagcgaggtctctctgaggctgctctgtcacgacgacatcgacacggtgaagcatttgtgtggagactggtttcccatagagtatcccgatagctggtacagagatattacttccaataagaaatttttcagcctagccgcaacgtaccggggcgctatcgtcgggatgatcgtggcggagataaagaatcgcaccaaaatacacaaagaagatggtgatatcctggcttcaaatttctccgtggatactcaggtggcttacattttatctttgggcgtggtgaaggaattcagaaagcacggaatcggctcccttctgctggagagcctcaaggatcatataagcaccactgctcaggaccactgtaaggccatctaccttcacgttttgaccactaataacaccgccatcaacttttatgaaaacagggactttaagcagcaccactatctgccctactattattccattcgaggagtgttgaaagatggattcacctatgtattatacattaacggcggacatcctccttggaccatcctagactacatccagcacctggggagcgccctggctagtctttctccttgtagtataccacatagggtgtaccgccaagctcattcccttctttgttcctttttgccttggagcggcatctcaagtaagtcgggtatcgaatatagccgaaccatgtag

SEQ ID NO: 125620 - DNA, 729 bp, synthetic construct
  misc_feature 1..729: note = Description of Artificial Sequence: Synthetic coding sequence
  source 1..729: mol_type = other DNA
atgaccgaagtggtgccttcctcggccctctcagaggtgtcactgagattgctttgtcatgacgacatcgatacggtcaaacacctatgcggcgactggttcccaattgaatatccagactcttggtacagggatataacatccaataagaaattctttagtctcgcggctacctatcggggcgccattgtcggaatgatcgttgctgaaattaagaacaggacgaaaatccacaaggaggatggcgatattttggcctctaacttttcagtcgacactcaagtggcatatattctttctctgggtgtcgtcaaagaattccgtaaacacggtatcggctcccttttactcgagtccttgaaagaccacatcagcactaccgcccaggaccattgcaaggctatttacctgcatgtgctaacaaccaacaatacagctatcaatttctatgaaaatagagatttcaagcagcatcactatctgccctattactacagcattcgtggggtgcttaaggacggcttcacatacgtcctgtatatcaatgggggccaccccccatggacaattttggattacattcaacacttaggttccgctcttgctagtctgtctccatgctcaatcccccaccgcgtttaccgccaagctcacagcctcctgtgctcctttctgccatggagcggaattagctccaagtcaggaatcgagtacagcagaaccatgtag

SEQ ID NO: 125621 - DNA, 573 bp, synthetic construct
  misc_feature 1..573: note = Description of Artificial Sequence: Synthetic coding sequence
  source 1..573: mol_type = other DNA
atgactgaggttgtcccatcctcagccttgtctgaggtctctctacggctcctgtgccatgacgacattgacacggtgaagcacctctgcggtgactggtttccgatcgaatatcccgactcttggtatcgcgatattacatcaaataagaaattttttagcttggctgcgacctacaggggtgccattgttggcatgatagtcgcggagattaagaataggacaaagatccacaaggaggatggggatattcttgcttctaacttcagtgtggatacacaggtggcatacatattaagtctgggtgtggtcaaggaatttaggaaacacggaatagaacctcatggacttcaccctgccccaggcctctgtacttcccaacccgagcctctgttgcattcagctcagtctctgccccccggaccgcagcccgctcttcagcttcctgcaatggtgggtcacctattccaagagtggcaccgggtgcaacctgaccacgttatgagcgccgggcagcctcctccaggaccgacactccgtccaccagccgagccagctttcctctccatttag

SEQ ID NO: 125622 - DNA, 750 bp, synthetic construct
  misc_feature 1..750: note = Description of Artificial Sequence: Synthetic coding sequence
  source 1..750: mol_type = other DNA
atgttcccccgaaggagaacagaacggcggttgggggatacaggaaccaggaagaaaattgcataccgcaaggcggtaccgggcgggcggaagtgcggagcatcattatcatgggaaaaaagtagtcgcgagtaccctgactcgtggtatcgggacatcacctcaaacaaaaagttcttcagtctggccgcgacctatagaggagctatcgtgggaatgattgttgccgaaatcaagaatcgaaccaaaatccacaaagaagacggggatatccttgctagtaacttctcggtggacacccaggtagcatacattctgtctctcggcgtcgttaaggaatttagaaaacatggcattggcagcttattacttgaatctcttaaggaccacatcagcacgacggcccaggaccattgcaaggctatctatctgcacgttcttacaacaaataacaccgccattaatttttacgagaacagagactttaaacagcaccattacttaccatactactacagcatcaggggcgttcttaaggatggatttacctatgtgttgtatatcaacggagggcacccgccgtggaccatcctggattacatccagcatctgggttccgcactggccagtctctccccctgctcaattccccatcgtgtgtaccggcaggctcacagtctgctatgcagttttctgccgtggtccggaattagttccaagtctggcatcgaatacagcaggacaatgtag

SEQ ID NO: 125623 - DNA, 492 bp, synthetic construct
  misc_feature 1..492: note = Description of Artificial Sequence: Synthetic coding sequence
  source 1..492: mol_type = other DNA
atggctgtcatcctgggcatttttggtactgttcaatacaggtctagatatcttatactgtacgcagcctggctggtgctatgggtcggctggaacgccttcattatctgcttttatcttgaggtcggccagctatcacaggatagggactttatcatgaccttcaacactagcctgcataggagctggtggatggaaaatggacctggatgtctcgtcacacctgttctaaactcaaggctagcattggaggaccatcatgtgatcagtgtaactggatgtttacttgactacccatacatcgaggctcttagttctgcgctacaaatcttcctggctctgtttgggttcgtttttgcatgctacgtgtccaaggtcttcctggaggaggaggattcgttcgatttcatcgggggtttcgatagctacgggtaccaggcgccccagaagacttcccacctgcagttgcaaccactgtataccagcggatag

SEQ ID NO: 125624 - DNA, 624 bp, synthetic construct
  misc_feature 1..624: note = Description of Artificial Sequence: Synthetic coding sequence
  source 1..624: mol_type = other DNA
atgggcaagtgctcaggacggtgcactttggttgctttctgttgtttgcagctggtggctgcccttgagcggcagatattcgattttttgggttaccagtgggcaccgatcctcgccaactttttgcacattatggccgtaattctgggtatttttggaaccgtgcagtacaggagtcgctacttgattttgtatgcagcatggctcgtgctttgggtgggatggaatgcctttattatttgtttttacctggaggtgggacagctgtcccaggacagagacttcattatgacctttaatacgtccctccaccgatcttggtggatggaaaatgggccaggttgcttagtgactcctgttctgaattcaaggctggccctggaggaccaccacgttatcagtgtcaccggctgcttattggattatccatatatcgaagccctatctagcgccctccagatttttctcgccttattcggcttcgtgtttgcctgttacgtttctaaggtctttttggaggaagaggactcttttgactttataggaggatttgacagctacggctatcaagccccccagaagacatcccacctccagctgcaacctctgtacacatcaggatag

SEQ ID NO: 125625 - DNA, 411 bp, synthetic construct
  misc_feature 1..411: note = Description of Artificial Sequence: Synthetic coding sequence
  source 1..411: mol_type = other DNA
atggctgtgatccttggcattttcggaactgtccagtacagaagccgttatctgatactggatagagattttattatgacttttaacacgtcgctgcaccggagttggtggatggaaaatgggcctggttgtctggttacaccagtcttaaacagcaggctcgctctggaggaccatcatgtgatttcagtgaccggctgcctgctcgattatccttacatagaggctttgagttccgcgctgcagatctttctagctctttttggcttcgtgtttgcctgttatgtttccaaagtctttctggaggaagaggattcctttgatttcataggtgggttcgacagctatggctatcaagctccccagaagacgtcacacctgcaattgcagcccctgtatacaagcggttag

SEQ ID NO: 125626 - DNA, 567 bp, synthetic construct
  misc_feature 1..567: note = Description of Artificial Sequence: Synthetic coding sequence
  source 1..567: mol_type = other DNA
atgggctattgctcggggaggtgcaccctgatcttcatctgtggcatgcagttggtgtgtgtactggagcgacagattttcgacttcctcggataccagtgggctcccatcctcgcgaattttgttcatattatcattgtgatcctgggcctttttgggactatccagtataggccaaggtacatcacaggctatgcagtgtggcttgtgctttgggtgacatggaatgtcttcgtaatttgcttctatcttgaggccggtgacctaagcaaagaaacagacttgatccttacgttcaatatttcaatgcaccgatcttggtggatggagaacggcccgggttgcacagtgacgagtgtcactcccgcccctgactgggccccagaggatcatcgctacatcaccgtgtccggctgtctgcttgaatatcagtatattgaagtcgcacactcttcactccagattgttttggccgtgtcagtgggctcgcagcctctgttgctggtgcctctgggccttttttatttctgcgccaacagcgtgcacacaaatggcatatgcggatag

SEQ ID NO: 125627 - DNA, 627 bp, synthetic construct
  misc_feature 1..627: note = Description of Artificial Sequence: Synthetic coding sequence
  source 1..627: mol_type = other DNA
atgggctattgttctggtaggtgcacgctgatcttcatatgtggaatgcagctcgtctgtgtcctcgagcgacagatcttcgacttccttggctatcaatgggcgcctatactggccaacttcgtacacataatcattgtgatcctgggactgttcggcacaatccaatataggccccgttacattactggctacgctgtgtggcttgtgttatgggtgacctggaacgtgttcgtgatctgcttttacctcgaggctggggacctgtcaaaggagacggacctgatccttacgtttaacatttccatgcatcgctcttggtggatggagaacgggccaggctgtactgtaacttctgtgacaccagccccagattgggctcctgaggaccaccggtatattacggtcagtgggtgcctactggagtatcaatacattgaggtggcgcattcctctctgcagatagtgcttgcactggctgggtttatttacgcgtgttacgtagtgaaatgtataaccgaggaagaggattcgtttgactttattggtggttttgacagttacggttatcagggcccacagaaaacgagccacctgcagctgcagccaatgtacatgtctaaatag

SEQ ID NO: 125628 - DNA, 624 bp, synthetic construct
  misc_feature 1..624: note = Description of Artificial Sequence: Synthetic coding sequence
  source 1..624: mol_type = other DNA
atggggatcatccgatttctgcttctttactgccccaccaatatcttgactgtgtgtgttctagaacggcagatctttgacttcctcggctaccagtgggcgccaattctggctaactttgtccacattattattgtgatcctgggcctgtttgggaccatccagtaccggccacgctacatcaccgggtacgccgtttggttagtgctttgggtgacatggaacgtgttcgtgatctgcttttacctagaagccggggacctgtctaaggaaaccgacctcattctgacctttaatatttccatgcatagaagttggtggatggagaacgggcccggctgtactgtgaccagcgtgacccccgctccagactgggcacccgaggaccatagatatattactgtgtctggttgtctactggagtaccagtacattgaggtggcgcacagctctctgcagatcgtccttgcactggcaggcttcatatacgcttgctacgtcgtgaagtgtattaccgaggaggaggacagttttgactttataggggggttcgattcctacggatatcaaggtccacagaagacttcccatctccagcttcagcccatgtatatgagcaagtag

SEQ ID NO: 125629 - DNA, 576 bp, synthetic construct
  misc_feature 1..576: note = Description of Artificial Sequence: Synthetic coding sequence
  source 1..576: mol_type = other DNA
atgaagatcgtttgcgtcttagaaagacagatcttcgatttcctgggttaccagtgggctccaatcttggccaactttgtgcacattattatcgtgatactcggcctgttcggcactatccagtacagaccacgttacataaccggctacgccgtctggctggtactctgggtaacttggaatgtctttgtcatttgtttttatttggaagccggcgacctcagtaaagaaactgacctcatcttaacatttaatattagtatgcaccgaagctggtggatggagaacggtccagggtgcaccgttacctcagtaacccccgctcctgactgggccccggaagaccacagatatattaccgtgagtggttgtctgctcgaatatcagtacatcgaagtggcacattcgtctttgcagatagtgctggctctcgctggttttatttacgcgtgttacgttgttaaatgtatcacagaggaggaggactcctttgatttcatcgggggctttgacagctacggctaccagggcccccagaaaacctcacaccttcaactccagccaatgtatatgtag

SEQ ID NO: 125630 - DNA, 420 bp, synthetic construct
  misc_feature 1..420: note = Description of Artificial Sequence: Synthetic coding sequence
  source 1..420: mol_type = other DNA
atggggtattgttctggccgatgtacactcattttcatttgcggcatgcagctggtctgtgtgctggaacgccaaatcttcgacttcctcggatatcagtgggcccctatcctcgcaaactttgttcatatcattattgtgatccttgggcttttcggaactattcagtatcggcccaggtacatcaccggctacgcagtctggctagtactctgggtgacctggaacgtgttcgtgatatgcttttatttggaggcaggggatctgtccaagctcgccgggtttatttacgcctgctacgtggttaaatgtatcaccgaggaggaagactcatttgactttatcggtggcttcgattcttatggctatcaggggcctcagaaaacctcccacctacaacttcagcccatgtatatgtag

SEQ ID NO: 125631 - DNA, 594 bp, synthetic construct
  misc_feature 1..594: note = Description of Artificial Sequence: Synthetic coding sequence
  source 1..594: mol_type = other DNA
atgggctgctgcaccggacgttgctccctgatttgcctgtgcgctctccagctggtgagtgcactcgaaagacaaatctttgatttcctcggatttcagtgggccccaattctggggaactttctccacattatcgttgtgatcctggggctgttcggcacgatccagtacagaccaaggtacattatggtgtatacagtgtggacagctctgtgggtgacctggaatgtgttcattatctgcttctacctggaggttggcgggctgagcaaagacaccgacctgatgacctttaacatttctgttcaccggtcctggtggagagaacatgggcccggatgcgtgcggcgcgtgctccctccctcagcccacggcatgatggacgactatacttatgtctcagtgaccggatgcattgtggactttcagtacctagaagttatccactccgctgtccaaatcctgttaagtctggttgggttcgtctatgcttgctatgtgatctcaatatctatggaggaagaggatacatactcctgcgacttgcaagtctgcaagcacctgtttattcagatgttgcagatcatcgagtag

SEQ ID NO: 125632 - DNA, 594 bp, synthetic construct
  misc_feature 1..594: note = Description of Artificial Sequence: Synthetic coding sequence
  source 1..594: mol_type = other DNA
atgggctgctgtacggggagatgtagtctgatctgcttgtgtgctcttcagctggtcagtgcgctcgagcgccaaatctttgactttctaggcttccagtgggccccgatcctcggcaactttctacacattatcgtggtgatcttaggacttttcggaaccatccagtatcgccctaggtacatcatggtgtacactgtgtggactgccttgtgggtcacatggaatgtgtttatcatctgcttctatctagaggtgggcggtttgtcaaaggacacagatttgatgacattcaatataagcgtacatcggagttggtggcgggaacatggacccggatgcgttagacgagtgctcccgccatcggcccatggcatgatggatgactacacctatgtctctgttacaggatgcattgtggacttccagtatctcgaggtcatacacagcgcagtccagatcttgctatctctcgtgggatttgtgtacgcttgttatgttattagcataagcatggaagaggaagacacatattcttgtgatctccaggtatgcaagcacctattcatccagatgctgcagatcatcgagtag

SEQ ID NO: 125633 - DNA, 486 bp, synthetic construct
  misc_feature 1..486: note = Description of Artificial Sequence: Synthetic coding sequence
  source 1..486: mol_type = other DNA
atgggatgttgtaccggacgatgctctcttatctgcctgtgtgctttgcagctggtgagttgggtgtttgaccggcagatcttcttgttgagctttcagtgggcgcctatcctcggcaattttttgcacataatcgtggttattctgggtttgttcggcacaatacagtatcgccctaggtacataatggtctacaccgtttggactgcattgtgggtcacctggaatgtattcatcatatgtttttatttggaagtcggcggtttgtccaaagatacggacctgatgaccttcaacatctctgtgcatcgttcctggtggagggagcatggacccggctgtgttcggcgtgtgctacctccaagcgctcacggtatgatggacgattacacttacgtgagcgtcactgggtgcattgtggattttcagtatcttgaagtgattcactctgccgtgcagatcctcctctccatcttctttctctag

SEQ ID NO: 125634 - DNA, 627 bp, synthetic construct
  misc_feature 1..627: note = Description of Artificial Sequence: Synthetic coding sequence
  source 1..627: mol_type = other DNA
atgggatcttgctccggtcggtgcgcattagtcgtgctttgtgccttccaattagtggcagccctcgagaggcaggtttttgacttcctcggataccagtgggcaccaatcctcgctaacttcgtgcacattatcattgttatcctcggcctgttcggtacgattcagtacagactccgctatgttatggtgtacacactgtgggcagccgtttgggtcacatggaatgtgttcattatttgtttttacctcgaagttggaggtttactgaaggacagcgaactcctgactttttctctctcgcgccatcgatcgtggtggcgcgagcgctggcctggttgtctacacgaagaggttcctgctgtggggctaggtgcccctcatgggcaggcattggtctcaggggcaggatgtgccctggaaccttcatacgttgaggccctacattcatgtctgcagatcctgattgctcttctaggctttgtgtgcggttgccaagttgtttcggtcttcaccgaggaagaggatagcttcgacttcataggcgggttcgaccccttcccactttaccacgttaacgagaaaccatccagtctgttatctaaacaggtgtaccttccagcatag

SEQ ID NO: 125635 - DNA, 267 bp, synthetic construct
  misc_feature 1..267: note = Description of Artificial Sequence: Synthetic coding sequence
  source 1..267: mol_type = other DNA
atggctgaatcccggggccgattatacttgtggatgtgtctcgcagccgccctggcaagctttcttatgggatttatggtggggtggttcataaagcctctgaaagagacgactacgagcgtgcggtatcaccagtctatacggtggaaactagtgagcgagatgaaggccgagaacatcaaatcttttctacggtcgttcaccaaactgccacacctggcggggactgagcaaaacttcctgttggccaagaagatacagacctag

SEQ ID NO: 125636 - DNA, 2223 bp, synthetic construct
  misc_feature 1..2223: note = Description of Artificial Sequence: Synthetic coding sequence
  source 1..2223: mol_type = other DNA
atggcagagtcccgcggcagactatatttatggatgtgtctcgctgccgcgctggcaagtttcctcatgggtttcatggtgggatggttcattaagccattaaaggaaactacaacctccgtcaggtatcaccagtcaatcaggtggaaactggtgtctgaaatgaaggcggagaacatcaagtccttcctgcgctcctttactaaattgccccacctagccggcaccgagcagaatttccttcttgctaaaaagattcagacacaatggaagaaatttggattagattcggccaagctggtgcactacgatgttctgctcagttatcccaacgagactaatgcgaactatatttcaattgtggatgagcatgaaaccgagatcttcaagacaagctacctggagcccccgccggacggctacgagaatgttactaatatcgtgccaccatacaacgccttttctgcccagggaatgcccgaaggcgatttggtctacgtaaattatgcgcgtacggaagattttttcaaacttgagcgggagatggggattaactgcacgggcaaaatcgtgatcgccaggtacggcaaaatcttcaggggcaataaggtcaaaaacgcaatgctcgctggcgctattggaattattctctactctgatcccgcggactactttgctcccgaagtgcagccttaccctaagggctggaacttgcctggtactgctgcacagagaggcaatgtgctgaatctcaacggcgccggggacccgcttactcccggttatccagcaaaggagtacacgttccgtctggatgtggaagaaggcgtcggtattcccagaattccggtacaccccatcgggtataatgacgcagagatcttgcttcgatatctgggtggaatagctcctccagacaagtcgtggaagggcgcactcaatgtgtcttatagcattgggcctggtttcacagggtcagactccttccgcaaagtccgcatgcacgtgtataatataaataaaattacacgcatctataacgtcgtgggcacaatccggggttcagttgagcccgaccgctacgtcatcttgggcggacatcgtgattcttgggttttcggcgcaattgaccccaccagtggtgtcgccgtcttacaggagatagcccgcagttttggaaagctgatgtctaaaggatggagaccgcgacggaccatcatcttcgccagctgggatgcagaggaattcggccttctgggaagcacagagtgggctgaagaaaacgtcaaaatactgcaggagcgaagcatcgcatacatcaacagtgacagtagcattgaaggtaactatactttgagggtcgactgtaccccccttttgtaccagcttgtctacaagctcactaaagaaatacctagtccggacgatggtttcgagtcaaagagcctatacgaatcctggctggagaaagaccctagtcccgagaacaagaacttgccacggattaataagcttgggagcggttccgacttcgaggcatacttccagaggctagggatagcctctgggcgggccaggtataccaaaaacaagaaaaccgacaaatactcgtcataccccgtgtaccacacaatttatgagacatttgagctggtagagaagttttacgacccgacgttcaagaagcagttgtctgtcgcccagctaaggggcgctctagtatacgagcttgtcgattcaaagattatccccttcaacatccaggactacgctgaagcacttaagaattacgcggccagcatatataatttaagtaaaaagcacgaccagcagctcaccgatcatggcgtcagtttcgatagtttgttctccgcagtgaagaacttctctgaggcagcctcagacttccataaaaggctgatccaagtggatctgaacaaccctatagccgtacggatgatgaatgaccagttgatgctgctggaacgagctttcatcgacccccttgggcttccagggaaactgttttaccggcacatcatctttgctcccagctcccacaataagtacgccggggagtcttttccgggcatttatgacgctatctttgatatcgaaaacaaggcgaatagcagattagcttggaaagaggtcaagaagcacatctccatcgccgcatttacaattcaggcggctgctggaaccctgaaggaggtgctctag

SEQ ID NO: 125637 - DNA, 1635 bp, synthetic construct
  misc_feature 1..1635: note = Description of Artificial Sequence: Synthetic coding sequence
  source 1..1635: mol_type = other DNA
atgcaatggactaaggtgttggggctcggcctcggcgccgcggctcttctggggctaggtattatcctgggccattttgcgattcccaaaaaggccaattctttagcacctcaggatctggacttggagatcctggaaactgtgatgggtcagttagacgcgcatcgcattagggagaacctccgtgagctgagcagagagcctcacctagctagttccccccgcgacgaggaccttgtgcagctactgctgcagcgctggaaggatcctgaatccggtttagattcggccgaagcatctacttacgaagtgttgctctcttttccgagccaagaacagcctaatgtggtcgatattgttggaccaactggcggcataattcactcatgccacagaacggaagaaaatgtcaccggggaacaggggggacctgatgttgttcagccatacgcagcatacgcgccttctgggacccctcagggattgctagtctacgctaaccggggagccgaagaggactttaaggaactccaaacccaggggattaaactggagggaactattgccctcacccggtacggaggtgttggcaggggagctaaagctgttaacgccgccaagcatggtgtggccggggtgctggtttacacagatcctgctgatattaacgatggactaagctccccagatgaaacattcccaaattcctggtacctgcctccctccggagtggaaagaggatcttactacgagtatttcggagaccccctcaccccttatttacccgcggtgccatcttcttttcgggttgatctggctaatgtgtctggattccctcctattccaacgcagccaatcggctttcaggacgcacgcgacctgctgtgcaacttaaatggtaccttggctcctgccacctggcaaggagcgttagggtgtcactaccgccttggcccaggcttccgtcccgatggcgactttccagccgactcccaggttaacgttagtgtgtacaaccggcttgagctccggaatagttccaatgttctgggtatcatccgcggagccgtcgaacctgaccggtacgtgctatatggcaaccatagagattcctgggttcacggagcggtggatccctcatccggtacagcggtcctgctagagttgtcccgggtgctaggaaccctgctcaagaaggggacctggaggccaagaagatcaattgtgtttgcttcctggggcgctgaggaattcggactgattggaagcacagagttcaccgaggagttcttcaacaaactccaggagaggaccgtggcatacatcaatgtcgacatttctgtgtttgccaacgcgacactcagagtccaaggcactccgccagttcagagcgtggtcttcagcgcgacaaaggagatcagatcacccggaccgggggacttgagtatctacgacaactggatccgctattttaataggtcatccccagtgtatggactggtgccaagagcccggctgcagcccggcagtacaccaccaacaacacagccactgacgccgctcacaatgtggacatctttctggacacgggcttctgcagctattcgcctgtggcctggccagcggggagtctag

SEQ ID NO: 125638 - DNA, 1569 bp, synthetic construct
  misc_feature 1..1569: note = Description of Artificial Sequence: Synthetic coding sequence
  source 1..1569: mol_type = other DNA
atgcagtggacaaaggtcttgggcctcggcctgggagccgcagcccttctcggactagggataatcctcgggcattttgctataccaaaaaaagctaattcattggcgccccaggaccttgatctggagattctggagacagtaatgggtcaattggacgctcatcggatcagggagaacctgcgtgagctgtcccgggagcctcacttggcttcatcgccaagggacgaagaccttgttcaactgctgctgcagcgttggaaagatcctgagtccggtctggactctgccgaggctagcacatatgaggttctgttgtcatttccaagccaagaacagcctaacgtggtcgatatcgtcggacctacgggtggcattatccattcatgccatcgcactgaagagaacgtaaccggcgaacaggggggcccagacgttgtacaaccctatgccgcctacgccccctcagggaccccacaaggattgcttgtctacgccaaccgtggagcagaagaagacttcaaggaattgcagacccagggtatcaagctcgaggggactatcgccctcactcgatacggaggggtcggcagaggcgctaaggccgtgaacgcggccaaacacggagtcgccggagttttagtatataccgaccctgctgacatcaatgacggccttagctcaccggacgagacttttcctaactcctggtacttgccacctagtggagtcgagaggggcagctactatgaatattttggcgaccccttaacaccctacctccctgccgttcccagcagcttccgggtagacctagcgaatgtaagcggattccccccaatccctacccagcccatcgggttccaagacgccagagatctcctatgtaatctgaatggcacgctggcccctgccacttggcagggtgccctcggttgccactaccggctcgggccagggttcagacccgatggcgattttcctgctgactcacaggtaaacgtgagtgtctacaaccgcctggagttgaggaacagtagcaacgtactgggaatcatccgcggagctgtagaaccggaccgatatgttctttacggcaaccacagagactcatgggtgcatggcgccgtggatccgtccagcggcaccgccgtactcctcgaactgtctcgggtgctcggcacattactgaagaagggtacttggcgcccacggcgctctattgtgtttgccagttggggggccgaagaatttgggctgataggctctacagagtttactgaggaattctttaacaaacttcaagaacgcaccgttgcctacatcaatgtcgatatctcagtgttcgccaacgccacactgagagtgcaaggtactcccccagtccagtccgtggtcttcagcgcaactaaagagattcgaagtcctgggcctggagatctctctatatatgacaactggatccggtactttaaccggagctctccggtctacggcttagtgccaagactgcagcagccttcaggttgcgggccagactcaggcgagtgtgattcgccagctcagtag

SEQ ID NO: 125639 - DNA, 2223 bp, synthetic construct
  misc_feature 1..2223: note = Description of Artificial Sequence: Synthetic coding sequence
  source 1..2223: mol_type = other DNA
atgcaatggactaaggtgctgggtttgggactgggggcagctgccctgctcggcctgggcataatccttggccacttcgccataccgaagaaggccaattctttggctccacaagatctggacctggagatccttgaaacagtgatgggtcagctggatgctcaccgcattcgggagaatctgagggaactgtcaagggagcctcacttagcttctagcccccgcgacgaagacctggtgcagttactgctgcagcggtggaaagacccagagtcgggacttgactccgccgaggcttccacttatgaggttctgttaagtttcccgtcccaggaacagcccaatgtcgttgacattgtagggccgaccgggggtatcatacactcgtgtcatcggaccgaggagaatgtgacaggggagcaaggcggcccggatgtcgtccagccttatgcggcatatgcaccctcaggaaccccccagggtctccttgtgtatgctaatagaggtgccgaggaggactttaaagagctccaaacccagggaattaaactggaaggcaccattgccctgacgcgatatggaggagtgggacggggagctaaagctgtgaacgctgcaaagcatggggtagccggcgtgttagtgtatacagacccagccgatataaatgacgggctctcgagtcccgacgaaaccttccccaactcctggtacctgccgccatccggagtcgagcgagggtcctactacgagtatttcggagatccacttaccccctaccttccagctgtgccttcctctttccgcgtcgacctagccaatgttagtggcttcccgcctatccccacgcagcctattggctttcaggatgcccgtgaccttctgtgtaacctgaatggcactctggcccctgccacatggcagggtgctcttggctgccattaccgcctcggaccgggctttcgtccagacggggacttccccgccgattcccaggttaacgttagtgtgtataatagacttgagctacggaactcaagtaatgtactcgggattatcagaggagcagtggaacctgatcgctacgttctgtatggcaaccatagagatagttgggtccacggcgcagtggacccgagctcgggcacggccgtgctgctcgagctctccagagtgcttggaacgttactgaaaaaagggacgtggagaccacggaggtccattgtcttcgcgtcctggggcgccgaggagtttggccttattgggtcgacagagtttaccgaggagttcttcaataaattgcaggagcggacagttgcttacattaacgtcgacattagcgtgtttgctaacgcaacgctgcgggtgcaaggcacccctcctgtgcagagtgtagtttttagtgctacaaaagaaattagatctcccgggcccggagatctcagtatttacgacaactggattcggtactttaacaggtcaagtccagtctatggtctcgtgccctcccttggttccctcggcgccggatccgactacgctcctttcgttcacttcctggggattagttctatggacatcgcctacacttacgacagatcaaagaccagtgctagaatatatccaacctaccataccgcattcgacacattcgactatgtggacaagttcctagacccaggctttagttctcatcaggctgttgcaaggaccgccggatccgtcatcctgcggctgtctgattccttcttcctgccactaaaagtgtctgattattctgagacattacgatccttcctgcaagcagcacagcaggatctgggcgccttgctggaacaacattccatctctttaggacctcttgtgactgcagtggaaaagttcgaagctgaggccgctgcgttaggacaacgaatctcaactttgcagaagggcagcccagaccccctgcaggtccgaatgctcaacgaccagctgatgctcctcgagaggacctttctcaaccctagagccttcccagaggagcgatactactcacatgtgttgtgggccccccggacgggctcagtcgtgacgttccctggactttcaaatgcctgttccagggctcgtgacactgcgtctggttctgaagcatgggctgaggtccaacggcaactaagtattgtggtgacagctttagaaggcgccgctgcaaccctccggcctgtagccgatttatag

SEQ ID NO: 125640 - DNA, 2220 bp, synthetic construct
  misc_feature 1..2220: note = Description of Artificial Sequence: Synthetic coding sequence
  source 1..2220: mol_type = other DNA
atgcaatggaccaaagttcttgggctgggactgggggcagccgcgctcttggggctaggcattattttgggccatttcgctatccctaagaaagctaattctttagctcctcaggaccttgaccttgaaatccttgagaccgtgatgggacaattagacgcccaccgcatacgggaaaacctaagagagttatcaagggagccccacctcgcttccagccctagggacgaggacctggtgcagttgttgttgcagaggtggaaggaccctgaaagcgggttggactcagcagaggcttctacctatgaagtcctcctgtcgtttccttcccaggagcaacccaacgtcgtggacatcgtcgggcctaccggagggatcattcacagttgtcaccggacggaagagaatgtgaccggtgagcagggtggacccgacgttgtccaaccgtatgcagcttatgcaccaagcggaacacctcaggggctcctggtttatgccaatcgcggggcggaagaagatttcaaggagctgcagacacaaggtattaagctggaagggaccatagccttgactaggtatgggggagtgggccggggtgccaaggcggtcaacgctgcaaagcatggggtggccggagtgttagtgtatactgaccctgccgatatcaacgacggcctgagctcccccgacgagacttttcccaactcttggtacctgcccccctccggagttgaacggggaagctactatgaatacttcggcgatcctctcacgccttacctccccgccgtgccgagctcctttcgtgtagatctggcaaatgtgagcggctttccacccatcccaacccagcctatcggcttccaggatgcgcgcgatctcctttgcaatttgaatggtacccttgcacccgccacctggcagggagcgctggggtgtcactatcgcctgggccccgggttcaggcccgacggagatttcccagctgattctcaggtaaacgtatccgtgtacaaccgactggagttacgcaactcatccaacgtcctgggcatcatcaggggagcggtcgagcctgacaggtacgtcttgtacggcaatcacagagattcctgggtccatggcgccgtcgacccatcatccggtacggcagtcctcctggagctcagccgtgtgctgggtactctgctgaagaagggaacctggcggcctcgacgctccatcgtgttcgcaagctggggagccgaggaattcggcctgatcggttccaccgaattcacggaagaatttttcaataagctccaggagcgtacggtggcgtacatcaacgttgatatctccgtcttcgccaatgcgacccttagagtacagggaactcccccagtccaaagtgttgtattcagtgccaccaaggaaatccgatctcctggccctggtgacctctcaatctacgataattggatcagatatttcaatagatctagcccagtctacgggctcgttccatccctcggctccctcggggccgggtccgactatgccccattcgtgcatttccttggtattagctctatggatattgcttacacatatgataggtctaagaccagcgcaagaatctaccctacctatcataccgcctttgacacatttgactatgtcgataagttcctggacccaggattctcttcacaccaagccgtagcgaggacagcaggctcagtgatcctgaggctgagcgatagtttcttccttcctctaaaggtgtccgattactccgaaacgctaagatcttttctacaagctgcacagcaggacctgggcgccctgctggagcagcatagtatatctttgggtcccctcgtaactgctgtagaaaagttcgaggccgaggctgctgcactgggacaacgtataagcacactccagaaaggatctcctgacccattgcaggtgcggatgctcaatgaccaattgatgctcctggaaagaacatttttgaatcccagagcattccctgaagagcggtactattcccacgtgctgtgggcacctagggggctccgatcccacattcccgggcttagcaacgcatgtagcagggcaagagacacagcatccggatcagaagcctgggcagaagtgcagcgacagctgtcaatcgtggtgaccgccctagagggagccgctgccacattgagacctgtggccgatctttag

SEQ ID NO: 125641 - DNA, 405 bp, synthetic construct
  misc_feature 1..405: note = Description of Artificial Sequence: Synthetic coding sequence
  source 1..405: mol_type = other DNA
atggagattagtaagaaaattaaaacccagtggacaagcctggggttagaggatgtgcagtttgtgaattattctgttttattagacttgccaggcccttctccaagcaccgttacccttagtagctccgggcagtgcttccatcccaacggtcagccctgttccgaagaagcgcggaaggattcctcccaggacctattgtatagctacgctgcatatagtgcgaaaggcacattgaaggccgaggtcatagacgttagctacggcatggccgatgacttgaagcggattagaaaaataaaaaacgtaacaaaccagatcgctttgcttaaattagggaagctacctctgctctacaagatgaaagtcctcgataaagctgaccaaacgagccccttgtattag

SEQ ID NO: 125642 - DNA, 2388 bp, synthetic construct
  misc_feature 1..2388: note = Description of Artificial Sequence: Synthetic coding sequence
  source 1..2388: mol_type = other DNA
atgggagaaaatgaagccagcctgcccaatactagtttgcagggaaagaaaatggcttaccagaaggtgcacgcagaccaacgagctcccggccacagtcaataccttgacaatgatgacctccaagcaaccgctttggacctggaatgggacatggagaaggagttagaagagtctgggtttgatcagtttcaactagatggcgctgaaaatcagaacctgggccactccgaaaccatcgatctcaacctcgactccatccagcccgccactagccccaagggccggttccagaggctgcaggaggaatccgactacattactcattatacaagatctgctccgaaatccaatcgttgtaacttctgccatgtgctgaaaatcctgtgtactgccacaatcctgtttatcttcggtatactcatcgggtactacgtccatacgaattgtccaagcgacgcaccatcgagcgggacggtagatcctcaactgtatcaggaaatcttgaagaccatccaggccgaggacatcaagaaaagcttcagaaacctggtgcagttatacaaaaatgaggatgacatggagatcagcaagaaaataaaaactcagtggacctcacttgggttagaagacgtccagtttgtgaattactcagtgctgctagacctgccggggccatcaccatctacagtgaccctcagctcttccggacagtgttttcaccccaacggccagccatgctccgaggaggcccggaaagacagctcacaagacctgctgtacagttacgctgcgtactccgcaaagggcactcttaaggctgaagttatagacgtgagttacgggatggctgatgacttgaagcggattcgaaagattaagaatgtgaccaaccagattgccctcttgaaactgggtaagctacccttgctttacaagcttagcagtctggaaaaggccggtttcggaggtgttttgctgtacattgacccttgtgaccttcccaagaccgtaaatccgagtcatgacacatttatggtatccctaaatcccggtggagatcccagcaccccagggtacccaagcgtggatgaatcgttccgacagtctcggtccaatctcacctcgttgctagttcaaccaatctccgcccctctggtggctaagttaatatctagccccaaggccaggaccaagaatgaagcctgttcttcgctggaactgccaaacaatgagattcgggtcgtgtcaatgcaggtccaaactgtaaccaagctgaagaccgtgactaacgtggtgggttttgtgatgggcctgacttcccccgatcggtatattatcgtaggatctcaccaccacactgcacacagctataatggacaggaatgggcttccagcacggctattattacagccttcatcagagcactgatgtcaaaggtgaaaagaggatggagacccgatcgcaccatcgtcttctgcagttggggtgggaccgccttcggcaacattggatcatatgagtggggggaggacttcaagaaggtgctccaaaaaaacgttgtcgcttatatctccctgcatagccctatacggggcaatagttcattgtatcccgtggcaagtcccagtcttcaacagctggtggtcgaaaaaaacaacttcaattgcacacgcagggcacagtgtcctgagactaatatctcgtctatccaaattcagggggacgcagactatttcataaaccatctgggggttcccattgtccagttcgcctacgaggatatcaagaccctcgaaggtccaagcttcttatctgaagcacgatttagcaccagagcaactaagattgaagaaatggatccaagcttcaatctccacgaaacaattaccaagctctcaggggaggttatcttgcagatcgccaatgagccagtgctgcccttcaatgccctggatattgctttggaagtgcagaataaccttaaaggggatcaacctaacacccatcagctactggccatggccttgcgattgcgcgagtccgctgagctgttccagtccgatgagatgcgacctgcaaacgatcctaaggagagagcccccatcagaatcaggatgctgaacgacatcctacaagatatggagaaaagctttctggtgaagcaagctccaccggggttctaccggaatattctctaccacctcgatgagaagacatcacggtttagcatcctgattgaagcttgggagcactgcaagcccctggcgagtaacgagacacttcaggaagctctgagtgaggttctgaattccatcaatagcgcccaggtgtattttaaagctggcctagacgtattcaaatctgtcttggacgggaaaaactag

SEQ ID NO: 125643 - DNA, 1236 bp, synthetic construct
  misc_feature 1..1236: note = Description of Artificial Sequence: Synthetic coding sequence
  source 1..1236: mol_type = other DNA
atgctgttaaagacagtcctactgctcgggcacgtggctcaggtgcttatgctggataatggccttctgcagaccccacccatgggctggctagcctgggaaagattccgctgtaacatcaattgcgacgaggatcccaagaattgtatctccgagcaactgttcatggagatggctgataggatggctcaggatggttggagggatatggggtacacctacctgaacatcgacgactgttggatcggaggccgcgacgcatctggccgccttatgccggatcctaagcgttttccacatggaattcctttcctggccgactatgtgcatagtcttgggttgaagctcgggatatatgcagatatgggcaactttacgtgtatgggctaccctgggaccacactagacaaagtcgtgcaagacgcccaaacatttgcagagtggaaagtggatatgctgaaattagacggctgtttctccacccccgaagagagagctcagggttatcccaagatggccgctgccctgaacgccacaggcaggcctatcgccttttcctgtagctggccagcttatgagggagggcttcctccgcgcgtcaattacagtctacttgcagacatttgcaatctctggcggaactacgacgacatacaagactcatggtggagtgttctctctatcttgaattggtttgtggagcatcaagacattctgcaacctgttgcaggccctggtcattggaacgacccagatatgttactcattggcaatttcggcctatccctggagcagtcacgggctcagatggccctctggaccgttctggccgcacctctgcttatgagcacagacctcaggacaatctctgctcagaatatggacatcctgcagaaccctctgatgattaaaatcaatcaggatcccctgggaatccagggaagaaggattcacaaggagaaatcattgatagaggtttatatgagacctttgtccaataaagcctcagctctggtttttttctcgtgtagaaccgatatgccttataggtaccactcgtctcttggtcagctgaatttcaccggctctgtcatctatgaagcccaagatgtttattctggagacattatctctggacttagggacgagacgaactttactgtaattataaatccctccggcgtggtaatgtggtacctttatccaatcaagaatcttgaaatgagtcagcagtag

SEQ ID NO: 125644 - DNA, 1236 bp, synthetic construct
  misc_feature 1..1236: note = Description of Artificial Sequence: Synthetic coding sequence
  source 1..1236: mol_type = other DNA
atgctcctcaaaacagtcctgctgctcgggcacgtggcccaggtgttgatgctggataatgggctccttcagacaccgcccatgggatggttagcatgggagcgcttccgctgcaatatcaactgcgatgaagatccgaagaattgcattagtgaacagctgttcatggaaatggccgatcggatggcccaggacgggtggcgagacatggggtacacttatctgaacatcgatgactgttggatcgggggccgcgacgcgtccgggagactcatgcctgatccgaagcggtttccacacggaatacccttcctggccgactacgtccactccctcggacttaaacttgggatatatgcagatatggggaattttacctgtatggggtatccaggtactacattggataaggtggtacaggacgcacagaccttcgcggagtggaaagttgacatgcttaagcttgatggctgtttctctaccccagaggagagagctcagggttatccaaagatggcagccgctctaaacgcgaccggcaggcctattgcgttttcgtgtagctggcccgcctacgaaggcggattgccgcccagagtgaactattctctgcttgccgacatatgcaacctctggcggaattatgatgacattcaggacagctggtggagcgttctgtctattcttaattggtttgtggagcaccaggatattctacaacccgtggctgggcccggccactggaatgatcccgacatgctccttatcggtaacttcggtctgtccttagaacaatccagggcacaaatggccttgtggactgtcctggctgctccgctcctaatgagcactgacttgaggacaataagcgcccagaatatggatattctgcagaatcctctcatgattaagataaaccaggaccctcttggcatccagggtcggcgcattcacaaggaaaagagcctaattgaggtctacatgcgtcctctgtcaaataaggcaagcgctctggtattcttcagctgtaggactgatatgccatataggtaccactcctctctcgggcagctgaactttactggcagtgtgatatacgaggcgcaggatgtctacagcggggacattattagtggtctgcgggacgagaccaactttacagtgattatcaacccctcgggagtggtgatgtggtatctgtatcctattaagaatctggaaatgtctcagcagtag

SEQ ID NO: 125645 - DNA, 1236 bp, synthetic construct
  misc_feature 1..1236: note = Description of Artificial Sequence: Synthetic coding sequence
  source 1..1236: mol_type = other DNA
atgctgctaaaaacggttttgctgctcgggcatgtggcccaggtgctcatgttggacaatggcctactgcagactcccccaatggggtggttagcatgggaacgcttcagatgcaacattaactgcgacgaggatccaaagaattgcatcagcgaacagctgtttatggagatggccgatcgcatggcccaggacgggtggcgcgacatgggatacacgtacttgaacatagatgattgttggatcggaggcagagatgctagtggcagactgatgcctgaccccaaacgctttccacacggcatacccttcttggccgactatgtccactccctgggattgaaattgggaatttatgcagacatggggaacttcacttgcatgggctatcccgggacaaccctggacaaagtcgtccaggacgcacagacatttgcagagtggaaagtcgacatgttgaaacttgacggatgcttttcaacgcccgaagagcgggcccaagggtatcccaagatggcggcagctttgaacgcaaccggccggcccatagccttctcctgctcttggcccgcctatgaggggggtctgccgccaagagtgaactacagtctcctggccgatatatgtaatctctggagaaactatgatgatattcaagactcttggtggagtgtgctctctatccttaattggttcgtggaacaccaggatatactccagcctgtggccgggcctggccattggaacgaccccgatatgcttctgatcgggaattttggcctgagtctggagcagtcacgagcccaaatggccttgtggaccgtgctggccgcacctctgctgatgtccaccgacctcagaactatttctgcgcagaatatggacatcctgcagaatcctctcatgatcaaaattaaccaggaccccctgggtatccagggaagaaggatccataaagaaaagagtctaatagaggtgtatatgagaccgttgtccaataaagcaagcgctctggtcttttttagctgccggacagatatgccatatagatatcattccagtcttggacaactgaatttcaccggatcagtgatctacgaagcccaagacgtgtactccggggatataattagcggactccgtgacgagacgaattttactgtgataatcaacccgagcggcgtggtgatgtggtacctgtatcccatcaaaaatttggagatgagtcagcaatag

SEQ ID NO: 125646 - DNA, 1035 bp, synthetic construct
  misc_feature 1..1035: note = Description of Artificial Sequence: Synthetic coding sequence
  source 1..1035: mol_type = other DNA
atggcagcgatctatggcggtgttgagggcggaggcacaaggtctgaagtcttgctggtgtccgaggacgggaaaatcctggccgaggccgacggcctctccacaaaccactggttaataggaacggacaagtgtgtggaaaggatcaatgagatggtgaaccgcgctaagcgaaaggctggcgttgatcccctcgtcccgcttagatctttaggcctttctctatccgggggagaccaggaggacgctggaaggattttgatagaggaactgcgtgaccgatttccgtatcttagcgaatcgtacctaattacaacggatgccgctggatcgattgcgactgcaacccctgatggtggcgttgtgttgatctctgggacaggctcgaattgtagactaattaatcctgatggttcggagtctggttgtggagggtggggtcacatgatgggagatgagggctctgcctattggatagcccaccaggccgtcaagatcgtgtttgattccattgacaatctggaagcagcaccccacgatattggttacgtaaaacaggccatgttccattactttcaggtcccggacagacttggcatcctcacgcacctataccgagacttcgacaagtgccgcttcgctgggttttgtaggaaaatcgcagagggggctcagcaaggagaccctctttctcgatacatcttccgaaaagctggcgagatgctggggagacacatcgtggctgtcctgccggagatcgatccagttctcttccagggcaaaatagggttgcccattctgtgcgttggctccgtgtggaagagttgggaactgctgaaagaaggattcttattggcattaacacagggacgtgaaatccaggctcagaattttttctcctccttcacattgatgaaactgcgtcattccagtgcgctaggcggcgccagtcttggcgctcgtcacataggacacctactgcccatggactacagcgccaacgcaattgccttttatagctatacatttagctag

SEQ ID NO: 125647 - DNA, 1173 bp, synthetic construct
  misc_feature 1..1173: note = Description of Artificial Sequence: Synthetic coding sequence
  source 1..1173: mol_type = other DNA
atgcggacccgaactgggtcacagctggctgcacgggaagtcactggctcaggcgctgtccctagacagttggaaggtcgacgctgccaggccgggagagacgctaatggcgggacctcctccgacggctcctcctctatggcagcgatctatggcggcgtcgaaggcgggggcacacgatctgaagtattgctggtgagtgaggatgggaaaatactggcagaggcagacggattaagtacgaatcactggctgatcggcacagacaaatgcgtcgagcgcataaacgagatggtgaatagagctaaacggaaggccggtgtggaccctcttgtgcctctgcgctctctcggtctctccctatcagggggcgaccaggaggacgccggccgaatcttaattgaggagctgagagatagattcccatacctgagcgaatcttatctcatcacaaccgacgcggcggggtcgatagctaccgcaacacccgatggaggcgttgtcctgatcagcggaacagggtcaaactgccggttaatcaatccagatggatctgaatcaggctgcggcgggtggggtcatatgatgggcgatgaaggctctgcgtactggatagcccatcaggccgtgaaaatcgtattcgactcaatagataacctggaggcggcccctcatgacatcggttacgtgaaacaggccatgtttcactactttcaagtccctgatcggcttgggatcttaacccacctataccgcgattttgataaatgccgctttgccggcttctgtcgtaaaatcgcggagggggcacagcagggtgacccgctgtcccgctatattttccggaaggccggcgagatgcttggccgacatatcgttgcagtgctgcctgagatcgaccccgtgctctttcagggcaagatcggcctgcccatactgtgtgtcggctctgtttggaagtcttgggagctgctcaaagagggatttttgctcgcacttacccaaggccgtgagatacaggcacagaatttcttctcatcgtttacgctgatgaaattacgccattcaagcgcgctcgggggtgccagtctcggggctcgacatatcggccatctgctgcctatggattattccgcgaatgcaattgccttctactcgtacactttcagttag

SEQ ID NO: 125648 - DNA, 1548 bp, synthetic construct
  misc_feature 1..1548: note = Description of Artificial Sequence: Synthetic coding sequence
  source 1..1548: mol_type = other DNA
atggccaccagcaccgggcggtggctcctgcttaggctggccctgtttgggttcttatgggaagcaagcggcggactggacagtggtgcgtcccgcgatgacgatttactgctgccatatccccgagcacgcgcaagactgccccgggattgtacgagggtgcgagcgggaaaccgagagcatgagagctggcccccgccacccgctacccccggggctggcggcctggccgttcgaacatttgttagccactttagagaccgggcagtggcgggacatctgactagagctgttgagcctctcaggaccttcagcgtgcttgagccaggtgggcctggcgggtgtgccgccaggcgccgggcaacagttgaggaaacagcccgcgccgctgattgcagagtagcccagaacggaggcttctttcggatgaactctggcgagtgcctgggtaatgttgtgtcagacgagagaagggtgtccagttccggaggactgcagaacgctcaatttggcattaggcgagatggaacgctcgtgaccggctatctttcggaggaagaggttctcgacacagaaaatccctttgtacagttattgtcgggcgtggtgtggctgatacgcaacggcagcatttatataaacgagtcgcaggcaactgagtgcgatgagacacaggaaactggatcgttttcaaaattcgtcaatgtgataagcgccaggaccgccattggtcatgacaggaaaggccagttagtgttgtttcatgccgatggacaaacagaacagcgcggcattaacctgtgggagatggccgaattccttctgaagcaagatgtggtgaacgcgataaaccttgacggcggcggctccgctacctttgttctgaacggcactctggcatcttacccttccgaccattgccaggataacatgtggcgctgtcccaggcaagtgtccacggtggtatgcgtgcatgaacctaggtgtcagcccccagattgtcacgggcacgggacctgcgtggacgggcattgtcagtgtaccggacatttttggcgcggccctggatgcgacgaactggactgtgggccaagcaactgttcgcagcatgggttgtgtacagaaacaggctgtagatgcgatgcaggctggaccgggagtaattgttccgaagagtgtcctctgggttggcatggccccgggtgccaacgcccctgcaagtgcgaacaccattgtccctgcgatccgaagacgggcaattgttcagtttcacgggtcaagcagtgtcttcagccccctgaggcgaccctccgcgccggcgagctatcattcttcacacgtactgcctggctggcactcacgctagcgctggccttcctactgctgatcagcaccgccgccaacctatcactgttgctgtccagggccgaacggaatagacgactgcatggcgattacgcgtaccatccacttcaggaaatgaatggggagcccttggccgctgagaaggagcagccgggcggagcgcacaacccattcaaagattag

SEQ ID NO: 125649 - DNA, 1446 bp, synthetic construct
  misc_feature 1..1446: note = Description of Artificial Sequence: Synthetic coding sequence
  source 1..1446: mol_type = other DNA
atggccacttcaacaggccgctggttactgttgcgacttgcactgttcggtttcctgtgggaggcctccggtggccttgatagcggagcctcccgggacgacgacctactccttccatatccaagagcccgcgcacggctgccaagggactgtacacgggttcgggctggtaaccgcgaacatgagagttggccgcccccaccggctacgcctggggccggcgggctggctgtccggaccttcgtttctcatttccgagatagggcagtggccggacatttaacccgggctgtagaaccgttaagaacttttagcgtactggagcctgggggccctggcgggtgcgccgcgagacgaagggccacagtggaagagactgcgagagcagccgactgccgggtggctcagaatggagggttttttaggatgaactctggggaatgcttgggcaatgtggtcagcgacgagcgccgtgtttcctcttctggggggttgcaaaacgcacagtttggtatccgacgtgacggaacactcgtgacagggtacctgtctgaggaggaggtcctcgataccgaaaaccctttcgttcaacttctctctggcgtggtgtggttgatccggaacggaagtatttatatcaacgaatcgcaggctactgaatgtgacgaaacccaagagaccggcagtttctcaaaatttgtgaacgtgatctccgctagaaccgccataggtcatgaccgcaaggggcaacttgtgctttttcacgccgatggccagactgagcagcgtggaataaatttgtgggagatggctgagtttctgctgaagcaggatgtcgtgaatgcgatcaacttagacgggggaggaagcgccaccttcgtcctcaatggaacactagcctcttaccctagcgatcactgtcaagataacatgtggcggtgcccccggcaggtatccaccgttgtgtgtgtccacgagccccgatgccagcctcccgattgtcacggtcatgggacctgtgtcgatggacactgtcagtgcacaggccatttttggcggggccccggatgtgacgagcttgactgcgggcctagtaattgctctcagcacgggctttgcaccgagaccggttgccgctgcgatgctggctggactggctcaaattgttccgaagtgaaacaatgtctgcaaccacccgaagcaacccttagggcgggtgagcttagtttctttacccggacggcatggctggccttgacccttgctctcgctttcctgcttctgatctccaccgccgcaaatctgtccctgttgctgtccagggccgaacgtaaccgccgtctgcatggtgattacgcctaccatccactacaggaaatgaacggcgagccccttgccgccgaaaaagaacaacctgggggcgctcataacccctttaaagattag

SEQ ID NO: 125650 - DNA, 2514 bp, synthetic construct
  misc_feature 1..2514: note = Description of Artificial Sequence: Synthetic coding sequence
  source 1..2514: mol_type = other DNA
atggcggagcccagccaagcgcccaccccggctccagctgcacagccccgacccttgcagtctcccgcccccgcgccgacccccacacccgccccttctcctgcatctgccccaattcctacgccgaccccagcaccagcacctgcccctgccgccgcccccgccggcagtacgggaactgggggcccgggcgtcggcagcggcggcgcaggctccggcggggatcctgctcggcctgggctgagtcagcagcaacgcgcctcacagcggaaagcccaggttaggggtctcccaagagcaaagaagctggaaaaactcggggtgttctctgcatgtaaggcaaatgagacatgcaagtgtaacggctggaagaatcccaagccaccaacggcccctcgcatggatctgcaacagcccgccgcaaatctctccgagctgtgcaggtcctgtgagcaccctcttgctgaccacgtcagccacttagagaatgtcagcgaggatgagatcaaccggcttctcgggatggtagtggacgtcgagaacctctttatgagcgtgcataaagaagaggacaccgacactaagcaggtttacttctacttgtttaagctgctgaggaagtgcattcttcaaatgacacgccctgttgtcgaaggttccctcggaagcccaccttttgaaaagcctaatatcgaacagggagtactcaattttgtccaatataagttcagtcacctcgccccgcgagagaggcagaccatgttcgaactgtctaagatgttcctcctgtgccttaattattggaagctcgaaaccccagcacagtttcggcagcgaagccaggccgaggatgttgcgacatacaaggtgaattatacaaggtggctgtgttattgccacgtgccacagtcttgtgactctctcccgaggtacgaaactacgcatgtgtttggacgttcgttattgagaagcatttttacggtaaccagacgacagctgctggagaagtttcgcgtcgagaaagacaagctcgtgccagagaagaggacgctaatcctaactcacttccctaaatttttgagcatgctggaggaggaaatctacggtgccaacagccctatctgggaatcagggttcactatgcctccatccgaaggtacccagctcgtacccagaccagctagtgtgtccgcggcggtggtgccaagcacacccatcttcagtcccagcatggggggcgggtccaactcctccttgagcctcgactccgccggagctgagccaatgccgggcgagaagaggacactcccagaaaacctgaccctcgaagatgcgaagcggctgcgggtgatgggggacatccccatggagctcgtcaatgaagttatgcttactataactgaccctgccgctatgctgggcccagaaacgagtctactatccgccaatgccgcacgcgatgagacagctcgcctggaagagaggaggggtattattgaattccacgtaatcgggaactccctgacgccgaaggctaacagacgagtactcctgtggctggtggggctccaaaacgtgttctctcaccagttaccccggatgcccaaagagtatattgcccggctggtgttcgacccgaagcataagacactcgctctgataaaggatggcagggttatcggcgggatctgtttccgaatgttccccacccagggatttaccgaaatcgtgttctgcgccgtgaccagtaacgagcaggtaaaaggatacggcacccacctcatgaatcacttaaaggagtaccatatcaagcacaacatcctgtactttctgacctatgctgacgagtacgccattggttactttaaaaagcagggctttagtaaagacattaaggtgcctaagtcacgatatctcgggtacatcaaggactatgagggtgccactctaatggaatgcgagctgaacccccgaatcccctatactgagctgagccacattattaagaaacagaaagagatcatcaaaaagcttattgagagaaaacaggcacagatccgaaaggtgtaccctgggttgtcgtgctttaaagaaggtgttagacagattccggtcgaatcagtgccaggaattagagagaccgggtggaaaccattgggcaaggagaaaggtaaggagttgaaggatcctgaccagctctacacaaccctcaagaacctcctggcccagattaaatcacacccttccgcctggccattcatggagcccgtcaaaaagagcgaagcacccgattactacgaggtgattagattccccatcgacctcaagaccatgaccgagagactgcggtctcggtactacgtgacacgaaagctattcgtggcagacctgcagagagtgatagctaactgtagggaatataatcccccagattccgaatattgtagatgtgcatccgcgctggagaaatttttctacttcaaactcaaagaggggggcctcatagacaagtag

SEQ ID NO: 125651 - DNA, 1260 bp, synthetic construct
  misc_feature 1..1260: note = Description of Artificial Sequence: Synthetic coding sequence
  source 1..1260: mol_type = other DNA
cctcaatgttgtctgcactcccgagggatgttcccacggctgagtccagttgatacagaggcagtatggctcctccaggggtggctttttcagcaccagccacaattttgggggccagcccagattagagccgtgctgggtgctgtcccaagaggccgactcctcgtgctagatctgtttgctgagtctcagcctgtctatactagaactgcttccttccaaggacagcccttcatctggtgtatgctgcacaactttggtggaaaccatggcctgttcggagcgctcgaggcagtaaacgggggaccagaggctgccaggctgtttcccaactccaccatggtagggacaggaatggcgcccgagggtatcagccagaatgaggtcgtctattccctcatggcagaactcgggtggagaaaagaccccgtgcctgatctggccgcctgggtcacctccttcgctgctcgaaggtacggcgtcagtcatcccgatgctggagccgcctggagactgctgctgcgctccgtgtataattgtagtggcgaagcttgccgcggtcacaacaggagtcctcttgtaagaaggccaagcctgcaaatgaacacaagcatttggtataacagaagtgatgtcttcgaagcctggcgcctcctactgactagtgccccctcgctggcgacatcaccggcctttagatacgacctccttgatctcactagacaagcagttcaggaactcgtgtctctgtactatgaggaggcccgaagcgcttacctgagcaaggagctagcatcgctgctacgcgcaggcggagtccttgcctacgagctgcttcccgcccttgacgaggtgttagcgtccgattcaagattcctgttgggctcctggctggagcaagcgcgcgcagctgccgtgagtgaagcggaggccgacttctatgaacagaattcgcgttaccaactaacattgtggggccccgaagggaacatcctcgactacgctaataaacagctggctgggctcgtggcaaattactataccccacgctggagactgtttctcgaggcattggtggactccgtggcacagggaatcccatttcagcaacatcagtttgacaagaatgtattccagctcgagcaagcatttgtgctatctaagcaaagatacccttcccagccccgaggcgacaccgtggatttggcaaagaagatcttcctgaagtactacccccgctgggtcgcgggaagctggtag

SEQ ID NO: 125652 - DNA, 963 bp, synthetic construct
  misc_feature 1..963: note = Description of Artificial Sequence: Synthetic coding sequence
  source 1..963: mol_type = other DNA
atggctttccctaagaaaaaactgcagggcttagtggcggccacgatcaccccaatgacagagaacggtgagatcaacttttcagtaatcgggcaatatgtggactacttggtcaaggagcagggcgtcaagaatattttcgtaaacggtactactggagaggggctcagcctgtccgtttctgagcgcaggcaggtcgccgaggagtgggtgacaaagggcaaggataagctcgaccaggtaatcatccatgtcggggcgctgagtctgaaagaatcacaggagctggctcagcatgccgccgaaatcggggccgatggtatcgctgtgattgctcccttttttcttaagccatggaccaaagacatcctgataaatttcctgaaagaagtggccgctgccgcacccgctctgcctttctattactaccacataccggcactcactggtgtcaaaatcagagctgaggagctattagacggcatccttgacaagatccctacatttcaggggttgaaattctcggatactgatcttctcgactttggtcagtgtgtcgatcagaataggcagcagcaattcgcattcctctttggggtggacgaacagctactgagcgccctggtaatgggagctacaggcgccgtggggtccacatataactacctgggcaaaaaaaccaatcaaatgcttgaggcatttgaacagaaagacttttcccttgctctgaattatcagttttgtatccagcggttcatcaatttcgttgtcaaactgggttttggtgtgtcacagaccaaagcaatcatgacactcgtgtctggtatccccatgggccccccccggctcccgctacagaaggccagccgcgaatttactgactctgcagaggcgaaattgaagagtctggatttccttagctttacggacctgaaagatggcaacctggaggcggggtcctag

SEQ ID NO: 125653 - DNA, 330 bp, synthetic construct
  misc_feature 1..330: note = Description of Artificial Sequence: Synthetic coding sequence
  source 1..330: mol_type = other DNA
atggcatttccaaaaaagaaactgcagggcttggtggccgcaaccattacgccaatgaccgaaaatggcgagatcaacttctctgttataggacagtacgtggactatttggtaaaggaacagggtgtcaagaatatcttcgttaatgggacaacaggcgagggattgtccctgtcggtttccgaacgccggcaggtggccgaagagtgggtgactaagggaaaagacaagtcaaatcatcacaagctcgggactataagaaccactcagagcagaagatcttcatttaggagacagcttaaagcgtggcacagcggcagccacctctag

SEQ ID NO: 125654 - DNA, 558 bp, synthetic construct
  misc_feature 1..558: note = Description of Artificial Sequence: Synthetic coding sequence
  source 1..558: mol_type = other DNA
atgtcccgggctcccgggattttagcctcatggcgccgtgcaccctctctctccgtgcagaagggttcccagacagcacggcatacttgtcatcccgaggtgcctctggggaactgctttctccccgtctataaagcttccccgctcacggtgacgcgactctgggccgagagactggatcaagttatcattcacgtcggcgcgctatccctcaaggaaagccaggagctggcacaacatgctgcagaaatcggagctgacgggatcgcggttattgctcctttcttcctgaaaccatggaccaaggacatcctcatcaatttcttgaaggaggtggccgcagcggcaccagctttgcccttttattattatcatatcccagctttaacgggtgtaaagataagagcagaagaactgttggacgggattttggacaaaatccctaccttccagggactgaagttttctgacaccgacctgctggatttcggccaatgcgtcgaccagaaccgccagcaacaatttgctttcctgttcggcgtggacgaacacctgtag

SEQ ID NO: 125655 - DNA, 723 bp, synthetic construct
  misc_feature 1..723: note = Description of Artificial Sequence: Synthetic coding sequence
  source 1..723: mol_type = other DNA
atggcgtttccaaaaaagaagttacagggtcttgtggcggcgactatcacaccaatgaccgagaacggcgagatcaatttctccgtgatagggcagtacgtcgactacctggtgaaggagcaaggcgtaaaaaatatctttgtgaatgggacaacaggtgaggggctctctctgtcagtgagtgaacggcggcaagtcgcagaggagtgggtaactaagggcaaagataagcttgatcaagtaatcatacacgtgggtgctctgagtctcaaagagtctcaagagctcgcacaacatgcggcggaaatcggcgccgacggtatcgccgtcatcgcgccctttttcctgaagccctggactaaagatatactgataaatttcctcaaagaggtcgcagctgccgctcccgctctgcctttctactactaccacattcccgccctgactggcgttaaaatcagagcagaggagcttctcgatggaatcctggataaaatcccaacctttcaggggcttaagttcagcgacacggacctcctcgatttcgggcagtgcgtcgatcagaatcgccagcagcagttcgctttcttatttggggtcgatgagttttgtattcagaggttcatcaattttgtagtcaaactcgagaatagtaaactcaaggtttcaaagaaccagcgcactctgcctctgggtaccacgaatttcccttttctccactag

SEQ ID NO: 125656 - DNA, 963 bp, synthetic construct
  misc_feature 1..963: note = Description of Artificial Sequence: Synthetic coding sequence
  source 1..963: mol_type = other DNA
atggcctttcctaaaaaaaagctgcagggactggtggctgctactattacgcccatgaccgaaaatggggagattaatttcagtgtgatcgggcagtacgtggattacttggttaaagagcagggagtcaagaacatctttgtgaacggcaccacaggagaaggcctgagtctgtcagtgagcgagagacgtcaggtggccgaagaatgggtgaccaagggaaaggataagctggaccaggtgatcattcatgtaggcgccctctctcttaaggaatcccaagaactcgcccagcatgcggccgaaattggcgccgacgggatcgctgttatcgccccattcttcctaaagccatggacaaaagatatactcattaactttctgaaggaggtggccgctgctgcaccagccctccccttttattattaccatataccggcactaaccggcgttaaaatcagagccgaagagctgctggacgggattctagataagatccctactttccagggactgaagttttcagataccgaccttttggattttggacagtgcgtcgatcagaatcggcaacagcagttcgcctttcttttcggagtggacgagcagcttctgtccgcactcgtcatgggcgcaactggcgccgtgggatccacttacaattatctgggaaagaagacaaaccagatgctcgaggcttttgaacaaaaggatttctccctggccttgaattatcagttctgcatccagagatttattaatttcgtggttaaactcgggttcggtgtgagccagactaaagccattatgacactggtatccggaatcccaatggggcccccgagactccctctgcagaaagcgtctcgggaatttacagacagcgctgaggctaagttaaagtctctggactttctcagcttcacagacctgaaagacggcaacctagaagcgggaagttag

SEQ ID NO: 125657 - DNA, 906 bp, synthetic construct
  misc_feature 1..906: note = Description of Artificial Sequence: Synthetic coding sequence
  source 1..906: mol_type = other DNA
atgtctcgggcccctgggatcctggcctcatggcggcgcgctccctcactgagcgttcagaaaggcagtcagacagcacgacacacatgtcacccagaggttcccctggggaattgcttcctgcctgtatataaggcctcgcccttgacagtgactagactgtgggcagagcgcctggaccaggtcatcattcacgtgggggccttgtcgttgaaagagagccaggagctggcacagcacgctgccgaaatcggggccgatggaatcgcagtcatcgcaccttttttcctcaagccttggacaaaggatattctcattaactttctcaaagaggttgctgctgccgcgccagccctgcctttttactactatcacattccagcgctgacaggcgtaaaaatcagggctgaagagctgctggacggcattttagacaagatcccaacctttcagggtttaaagttttcagataccgatctgttggactttggtcagtgcgtggaccaaaataggcaacagcagttcgctttcctctttggagttgatgagcagctactgtctgcacttgtgatgggtgctaccggggcggtcggaagcacttacaattatttaggtaaaaaaactaaccagatgctcgaggctttcgagcaaaaggacttttctctcgccctaaactaccagttctgcatccagcgatttatcaacttcgtggtgaagttggggtttggggtgtcccagaccaaagctatcatgaccctcgtgtcgggaatccccatgggtcccccccgcctacctctacaaaaagcctcaagagaatttacagacagtgcggaggcgaaactcaagtctctggactttcttagctttaccgatctgaaggacggtaacctggaggctggaagttag

SEQ ID NO: 125658 - DNA, 723 bp, synthetic construct
  misc_feature 1..723: note = Description of Artificial Sequence: Synthetic coding sequence
  source 1..723: mol_type = other DNA
atggcctttccaaagaagaaacttcaaggcctcgttgcagccactatcaccccaatgacggagaatggcgagattaactttagcgtcattgggcagtatgtggattatctggttaaagagcagggcgttaaaaatatctttgtcaatggcaccacgggggagggcctatccctgtctgtgagtgagcgacgacaggtcgctgaggagtgggtgaccaaaggcaaggacaagcttgaccaggtgatcattcacgtcggagccctgagtctcaaggaatcacaagaactcgcacagcacgccgctgaaatcggcgccgacgggatagccgttatcgctccatttttccttaagccctggaccaaggacattctgattaatttcctcaaggaagtggccgctgccgctccagccctgcccttttactactatcacattcccgctctgaccggagttaagattcgggcggaggagctactggacggaatcctggataagattcctacattccagggactaaagtttagcgacacagatctgctggacttcggacagtgtgtggaccagaatcgacagcagcaatttgcattcctgttcggcgtggatgagttttgcatccagagatttattaacttcgtcgtcaagttagagaacagcaagctgaaagtttcaaaaaaccagcgcactctcccccttggtacaacaaacttcccatttctgcattag

SEQ ID NO: 125659 - DNA, 624 bp, synthetic construct
  misc_feature 1..624: note = Description of Artificial Sequence: Synthetic coding sequence
  source 1..624: mol_type = other DNA
cgagaaggacagaaagggtcacaaacagcccggcacacctgtcaccccgaggtgccactgggtaattgtttccttcccgtctataaggctagcccattgaccgttacgcggctttgggccgaacgcctggaccaggtaatcattcacgtaggcgctctctccctgaaggagtcccaagagctggcccagcacgccgctgagatcggggcagatggcatcgcggtcattgcccctttctttctcaaaccttggacgaaagacatactcattaactttctgaaggaagttgccgccgctgcaccggctctacctttttactattaccacatcccggcactgacaggagtgaaaactactgtggagtgctcgggcgacggtagcaactggtcgtcaggacagttctgcatacagcgctttatcaactttgtggtcaaattgggtttcggtgtcagccagaccaaagctattatgaccctcgtttcaggtatccccatggggcccccgcggctgccactgcagaaagccagccgggaattcaccgattctgcggaggccaagctgaaaagtcttgatttcctgtcctttaccgaccttaaggacggcaacctggaggccggtagctag

SEQ ID NO: 125660 - DNA, 747 bp, synthetic construct
  misc_feature 1..747: note = Description of Artificial Sequence: Synthetic coding sequence
  source 1..747: mol_type = other DNA
atgggattaagccgggtgagggctgttttcttcgacctggacaataccttgattgataccgccggcgccagccgccggggaatgctggaagtgattaagctcctccagagtaagtatcattacaaggaggaggctgaaattatatgtgataaggtgcaagttaagctctctaaagagtgctttcacccctataacacctgtattaccgacttgcgcacatcccactgggaggaggcaattcaagagaccaaaggtggggccgctaatcgaaaattagccgaggagtgttattttctgtggaaatctacccgtctccagcacatgaccctggcagaagatgtcaaggctatgctgaccgagctgaggaaggaagtacgtctcctcctgctgaccaacggggacagacaaactcagagagaaaaaattgaggcttgcgcgtgtcaaagctattttgatgccgtagtggtgggaggggaacagagagaagaaaaaccggccccctccatattttactattgttgcaacctgctgggggtgcaaccaggagactgcgttatggtgggtgacacactcgaaactgatattcagggcgggctgaatgccggcctgaaggctacggtgtggataaacaagaacggcatcgtgcctctgaagtccagtcccgtgccccattacatggtctccagcgtattagagctgcccgctctgctgcaatcaatagactgcaaggtgagcatgtccacgtag

SEQ ID NO: 125661 - DNA, 1515 bp, synthetic construct
  misc_feature 1..1515: note = Description of Artificial Sequence: Synthetic coding sequence
  source 1..1515: mol_type = other DNA
atggcagcgcaggccctagctctgctgcgcgaggtcgctcgccttgaagctcccctggaggagctgcgtgctctccattctgtcctgcaggcagtgccgctaaacgagttgcgacagcaggccgccgagctgcggctcggtcctctgttctcactcctgaatgagaaccatagagaaaagaccaccctgtgtgtcagtatccttgagagattgctgcaggccatggagcccgtccatgtggccaggaacctccgagtggatctgcagcggggtctcatccatcccgacgacagcgtgaagattctcaccttgtcccaaatagggagaatcgtggagaactccgatgccgtaacggaaattctgaacaatgcggaactgttaaagcagatagtctattgcatcgggggtgagaatctgtctgtggctaaggctgctatcaagagcctgtcaagaatctctctgacccaggcgggactggaggcactgtttgagtccaacctcctggatgatctgaagagcgttatgaaaactaacgatatcgtccgctatcgagtgtatgagctgatcattgagatttctagtgtctctcctgagagcctcaattactgtacaacttcaggcctggttacccagctgttgagggagcttaccggggaagacgtgctggtgcgagctacctgtatcgagatggtgacttccctggcctacactcaccatggcagacagtacctggcgcaggagggagtgatcgaccagatcagcaatattattgtgggagcagacagcgaccctttttctagtttttatctacccgggtttgtgaagttctttggcaacctggctgtgatggacagcccccagcaaatttgtgaaaggtaccctattttcgtggaaaaggtttttgaaatgattgaatcccaggaccctacaatgattggggtagctgtggacacagtaggcatcttaggctcgaatgtggaaggaaaacaggttcttcagaaaaccgggacacggttcgagcgccttcttatgcgcatagggcatcagtccaaaaacgccccggttgaactgaagattagatgtcttgacgctatctcttccttactgtatctgccgccagaacagcagaccgatgatctcttgcggatgacagagagttggttcagtagtctgagtcgagaccctctggagctgtttaggggaatttcatcgcagccattccccgagttacactgcgcggccctcaaggtcttcaccgctatcgccaatcagccgtgggctcagaagttgatgttcaactcaccgggcttcgtggaatacgtggtagatcgatctgtggaacatgacaaggcttccaaggacgctaaatatgagctcgttaaggctctggccaatagcaagactatcgctgagatctttggcaatccaaattacctgcgattacggacctatctcagcgagggaccttactatgtgaagccagtgagtaccacagctgtcgagggcgctgagtag

SEQ ID NO: 125662 - DNA, 423 bp, synthetic construct
  misc_feature 1..423: note = Description of Artificial Sequence: Synthetic coding sequence
  source 1..423: mol_type = other DNA
atggttcttgtgctcgactattcaggacgcccaatggtcatcagctcagggatgcagagtatggatacaatgaaacaagtgtaccaaattgtcaagcctctgaatccgaacttctgtttcctgcagtgtacgtcagcataccccttacaacctgaggatgtgaacctgagagttatcagtgagtatcagaaactgttccccgatattcctatcggttacagtgggcacgagaccgggattgccattagtgtggctgctgtcgcactaggcgctaaggtcctggaaagacacatcacactggataaaacatggaaagggtcagatcactccgcatcactggagccaggggagctcgcagaactggtgcggagcgttcgtcttgtagagcgcgcgctgggatcccccactaagcagttgttatag

SEQ ID NO: 125663 - DNA, 348 bp, synthetic construct
  misc_feature 1..348: note = Description of Artificial Sequence: Synthetic coding sequence
  source 1..348: mol_type = other DNA
gaggatgtgaacctgcgtgtgatatccgaataccagaaactgtttcccgacattcctattggttattccggccacgagaccggaattgccatctccgttgcagcggtggccttaggcgccaaggtgctggaacgtcatatcaccctcgacaagacttggaagggatctgaccattccgcgagtctagaacccggcgagctggcagagctggtgcgaagcgtgaggctggtcgagagggcgctgggctcccccactaagcagctgttgccgtgtgagatggcttgcaatgagaaagtgtgccctgccggactgtacagcgtactcttaccttgcgtcgagaagggatag

SEQ ID NO: 125664 - DNA, 873 bp, synthetic construct
  misc_feature 1..873: note = Description of Artificial Sequence: Synthetic coding sequence
  source 1..873: mol_type = other DNA
atggatattgaggcctaccttgagcggataggctacaagaagtccagaaacaagctggatctcgagacacttactgacattctccagcaccagatacgagcagtgcctttcgagaacctaaacatccactgtggcgacgccatggacctgggcctggaagctatctttgatcaagtggtgagacgcaataggggcggttggtgtctgcaagtaaatcacctgctgtattgggccctcaccaccattggattcgagaccactatgctagggggatatgtgtacagcacccctgctaagaagtactcaaccggcatgattcatcttctgcttcaggttacaattgacggccgaaattatattgtcgatgctggcttcggcaggtcataccagatgtggcagcccttggagctcatatccgggaaggatcagccccaggtgccctgcgtgttcagattgacggaagagaacggcttttggtatctggaccagattaggagagaacagtatattccaaacgaagagtttctccactccgacctgctggaggattcaaagtatagaaaaatctatagctttacacttaagccacgtacaatcgaggattttgagtccatgaatacctacctgcagacctctccatccagcgtcttcacatctaagagcttctgttctctccagacgccagacggcgtccactgtttagttggattcacgctcacacacaggcggttcaattacaaagataacaccgatcttatcgaattcaaaactctgagcgaggaagaaattgaaaaggtgcttaagaatatcttcaatatatcactacagaggaaactggttcctaaacatggtgatcgcttcttcacaatatag

SEQ ID NO: 125665 - DNA, 873 bp, synthetic construct
  misc_feature 1..873: note = Description of Artificial Sequence: Synthetic coding sequence
  source 1..873: mol_type = other DNA
atggatatcgaggcctacctggagcgcataggttacaaaaaaagtcggaacaagttggatctcgagacactgacggacatccttcaacaccagatcagagccgtgccatttgaaaatctcaacattcactgtggtgatgccatggacctaggtctcgaagccatttttgaccaggtggtgaggcgcaaccggggcggctggtgtcttcaggtcaaccacctgttatattgggctctgaccacaattggcttcgaaactactatgttaggcggatacgtttattcgactccagcaaagaaatactccaccgggatgattcatctcctgctccaggtcacaattgacggacgcaactatatcgtggacgctggatttgggcggtcttatcagatgtggcaaccgctggaactgatctccggaaaggaccagccacaggttccatgcgtgtttcgacttaccgaagaaaatggcttttggtacctagaccagatacggcgagaacagtatatccccaacgaagaatttttgcactcggacctgctagaggacagcaagtatagaaagatttatagcttcacattaaaacccagaacgatcgaggatttcgaaagtatgaatacgtacctgcagacttctccctcatcagtctttacaagtaagtccttctgctccctgcagaccccagacggcgtccattgcctggtgggcttcaccttgactcaccgtagatttaattataaggacaacaccgacttgatagaattcaagacactatctgaggaggagatagaaaaggtcctaaaaaatatttttaacatcagtctgcagagaaagctggtccccaaacacggtgaccgtttcttcacaatttag

SEQ ID NO: 125666 - DNA, 873 bp, synthetic construct
  misc_feature 1..873: note = Description of Artificial Sequence: Synthetic coding sequence
  source 1..873: mol_type = other DNA
atggatatcgaggcttacctcgagcgcattggctacaagaagtccaggaataaattagacctggaaactctgactgacattttgcagcaccagatcagggccgttccctttgagaacctgaacatccactgtggagatgcaatggacttgggtcttgaggccatcttcgaccaggtggttaggagaaaccgagggggctggtgccttcaggtcaatcacctcctttactgggccctgaccactatcggcttcgaaaccactatgctcggcggctatgtgtatagcaccccagcgaaaaaatactctacagggatgattcatctcctgcttcaggtgacgatagacggccgcaactacattgtggatgcgggtttcggccgtagttatcagatgtggcagcctctggagcttataagcggaaaagaccagccgcaggtaccctgcgtcttcagactgacagaagagaacggtttttggtatcttgatcagattagaagagaacagtatattcctaatgaagagttcctgcacagcgacttgctcgaggactctaaataccggaagatttattcctttacacttaagcccagaacaatcgaagactttgagtccatgaacacatatctgcaaacctcacccagctcagtttttacaagcaaatcattttgtagtcttcagacccccgacggggtgcactgtctggtaggatttacccttactcaccgacgatttaattacaaagacaacaccgacctcattgagtttaaaacactgtcagaggaagagattgagaaagtgcttaaaaatatttttaacatcagcctgcagagaaagctcgtcccaaaacacggtgataggtttttcaccatttag

SEQ ID NO: 125667 - DNA, 873 bp, synthetic construct
  misc_feature 1..873: note = Description of Artificial Sequence: Synthetic coding sequence
  source 1..873: mol_type = other DNA
atggatattgaggcctaccttgaacggataggttataagaagtctcggaataagcttgacctcgagacactgaccgatatcctgcagcaccagatccgcgcggtgcctttcgagaatctcaatattcactgtggcgacgccatggatctgggcctggaggcaattttcgatcaagttgtgaggcggaaccgaggaggctggtgtctgcaggtcaatcacctattgtactgggcactcaccactattggttttgagactacaatgcttggcggctacgtctacagcacacccgcaaaaaagtacagcacagggatgattcacttactgttgcaagtgaccattgatgggcgcaattatatcgtggacgccggctttggccggagttaccagatgtggcagcctctggagctcatcagcgggaaggaccagccgcaagtaccgtgtgtgttcaggctgactgaggagaatgggttttggtatcttgatcagattagacgagaacagtatatcccaaatgaggaattcctgcactcagacctgcttgaggatagtaaatacagaaaaatttattcgtttacactgaaaccaagaaccatcgaagacttcgaaagcatgaacacatatctccagacatctccctccagtgtctttactagtaagtcgttttgcagcctgcaaactccagatggggtacactgcctggtcggattcactttaacacacaggaggtttaactataaggataacaccgaccttattgagtttaagactctgagcgaggaggagattgaaaaagtgctaaagaatatttttaacatatccctgcagagaaaactggtgccgaagcacggcgataggtttttcaccatttag

SEQ ID NO: 125668 - DNA, 873 bp, synthetic construct
  misc_feature 1..873: note = Description of Artificial Sequence: Synthetic coding sequence
  source 1..873: mol_type = other DNA
atggatattgaagcatacttggaacgtattggctataaaaagtccagaaataaactggacctagagacactgacagacatccttcagcaccagatacgcgcagtgcccttcgagaatctcaacatccattgtggcgatgctatggatctgggcctcgaggccatctttgatcaggtagtaagaagaaaccgaggagggtggtgtttacaggtgaaccatctgttgtattgggccctgaccacaattggcttcgaaaccaccatgttaggcgggtacgtttactccacccctgccaagaaatacagcacaggaatgattcacctgttgctccaggtcactatcgatgggcgcaactatatcgtggatgcgggtttcggccggtcctaccaaatgtggcaacctctggaattgatctctggtaaggaccagccccaggttccctgtgtgttccggctcacagaggagaacggattctggtaccttgaccaaatccgccgggaacagtacatacccaatgaagagtttttacacagcgatctcctggaagatagcaagtatcgaaaaatctattcttttacactgaagcctaggacaattgaagactttgagagtatgaacacctacctgcagacctcaccatcttctgtgttcactagcaaaagcttttgtagtctgcagacacctgatggggtccattgtctggtggggtttactttgactcatcggaggttcaattacaaggacaacacagatctgatcgaatttaaaacactttccgaggaggaaattgaaaaggtgctgaaaaacattttcaacataagtttacagaggaagctggtgccgaaacatggcgaccgattctttaccatctag

SEQ ID NO: 125669 - DNA, 873 bp, synthetic construct
  misc_feature 1..873: note = Description of Artificial Sequence: Synthetic coding sequence
  source 1..873: mol_type = other DNA
atggacatcgaggcctaccttgagcggatcggttataagaagtctaggaataaactggatttggaaacactgactgacattctgcagcaccaaatccgggcagtccccttcgagaatctgaatatacactgtggagatgccatggatttgggactggaagctatcttcgatcaggtggtgcgtcggaaccgggggggctggtgtctgcaggtgaatcaccttctttattgggctcttaccacaatcgggtttgagactacaatgctgggaggctatgtgtactctacccccgctaagaaatatagtacgggaatgatccatttactgctgcaggtgaccatcgatggccgcaattacattgttgatgctggttttggacgttcttatcagatgtggcagccccttgaacttataagcggtaaggaccaaccccaggtgccttgcgtcttccgactgactgaagagaatggcttttggtatctagaccagatccgacgcgagcaatatatcccaaatgaggagttcctccattccgatctgctggaggactcaaagtataggaagatttattcatttactctaaaacccagaacaatcgaggattttgagtccatgaatacttatctgcagacttcaccctcatccgtgttcacatcgaaatcattttgctctctccagacgcccgacggagttcactgcctggtaggattcaccctgactcaccgaagattcaattacaaggacaacaccgatcttattgaattcaaaactctgtcagaggaagaaatagagaaggttctcaagaatatctttaatatatcactgcagcgtaaactcgtacccaaacacggagaccgatttttcactatctag

SEQ ID NO: 125670 - DNA, 873 bp, synthetic construct
  misc_feature 1..873: note = Description of Artificial Sequence: Synthetic coding sequence
  source 1..873: mol_type = other DNA
atggacatagaggcctatctggagagaatcgggtataagaaatccagaaacaaactggatttggagacactgacggatatcctgcagcaccagatcagggcagtgccattcgaaaacctcaatatccactgtggcgatgccatggatctcggtctagaggctatattcgatcaagtagttcggaggaatcgcggcggatggtgtctccaggtgaaccacttgctctactgggccttaaccaccatcgggttcgagaccaccatgttgggcgggtatgtgtatagcacccccgcaaaaaaatattcaactggcatgatccatctccttctgcaggtcactatcgacggaagaaactatatcgtggatgctggcttcgggaggtcctaccagatgtggcagcccctcgagctcatttctggcaaagaccaaccgcaggtaccatgtgtctttaggctgactgaggagaacgggttttggtacctggatcagatccggagagaacagtatattccaaacgaagaattcctgcactctgacctgttagaggactccaaatacagaaagatttatagctttaccttgaaacccagaacaatcgaggattttgagtctatgaatacctacctgcaaacatctccgtccagcgtgttcacaagcaaatctttttgtagcctgcagacacctgacggcgtgcattgccttgttggctttacccttacacatcgtcgcttcaactataaggacaatacagacctgatcgagttcaagaccttgtccgaggaggagatcgagaaagtcctcaagaacatatttaatattagtctccagcgcaaactggttcccaagcatggggatcgctttttcacaatatag

SEQ ID NO: 125671 - DNA, 1059 bp, synthetic construct
  misc_feature 1..1059: note = Description of Artificial Sequence: Synthetic coding sequence
  source 1..1059: mol_type = other DNA
atgctcctgctcctcctgcacaaggaggccgcccttgagccccagggtccagcggtcgggtacaacagcctcccggtaagcgacgatcaccatgtgagcggaatccaggcccgaaaaaaacaacaaagcgttttctggattaagacagaggaccaacccacgttcaatcttctgcgtaagggaattatggatattgaagcttacctcgagaggatcgggtataagaaatccaggaacaaactagacctggagacccttactgacattctccagcatcagatcagagccgttccctttgaaaacttgaatatccactgtggcgatgcaatggacctcggcctcgaggccatctttgatcaggtcgtaaggcgaaacagaggtgggtggtgcctgcaggtcaaccacttactgtattgggccttaacaaccatcggtttcgagacaaccatgttaggcggctacgtgtacagtacccctgccaagaagtattcaaccggtatgatccatctgcttttgcaggtcacaatcgacgggaggaattacattgttgacgctgggttcggacgatcttaccagatgtggcagccactggaactcatcagcggaaaagatcaaccacaggtgccgtgcgtgtttagattgacagaagagaacggattttggtatctggaccagatccggcgagaacaatacatcccaaacgaggagttcctgcatagcgacttgctggaagattctaagtatcgtaaaatctacagctttactctgaaaccacggaccatcgaagactttgagtccatgaacacatacttgcagacaagcccgtccagtgtctttacttctaagagcttctgctcactgcaaacacccgacggcgttcactgcttggtggggtttacactcacccaccggagatttaactacaaggataacacagacttaattgaattcaagacactgagtgaggaggagatcgagaaggttctgaaaaatatcttcaacataagtctgcagcgaaagcttgtgccaaaacatggggatcgatttttcactatttag

SEQ ID NO: 125672 - DNA, 873 bp, synthetic construct
  misc_feature 1..873: note = Description of Artificial Sequence: Synthetic coding sequence
  source 1..873: mol_type = other DNA
atggacatagaagcatactttgagaggataggctacaagaatagccgtaataaattagatctggaaaccctaacggacattctggagcaccagattcgcgctgtgcctttcgagaatttaaacatgcactgtggccaggccatggaactggggttagaggccatcttcgaccatatcgtgcgacggaaccgcggaggctggtgcctgcaggttaaccaacttctatactgggcactgacgaccatcgggttccaaacgacaatgcttggaggatatttctatatcccaccagtgaataagtactcaacaggcatggtgcatctactgttgcaggttaccatcgacggtagaaattacatcgttgatgcagggtccggaagttcctctcagatgtggcagccacttgagctaattagcgggaaggatcagccgcaggttccttgtatcttctgtttaactgaagaaaggggcatatggtaccttgaccagatacgccgagagcagtacattaccaataaggaatttctgaacagtcacctactcccaaaaaaaaagcatcagaagatctacctatttactctcgagcccaggacgattgaagatttcgagtcgatgaatacttacttacagacgtctccaacaagctcgttcattactaccagcttctgcagcttacagacaccagaaggagtatattgcttagtgggattcatcctgacatacagaaagttcaattataaagacaatacagatctggttgaattcaaaacactgactgaggaggaagtggaagaggtcttaaggaacatatttaaaatctccctgggcagaaacctggtccccaaaccgggcgacggaagtctgactatctag

SEQ ID NO: 125673 - DNA, 684 bp, synthetic construct
  misc_feature 1..684: note = Description of Artificial Sequence: Synthetic coding sequence
  source 1..684: mol_type = other DNA
atggccccgtgtcacatacggaaatatcaagaatccgatagacagtgggtggtggggctgctgagccgcggaatggccgaacacgcgcccgccacttttcggcaactcctgaagttaccaaggacactcattctgctgctaggggggccactcgcgctgctgctagtgtccggctcctggcttctcgcacttgtcttcagtatatcgctgttcccagccctatggtttctggctaagaaaccttggaccgaatacgtggacatgaccctgtgtacagacatgagcgacattaccaagtcttaccttagcgagagggggtcatgcttctgggtggccgagtctgaggagaaagtggtggggatggttggggccctgccagtcgatgatccaacacttcgcgaaaaacgtctgcagctctttcacctgtttgtcgactctgaacataggagacagggaatcgcgaaggcactcgtccgaactgtcctgcagtttgctcgagaccagggctacagcgaggtaattctggatactggaaccattcagctgtccgcaatggcactttaccaaagcatgggatttaaaaagactgggcagagtttcttttgtgtgtgggcacggttagtcgcactgcacaccgtccacttcatttaccaccttcccagttccaaagttggatctctgtag

SEQ ID NO: 125674 - DNA, 405 bp, synthetic construct
  misc_feature 1..405: note = Description of Artificial Sequence: Synthetic coding sequence
  source 1..405: mol_type = other DNA
atggcggatattgagcagtattatatgaaacctccggggtcgtgcttttgggtcgccgtgctggacggaaacgtggtaggaatagttgcagccagggcccacgaagaagacaataccgtcgaactgctgagaatgagcgtggatagccggttccggggaaagggcatcgcaaaggctttaggaaggaaggtgctcgagtttgcggtcgtccacaactatagcgctgtggttttggggactaccgcggttaaagttgccgcacataaactgtacgagtcccttggcttccgccacatgggggcctctgaccattacgtcttgcccgggatgactctgtcactcgcagaacgtctgttctttcaggttaggtaccacagatataggctgcagctcagagaggagtag

SEQ ID NO: 125675 - DNA, 909 bp, synthetic construct
  misc_feature 1..909: note = Description of Artificial Sequence: Synthetic coding sequence
  source 1..909: mol_type = other DNA
atgcattgtggtcccccagatatggtctgcgaaaccaaaatcgtggcagccgaagaccacgaagcgttacccggcgccaaaaaagacgccctgctagcagccgccggagccatgtggccacccctgcccgccgcaccagggcctgcagccgccccgcccgcacctccacccgcacccgtggcacagcctcacggcggagccggtggcgcggggcctccaggcgggaggggtgtgtgcatacgcgaatttcgcgcagccgaacaggaggcagcccgccggatattttatgacggaattatggaaagaatcccaaatacagcctttcgggggctgcgccagcacccccgagctcagctgctgtatgcattgctggccgcgttgtgttttgctgttagtagatcacttctgctgacgtgtctggttccagccgctcttctgggtctgcgatattactactctaggaaggttattcgggcgtatctggagtgcgcactacacacggacatggccgatatagagcagtattacatgaaacccccggggtcctgcttctgggtggctgtcctcgatggtaacgtcgtgggcatagtggccgcgagagctcatgaggaggacaatacggtcgagcttctgaggatgagcgtcgatagcagatttcgcggtaaggggattgccaaagctcttggccgcaaagtgctggaatttgccgtggtacataactattctgccgtcgtgctggggacaactgccgtgaaagtcgcagcccataaactctatgagtccctcggcttccggcacatgggcgctagcgatcactacgttctccccggaatgactctgtccctcgctgaacgtcttttctttcaggttcgctatcaccgttaccggttgcaacttagggaagaatag

SEQ ID NO: 125676 - DNA, 1182 bp, synthetic construct
  misc_feature 1..1182: note = Description of Artificial Sequence: Synthetic coding sequence
  source 1..1182: mol_type = other DNA
atggacgaaaatgagtccaatcagagcctgatgacctcttcccaataccccaaggaagctgtgcggaaacgccagaactcagcacggaatagcggcgcgtccgactcatcgcgcttttctaggaaatcttttaagctcgactaccgactggaagaggacgttacaaagtcaaaaaaaggcaaagatggacgctttgtaaatccctggcctacctggaaaaatccctctatccccaatgtcttgaggtggctcattatggaaaaggaccactctagcgtaccttcgtccaaggaagagctggataaggaacttcctgtgctcaagccttacttcattaccaatcccgaggaggccggagtacgcgaggctggcttaagagtgacctggctcggtcatgccaccgtgatggtggagatggacgagttgatcttcctaaccgaccctatcttttccagcagagcttccccatcccagtacatgggtcccaagcggttccgtcgcagcccttgcacaatctcagaactccctcctattgatgccgtgctgatctctcacaatcattacgatcacctggattataattcagtgatagcactgaacgaacgcttcggcaacgaactaagatggttcgtaccactggggctgctggattggatgcagaaatgcggctgcgaaaatgttattgaactggattggtgggaggaaaactgcgtccccggacatgacaaggtgacctttgtttttacaccatcccagcattggtgcaagaggaccctcatggacgacaataaagtcctgtggggatcctggagcgttctcggtccttggaatcggttcttttttgctggagacactggttactgtccagcctttgaggagattgggaaacggttcggcccatttgatctggcagccatccccattggggcatacgagccaaggtggttcatgaagtaccagcacgtagatcccgaagaggccgtacggattcatacagacgtgcagactaagaaaagtatggcgatccattggggtacattcgccctggcaaacgagcattacctcgagccaccagttaaattgaatgaagcgctggaacgatacggtctgaacgcagaggatttctttgtgctgaagcacggggaaagccgctatctgaacaacgacgacgagaatttctag

SEQ ID NO: 125677 - DNA, 375 bp, synthetic construct
  misc_feature 1..375: note = Description of Artificial Sequence: Synthetic coding sequence
  source 1..375: mol_type = other DNA
atggatgagaacgagtctaaccaaagcctcatgaccagtagccagtaccctaaggaggccgttcggaaaaggcagaattccgctcgaaattccggcgccagcgattcctccaggttttcccgtaagagtttcaagctggactatagactggaagaggatgttactaaaagtaaaaagggaaaagatggccggtttgtgaatccgtggcctacatggaagaacccatcaattcccaatgtcttacggtggctcattatggagaaggatcactcaagcgtcccatcctcaaaagaggagttagataaggagttgcccgtgctcaagccctattttataacgaaccccgaagaagccggcgtgcgcgaggccggctag

SEQ ID NO: 125678 - DNA, 1182 bp, synthetic construct
  misc_feature 1..1182: note = Description of Artificial Sequence: Synthetic coding sequence
  source 1..1182: mol_type = other DNA
atggacgagaacgaatccaaccaatctctgatgacaagctctcagtatcccaaagaagccgttagaaagcggcagaactcagcccggaactccggcgccagtgactcttccagattcagtcggaagagcttcaagctcgactatcgactggaagaggatgtaactaaaagcaagaagggcaaggacggccgcttcgtaaacccttggcctacttggaaaaacccttcgattcccaatgttctgcggtggctgatcatggagaaagatcattctagtgtgccttcctcgaaggaggagctggataaggaattgccagtgttaaagccgtacttcatcaccaatcctgaggaagctggtgtccgggaggctgggttgcgcgtcacatggttgggacacgctaccgtcatggttgaaatggatgagctcatcttcctgactgaccctatctttagctcccgcgcctctccatctcagtatatgggccctaaaaggtttagaagaagcccctgcactatttctgagttgcctccgatcgacgcagtccttatcagccacaatcactacgaccacctggattacaattcggtgatcgctctgaacgaaaggtttgggaatgaactaaggtggtttgttccactggggcttttggactggatgcaaaagtgtgggtgtgagaacgtcattgaactagactggtgggaagagaactgtgtgcctggacatgacaaggtgacatttgtgtttactccttctcaacactggtgcaaacggacactgatggacgataacaaggtgctgtggggctcctggagtgtactgggcccctggaaccgcttcttcttcgccggcgacactgggtactgtcctgcatttgaggaaatcggcaagaggttcgggccattcgacctggctgctattccaattggcgcctatgagcctcgttggtttatgaagtatcagcacgtagatcccgaagaagctgtgcgtattcatactgatgttcagaccaaaaagagcatggccatacattggggtacatttgctctggcaaatgagcattatctagagccccctgtgaaactgaacgaagccctcgagcggtatgggctgaatgctgaagacttctttgtgctgaaacatggcgaatccagatacctgaacaatgacgacgaaaatttctag

SEQ ID NO: 125679 - DNA, 18 bp, synthetic construct
  misc_feature 1..18: note = Description of Artificial Sequence: Synthetic coding sequence
  source 1..18: mol_type = other DNA
atggatgagaatgaatag

SEQ ID NO: 125680 - DNA, 1182 bp, synthetic construct
  misc_feature 1..1182: note = Description of Artificial Sequence: Synthetic coding sequence
  source 1..1182: mol_type = other DNA
atggatgaaaacgagtccaaccaatccctcatgacatccagccaatacccaaaggaagctgtccgaaagcggcaaaactcagctaggaactccggagccagcgacagcagtcggttctccaggaagtcgtttaagctagactacaggctagaagaggacgtgaccaagtcaaaaaaagggaaggacggacgattcgttaacccttggcccacatggaaaaacccatctattcccaatgtcctccgttggctgatcatggaaaaggatcactcttcggttccgtcgagtaaggaggaactggacaaggagcttcctgtgcttaagccctattttatcacgaaccctgaagaagccggagtgagggaggccgggctgagagttacgtggttgggacatgcaacagtgatggtcgaaatggacgagctgatcttcttgaccgatcctatcttttcatctcgggcctcaccatctcagtacatgggtccaaagagatttagaagaagtccctgtaccataagcgagctcccgccaattgacgccgtgttgatcagtcacaatcactacgaccacttagactataacagtgttattgctctgaatgaacggttcgggaatgagcttcggtggtttgtaccactgggcctactagattggatgcagaagtgcgggtgcgaaaatgtgatagagctagactggtgggaagagaattgcgttcccgggcacgacaaggtcacatttgtattcactccttctcagcactggtgcaagcggaccctgatggacgataataaggtgctgtgggggagttggtctgtgctgggcccatggaacagatttttttttgccggagatacaggatattgcccagcctttgaagagattggcaaacgcttcggcccctttgacttggccgcaatccccataggcgcctacgagccccgctggttcatgaagtatcagcacgtggatccagaggaggccgtgcgaatacacaccgacgttcagactaaaaagagcatggccatacactgggggacttttgcactggcaaacgagcattatctggagcctcctgtgaaacttaacgaagcactggaaagatacggcctcaacgcagaggacttttttgtattgaaacacggcgaaagcaggtatctgaacaacgacgacgaaaacttttag

SEQ ID NO: 125681 - DNA, 1401 bp, synthetic construct
  misc_feature 1..1401: note = Description of Artificial Sequence: Synthetic coding sequence
  source 1..1401: mol_type = other DNA
atggccagacgccgcgagctgaagagatgtctgcaacttctggcgagcagcgccgagcccgctagacgggcacgcgtccgcaagaacccatccgcatgcaggggacgcccctcgcgatacgctgccgcattatgcgcgggaactctgtggcctgaggccgcagagctgcgccgtcgtgccttaccagcaactccaagcgcgtcttcaagcccaaaagatatggacgagaatgagtcaaaccagagcctgatgacctcatcccaataccctaaagaggcagtgagaaagcgccagaatagcgcaagaaactcaggtgcctcagattcttctcgattttctagaaaatccttcaaactcgactatcgactggaggaggacgtgaccaaatccaaaaagggcaaagatgggcggttcgtcaatccttggcctacatggaagaatccaagcattccgaatgtgttgaggtggctgatcatggagaaagatcattctagtgtgccaagctctaaggaagagctggacaaggagctccccgtgctgaagccctatttcatcaccaatccagaggaggctggcgtcagagaggccggcctgagagtgacctggcttggacatgccaccgtgatggtcgagatggatgagcttattttcctcaccgacccaatctttagctctagagcctctcccagtcaatatatgggcccgaagcggtttagaagatctccctgcacaataagcgagctcccgcctatcgacgctgtcctgatctctcataatcactatgaccacctggactacaacagtgtcatcgccctgaacgagcggttcggtaatgaactgaggtggttcgtgcccttaggcctgctggattggatgcagaaatgtggttgcgaaaatgtgatcgagttggattggtgggaggagaattgtgtccccggccatgacaaggtaactttcgtgttcacacctagtcaacactggtgtaaaaggaccctgatggatgataataaagtgctgtgggggtcatggtctgtgctgggtccctggaatcgtttctttttcgctggcgataccggctattgccccgcatttgaggagataggtaagcgattcggaccatttgatctggcagctattccaatcggggcatatgagccaaggtggttcatgaagtaccagcacgtggaccccgaagaggcagtccgcatccatacagatgttcagaccaagaagtccatggcaatccactggggcaccttcgccctcgcgaacgaacattacctcgaaccccctgttaaattgaatgaggctctagagcgatatggtcttaacgcagaagacttcttcgtgcttaaacatggcgagtctcgctatctcaataatgatgacgagaacttctag

SEQ ID NO: 125682 - DNA, 1182 bp, synthetic construct
  misc_feature 1..1182: note = Description of Artificial Sequence: Synthetic coding sequence
  source 1..1182: mol_type = other DNA
atggacgaaaacgagtccaaccagagcctcatgacaagtagccagtacccaaaggaagcggtccgcaagagacagaactcagcgcggaacagtggtgccagtgattctagtaggtttagccgtaagtcatttaaactggattataggctggaagaggatgtcaccaagagtaaaaaagggaaagatggcagattcgtcaacccttggcccacttggaagaacccatctattcccaatgtcctgcgttggctaattatggagaaagaccatagcagcgtaccctctagcaaggaagagctcgacaaagagctgcccgtcctaaaaccctacttcattacaaaccccgaggaagccggcgtaagagaagcgggcttaagagtgacttggctcggtcacgccaccgtgatggttgagatggatgagttgatctttctgacagatcctatcttttcctccagagcaagtcccagccagtacatgggcccaaagaggtttcgacggagcccctgtaccatatctgagctaccccccatcgacgctgttttgataagccataatcattacgaccacctcgactacaacagtgtgatagccctgaatgagagatttgggaatgagctgcgatggttcgtgcctctgggcttgttagactggatgcaaaagtgtggatgtgaaaacgttatcgagctcgattggtgggaggaaaattgtgtccccgggcatgataaagtgacctttgtcttcaccccaagtcagcactggtgtaaacgcactctcatggacgataataaagtgctgtggggatcctggagcgtgctgggcccatggaataggttcttcttcgctggcgacacaggttattgccctgcattcgaggaaattggcaaacgcttcggtcccttcgacttggcggctattcctatcggcgcctacgagccacgttggttcatgaagtatcagcacgtagacccagaagaagcggtgagaatccacaccgatgtccagacaaagaagtcaatggctatccactggggaacattcgcactggcgaacgaacactacctcgaaccaccagtgaagctcaatgaagccctggagagatacgggctgaacgccgaggacttttttgtgctgaagcacggagaaagccgctacctgaataatgacgatgagaacttctag

SEQ ID NO: 125683 - DNA, 2199 bp, synthetic construct
  misc_feature 1..2199: note = Description of Artificial Sequence: Synthetic coding sequence
  source 1..2199: mol_type = other DNA
atggagaggcaagtactgctcagcgaaccggaggaggcagccgccctgtataggggcttgtcacgacagccagcactttccgccgcatgtttaggtcctgaagtcaccacgcagtacgggggccagtatcggacggtccacaccgagtggacacaacgagatctggaaaggatggaaaatatcagattctgccgacagtatttagtgttccacgatggggactcagtagtgtttgccggacctgccgggaactcggtggaaacccgtggcgagttgctgagcagagagagcccttcaggcacaatgaaagctgtcctgaggaaggctggtggtaccggacctggggaggagaagcagtttctcgaagtgtgggagaagaatagaaagttgaagagcttcaatttatctgctctcgagaaacacggcccagtttatgaggacgattgttttggatgcctgagctggagtcactccgagacgcacctgctctacgtggccgagaaaaagcgcccgaaggcggaatcgttcttccagactaaagcgctcgacgtgagtgctagtgacgacgagatcgcccggctgaaaaaaccagaccaagctatcaaaggagaccagtttgttttttatgaggattggggcgagaacatggtctctaaatcaatacctgtgttatgcgtcctggatgtggagtccggcaacatatcagtactcgagggcgttcctgagaacgtctcccctgggcaggccttttgggcaccgggtgacgcgggagtagtgtttgtgggatggtggcatgaaccatttcgtcttgggatccggttctgcacaaacagaaggtcagccctctactatgttgacctcattgggggcaagtgcgaacttctgagtgatgacagcctggctgtgtcctctccacggctctcccccgatcagtgtcggatcgtctacctgcaatatccaagcctcataccacaccaccagtgctcacagctgtgtctatacgactggtacactaaggtgacctccgtcgttgttgacgtggtgccacggcaactcggcgagaatttcagcgggatttattgcagcctgctgccgctggggtgttggtctgcagatagccagcgggttgtttttgattcagcccaacgaagccgccaggacctattcgctgttgatacacaggttggtacagttacttccttaactgcaggagggagcgggggtagttggaagctgctgaccatcgatcaggacctcatggtcgcgcaatttagcaccccctctctgcctcctacgttaaaggtgggcttcctcccttctgcaggcaaggaacagtccgttttatgggtgtctctcgaagaggccgagcccatccctgacattcactggggcatcagggtgctccagccaccacctgagcaggaaaacgtgcaatatgccggcttggattttgaagctatcctcttacagcccggatctcctcctgataaaacccaggtgcccatggtggttatgccacacggaggcccccactcttcttttgtaaccgcgtggatgctgtttcctgcgatgttgtgcaagatgggattcgccgtattgctggtgaactacagaggtagcactggttttggtcaggactcgatcctgtctctcccaggtaatgtgggccatcaggatgttaaagatgtccagtttgctgtagagcaggtgctgcaggaagagcactttgatgcctctcacgtggctctgatgggcggaagccacggaggcttcataagttgtcacctcattggtcagtatccagagacctaccgtgcatgcgttgcgaggaaccctgtgatcaacatcgcatccatgctcggctctaccgacatcccagactggtgcgtcgttgaggctgggttcccgttttcgtccgattgcttgcctgacttgtctgtatgggccgaaatgctggacaagtcacctatcaggtatatcccccaggttaaaactcccctgctgttgatgctgggtcaggaggatcgcagggtgccttttaagcaaggcatggagtattatcgggcacttaaaacgcgtaacgttcctgtgaggcttctgctgtatccaaagtcaacccacgctctttcagaagttgaagtcgaatcggattcctttatgaatgccgtgttatggctgcgaactcacttggggtcgtag

SEQ ID NO: 125684 - DNA, 1833 bp, synthetic construct
  misc_feature 1..1833: note = Description of Artificial Sequence: Synthetic coding sequence
  source 1..1833: mol_type = other DNA
gtactgaatcgcctacagtcgaaatacggatctctgtatcggcgcgataatgtgatattgtccggtacacatacacactcaggacctgccggatatttccagtacacagtcttcgtcatcgcttccgaaggcttttcaaatcaaaccttccagcacatggtgacagggattctcaagtccatagacatcgcccacaccaacatgaagcccggcaaaatcttcattaataaaggcaatgtggacggcgtgcaaattaaccgtagcccttatagttatttgcagaatccacaaagtgaaagggcgagatactctagcaacactgacaaggagatgatcgtcctgaagatggttgacttgaacggggacgatttgggccttatcagttggtttgcaatccacccggttagtatgaataattctaatcacctcgtaaactctgacaacgtggggtacgcgtcctatctcctggagcaggaaaaaaataaggggtacttgcctggtcagggccctttcgtggccgcctttagctctagtaatctcggtgacgtcagtccaaacatcctcggccccagatgcattaatacgggagaatcgtgtgataacgccaacagcacctgccctataggtgggcctagcatgtgcattgccaaggggcccgggcaggacatgtttgatagtacacagatcattggccgggctatgtaccagagagccaaagaattgtacgctagcgctagtcaagaggtgacagggcctctcgcgtccgcacaccagtgggtggacatgaccgatgtgacagtgtggctcaacagtacccacgcatcaaagacatgcaaaccggccttggggtactccttcgccgccggcaccattgacggcgtcggcggtttgaattttactcagggcaaaactgaaggcgaccccttctgggatacgattcgggatcagatcctgggtaaaccttccgaggagattaaggaatgtcataagccgaagcccatcctcctgcacaccggcgaattgtccaaacctcacccctggcaccctgatatcgttgacgtacagatcatcacgctggggagtttggctatcaccgcgattccaggcgaattcactactatgtcaggaagacgactgagagaggccgtgcaagccgagtttgccagccatggcatgcagaatatgacagtcgtaatcagcggactatgtaacgtgtatacccattacatcaccacatacgaagagtatcaggcccagcgctatgaggccgccagtacgatttacgggccgcacaccctgagcgcctatatccagttgtttcggaacttagccaaagcgatcgcaactgatacagtggcgaatctgagtagaggccccgagccccccttcttcaaacagttaattgtccccttgataccttccatcgttgatcgcgcccctaagggacgaacatttggcgacgtgctccaacccgcaaagcctgagtaccgagtaggagaagttgccgaagtaatcttcgtcggtgccaatcccaagaattcagtgcagaaccagaatcaccagacctttctgaccgtggagaagtacgaggctacctccacctcgtggcagatcgtgtgcaatgatgcgtcttgggagaccaggttttactggcacaagggactgcttggcctgtccaacgccactgtagaatggcacatccctgacacagcacagcctggcatctacaggatccggtacttcgggcacaaccgcaagcaagacatactaaagcccgccgttattctgtccttcgaaggaacaagccctgccttcgaagtggttaccatatag

SEQ ID NO: 125685 - DNA, 1869 bp, synthetic construct
  misc_feature 1..1869: note = Description of Artificial Sequence: Synthetic coding sequence
  source 1..1869: mol_type = other DNA
atggactcagagaagtcctccgagtggcgctccgacgttctaaatcgattgcagtccaaatacggaagcctctaccgtcgagacaacgttattctgagcggcacgcatacccactctggcccggccggttactttcagtacacggtatttgtcattgcctctgagggcttttccaaccaaacatttcagcacatggttacagggattctcaagagcatcgacattgcgcatacgaacatgaagcctggaaaaatttttataaataagggcaatgttgacggggtacagatcaaccgcagcccatactcgtacttgcagaaccctcagtctgaaagggctagatactcctcaaataccgacaaggaaatgatcgtgttgaagatggtagatttaaatggggatgatcttggcctgatttcatggttcgcaattcaccctgtgtctatgaataacagcaaccacctggtgaattctgacaatgtagggtatgcatcatatctgctggaacaggaaaagaataaaggttaccttcctggccaaggaccatttgttgccgcattctcaagcagtaacttgggggacgtgtcacctaacatcctgggccccagatgtatcaacacaggtgagtcttgtgacaacgcaaacagcacttgtcccatcggaggtccttctatgtgcatcgccaagggcccaggccaggatatgttcgacagtacacagatcatcggccgggcaatgtatcagagggctaaggaactctatgcttccgccagccaagaggtgaccggacctcttgcgagcgcacaccaatgggtggacatgacagatgttactgtttggctgaactccacccatgctagcaaaacatgcaagccagcactcggctactcattcgcggccggtaccattgacggcgtcggcggattaaattttacccaggggaagacggagggggacccattttgggataccatcagggaccagatactaggaaagcccagtgaagagatcaaggagtgtcataagccaaagcctatcttgttacataccggcgaactgtctaagccacacccctggcatcctgacatagttgatgttcaaattatcactttaggatcattggcaataactgccatcccaggtgagttcaccacaatgagcggaaggcgcctcagagaagccgtgcaggctgaattcgcctcacacggaatgcagaacatgactgtggtgatttcgggtttgtgcaatgtctatacgcactatatcaccacctacgaggagtaccaggcccagagatacgaggccgctagtactatatacggtccacacaccttatccgcttacatccaactcttccgaaacttggccaaagctattgccacagatactgtggctaatctgtcgcgtggaccagagccacctttctttaaacagctgattgtgccgcttatccctagcatcgtggaccgagcccctaaaggtaggacgttcggagatgttctccagcctgctaagcccgaataccgggtgggagaggtggcagaagtcatcttcgtcggtgctaatcccaagaactcagtgcagaaccagaaccaccagacctttcttactgtcgaaaaatatgaagccacctctacctcctggcagatcgtatgcaatgatgcctcatgggagacccggttctactggcataaaggattattgggactgtctaatgccaccgtggaatggcacatacctgacaccgcccaacccggaatctaccgcatccggtattttggccataatcgtaagcaggacattctaaagcctgccgtcatcttaagttttgaggggacatctccagctttcgaggtggtgacaatatag

SEQ ID NO: 125686 - DNA, 1341 bp, synthetic construct
  misc_feature 1..1341: note = Description of Artificial Sequence: Synthetic coding sequence
  source 1..1341: mol_type = other DNA
atggagatggaacaagaaaaaatgactatgaacaaggagttgtctcctgacgcagcagcctactgctgttctgcttgccacggggacgaaacatggtcttataatcatcccataagggggagagcaaagtcccggtcactgagtgcttcccctgcgttgggcagcacaaaagaatttagacggactagaagccttcacggcccgtgtccagtgaccactttcgggcctaaggcctgtgtcctccagaacccacagactatcatgcacatccaggaccctgcctcacagcggttgacctggaacaagtcgccaaaaagcgttcttgttataaaaaagatgcgggacgcttccttattacagccatttaaagagctttgcacacacctgatggaggaaaatatgatcgtatacgtagagaaaaaagtactcgaagaccccgccatcgcaagcgatgaatctttcggcgccgtcaagaagaaattttgtaccttccgagaagattacgatgacatctccaatcagattgattttataatctgcctgggtggtgacggcacccttctgtatgcttcctctctgttccagggcagtgtgccaccggttatggcttttcacctggggtcactgggctttttaaccccttttagtttcgagaactttcagtcacaagttacacaggtgattgagggtaatgcggccgtcgtcctcagatcgcgccttaaggtgcgcgtggtcaaggaacttagaggcaaaaagacagctgttcataatggccttggggaaaatggcagccaggctgcgggtctcgatatggatgtcggcaaacaggccatgcagtaccaggtcctgaacgaagtggtaatcgatcgtgggccctcttcttacctcagcaatgttgacgtatatctagatggccatctgatcaccactgtgcagggggacggagtgatcgtctcaaccccaactgggagcaccgcctatgctgccgctgcaggcgcatccatgatccaccctaacgtgccagccatcatgatcacacccatttgtcctcatagcttatcttttcggcctattgtcgttcccgcaggggtagaactgaaaattatgttgtcccctgaggctcgaaatactgcctgggtgagcttcgatggtcgaaagcgtcaggagattcggcacggtgactcaatcagtatcacaacctcctgctaccctcttccctcgatatgcgtgcgcgaccccgtttcagactggttcgagagcctggcccaatgtctgcattggaatgtgcgcaagaaacaggctcacttcgaggaggaggaggaggaagaagaagaagggtag

SEQ ID NO: 125687 - DNA, 1341 bp, synthetic construct
  misc_feature 1..1341: note = Description of Artificial Sequence: Synthetic coding sequence
  source 1..1341: mol_type = other DNA
atggaaatggagcaagagaagatgaccatgaataaagagctgtccccagacgcagctgcgtattgctgcagtgcttgccacggcgacgaaacatggtcatacaaccacccaattcgcggcagagccaaaagtagaagcctgtcagcctccccagctctcggctcaactaaggaatttcggcgtaccagatcccttcacggaccctgtcctgtcacaacttttgggccaaaagcatgtgtgctccagaatccacagactattatgcacatccaggaccctgcgagccagaggctaacctggaacaaatccccaaaatcagttctggtcatcaagaagatgagggatgcatccctgttgcaaccctttaaggagttatgtacccaccttatggaggagaatatgatcgtgtatgtcgaaaagaaagtgctggaagaccctgccatcgcaagtgatgagtccttcggggctgtgaagaaaaagttttgcacatttagagaggattatgacgatatcagtaatcagatcgactttataatctgtctaggcggtgatggcaccctgctatacgcctcctctctctttcaagggtccgtacctcctgtgatggctttccacctcggatcactgggatttttgactcctttcagctttgaaaactttcaatcacaagtcacacaagttatcgaagggaatgccgccgtggtacttagatcacgactcaaggtgagagttgtgaaggagctcaggggcaagaaaactgctgtgcataacgggcttggggagaatggatcacaggccgcaggtctcgacatggatgtcggcaagcaggccatgcagtatcaggtcctaaacgaagtcgtcattgatcggggacctagctcctatctgagcaacgtggacgtttatctggacgggcatttgatcactaccgtgcaaggggacggagtaatcgtgtcaacacccacaggatccactgcctacgccgcagctgccggcgccagtatgattcacccgaatgtaccagctattatgattacacccatatgtcctcactccctgtcattcagaccaatcgtcgtgccggcaggggtggagctgaagattatgttgtctcccgaagctcggaatactgcctgggtatcatttgatggtcggaagcgccaggaaattcgccacggggacagcatctcaatcacgacctcttgttatccgctgccatccatttgtgttagggatcccgtgagtgattggtttgagtctctggcgcaatgtctgcattggaacgttcgcaagaaacaggcccacttcgaggaggaggaggaagaagaggaggaaggttag

SEQ ID NO: 125688 - DNA, 1245 bp, synthetic construct
  misc_feature 1..1245: note = Description of Artificial Sequence: Synthetic coding sequence
  source 1..1245: mol_type = other DNA
atgggtcgcccacgagtgaggcaggcttggcccggctgctgcggacacactggtcgcttgcccgctggtagaggttatttagcaagccacatgtgcgaccctgccggcgccgaactcattggagacgggatgtccgaccctactcccccttctaacgcttgcaccgggcacattcaagaccctgcctcacagaggctcacctggaacaagagtcctaaaagcgttctagtgatcaaaaaaatgcgggacgcgagtcttctgcagcctttcaaagagctgtgcacacatttgatggaggagaatatgatagtatatgtggaaaagaaagtgcttgaggatccagcaatcgctagtgacgagtcatttggcgcggtgaagaaaaagttctgtacctttcgggaggactacgatgacatttctaaccaaatcgactttataatatgtttaggaggcgatggaaccttgctctacgctagttccctgtttcagggaagcgtgccccccgtgatggcttttcacctcggaagtctcggttttcttacaccgttctcattcgagaattttcagtcacaggttacccaggtgatcgaaggcaatgcagcagtggtcttgcgtagccgtttgaaggtcagggtggtgaaggagctgcgggggaagaagacagcagtgcataatggcctgggagaaaatggatcacaagccgctggtctggatatggacgtcggcaaacaggccatgcagtaccaagtgctgaacgaggtcgtgattgacagaggcccgtctagttaccttagcaacgtggatgtgtacctcgacggccatctgatcactactgtacaaggagacggcgtgatcgttagtaccccaaccgggagtactgcctacgccgctgcggcaggggcatctatgattcatccgaacgttcctgcaattatgattactccaatatgcccgcactctttaagttttaggccgattgtcgtccccgcaggcgtggagctgaaaattatgctgagtcccgaggctagaaataccgcctgggtgagctttgacggacggaaaagacaggaaattagacacggagactctatctcaattactacatcatgttaccccttgccctccatctgcgttagggacccagtgagcgattggttcgaatcattagcccagtgtctgcactggaacgtgcggaaaaaacaggcccattttgaagaggaggaagaggaggaagaggaaggctag

SEQ ID NO: 125689 - DNA, 1776 bp, synthetic construct
  misc_feature 1..1776: note = Description of Artificial Sequence: Synthetic coding sequence
  source 1..1776: mol_type = other DNA
atggaaatggagcaagagaagatgacaatgaacaaagaactgagtccggacgccgcggcgtattgctgctctgcttgccatggagacgagacatggagttacaatcaccctattcgggggcgtgccaagtcacgttccctgtcagcaagcccggcgctgggttcaaccaaggaattccggcggacacgctcccttcatggcccatgtcccgtcaccacgttcggtccgaaggcatgtgtgctgcagaatccccagacgatcattgccacacccttatccctggcttctcagctcctccctagtcccgccgttagccactcgggacaaggcggagtgacaggccaggtacatgttttaccacagccttcagaccagggagtgctgagtggaccacgggccgcccgcggccagaccgccccccaagaggaagccgttacgcaggaggaagtggaagctcttgtgtgtgggcacactcagagatgggtgccgggacctgtgtatgatgccgccgctggaggttctggctgggcccaactttcactgcgggccggaatgggagttggtcaggccaccgggcacatccaagaccccgcctcccagcggctgacatggaacaaaagccccaaaagcgtactcgtgattaagaaaatgcgggacgcctcccttctccagccctttaaggaactctgtacacatcttatggaagcaagaggggccggtgggaagggggcatggggtgcccatggcgtcggcggagcatccattcacatcaccgcccctcgtgttggatcggcgggcggcatgtcaaggctggcgctatgttttcaggaaaatatgatagtttatgtggagaagaaagtgctggaagaccccgccattgctagtgatgagagttttggcgctgtgaagaagaagttttgtaccttccgagaagactacgatgatatcagcaatcagattgatttcatcatctgcctcggaggcgacgggaccttgctctacgcctcctcactattccaaggatccgtgccaccagtgatggccttccacttggggtccttgggcttccttacgcctttcagcttcgaaaatttccaaagccaggtgacacaggtaatcgaagggaacgccgccgtagtgctgcgatcccgtctgaaagtgagagtggttaaagaactcagggggaagaagacagccgtgcacaacggcctgggagagaatgggagtcaggccgctggacttgacatggatgtgggaaagcaggccatgcaatatcaggtcttaaacgaggtagtgatcgacagaggaccctcgtcatacctgagcaacgtcgacgtgtacctcgacggtcatctcattactaccgtccagggagatggagttatcgttagcacccctaccggctccaccgcttacgctgccgctgccggcgcttccatgattcatccaaatgtccctgctattatgattacacccatttgcccccattctctgagtttccgccctatcgtcgtgcccgcgggtgtcgagctcaaaattatgctttctccagaggctagaaatactgcatgggtttctttcgacggccggaaaagacaagaaatccgccatggtgactcgatctcgataacaacttcatgttatcccctcccctcaatttgcgttcgggacccagtgagcgactggttcgaaagcctggcgcagtgcctgcactggaacgtacgcaaaaagcaggcccactttgaggaagaggaggaggaggaggaagaagggtag

SEQ ID NO: 125690 - DNA, 1776 bp, synthetic construct
  misc_feature 1..1776: note = Description of Artificial Sequence: Synthetic coding sequence
  source 1..1776: mol_type = other DNA
atggagatggagcaggagaaaatgacaatgaataaggagctgtcacctgacgcagccgcttactgctgtagcgcctgtcatggggacgaaacatggtcctacaatcaccccattcgaggaagagccaaaagcaggtccctctccgcatctcctgccttgggatcaaccaaagagttcagaaggacccgaagccttcatggcccctgtcccgtcaccaccttcggccctaaagcgtgcgtgctgcagaaccctcaaactatcatcgccactccattaagccttgcatctcagttactcccttctccagctgtgagtcactctggacagggcggtgttaccggacaggtgcatgtcctaccacaaccgtctgaccagggtgtgctaagtggcccccgcgccgctcggggtcaaactgcaccacaggaggaggccgttacccaggaagaggtggaagcgctggtttgcgggcatacccagagatgggtcccagggcctgtgtacgacgctgccgccggcggttctggttgggcccagcttagcctgcgtgccgggatgggtgtgggccaggccactggccatattcaggatcccgccagccagcggctgacctggaacaaatcccccaagagcgtgctcgtgatcaaaaagatgagggacgcctcgctcctgcagccatttaaagaactgtgcactcatctcatggaagcaaggggggccggcggcaagggggcatggggggcccatggagttgggggcgcctctattcatatcaccgctcctagagtaggaagtgcaggaggcatgtcgagattagccctttgttttcaagaaaacatgatcgtctatgtggagaagaaggtgctcgaggatcctgctatcgcctcagacgaaagctttggggcggttaagaaaaagttttgtaccttccgggaagactatgatgatatctccaatcagattgactttattatctgccttgggggcgatggaactctattgtatgcgtcttccctttttcagggcagtgtaccgcccgtcatggcctttcacctgggctccctgggatttcttactccttttagttttgagaacttccagtcccaggtcacccaagtgattgaagggaacgccgccgtcgtgttgcgtagtcggctcaaagtccgcgtcgtgaaagaactccgcggcaaaaagacagccgttcacaatgggctgggagagaatggatcccaggcggcaggccttgacatggacgtggggaagcaggccatgcagtatcaagtactgaatgaagtcgtgattgaccgcgggccctcctcttatctaagtaacgtcgatgtgtatcttgatggccatttaattactactgtgcaaggagacggggttatcgtaagcactcctacaggttctaccgcttacgccgctgctgcgggcgcgtccatgatacaccctaatgttcctgccataatgattactccaatttgcccacactctctgtcctttaggccaatagttgtgcccgccggtgttgagttaaagatcatgctgtctcccgaggcacggaatacagcatgggtgagctttgatggccgcaagagacaggagattcgtcatggagactcaatttccatcaccacaagttgctatcctctgccaagtatctgtgtgagggaccctgtctccgattggtttgaatccctggcccaatgtctccattggaacgttagaaaaaaacaggctcacttcgaagaagaggaagaggaggaagaggagggctag

SEQ ID NO: 125691 - DNA, 621 bp, synthetic construct
  misc_feature 1..621: note = Description of Artificial Sequence: Synthetic coding sequence
  source 1..621: mol_type = other DNA
atgggacggccccgcgtgaggcaggcttggccaggttgttgcggtcatacgggtcgactccctgctggccgaggctacctggcaagccacatgtgtgaccccgctggagccgaacttatcggagacggcatgtccgaccccaccccccccagcaacgcatgcacgggtcacatacaggaccccgcttctcaacgcctgacctggaacaaatcaccgaagtccgttcttgtgataaaaaaaatgcgcgacgcctccctcctgcaacccttcaaagaactgtgtacgcatcttatggaggagaatatgatcgtgtacgtggaaaagaaagttctggaggaccccgctatagcctccgatgagtcattcggagcagttaagaagaagttttgtacctttagggaggactacgacgatatttctaaccagatagacttcatcatctgcttgggtggcgacggcacactgttgtacgcgtcttcgctcttccaaggatcggtccccccagtgatggcttttcacctaggctctctcgggttcctcacccccttcagctttgaaaattttcagtcacaagtaactcaggtgattgaaggcaatgccgcagtggtgcttagaagctag

SEQ ID NO: 125692 - DNA, 2121 bp, synthetic construct
  misc_feature 1..2121: note = Description of Artificial Sequence: Synthetic coding sequence
  source 1..2121: mol_type = other DNA
atgggccgcaaggtgactgtggcaacctgtgccttgaaccagtgggctcttgattttgagggcaatctgcagcggatactaaagtcaatcgaaatcgccaagaacaggggggcccgatataggctgggccctgaattggaaatctgtgggtatggctgctgggaccactactacgaatcagacactttactccacagtttccaggtcctggccgctcttgttgaaagtccagtcactcaagacatcatctgcgacgtgggaatgcccgtcatgcaccgcaatgtgaggtacaactgcagggttatctttcttaacagaaaaatcttactgattcgccccaagatggccttagccaacgagggcaactacagggaactccgctggtttaccccgtggtcccgctcccgccatactgaggaatatttcttgccacggatgattcaggacctcacgaaacaggagacagttcctttcggggatgccgtcctggttacctgggacacatgcattggctcagaaatttgtgaggagctgtggacccctcactctccccacatagatatgggtcttgatggagttgagattataaccaacgcttctgggagccaccaggtgctgcggaaggctaatacaagggtggatctggtgacaatggtgacgagtaagaatggcggcatttatctcctcgcgaaccagaaaggatgcgacggggatcgcctctactacgacgggtgcgccatgattgctatgaacgggtctgtgtttgcccaagggtcccagttttctcttgatgacgtggaggtcctgacagcaactttggatctggaggacgtgaggtcctaccgggccgagatttccagtcgaaatttagcagccagtcgggcgagtccttatcctcgggtgaaggttgacttcgctctctcttgccatgaggatctgcttgcacctatctccgagcctatcgaatggaagtatcactcacctgaagaggagatatccctcggacccgcatgctggctgtgggacttcctgcgtagatcccagcaggctggattcttgcttccactgtccggcggagttgattccgccgcaaccgcttgcctcatctattcaatgtgttgtcaggtttgcgaagccgtcaggagcgggaatgaagaagtgctggcggatgttcggaccattgtgaaccagatatcatataccccacaggatccgcgggatctgtgcggcaggattctgaccacctgctatatggcctccaaaaatagctctcaagaaacatgtactcgagctcgagaactggctcagcagataggctcacatcatatttcactcaatatcgatcccgcggtaaaggcagtgatggggatctttagcttagtgacaggcaagtctccgctgtttgccgcccacggagggagctcccgagagaacctggctctgcaaaacgtccaagcaaggataagaatggttctggcctatctgtttgcccagctgtccctgtggagcaggggcgtgcatggagggctcctggttctcggctcggctaacgtggatgaatcgctgcttgggtacctcacgaaatacgactgtagctctgctgatattaatcccatcggaggaatttcaaaaaccgacctgcgagcattcgtccagttttgtattcagaggtttcaactgccggccctgcaaagtattctcctagcccctgcaactgccgaactggagcctctggcagacggacaggtctcccagaccgacgaggaggatatgggcatgacctatgctgagttgagtgtctacggaaagctgcgaaaagtcgccaaaatgggaccctattctatgttttgcaaattgctgggcatgtggagacatatttgtacaccacgacaggtggctgataaggtcaaaaggtttttttccaaatactccatgaatagacataaaatgaccaccttgacccccgcttatcatgcagagaattactcccccgaagacaataggttcgacctgagaccttttctgtacaacacctcctggccatggcagttccggtgtattgaaaaccaagtgttgcagctggaaagggccgagccgcaatcactggacggggtcgattag

SEQ ID NO: 125693 - DNA, 1341 bp, synthetic construct
  misc_feature 1..1341: note = Description of Artificial Sequence: Synthetic coding sequence
  source 1..1341: mol_type = other DNA
atgggaattagtggtcaagaggtgctcacagccacattagatttagaagatgtgaggagctacagagcagaaatttcctcaaggaatctcgccgcttccagggcatcaccatatccccgagtgaaggttgacttcgccctctcctgccacgaggacctgcttgccccgatctccgaacctattgagtggaaatatcacagtccagaggaggaaatcagccttggtcccgcgtgttggctgtgggactttttaagacgttcccaacaggctggatttctgctacctctctccgggggagtcgactccgccgccaccgcttgccttatatactcaatgtgttgtcaggtgtgtgaggctgttcgatccggcaatgaagaagttttagcggatgtccggacgatagtcaaccagattagctacacgccccaggacccaagagacttgtgtggccgaatcttgaccacttgttacatggcttccaaaaattcgagtcaggagacatgtactcgggctcgcgaactggcccaacagataggttcccaccacatatctttgaacatcgatcctgctgtgaaagctgtgatgggtatattcagcctggtgaccggtaagtcccccctcttcgctgcccacggcggcagcagtcgcgagaatctagcactgcagaacgtccaggctcgcattaggatggtgctggcctatttatttgcccagctgtctctttggagccgcggcgttcacggtggattactggtgctggggagtgcaaacgtggacgagtccctacttgggtaccttactaagtacgactgctccagcgcagacattaaccctatcggcggcatttctaaaacggacttgagagccttcgtacagttttgtatacagcgctttcaactgcccgccttgcaaagcatactcctggcaccagccacagccgagctcgagcccctggcagatggccaagtttctcagacagatgaggaagacatggggatgacatatgccgagctttccgtatacggtaaactcaggaaggtggctaagatggggccttactccatgttctgcaagctgctcggaatgtggcgccatatctgtactccccggcaggtcgctgataaggtcaaaaggttcttcagcaaatattccatgaacaggcataagatgacaacactaacccccgcttaccacgcagagaattactctcccgaggataatcgttttgacctgcgtccatttttgtacaatactagttggccctggcaatttagatgtattgaaaatcaagttcttcagttggaaagagctgaaccacagtctctggacggggtagattag

SEQ ID NO: 125694 - DNA, 1122 bp, synthetic construct
  misc_feature 1..1122: note = Description of Artificial Sequence: Synthetic coding sequence
  source 1..1122: mol_type = other DNA
atggaacctgcagtctctgagcctatgagggatcaggtggcccgtactcaccttacagaagacaccccaaaggtcaacgcagatatcgagaaggtcaaccagaatcaggccaagagatgcacagtcatcggaggatccggttttctgggccagcatatggtggaacagctcttagcccgtggctatgccgtaaacgtctttgacattcagcaggggttcgataaccctcaggtccgatttttcttaggcgatctctgtagtcggcaagacttgtatccggcgctgaagggggtcaatacagtcttccattgcgcctctccacctccctcttcgaacaacaaggagttattttatagagtgaattacataggaacaaagaacgttatcgagacttgcaaggaggcgggtgtgcagaaactaatccttacaagctccgcttctgtgatctttgagggggttgatatcaagaatggaacagaggacctgccttatgccatgaaacccattgattattacacagaaaccaagattcttcaagagcgcgcagtgctcggcgccaacgatccagagaaaaattttctgaccaccgccattagacctcacggtatctttggccctagggatccccagctggtacctattttaatcgaggcagcacggaacggcaagatgaagttcgtaatcggtaatggcaagaatctggtggattttactttcgtggagaacgtagttcacggccatatcctcgctgcggaacagctgtcccgcgatagcacattgggcggcaaagccttccacatcactaatgacgagcctattcctttttggacatttttatcacggatcttaacaggcctcaattacgaagcacctaagtaccatattccttattgggttgcctactacttagccctccttttgtctttgctcgtgatggtgatttctccagttatacagctgcagccaaccttcacacccatgagagtggccctggctggcaccttccactactactcctgcgaacgcgcaaagaaggctatgggttaccaacctcttgtaacaatggacgacgctatggagagaactgtccagtcctttagacatttaaggagagtcaagtag

SEQ ID NO: 125695 - DNA, 765 bp, synthetic construct
  misc_feature 1..765: note = Description of Artificial Sequence: Synthetic coding sequence
  source 1..765: mol_type = other DNA
atggagcccgccgtcagcgaaccgatgcgggatcaggtcgcccgcacacacctgacagaagacacaccaaaggtcaacgcagacatcgaaaaggtcaaccagaaccaggccaagcggtgtactgtgataggtgggagcgggttcctgggacagcacatggtcgaacaattattggcgaggggctatgcagtgaacgtttttgacattcagcaggggttcgataatccccaagtgcgcttctttctgggcgatctctgctccagacaggatctctaccctgcactgaagggggttaatacagtgttccactgtgccagcccacccccctccagtaacaataaggagctcttctatcgggtgaactacattgggactaagaatgtcattgaaacctgcaaggaggcgggagtccagaagttgatcttgacgtcttccgctagcgtgatctttgaaggcgtggatatcaaaaatggtactgaggatttgccgtatgcgatgaagccaatcgattattatacagaaaccaaaattttgcaggagcgtgctgtgttaggtgctaatgatccggaaaagaatttcctcaccaccgccattagaccacatggcatatttggcccccgcgatccacaattggtacctattttgatagaggccgcccgtaatgggaaaatgaagtttgtcattggcaatggtaaaaatctagtagatttcacttttgtcgaaaacgttgtccacgggcatatactagccgctgagcaattgtag

SEQ ID NO: 125696 - DNA, 1122 bp, synthetic construct
  misc_feature 1..1122: note = Description of Artificial Sequence: Synthetic coding sequence
  source 1..1122: mol_type = other DNA
atggagccagcagtgtcggagccaatgcgcgatcaggtagctcgaacacacctgacggaggacactccaaaggttaacgctgacatcgagaaggtaaatcagaatcaggcgaagagatgcacggtgatcggcgggtcaggattcttaggtcagcacatggtggagcagctgctggccaggggatatgctgtcaatgtgttcgacatacagcaaggtttcgacaatccacaggttcgcttcttcctcggagatctctgcagtagacaagatctctatccagcgctcaaaggggtaaatactgtttttcactgcgcaagtccccccccatcctctaacaataaggaactgttttaccgagtgaattatatagggaccaaaaatgtcattgagacatgcaaagaggccggtgttcagaagctgatccttacctcaagcgctagcgtgatttttgagggcgtcgatatcaaaaacggtacagaggatttgccatacgctatgaagcctattgattactacactgagacgaagatacttcaagagcgggcagtcctgggagccaacgaccccgagaaaaactttttaaccaccgctattagaccacacgggattttcggccctcgggatccacagctggtgccgatcttaatagaggctgcccgaaatggtaagatgaaattcgtgatcggtaatggcaaaaacttggtcgattttacatttgtcgaaaatgtggtccatggccatatcttggccgccgaacaactgtctcgagactctacactcgggggaaaggcttttcacatcaccaatgacgagcccattcctttttggacattcctgtcacggatccttactgggttgaattacgaggcccctaagtatcacatcccgtactgggtggcctactacctcgccttattgctttctctgctcgttatggttatcagcccagtgatacagctgcagcctacgtttacccctatgcgggtcgccctggccggcactttccactactatagctgcgaacgcgcaaaaaaggcgatggggtatcagccactcgtgacaatggatgacgccatggaaagaacagttcagtcttttcgacacctgcggcgcgttaaatag

SEQ ID NO: 125697 - DNA, 825 bp, synthetic construct
  misc_feature 1..825: note = Description of Artificial Sequence: Synthetic coding sequence
  source 1..825: mol_type = other DNA
atggtcggcagaagagccttgatcgtgctcgcccacagcgagagaacgagttttaactacgcaatgaaggaagctgcggctgctgctctgaaaaagaagggctgggaggtcgtagaatcagatctctatgccatgaatttcaaccccattatatccagaaaagacatcaccggaaagctgaaggatcccgccaacttccaatatccagctgaaagcgtgctagcttataaggagggccacctctcacctgatatagtggctgagcagaaaaagctggaggccgctgacctggtgattttccagttcccccttcagtggttcggcgtccctgctatcctgaagggctggtttgaaagggtgttcatcggagagtttgcttatacctatgcggcaatgtacgataagggccccttcagaagtaagaaagccgttctgtctatcaccactggcggaagcggctctatgtacagcctacaggggatccatggcgacatgaacgtcattctttggcccatccagagtggtatcctgcacttctgtggatttcaggtgttggagccacagttgacctatagtattggccacacccccgctgacgcacggattcagattttagaggggtggaaaaaaaggctcgaaaatatctgggatgagacccctctttattttgcacccagcagcctgttcgatctgaatttccaggccggcttcttaatgaaaaaagaagtccaggacgaagagaagaataagaaattcggtctgagtgtcggtcaccacctgggaaagagcattcccacagacaaccaaatcaaggctcggaaatag

SEQ ID NO: 125698 - DNA, 711 bp, synthetic construct
  misc_feature 1..711: note = Description of Artificial Sequence: Synthetic coding sequence
  source 1..711: mol_type = other DNA
atggtgggtcgtcgcgctctgattgttctggcccatagcgagcgcacctcattcaattatgctatgaaagaggcagccgcagccgccttgaagaaaaaggggtgggaagttgtggagtccgacttgtacgccatgaactttaaccccatcatcagtcggaaggatataaccggaaagctgaaagatcccgcaaactttcaataccctgctgagtctgtgctggcatataaggaaggccacttgtctccggacatcgttgcagagcagaagaagctggaggccgccgacctcgtcatctttcagtcaaagaaggccgtactatctataacaacaggcggctccggcagcatgtactcattacagggcattcatggggacatgaacgtaatactgtggcccattcagtctggcatccttcatttttgtggattccaagtgcttgagcctcagctcacttatagcatcggtcacacccccgccgacgcccgtattcagatcctcgagggatggaagaaacgactggagaatatatgggatgaaacaccactatactttgccccgtcgtctctgtttgatctgaattttcaagctggttttctaatgaaaaaggaggtccaggatgaggagaagaacaaaaagtttggattgagcgttgggcaccatctcggcaagtcgatcccaacagacaaccagattaaggcccgcaaatag

SEQ ID NO: 125699 - DNA, 723 bp, synthetic construct
  misc_feature 1..723: note = Description of Artificial Sequence: Synthetic coding sequence
  source 1..723: mol_type = other DNA
atggtgggaaggcgtgcactcattgttttagcccattctgaacgaactagcttcaattacgcaatgaaggaggctgcagctgcggccctaaagaaaaagggatgggaggtcgtagaatctgacctctatgctatgaactttaaccctatcatttcccgaaaggacatcacaggtaaattgaaagatcctgcaaacttccagtatcctgccgaatccgtcctggcgtacaaggaggggcatctgtcaccagacatcgtggctgaacagaagaagctcgaagctgccgatctggtcatattccaatttccgctccagtggttcggagtacccgccattctaaaagggtggttcgagcgggtttttatcggggagttcgcttacacctacgccgccatgtatgataaaggccctttccgaagcgggatcctgcatttctgtgggttccaggtcctagagccacagctcacctatagtattggtcacactccagctgacgctcggatacagattctcgaaggttggaagaaaagactggagaatatatgggatgagacccctctttacttcgccccttcatccctgtttgacctgaactttcaggctggattcttgatgaagaaagaggttcaggacgaagagaaaaataaaaaattcggactgtctgtggggcaccatctcgggaagagtatccctaccgacaaccaaataaaagcccggaagtag

SEQ ID NO: 125700 - DNA, 609 bp, synthetic construct
  misc_feature 1..609: note = Description of Artificial Sequence: Synthetic coding sequence
  source 1..609: mol_type = other DNA
atggtcggaagacgggccctgattgtgctggcgcacagcgaaagaacgtctttcaactatgccatgaaagaagctgccgccgctgcccttaagaagaagggctgggaagttgtggagtctgatctgtacgcaatgaactttaaccccataataagccgtaaagacataaccggcaaactgaaagatccagccaacttccagtaccccgccgagagtgtgctggcctataaggagggccatctctctccggatatagtggccgagcagaagaaacttgaggcagccgatttggtgatttttcagagcggcatcctccacttttgcggctttcaagtgctggaacctcaactcacttacagcattggccacaccccagccgacgcccggatacagattctcgagggatggaagaagaggctcgagaatatctgggacgaaacacccctctacttcgcacctagctcattatttgacttaaacttccaggccggatttctaatgaaaaaagaggtgcaggacgaggagaagaacaaaaagtttggcctatctgtgggccatcacttgggcaaaagcattccgacggacaatcaaatcaaggctcggaagtag

SEQ ID NO: 125701 - DNA, 696 bp, synthetic construct
  misc_feature 1..696: note = Description of Artificial Sequence: Synthetic coding sequence
  source 1..696: mol_type = other DNA
atggctgggaaaaaagtgctgatcgtatacgcccaccaggaacccaagagctttaacggcagcctaaaaaacgtcgcggtggacgagctcagcaggcagggatgcactgtgacagtgtcagacttatacgcgatgaacctagagcccagggccactgataaggacatcacgggtaccttaagcaaccctgaagtgtttaattacggtgtagagacccacgaggcctacaagcagaggtccctggcgtcagacatcacagacgaacaaaagaaagtcagggaagccgacctagtgatatttcagttccccctgtactggttttctgtgccagccatattgaagggctggatggatcgggtgttgtgtcagggctttgcctttgacataccaggcttctacgactcgggcctccttcagggcaagctcgcactccttagtgttacaactggcggaacagcggagatgtacacgaaaacaggagtcaatggcgatagcagatactttttgtggccgctgcagcacggaacactgcatttctgtgggttcaaggtccttgcccctcagatctcgttcgccccagaaatcgccagtgaggaggagagaaagggcatggttgccgcatggtctcagcgtctgcagaccatatggaaagaggagcccattccttgtacagcgcactggcactttggtcagtag

SEQ ID NO: 125702 - DNA, 696 bp, synthetic construct
  misc_feature 1..696: note = Description of Artificial Sequence: Synthetic coding sequence
  source 1..696: mol_type = other DNA
atggccgggaaaaaagtacttatcgtatacgctcaccaggagcctaaatccttcaatgggagcctgaagaacgtagctgtcgacgagctctccagacagggctgtacagtgacagtgtcggacctatacgctatgaacttggaacccagggctacagacaaggatatcacaggaaccctatcgaatcctgaggtgttcaattacggagtggaaacgcacgaggcctacaagcagaggtctctggcctctgatattacagatgaacagaaaaaggtcagagaggccgatttggttatctttcagtttcccctgtattggtttagcgtgcccgccatacttaaggggtggatggaccgtgtgctttgtcaaggattcgcctttgacatccctggcttctacgattccggtctcttacaggggaagctcgctcttctgagtgtcaccaccggaggaacagctgagatgtacaccaagactggagtcaatggcgattctcgatatttcctttggcctctgcagcacggcactcttcacttctgcggcttcaaggtgctcgcgccacagatcagctttgcccccgaaatcgccagtgaggaagagcgcaaaggtatggtggccgcttggtcacagcgtttacaaacaatatggaaagaagaacccatcccgtgtactgcccattggcactttggtcagtag

SEQ ID NO: 125703 - DNA, 582 bp, synthetic construct
  misc_feature 1..582: note = Description of Artificial Sequence: Synthetic coding sequence
  source 1..582: mol_type = other DNA
atggcaggcaagaaggtgttgatcgtgtacgcacaccaggagcccaagtccttcaacgggagcttaaagaatgtggcagtcgatgagctgtctcggcagggatgtaccgttactgtatccgacctgtacgctatgaatctggagccacgggccaccgacaaagatattactggcaccttgagtaaccccgaggtgttcaactatggcgtggagactcatgaggcgtataagcagcgttccctggcctccgacataactgacgagcagaagaaggtgagggaggcagacctcgtgatttttcaaggcaaactcgcgctcctgtcggtcacgaccggggggactgccgagatgtacaccaaaacaggagtcaatggagactcccgatacttcctgtggcctttacagcacggcaccctgcacttttgcgggttcaaagtcctggccccgcagatctcttttgcccctgagatcgccagtgaagaagagaggaaggggatggttgccgcttggagtcagagactgcagaccatctggaaagaagagccaattccatgtaccgcccattggcactttgggcagtag

SEQ ID NO: 125704 - DNA, 582 bp, synthetic construct
  misc_feature 1..582: note = Description of Artificial Sequence: Synthetic coding sequence
  source 1..582: mol_type = other DNA
atggccgggaaaaaagtgctcatcgtctacgcccatcaggaaccaaagagtttcaacggatcactgaagaacgtcgctgtggatgagctgagcagacagggctgcaccgttacggtctctgacctctatgctatgaatctggagcccagggccactgacaaagacataactggtacgctgtcaaatcctgaagtgttcaattacggcgtggaaacgcacgaagcctacaaacaaaggtctctggcaagtgacattaccgatgaacaaaagaaagtccgagaggcagaccttgtgatttttcagggcaaactggctttactgtctgtgacaaccggcggcaccgcagagatgtataccaaaactggcgttaacggagactctcgatactttttatggccacttcagcacggcaccctccacttttgtggcttcaaggttttagcccctcagatttccttcgctcctgagatcgctagcgaagaggaaaggaagggtatggtggccgcttggagccaacgcctccaaacgatttggaaagaggagccaatcccctgtacggcacactggcacttcgggcagtag

SEQ ID NO: 125705 - DNA, 696 bp, synthetic construct
  misc_feature 1..696: note = Description of Artificial Sequence: Synthetic coding sequence
  source 1..696: mol_type = other DNA
atggctgggaagaaggttctcatcgtgtacgcgcaccaggagccaaagtcttttaacgggagtttaaagaacgttgcggtggatgagctatctcgccaaggctgtacagtgactgtctctgacttatatgcgatgaaccttgaaccacgggccactgacaaagatatcaccgggacattgtcaaaccccgaggttttcaactatggcgtggagacccatgaagcatataagcagaggagtctggcttctgacatcaccgacgaacagaagaaggtgagagaggccgatctggtcatcttccagttccctttgtattggtttagcgtccctgctatcttgaaggggtggatggatcgggtcctgtgtcaaggatttgcatttgatattcctggtttctacgacagcggcctattacaggggaaattggctttgctgtcggtcactaccgggggaacagcagaaatgtacactaaaaccggcgtcaacggagacagccgatacttcctttggccactgcagcacgggaccctgcatttttgtggatttaaagtgctcgcgccacagataagctttgcgccagagatcgcctctgaggaggaaaggaaaggaatggtggcagcttggagtcaaagactgcagactatttggaaggaggagcctataccatgcacagcccattggcattttggtcagtag

SEQ ID NO: 125706 - DNA, 420 bp, synthetic construct
  misc_feature 1..420: note = Description of Artificial Sequence: Synthetic coding sequence
  source 1..420: mol_type = other DNA
atggccggaaagaaggtgctcattgtatacgcacaccaagagccgaagtccttcaatggtagcctaaaaaacgtagctgtggatgaactctcacggcagggctgcaccgtgactgtctctgacttatacgctatgaacttggaaccccgagcgactgacaaagatattactgggactttgtcaaacccggaagtcttcaactacggagtggagacgcacgaggcctataagcagcggtccctggcttccgatatcacggacgagcagaagaaggttagggaggcagaccttgtgatctttcaatttcctctgtattggttcagcgttccagcaattttgaaaggatggatggaccgggtgctgtgtcaagggttcgcctttgacatcccaggcttttacgacagtgggctcctccagtag

SEQ ID NO: 125707 - DNA, 420 bp, synthetic construct
  misc_feature 1..420: note = Description of Artificial Sequence: Synthetic coding sequence
  source 1..420: mol_type = other DNA
atggctgggaagaaggtattaatcgtctatgcacatcaagaacccaaaagtttcaacggatctttgaagaacgttgcagtcgatgaactgagcagacagggttgtactgtaacagttagcgacctgtacgcaatgaacctcgagccgagagcaacagacaaagatatcaccggcacactgtccaaccccgaggtctttaattatggcgtggagacacatgaggcctataaacagcgctccctggcctccgatattactgacgaacagaagaaggtaagagaggctgatctagtgatcttccagttcccgctgtactggtttagcgtacccgcaatccttaaaggctggatggatcgggttctgtgtcagggcttcgcatttgacatcccagggttctacgactccggtctgctgcagtag

SEQ ID NO: 125708 - DNA, 192 bp, synthetic construct
  misc_feature 1..192: note = Description of Artificial Sequence: Synthetic coding sequence
  source 1..192: mol_type = other DNA
atggccggaaaaaaggtgctgatcgtttacgcccatcaggagcctaagtcctttaatgggtctctcaaaaatgtcgcggtggatgaattatccaggcagggatgcaccgtcactgtgagcgacctgtacgccatgaatctcgagcctcgcgctacagataaagacatcacagggaccctctcgaatccatag

SEQ ID NO: 125709 - DNA, 483 bp, synthetic construct
  misc_feature 1..483: note = Description of Artificial Sequence: Synthetic coding sequence
  source 1..483: mol_type = other DNA
acccctggtttaaagcaaagctcacatctctctctgtggtcgagctgggactacaggttgctcgatagcctgaaacgagactatgcagggaaacctcagcctccgattaaatccgagaggcgcaacccgccaagctacgctatggcaggtaagaaagtcctcattgtatatgcgcaccaagagccaaagtcctttaatggtagcctaaagaatgtcgctgttgatgaacttagtagacagggctgcacagtcacagtgagcgacctgtacgcaatgaatttggagccccgggccacagataaagacattaccggaacacttagcaaccccgaggtgtttaattatggggtggaaactcacgaagcctacaaacagagaagcctcgcctcagacattaccgatgagcaaaagaaggtgagggaggctgacttggtaatattccaaatgctcagtaccgagctttcgctaactagtcggtgctag

SEQ ID NO: 125710 - DNA, 231 bp, synthetic construct
  misc_feature 1..231: note = Description of Artificial Sequence: Synthetic coding sequence
  source 1..231: mol_type = other DNA
atggcggcagctgctgcttcacgaggtgtgggggccaaactgggcctgcgggaaattagaatacatttgtgccaaaggtctccagggtctcagggggtgcgggatttcattgaaaagagatatgtcgaactgaagaaggcaaacccagatctgccaatcctgatcagagagtgcagcgatgtacaaccaaaattgtgggctaggtacgccagtagagtacaaaattcatag

SEQ ID NO: 125711 - DNA, 213 bp, synthetic construct
  misc_feature 1..213: note = Description of Artificial Sequence: Synthetic coding sequence
  source 1..213: mol_type = other DNA
atgtggttcgagattctgcccggcctttccgtgatgggagtgtgccttcttatcccaggactggcgaccgcttatatccaccgtttcacaaacggtgggaaagaaaaacgcgtcgcacactttggctatcactggtctctgatggagagagatcgccgaatcagcggcgttgataggtactatgtgagcaaaggactcgaaaacatagactag

SEQ ID NO: 125712 - DNA, 1068 bp, synthetic construct
  misc_feature 1..1068: note = Description of Artificial Sequence: Synthetic coding sequence
  source 1..1068: mol_type = other DNA
atggctttgaggctcctgaaattggcggctacctccgctagcgctcgcgtggtggccgcaggtgcccaacgggtgagaggcattcacagttcagtccaatgtaaactgcgctatggtatgtggcacttcttgttgggagataaggctagtaaaagactgactgagagaagtcgcgtcattactgtagatggcaatatctgcacaggcaaaggaaaactggccaaggaaatcgcagagaagttgggattcaaacactttcctgaggctggaattcattaccccgacagtaccacgggagatggcaagccactggctactgattacaatggcaactgctcattggagaaattttatgacgaccctagatccaacgatggtaattcctacaggttgcagtcctggctatatagctcacggctgctccagtattcagatgcgttggaacacctgctgaccaccggccaaggtgtagtgctagagcggtctatatttagtgactttgtcttcttggaggctatgtataatcaaggctttatccggaaacaatgtgttgatcattacaacgaggtcaaatcggtaacgatttgtgactacttgcctccgcacctggtcatatatattgatgtgcccgtgccggaggtgcagcggcggattcagaagaagggagaccctcacgaaatgaaaattacctcagcctacttgcaggacattgaaaatgcatacaaaaaaaccttcctgccagaaatgtctgagaagtgcgaggtactgcagtattcagcgagggaggctcaggatagtaagaaggtggtggaggacattgaatacctcaaatttgacaaaggtccctggttgaagcaggacaacagaaccctttaccacctgcgattgcttgtccaggataagttcgaggtgctgaattacactagcattcctattttcctgcccgaggtcacaatcggggctcatcagactgatcgggtgctgcatcagttcagggaactgcccggtcgaaagtactcacccggctataataccgaagtgggagacaagtggatctggctgaaatag

SEQ ID NO: 125713 - DNA, 1068 bp, synthetic construct
  misc_feature 1..1068: note = Description of Artificial Sequence: Synthetic coding sequence
  source 1..1068: mol_type = other DNA
atggcacttcgcctgcttaaactcgctgccacctcagcatcagcccgtgtggttgcgcgggctccaagcgcttggcgcggaatccactcgagtgtgcagtgcaaactgcgctacgggatgtggcacttcttgttaggggacaaagccagcaaacgactcactgagcgatcacgggtgattacagtggacggtaacatctgtacaggaaagggcaagctcgccaaggagatcgccgaaaagctgggatttaagcacttccctgaagccggtatacactatccagactctacaacaggcgatggaaaacctcttgccactgattacaacggaaactgcagcttagaaaaattttatgatgaccctcggagcaacgacgggaacagctaccgcttgcagtcttggctttacagttctcgtctgcttcagtattccgacgccctggaacaccttctgactactggccagggagtggtgctggagaggtctattttctccgatttcgtgttcctcgaagcaatgtacaaccagggatttattcgtaaacagtgtgtggaccactacaacgaggtgaagagcgtcactatctgtgactacttacctcctcatctcgtcatctacattgatgtgccagtgccagaagtgcaacgccgtattcagaagaagggtgatcctcatgagatgaagataacctctgcttacttgcaggacatcgagaacgcttataaaaagaccttccttcctgagatgtcggaaaagtgcgaagtgctccagtactctgcaagagaggcccaggactctaagaaggtagtggaagacattgagtacctgaagttcgataagggaccctggctgaaacaagacaataggaccctctatcatctaaggctcttggtgcaggacaaattcgaggtccttaattacacatctattcctatttttcttccagaggtgactatcggagcccatcagactgatagggtgctccaccagttcagggaattgcccggccgtaaatacagtcccggatataacaccgaagtcggcgataagtggatctggctaaaatag

SEQ ID NO: 125714 - DNA, 426 bp, synthetic construct
  misc_feature 1..426: note = Description of Artificial Sequence: Synthetic coding sequence
  source 1..426: mol_type = other DNA
atggctcctaaggtgttccgacagtattgggacattcctgacgggaccgattgccatcgtaaggcttacagtaccacctcaattgcctcagtcgctggcctgacagccgctgcttacagagtcactcttaaccccccgggaacttttctggagggtgttgccaaagtggggcagtacactttcaccgcagcggccgtcggtgctgtgttcggactaaccacatgtatttccgcgcacgtccgggagaagcccgatgaccccttgaactacttcttgggagggtgtgccggcggcctgacgctgggggcaaggacccacaattacggtataggcgctgctgcctgtgtgtacttcggcattgctgcttctctggtgaagatgggccggttggaaggctgggaagtctttgcaaagccaaaggtttag

SEQ ID NO: 125715 - DNA, 687 bp, synthetic construct
  misc_feature 1..687: note = Description of Artificial Sequence: Synthetic coding sequence
  source 1..687: mol_type = other DNA
atggcaccaaaggtatttagacagtactgggacatcccggatggaaccgactgccataggaaggcttatagcactaccagcatcgcttctgtcgcaggcctgactgctgcagcttatcgggtcaccctgaacccccccgggactttcctggagggagttgcaaaagtcggtcagtacaccttcaccgcagccgcagtgggcgccgtgttcggactgacaacatgcattagcgctcacgtccgcgaaaaacctgacgatccgcttaattatttcctgggaggctgcgctggtggcctgacactgggcgcaagaaagactggcagccattgtgttgtacaagccgggctgaagttacttgcttcttcatccccacatacctcggcaagtcagagcgcaggcatcatcggtatgtctcattgcgttcagaggttctgggtgccatcttcctctgcctgcctcgaagtgctgtccggcgaatccaccgatgttcatgcttgctcaagtaccaggggggcctgtaattcttctggctctaggccactgccggagctgggagctcgggctagtggttcattaagaaaagggggccatactcatcctgctcctcggggagcaggtgctttgactcccgtacaggccttgatagagtccttgctgaataccctgggcagcaacccacgaacttag

SEQ ID NO: 125716 - DNA, 684 bp, synthetic construct
  misc_feature 1..684: note = Description of Artificial Sequence: Synthetic coding sequence
  source 1..684: mol_type = other DNA
atgcaggaaccgcgccgcgtgacaccatgcctgggaaaacggggcgtcaaaacccctcaacttcagccggggtcagctttcctgccccgggtccgccgacaatctttccctgctcgctcagattcgtacacgacggtgcgagatttcctggcggttccgagaaccatctctagcgcctcagctaccctgatcatggctgtggccgtgtcgcactttcgccctgggcctgaggtttgggataccgcctccatggcagcttcgaaggtcaagcaggacatgccacctccaggcgggtacggtcccattgattacaagcggaacctgcctaggaggggcttgagtggatactcgatgctggctataggcatagggaccctgatctatggtcactggagtatcatgaaatggaaccgggagaggagacgattgcaaatcgaggacttcgaggctcggatagccctgttgcctcttttgcaggccgagacggacagacggacgctgcagatgctgagagagaacctagaggaagaggcaatcatcatgaaagacgtgccagattggaaagtgggcgaatcagtgttccataccacccggtgggtccctccactcatcggagagctctacggattgaggactacagaagaggccctccatgcttcccatggcttcatgtggtacacttag

SEQ ID NO: 125717 - DNA, 435 bp, synthetic construct
  misc_feature 1..435: note = Description of Artificial Sequence: Synthetic coding sequence
  source 1..435: mol_type = other DNA
atggcagcttccaaagtgaagcaggatatgccaccgcccgggggctatgggcctatcgattacaagaggaatctgcctaggagaggtcttagcggctatagcatgctggctatcgggatcggcactttgatctacggccattggtcgataatgaagtggaatcgcgaacgacgcagactgcagatcgaagacttcgaagcccgcattgccttattgcctctgcttcaagccgagacagacaggcggactcttcagatgcttagagagaacctggaggaggaggctattatcatgaaggacgtgcccgattggaaggtcggcgagtccgtctttcatacaactaggtgggtccccccacttatcggcgagctctacggactgcgaactacggaggaggccctgcacgccagtcatgggttcatgtggtatacttag

SEQ ID NO: 125718 - DNA, 300 bp, synthetic construct
  misc_feature 1..300: note = Description of Artificial Sequence: Synthetic coding sequence
  source 1..300: mol_type = other DNA
atggccgcagcagctgcttcacggggtgtgggggctaagctcggtcttagggagatccgtatacacttgtgccaacggagtccggggtcccagggggtgcgggatttcattgaaaaacggtatgtggagcttaagaaggctaacccagacttgccaattctaattcgtgagtgtagcgacgtgcagcctaagctatgggccagatatgcctttggtcaggagacgaacgttcccctcaataatttctccgccgaccaggtcactagagcactagagaacgtgcttagcggcaaggcttag

SEQ ID NO: 125719 - DNA, 720 bp, synthetic construct
  misc_feature 1..720: note = Description of Artificial Sequence: Synthetic coding sequence
  source 1..720: mol_type = other DNA
atggccggcgttctgaagaaaactaccgggcttgtagggctggccgtgtgtaacaccccgcatgaagtgtgcacctttgttttgtccagctttcttaattcacagggtaggctgaatagctgtcattttgcatattgccgcgtcaacggaatacagatgttccaggcactcaactacaaaccccgtgagcttctcaggcatggacgttgtcctcccacctccctgattcgatgtcacatatttatctacttctgtcacgatctctttatcaagcccgttttcctactcaccttctctctcactttttcttggctgcatttgtgtctgctcctatccgccccttcccaaatttacatcagcgtgttccatctcttttccttgccctataggttctgtcttggcgcattggattatatatatcttggccttctcaaggtactgccaccctttccctccgttagatcttttccctccgtatttacaaacgtatttattaaaaaaacacataagttctttatattactggtcccaagtatcatcacaccctttctgtgttttactctgcagatcacgcagaaatcttacctctactttcttcagtttttgtcctactcgcctcttaacgccctaagtcacccgtggcgtttcagctcttctccgatcattagcatgctcccaaacccgatggtcagctcttacttctccccaagtcttacgtag

SEQ ID NO: 125720 - DNA, 351 bp, synthetic construct
  misc_feature 1..351: note = Description of Artificial Sequence: Synthetic coding sequence
  source 1..351: mol_type = other DNA
atggcaggcgtcttgaaaaaaacaactggcttagtgggtctggctgtgtgtaacacaccacacgagcgcctgaggattctctacaccaaaatcctcgacgtactcgaggagattcctaaaaacgctgcctatcggaaatacacagagcaaatcacaaatgagaagctggcaatggttaaagcggagcctgatgtgaaaaagttggaagaccagctccagggaggacagttagaagaggttatactgcaggcagagcacgagcttaatctcgctcgcaagatgcgggagtggaagctttgggaacctctcgtcgaggagccaccagcagatcagtggaagtggcctatatag

SEQ ID NO: 125721 - DNA, 351 bp, synthetic construct
  misc_feature 1..351: note = Description of Artificial Sequence: Synthetic coding sequence
  source 1..351: mol_type = other DNA
atgccctatagggtggggcaaacgacagggttagtgggtctggctgtctgcaacaccccacatgagcggctcagaatcctgtacacaaagatattagacgttcttgaagagatccctaagaatgcagcctatcggaagtatactgagcagattactaatgagaaactggccatggtgaaggcagaacccgacgttaaaaagttggaagaccagctgcagggcggtcagctcgaggaagtgatcctgcaggccgaacacgagctcaacttggcacggaaaatgagagaatggaagttatgggagcccctcgtggaggagccgccagccgatcaatggaagtggcctatttag

SEQ ID NO: 125722 - DNA, 465 bp, synthetic construct
  misc_feature 1..465: note = Description of Artificial Sequence: Synthetic coding sequence
  source 1..465: mol_type = other DNA
atgggtaaagacattagacctcgctctgcccgtgccgcgtgtaagggcgttggcctatggagcggctgcttcggcaagatggccggttcaggtgtgcgacaagccaccagtactgcctctacattcgtgaaacctatctttagcagagacatgaacgaggccaagcgccgagtgagggaattgtatcgggcatggtaccgcgaggtgccgaatactgtgcaccagtttcagctggacatcactgtcaagatgggtagggacaaggttcgtgagatgttcatgaagaatgcgcacgtgaccgacccccgggtggtggacctgctggtcatcaagggaaaaatcgagcttgaagagactattaaggtctggaagcagagaacccacgtgatgcgctttttccacgagacagaggcccccaggccgaaggatttcctcagtaagttctatgtgggccacgatccttag

SEQ ID NO: 125723 - DNA, 342 bp, synthetic construct
  misc_feature 1..342: note = Description of Artificial Sequence: Synthetic coding sequence
  source 1..342: mol_type = other DNA
atggcctccgcaacccggctgattcagcggttacggaattgggctagtggccacgatctccagggcaagctccagctgaggtatcaagagatttctaaacgcacccagcctccgcctaaattacccgtagggccaagccacaagctgagcaacaattattattgcaccagagacggccggcgagagtctgtgccccctagcataatcatgtcttcacagaaagcattggtgtccggcaagcctgcagagtcctccgccgttgcagcgaccgaaaaaaaagccgtcacgcctgccccaccgattaagagatgggaactgtcatctgaccagccttacctttag

SEQ ID NO: 125724 - DNA, 519 bp, synthetic construct
  misc_feature 1..519: note = Description of Artificial Sequence: Synthetic coding sequence
  source 1..519: mol_type = other DNA
atgcccggaattgttgagctgccaacactggaagaactaaaggtggacgaggttaagatttccagcgccgtactcaaggctgcggctcaccattacggcgcacaatgcgacaaacccaataaagagttcatgctgtgtagatgggaggagaaggaccctcgacgttgccttgaggaaggtaaactggtaaacaaatgtgcgttggactttttccgccaaatcaagcgtcactgcgccgagccgttcacagagtattggacttgcatagactatactgggcagcagctgttccgccattgtaggaagcagcaagccaagttcgacgagtgtgtgctggacaaactggggtgggttcgaccggatctgggtgaactgtctaaggtcacaaaagtcaagaccgacagacccctgcctgagaacccttatcactcgcggcccaggccggacccctctcccgagatcgaaggcgacctccagcccgcgactcatggctctaggttctatttctggaccaaatag

SEQ ID NO: 125725 - DNA, 387 bp, synthetic construct
  misc_feature 1..387: note = Description of Artificial Sequence: Synthetic coding sequence
  source 1..387: mol_type = other DNA
atgcccggtattgtggagctgccgacgcttgaggaacttaaagttgatgaggtcaagatatcaagcgcagtgctgaaagccgccgcccaccattacggggcccagtgtgacaagccgaataaggagtttatgctgtgtaggtgggaggagaaagaccctagacgatgtctcgaagaggggaagttggtcaacaaatgtgcgcttgactttttccgacaaattaagcggcattgcgcagagccattcacagaatactggacatgtatcgactacaccggacagcagttatttcgtcattgtagaaaacagcaggccaagtttgatgagtgtgtccttgataagctgggttgggtgagacctgatttgggcgagctgagcaaaggctag

SEQ ID NO: 125726 - DNA, 1134 bp, synthetic construct
  misc_feature 1..1134: note = Description of Artificial Sequence: Synthetic coding sequence
  source 1..1134: mol_type = other DNA
atggcagccgccgcgcagtcccgggtagtgcgcgtgctgtccatgagccgctccgcaatcaccgccattgcgaccagtgtctgccatggccctccatgcagacaactccaccacgctcttatgccccacgggaaaggaggaagaagttctgtgtcgggcatcgtagccacagtgttcggggctacagggttcttgggccggtacgtcgtgaaccaccttggtcgcatgggctctcaggtgataattccatacaggtgtgataaatacgatattatgcacctccggccaatgggggacctggggcagctgttatttctggaatgggatgcgcgggacaaggactccattaggcgcgtggtccagcacagtaatgtagtcattaatctcataggtcgggattgggagacaaaaaattttgatttcgaagacgtgttcgtgaagattccgcaggccattgcccaattgagtaaagaggcaggcgtggaaaagttcatccacgtgtcacacctgaacgccaatattaagagtagcagccgttacttaagaaacaaagcggtaggggaaaaggttgttagggacgcctttccggaagccattatcgtgaagcccagtgatattttcggcagggaagaccgtttcctcaattcatttgcaagtatgcataggtttgggcctattccacttgggagcctaggatggaagacagtgaagcagccggtctatgtggtcgatgtgtctaaaggcatagtgaatgctgtgaaagatccggacgctaatggcaagtcctttgcctttgtgggcccctccaggtacctactgttccacttagtcaagtatatttttgccgtagcccaccgcttatttctgccttttcctcttcccttgttcgcatatcgatgggtggccagggtgtttgagatctccccatttgagccctggataacccgagacaaagtggagaggatgcacattacagatatgaaactccctcatctgcccgggttggaggatctggggatccaggcgaccccactggaattaaaagcgatcgaggtactgcgccggcacagaacttataggtggctaagcgccgagattgaggatgtgaagcccgccaaaactgtaaatatttag

SEQ ID NO: 125727 - DNA, 984 bp, synthetic construct
  misc_feature 1..984: note = Description of Artificial Sequence: Synthetic coding sequence
  source 1..984: mol_type = other DNA
atggccctagtgcacaagcttctgcgcggcacctatttcctgcgtaagtttagtaagcccaccagcgctctgtaccctttcctagggattagatttgcagaatactcatctagtctccagaagcccgtagcttcacctggcaaagcctcttctcagaggaagacagagggagacctgcagggggatcaccagaaggaggttgccctggacatcacttcatcagaggagaaacccgacgtgagcttcgacaaggccatccgtgacgaagcaatttaccatttccgtctgcttaaggacgagatcgtggaccattggcgtggccccgagggccatcccctgcatgaggttttgctggagcaagctaaggtagtctggcagtttaggggaaaagaggatctggataaatggacagttacttctgacaaaaccatcggcggccgctctgaggtttttttaaagatgggcaagaacaaccagtccgcgctcctgtacggtactctgtcatctgaagccccacaggatggagagtcaaccagaagcggctactgcgctatgataagccggattcctaggggagcctttgaacgaaaaatgtcctatgattggagccagtttaacacactctatctgagggtacggggagacggacgtccatggatggtaaatattaaggaagataccgacttcttccaacggaccaaccagatgtattcttattttatgtttacccggggcgggccctactggcaggaagtgaagatccccttctctaaatttttctttagcaacagaggaagaatcagagacgtccagcacgaactcccgctggataaaatttcttcaatcggttttacactcgccgacaaagtggatggaccgttctttctggagatcgactttatcggggtgtttaccgaccctgcacatacggaagagttcgcctatgaaaattctccagagctgaacccacgcttatttaagtag

SEQ ID NO: 125728 - DNA, 576 bp, synthetic construct
  misc_feature 1..576: note = Description of Artificial Sequence: Synthetic coding sequence
  source 1..576: mol_type = other DNA
atggctcttgtgcacaagctcttgcgcggtacctatttcctgaggaaattctctaagccaacctccgctctgtatccctttctcgggatcaggtttgcggagtacagttcctcacttcaaaagcctgtggcctcccccgggaaggcctcatcccagcgcaagactgaaggtgaccttcagggagatcaccaaaaagaggtcgctctggatataacttcatccgaggagaagccagacgtaagctttgacaaggctatcagagacgaggcaatataccattttcgactcctcaaagacgagatcgtcgaccattggaggggccctgagggccaccctctgcacgaagtgcttctggagcaggccaaagtcgtctggcaattccgaggaaaagaagatctggacaaatggaccgtcacctcggataagaccattggaggaaggtcagaggtttttttgaagatgggcaagaataatcagtccgcacttttgtatggcaccctgtcttccgaagctccgcaggacggggaatcgaccaggagtggttactgtgctatgattagtaggattccccggtag

SEQ ID NO: 125729 - DNA, 630 bp, synthetic construct
  misc_feature 1..630: note = Description of Artificial Sequence: Synthetic coding sequence
  source 1..630: mol_type = other DNA
atggccctggtgcacaaattgttacggggtacttatttccttcgaaagttctcaaagccgacttctgcgctgtacccgttcctgggcataaggttcgctgagtatagttcctctttgcagaagcccgtggctagccctggcaaggctagtagccagcgaaaaacggaaggcgacctccaaggcgaccaccagaaggaggtggccctggacattacttcttccgaggagaaacccgatgttagcttcgataaggcaattagggacgaggcaatctatcacttccgcctgttaaaagatgagattgtcgaccactggaggggcccggaggggcatcctctgcatgaggtcctcttggagcaggccaaggtcgtgtggcagtttcgaggtaaggaggacctggataaatggaccgttacatcggataaaacgataggtgggaggtctgaggtcttcctgaaaatggggaaaaacaaccaaagtgccctgctctacggcaccctgtcctccgaggccccacaggatggggaatccacaagatctggctattgcgctatgatcagccgcatcccgaggggagcttttgaaagaaaaatgagttacgactggtctcagtttaataccctgtattag

SEQ ID NO: 125730 - DNA, 510 bp, synthetic construct
  misc_feature 1..510: note = Description of Artificial Sequence: Synthetic coding sequence
  source 1..510: mol_type = other DNA
atgggatggagccaggacctcttccgcgctttatggcgtagtttatctagggaggtcaaggaacatgtgggaacagatcaatttgggaacaagtactactatatcccccaatacaaaaactggagaggtcagactatccgcgagaaacggatcgtggaggctgcaaacaaaaaggaagtggattatgaagccggggacatccctaccgagtgggaagcatggataaggcggacgaggaaaacaccgcccacaatggaagagatcctcaagaacgagaaacatagagaggaaatcaagatcaagtcgcaggatttttacgagaaggagaagttactctcgaaggagaccagcgaggagctactgcccccccccgtgcaaacccagataaagggccatgcctcagccccttatttcggtaaggaggagcccagtgtcgcgccatctagtacaggaaagaccttccaacctggatcttggatgccccgggacggcaagtcacacaaccagtag

SEQ ID NO: 125731 - DNA, 384 bp, synthetic construct
  misc_feature 1..384: note = Description of Artificial Sequence: Synthetic coding sequence
  source 1..384: mol_type = other DNA
atgtacatcgactcctacaattctcggggtttcatgatcaatggcaacagagtgcttggtccttgcgcgctgctgccacatagcgttgtgcaatggaacgtggggtcccatcaggatatcacagaagactctttctccctcttttggcttctggagccccgcatcgaaatcgtcgttgtgggtaccggagatagaacagaaaggctgcagtctcaggtcctccaggccatgcgtcaacgggggatagccgtggaagttcaggacacgcccaacgcatgtgcaacttttaacttcctgtgccacgaggggagggtcactggagcagccctcatcccaccccccgggggcacttcattaacttccctgggtcaggcggcgcagtag

SEQ ID NO: 125732 - DNA, 555 bp, synthetic construct
  misc_feature 1..555: note = Description of Artificial Sequence: Synthetic coding sequence
  source 1..555: mol_type = other DNA
atggccactgccctggcacttcgaagcctctatagggcccggcctagcttgaggtgtccgcctgtggaactgccctgggcacctaggagaggacaccggctcagccctgccgatgacgaactctatcaacgcacccggatctctctcctccaaagggaggccgcgcaagctatgtatatcgattcttacaattctaggggctttatgattaacggtaatagagttctgggtccatgcgccctcttgccacacagcgtcgtccagtggaacgttggttcccatcaggacattacggaggactcttttagtttgttctggctgttagagcctcgcatcgaaatagttgtggtgggcaccggcgaccgaacagaaagactgcaatcccaggtgctgcaagctatgcgacaacggggaatcgcagtcgaggtgcaggatacccctaacgcctgcgctaccttcaacttcctttgtcacgagggtagagttacaggtgccgccctgatcccccccccgggaggaacgtctctgacatcattgggccaggcggcacagtag

SEQ ID NO: 125733 - DNA, 384 bp, synthetic construct
  misc_feature 1..384: note = Description of Artificial Sequence: Synthetic coding sequence
  source 1..384: mol_type = other DNA
atgtatattgactcatataattctagaggttttatgatcaacgggaatagggtgcttggtccttgtgctttgctgccccattctgtcgtccaatggaacgtgggaagccaccaggatattacggaggatagtttttcactcttttggctactggagccacgcattgaaatcgtggttgtgggcactggtgataggacagaacggctccagtcacaggtactgcaagcaatgcggcagcgaggcattgctgtggaggttcaagatacccccaacgcatgcgccacgttcaacttcctgtgtcacgagggacgggtgaccggggccgcacttattccacctccaggagggaccagtcttaccagtcttggccaagcagcccagtag

SEQ ID NO: 125734 - DNA, 384 bp, synthetic construct
  misc_feature 1..384: note = Description of Artificial Sequence: Synthetic coding sequence
  source 1..384: mol_type = other DNA
atgtacattgactcctataacagccgggggttcatgatcaatggaaatagagtgttgggcccgtgtgccttactccctcatagcgtagtacaatggaatgtggggtcccatcaagatataaccgaggatagcttcagtctcttctggctgttggagccccggattgaaatagtagtggtaggcactggagataggacagagcggctccagtcccaagtactgcaagcaatgcgacagaggggcatcgcggttgaagttcaagacaccccaaatgcatgcgctacctttaacttcctgtgccatgaaggccgagtgactggagcagctttgattcctccccctgggggcaccagcttgacttccttgggccaagccgctcagtag

SEQ ID NO: 125735 - DNA, 528 bp, synthetic construct
  misc_feature 1..528: note = Description of Artificial Sequence: Synthetic coding sequence
  source 1..528: mol_type = other DNA
atgggagcattagtcatccgtggcataaggaactttaaccttgagaaccgtgcggaaagggagatatccaaaatgaaaccttctgtggctccgagacatccgagcaccaactcactgctgcgggagcagatttcactttatcccgaggtgaaaggtgaaatagcccggaaagacgagaaactgttgagctttctgaaggatgtctacgtcgactcaaaagatccagtgagttccctgcaggtgaaggctgctgagacttgtcaggaaccaaaggaatttagactgcccaaggaccatcattttgacatgattaacataaagagtattcccaagggtaaaatcagcatagttgaagccctgacccttcttaacaatcacaaactgtttcccgaaacatggaccgctgaaaaaatcatgcaagagtaccaactggagcagaaagacgtcaactccctccttaagtatttcgtcaccttcgaggttgagatctttccaccagaggacaaaaaggcgattcgctccaagtag

SEQ ID NO: 125736 - DNA, 519 bp, synthetic construct
  misc_feature 1..519: note = Description of Artificial Sequence: Synthetic coding sequence
  source 1..519: mol_type = other DNA
atgcccgactcctgggacaaggatgtgtatcccgaacctcccagacggactcctgtgcaacccaacccaattgtttatatgatgaaagcttttgaccttatcgttgaccgcccggtaactctggtaagagaatttatcgaacgccagcacgccaagaatcggtattactactatcatcggcaataccgacgggttcccgacatcacggagtgcaaagaagaagatatcatgtgtatgtatgaggccgagatgcagtggaagcgagactacaaagtggaccaagagattattaatataatgcaggataggcttaaagcctgccagcaaagggagggccagaattatcagcagaactgtattaaggaggttgaacaatttacgcaggttgcgaaagcctatcaggatcggtaccaggacctgggggcctacagttccgccagaaagtgcttagctaagcagcggcagcgcatgttacaggagcgcaaggctgccaaggaggccgccgccgccaccagctag

SEQ ID NO: 125737 - DNA, 507 bp, synthetic construct
  misc_feature 1..507: note = Description of Artificial Sequence: Synthetic coding sequence
  source 1..507: mol_type = other DNA
atgccagattcatgggacaaggacgtgtaccctgagcctcccaggagaacacctgtgcaacctaatcctatagtttatatgatgaaagcattcgatctcatcgtggaccggcccgttacattggtcagggagtttattgagcgccaacatgccaagaaccggtattattactatcaccgtcagtatcgccgcgtgccagatatcaccgaatgtaaggaggaagacatcatgtgcatgtacgaggcagagatgcagtggaagcgcgactacaaggtggaccaagaaatcatcaacattatgcaggatcgtctgaaggcctgtcaacagagagaagggcagaactaccagcaaaactgtattaaggaggttgagcagtttactcaggtggccaaagcctatcaggataggtgtgcttgcccgactcacccccagcctccgactatcttgctcagaccgggtgggcagaaccattgtaagtccagcctgccttcgttggttctgacctag

SEQ ID NO: 125738 - DNA, 492 bp, synthetic construct
  misc_feature 1..492: note = Description of Artificial Sequence: Synthetic coding sequence
  source 1..492: mol_type = other DNA
atggccgcaggtctttttggactgagcgcgagacgccttctggccgcggccgcgacacgcggcctccccgccgctcgggttcgatgggaatcatccttttccagaactgtcgttgcaccttctgccgttgcaggcaagagaccacctgagccaaccacaccatggcaggaggatccagagcctgaggacgaaaacctatacgagaagaatccagacagtcatgggtatgataaggaccctgtgctcgacgtctggaacatgcggctcgtgttcttttttggcgtgtccattattctggttcttgggtccacgtttgtcgcgtatttaccagactatagatgcaccggttgtccaagggcttgggacggcatgaaggagtggagtagaagggaggccgaacggttggtgaagtaccgggaagctaacggcttacccatcatggaatcaaactgttttgacccctcgaagattcagctgccagaagacgagtag

SEQ ID NO: 125739 - DNA, 462 bp, synthetic construct
  misc_feature 1..462: note = Description of Artificial Sequence: Synthetic coding sequence
  source 1..462: mol_type = other DNA
atggctgcaggtctttttggcctgtcagctaggcgcttgctggcagcggccgccaccagaggtctgccggccgctcgagtgagatgggagagttctttcagtcgcactgtggtagccccttccgcagttgcggggaagaggccgccggaacccaccactccttggcaggaggatccggaaccggaagatgagaatctgtacgagaagaatccggattcccatggctacgacaaggatcctgtgcttgacgtttggaacatgcggctcgtcttcttttttggtgtgtctataatcttggtcctaggctccacatttgtagcttacttacccgactaccgcatgaaggagtggtcccgccgggaggccgaacgccttgtgaagtatcgagaagcaaatgggctgcctattatggaatcaaactgctttgacccaagcaaaattcagctccccgaggatgaatag

SEQ ID NO: 125740 - DNA, 474 bp, synthetic construct
  misc_feature 1..474: note = Description of Artificial Sequence: Synthetic coding sequence
  source 1..474: mol_type = other DNA
gcagcccccagcgtcatggctgcaggcctgtttggcttatccgccagaaggttgctggccgcacggaggcgcggactgcccgccgcccgcgtgcggtgggaatcctcctttagcaggacagtagttgctccctcagctgttgccggaaaaagaccacccgagcccaccaccccctggcaggaggaccctgaacccgaagatgagaacctttacgagaagaacccggactcccacggatatgacaaggatcctgtgctcgacgtctggaacatgcgcctagtgttctttttcggcgtttccatcattcttgtcttggggagcacatttgtcgcgtacctacccgattataggatgaaggaatggagccgtagagaggcggaacggctagtaaagtatagagaggctaatggcctaccaatcatggaatccaattgttttgatcccagcaagatccaactaccagaggacgaatag

SEQ ID NO: 125741 - DNA, 297 bp, synthetic construct
  misc_feature 1..297: note = Description of Artificial Sequence: Synthetic coding sequence
  source 1..297: mol_type = other DNA
atggcccatgagcacggacacgagcacggacaccacaaaatggagttgcccgactaccggcagtggaaaatcgaaggtacccctctggaaaccatccaaaagaagctcgctgccaaggggctcagagacccctggggccgaaacgaggcttggagatacatgggagggttcgctaaatcagtctccttttcagacgtttttttcaaggggtttaagtggggatttgcagctttcgtggtcgcagtgggggcagagtactaccttgaatccctcaataaggacaagaagcaccattag

SEQ ID NO: 125742 - DNA, 297 bp, synthetic construct
  misc_feature 1..297: note = Description of Artificial Sequence: Synthetic coding sequence
  source 1..297: mol_type = other DNA
atggcgcacgagcatgggcacgaacatgggcatcacaagatggagctgcccgattataggcagtggaagatcgagggtactcccctggaaactatccagaaaaagctggctgctaaaggcctgagggacccttggggacgaaatgaggcctggaggtatatgggcggcttcgctaagagtgtatctttcagtgacgtgttcttcaagggtttcaagtgggggttcgctgccttcgtcgtagcggtgggtgctgagtattatctcgagtctcttaataaggacaagaagcaccattag

SEQ ID NO: 125743 - DNA, 198 bp, synthetic construct
  misc_feature 1..198: note = Description of Artificial Sequence: Synthetic coding sequence
  source 1..198: mol_type = other DNA
atggctcacgagcatgggcacgagcacgggcaccacaagatggagctgcctgactatcggcagtggaaaattgagggaacccccctggagaccatacagaagaagctagccgccaaaggcctcagggatccatgggggcgcaacgaagcatggcgctacatggggggctttgcaaaatccgtgtcattttctgattag

SEQ ID NO: 125744 - DNA, 297 bp, synthetic construct
  misc_feature 1..297: note = Description of Artificial Sequence: Synthetic coding sequence
  source 1..297: mol_type = other DNA
atggcacacgagcatggccatgagcacggccaccataagatggagctccccgactatcgtcagtggaagatcgagggcactccattggagaccattcagaaaaagctggcagctaaggggctccgggacccttggggccggaacgaagcctggcgctacatgggtggcttcgctaaaagtgtgagcttcagcgatgtcttttttaagggtttcaaatggggatttgctgccttcgtggtagccgtaggggcagagtactatctagaatctttaaacaaagacaaaaagcaccactag

SEQ ID NO: 125745 - DNA, 741 bp, synthetic construct
  misc_feature 1..741: note = Description of Artificial Sequence: Synthetic coding sequence
  source 1..741: mol_type = other DNA
atgactactggggattgttgccatcttcctggatcactttgtgactgcagcgggtcacccgcctttagtaaagtggttgaggccacgggactgggcccaccccaatatgttgcacaagtcacttcgagggacggccgcctcctttccacggttattcgcgctctggacacaccatccgacgggcccttttgccgcatctgccacgagggcgctaatggggagtgcctcctgagcccatgcggatgcacaggtactctcggcgcagtgcacaagtcttgtctggagaaatggctgtccagcagcaacacaagctattgtgagctgtgccacactgagttcgccgtggaaaaaagacctaggcccctgacggagtggctcaaggatcccgggcctcgaacagagaagcgtaccctttgctgcgatatggtctgcttcctttttataacccctttagccgcaatctcaggctggctttgcctacgtggcgcgcaggaccacctgcggttgcactcccaactcgaggctgtcggcctgattgcactgactatcgccctatttactatttacgtgctgtggacactcgtgtcatttaggtaccattgccaactgtattcagagtggcgcaaaacaaatcagaaggtgcgcctgaagatcagagaggccgactcccctgaggggccgcaacactctccgctggctgctgggctgcttaagaaggtggccgaagaaactccagtgtag

SEQ ID NO: 125746 - DNA, 561 bp, synthetic construct
  misc_feature 1..561: note = Description of Artificial Sequence: Synthetic coding sequence
  source 1..561: mol_type = other DNA
atggccgtagctcgtgcgggggtcttgggggtgcaatggctccagcgagccagcaggaacgtcatgcctttaggcgctaggaccgccagccacatgacaaaagacatgtttccgggcccatatcccagaacacctgaggagcgggcggccgccgccaaaaaatacaacatgcgcgtcgaagactacgagccctaccctgatgatggcatgggctacggcgactatccgaaactcccagacagaagtcaacacgagcgggacccctggtacagttgggatcagcccggcctgagactgaactggggggagccaatgcactggcatctcgatatgtacaatagaaaccgggtggacacaagtcccactcctgtcagttggcacgtgatgtgcatgcagctcttcggatttctcgccttcatgatcttcatgtgctgggtcggcgatgtgtaccccgtttaccaacccgtggggcccaaacaatacccctataacaacctgtatcttgagcgtggaggcgatccctcaaaggaaccggagcgggttgtacactatgagatttag

SEQ ID NO: 125747 - DNA, 519 bp, synthetic construct
  misc_feature 1..519: note = Description of Artificial Sequence: Synthetic coding sequence
  source 1..519: mol_type = other DNA
atggctgtggctcgtgctggggtgctgggagtgcagtggttgcagcgagccagccgtaatgttatgccactaggggcacgaactgcaagtcatatgaccaaggacatgtttccaggtccataccccagaactcctgaggagcgcgccgctgcagctaagaaatataatatgcgggttgaagattacgagccctaccctgatgatggcatggggtatggagactaccccaagctgcctgacagatcccagcatgagcgagacccctggtacagttgggatcagcctggactgcgccttaattggggcgaaccaatgcattggcatctagacatgtacaatcggaatcgtgtagatacttccccaacccccgtttcctggcacgttatgtgtatgcaactcttcggattcctggcctttatgattttcatgtgttgggtaggagacgtgtatcccgtgtatcagcccgtttgccgccatcatttctcatacaaccttggcttcttaagtgcactgggttag

SEQ ID NO: 125748 - DNA, 468 bp, synthetic construct
  misc_feature 1..468: note = Description of Artificial Sequence: Synthetic coding sequence
  source 1..468: mol_type = other DNA
atgacgaaagacatgttccccggcccctatcctcgtacccctgaagaacgcgcggctgccgccaagaagtacaatatgcgggtcgaggattacgagccataccccgacgatggaatgggttatggtgattaccccaagcttcccgaccgtagccaacatgagcgcgatccctggtactcgtgggaccaacctggtctacgcctgaattggggcgagcccatgcattggcatctggacatgtacaaccgaaaccgcgtggacacaagtcccacacctgtttcgtggcacgtcatgtgcatgcagctgttcgggtttcttgcctttatgattttcatgtgctgggtaggcgatgtatacccggtgtaccagcctgtcggtccaaaacaatatccttacaataatctctatcttgagagggggggagaccccagcaaagagcccgaacgtgtcgtccactacgagatctag

SEQ ID NO: 125749 - DNA, 519 bp, synthetic construct
  misc_feature 1..519: note = Description of Artificial Sequence: Synthetic coding sequence
  source 1..519: mol_type = other DNA
atggccgttgcaagggcgggggtccttggggtccagtggctgcagagggcgtcgcgaaacgtcatgcctctgggagccaggactgcaagtcacatgactaaggatatgtttcctggaccatatcctcggactcccgaagagagggccgcagctgcaaaaaagtataacatgcgggtggaggactacgagccatacccagatgatggcatgggatatggcgactatccgaaacttcccgaccggtcccaacacgaacgggatccctggtatagctgggaccagcctgggctgcgattaaactggggcgagcctatgcattggcacctagatatgtataacaggaacagggtggacaccagcccgacccctgtctcctggcatgtcatgtgcatgcagctcttcgggttcctcgccttcatgatctttatgtgctgggtcggcgatgtctaccccgtgtaccagcccgtgtgcagacatcacttttcttacaatctggggttcctgagcgccctcggctag

SEQ ID NO: 125750 - DNA, 540 bp, synthetic construct
  misc_feature 1..540: note = Description of Artificial Sequence: Synthetic coding sequence
  source 1..540: mol_type = other DNA
atggcattcttggccagtggcccatatctgactcaccagcagaaggtgctacgactgtacaaacgagcacttcgccatcttgagtcctggtgcgtgcagcgggataaatacagatattttgcttgcttgatgagggcccggtttgaagagcacaaaaacgaaaaggatatggctaaggctacccagctgctgaaggaagccgaggaagaattttggtataggcagcatcctcaaccctacatcttccctgactctccaggaggcacttcctatgaaagatacgactgttacaaggtgcccgaatggtgtctcgatgactggcaccccagtgagaaggcaatgtaccccgactactttgcaaagcgggagcagtggaagaaacttcgcagagagtcatgggagcgagaagtaaagcaacttcaggaggagactccacccgggggtcctctgactgaggcattacctcctgccaggaaagaaggcgatctcccccctctatggtggtatattgtcacccgcccaagggagagacccatgtag

SEQ ID NO: 125751 - DNA, 471 bp, synthetic construct
  misc_feature 1..471: note = Description of Artificial Sequence: Synthetic coding sequence
  source 1..471: mol_type = other DNA
atggcttctcgggtgctcagcgcctacgtgagccgattgcccgcggcctttgctccactgccgcgcgttagaatgttagctgtcgcccggcccctaagtacagctttgtgcagcgcaggaacgcagacgagactaggaacgcttcagcctgcacttgtcctggcacaggtccccggcagagtgacacagctgtgccggcagtattctgacatgcctcctctgacactggaagggatccaagaccgggtgctttacgtgctgaagctgtacgacaagattgatcctgaaaagcttagcgtgaattctcacttcatgaaggacttaggattagattcccttgatcaggtcgagatcataatggcaatggaagacgagttcgggttcgaaattcccgacattgatgccgaaaagctaatgtgccctcaggaaatagtcgattacattgccgacaagaaagacgtctacgagtag

SEQ ID NO: 125752 - DNA, 231 bp, synthetic construct
  misc_feature 1..231: note = Description of Artificial Sequence: Synthetic coding sequence
  source 1..231: mol_type = other DNA
atggccccctcagccctgctgagacctctaagtcggcttctggcccccgcaaggctcccttccgggccttcagttagatctaagttttatgtcagagaaccacccaatgccaaacctgattggctgaaagttggtttcaccctcgggacaaccgtgtttttgtggatttaccttataaaacagcataatgaggatatcctggaatataagcgcagaaatggcctggagtag

SEQ ID NO: 125753 - DNA, 231 bp, synthetic construct
  misc_feature 1..231: note = Description of Artificial Sequence: Synthetic coding sequence
  source 1..231: mol_type = other DNA
atggccccctctgcattgctccgaccgctatctaggctgctggcccctgcgaggctcccttcagggccgagcgttaggtccaagttctacgttagggagccaccaaacgccaagcccgactggttgaaggtgggttttacgctcggaaccacggtgttcttgtggatctacttaatcaaacagcataacgaagatatcctggaatataaacgtcgcaatggcctggaatag

SEQ ID NO: 125754 - DNA, 231 bp, synthetic construct
  misc_feature 1..231: note = Description of Artificial Sequence: Synthetic coding sequence
  source 1..231: mol_type = other DNA
atggcaccctctgccctcttgagaccactgtccagactattggcaccggcccgactgcctagtggaccctctgtcagatctaagttctatgtgagggaaccgcccaatgccaaaccagattggctcaaggtgggcttcacactgggcactacagtgttcttgtggatatacctcatcaagcagcacaatgaggatatccttgagtacaaacgaagaaacggacttgaatag

SEQ ID NO: 125755 - DNA, 231 bp, synthetic construct
  misc_feature 1..231: note = Description of Artificial Sequence: Synthetic coding sequence
  source 1..231: mol_type = other DNA
atggccccatcggccttgttacgccccctgtcacgactgttagcaccagcccggttgcctagcggccccagtgtccggtccaagttttacgtacgcgaaccccccaacgcaaaaccggattggctgaaggtgggatttaccctagggactacagtctttttatggatctatctgatcaaacaacataatgaagacatcttggaatataaacgcaggaatggtctggaatag

SEQ ID NO: 125756 - DNA, 231 bp, synthetic construct
  misc_feature 1..231: note = Description of Artificial Sequence: Synthetic coding sequence
  source 1..231: mol_type = other DNA
atggctcccagtgccctccttagaccactgtctcggcttctggccccggcaagattaccgagcgggcctagcgtgcgatcgaaattttacgtgagagaaccccctaacgctaagccagactggttaaaggtaggatttaccctaggtaccacagtgtttctctggatctacctgatcaagcagcataacgaggacatcttagagtacaagagacggaatgggctggaatag

SEQ ID NO: 125757 - DNA, 231 bp, synthetic construct
  misc_feature 1..231: note = Description of Artificial Sequence: Synthetic coding sequence
  source 1..231: mol_type = other DNA
atggcaccctcagcccttctaaggccgctctcgcgactcctggcccctgcacggctcccctctggcccttccgtgagatccaaattttacgtaagagagccgcctaatgcaaaacccgattggctgaaggtggggtttacactggggacaactgtgttcttgtggatctacctgattaagcagcacaacgaagatattctcgaatataaacgcaggaacggacttgaatag

SEQ ID NO: 125758 - DNA, 231 bp, synthetic construct
  misc_feature 1..231: note = Description of Artificial Sequence: Synthetic coding sequence
  source 1..231: mol_type = other DNA
atggcacccagcgcccttttacgacccctgtcacggctgctagcccccgctcgcctaccaagtggaccttctgtgcggagcaaattttacgtgagagagcctcccaacgccaaacccgattggctgaaagtagggtttacattaggcaccactgtcttcctttggatttatcttattaagcaacataacgaagacattctggaatataagaggcggaatgggctcgaatag

SEQ ID NO: 125759 - DNA, 231 bp, synthetic construct
  misc_feature 1..231: note = Description of Artificial Sequence: Synthetic coding sequence
  source 1..231: mol_type = other DNA
atggccccaagcgcgctgctccgcccactgagcagattactagcaccggcaaggctaccctcagggccgtcagttaggagcaaattttatgtacgcgagccccctaatgctaagccggactggctaaaggtgggcttcacactgggaactaccgtctttctgtggatttaccttatcaaacagcacaacgaagatatcttagagtacaagcggcgaaatgggttggagtag

SEQ ID NO: 125760 - DNA, 915 bp, synthetic construct
  misc_feature 1..915: note = Description of Artificial Sequence: Synthetic coding sequence
  source 1..915: mol_type = other DNA
atgatctacacaatgaaaaaggtccatgccctctgggcaagcgtttgtctacttctcaacctcgcccctgcccctttgaacgccgacagcgaagaggacgaagagcataccataatcaccgacaccgagcttcctcctctcaaactgatgcatagcttttgtgcattcaaagctgatgatgggccatgcaaggctataatgaagcgctttttttttaatatctttactcggcaatgcgaggagtttatttatggaggatgcgaaggcaatcaaaatcgctttgagtcactcgaggagtgcaagaagatgtgtaccagggataatgctaaccgaatcatcaaaaccacgctgcagcaagagaagcctgatttttgtttcctggaggaagaccctggcatttgccgcgggtacattacgcgatatttctacaacaatcaaaccaaacagtgcgagaggttcaagtacggtggatgtctgggcaacatgaacaatttcgagaccctcgaggagtgcaaaaatatctgtgaagacgggccaaacgggttccaggttgacaattatggcactcagctcaacgctgtgaataactctttgaccccacaaagtactaaagtcccatccttattcgaatttcacgggccgtcctggtgcttaactcccgcagatcggggcctctgtagggccaatgagaaccgcttctactacaacagtgttataggtaagtgtcggccattcaagtactccggatgcggaggcaacgagaacaacttcacgtccaagcaagaatgtttgcgcgcctgcaagaaggggttcatacagaggatctctaagggaggactgatcaagactaaacgtaagagaaagaaacagcgcgttaagattgcgtacgaagaaatcttcgtcaaaaacatgtag

SEQ ID NO: 125761 - DNA, 2013 bp, synthetic construct
  misc_feature 1..2013: note = Description of Artificial Sequence: Synthetic coding sequence
  source 1..2013: mol_type = other DNA
atgcaaattcctagattttgctaccatgagagactgtccgtggccggcaattgtaggatgtgtctggtggaaatcgagaaagccccaaaagtggtggcagcctgtgcaatgcccgtgatgaaaggatggaacattctgacaaactctgagaaaagcaaaaaggcgagggaaggcgtgatggaatttttactcgctaatcaccccctggattgtcctatctgtgaccaaggcggcgagtgtgaccttcaagaccagtcgatgatgttcgggaatgatcggtctcggtttctggaaggtaaacgggccgtcgaggataaaaatatcggcccactggtgaagacgataatgacacgatgtattcagtgtacccgatgcatccgattcgcaagcgagattgctggggtggacgatctgggaaccaccgggcgaggcaatgacatgcaggtgggcacgtacatagagaaaatgttcatgagtgagctgtccgggaacattatcgatatctgccccgtgggggctttgacatcaaagccatatgcctttaccgcacgcccttgggagacaaggaagactgagtctatagatgtcatggatgccgtagggtctaatatcgtcgttagtacaaggaccggcgaagttatgcgaatcctcccacggatgcatgaggatatcaatgaggaatggatcagcgacaagacccgctttgcctatgatggattgaaaaggcagcgactaacagaacctatggtgcggaatgaaaagggcctgcttacatacacatcttgggaggacgccctgagcagggtcgccggcatgctccagagtttccaaggaaaagacgtcgccgctatcgccgggggcttagtggacgcagaagccttggtcgcactaaaagatctcctgaaccgtgtcgacagtgatactctgtgcacggaggaggtctttcctaccgctggtgccgggactgacttgcggtcgaactatcttttgaataccacaatcgccggagtggaagaggccgatgtggtgcttcttgtggggacaaaccctaggtttgaggcaccgctctttaacgccaggattcgaaagagttggttgcacaacgacctcaaagtcgcactgatcggatcgcccgttgatctaacatacacctacgaccacctgggggatagtcctaagatcctgcaggacatagcttctggctctcatcctttttcacaggtactgaaggaagcaaaaaaaccaatggtcgtcctcgggtcgtcagctcttcagagaaatgacggggctgcaatcctcgctgctgtgtcttccattgcccagaagataaggatgacgtccggggtgactggagactggaaggtaatgaacattttacatcgcattgcctcccaagtggccgcccttgatctggggtataagcccggagtggaggcaattcggaagaatccgcctaaggtgttgttcctcttgggcgcagacggagggtgcattacgcgacaagatcttcccaaagactgtttcataatttatcaaggccatcacggcgacgtgggcgctccaattgcagacgtgatccttccaggagctgcgtataccgagaagagcgctacttatgtgaatacagaaggccgagcacaacaaaccaaagtggcagtcaccccacctggactcgcccgggaagactggaagatcattagagcgctgtctgagattgccgggatgaccctcccttatgacacccttgatcaagtgcgcaacaggctggaggaagtaagccctaatctcgtgaggtacgacgacatagaaggggctaactatttccagcaggctaacgaactgagcaagctggtaaatcagcagctgctggcagacccacttgtgccaccacagctaaccattaaggacttttatatgacggatagtatcagcagggcgagtcagaccatggcaaagtgtgtgaaggctgtgactgaaggggcccaggcagtggaagagcctagtatctgctag

SEQ ID NO: 125762 - DNA, 1851 bp, synthetic construct
  misc_feature 1..1851: note = Description of Artificial Sequence: Synthetic coding sequence
  source 1..1851: mol_type = other DNA
atgtgggaaggcgtgatggaatttctgctggcaaaccaccccttagattgtcctatctgcgatcagggcggcgaatgtgacctccaggaccagagcatgatgtttggaaatgacagatcgcgctttttggaaggtaagagagcagtagaagacaaaaatataggcccgttagtgaagaccattatgaccaggtgtatccagtgtacccgctgcattcgtttcgctagcgagatagccggcgtagatgatcttggtactaccgggagaggcaacgatatgcaagttggtacgtacatcgaaaagatgtttatgtcagagctctctggcaatatcatcgatatttgtccagtcggggcgctgacctctaagccctacgcctttactgcccgcccctgggagaccagaaaaaccgaatcaatcgatgtaatggacgctgttggaagtaacatcgtggttagtaccaggaccggcgaagtgatgcgtatcctcccacggatgcacgaggatatcaatgaagagtggatttccgataagacccgattcgcttacgacggactgaaaaggcagagactgacggagccaatggttaggaacgagaaaggcctgctgacctatacctcctgggaggacgccctgtctagagtggctggaatgctgcagagttttcagggcaaggatgtggccgcgattgccggtgggctggtggacgcagaagctttagttgcacttaaagacctgctaaatagagtagatagcgataccttgtgtacagaagaagtctttcccacagcaggcgccggcaccgacctgcggagtaattacctcctgaatactacgatagccggcgtcgaagaagcggatgtcgttctactcgttggtactaaccctcggtttgaggcccccctgttcaacgctcgcatccggaaatcttggttacataatgatctgaaggtggccctgattggctctccagtggatctgacatacacttatgatcacctaggggactcccctaaaatcttacaggacatagcctccggtagccacccgttctctcaggtgctgaaagaggccaagaagcctatggtggtcctgggatcctccgcgcttcagcggaacgacggggccgcgattctggcggccgtatccagcatcgcccagaagatccggatgacatccggggttaccggcgactggaaagtcatgaacatactgcatagaattgcaagtcaggtcgccgcattggatctcggctacaaacccggagtagaagctatccgcaagaaccctcccaaagttctcttcctcctgggtgcggacggcggatgcatcacccgccaggatttgcccaaagactgctttatcatttaccagggtcaccacggtgacgtgggcgcccccatcgccgacgttatcctaccgggcgctgcctatacagagaaaagtgctacatatgtcaatactgagggccgagcacagcaaactaaagtggcagttactccacccggactggctcgcgaggattggaagatcatccgggcattatcggagatcgcagggatgacgctgccttatgacacactcgaccaggtaaggaaccgtctagaagaggtctctcctaacctggttcgctacgacgatatagagggagccaactacttccaacaggctaatgagttgtccaaactggtgaatcagcaactactcgctgacccactggtaccacctcaactaaccatcaaagacttttatatgacagactcgatatcgcgcgcaagtcagactatggctaaatgtgtgaaagccgtcacggagggcgcccaggccgtggaggagccaagcatctgctag

SEQ ID NO: 125763 - DNA, 2076 bp, synthetic construct
  misc_feature 1..2076: note = Description of Artificial Sequence: Synthetic coding sequence
  source 1..2076: mol_type = other DNA
atgctccggatccctgttcgtaaggctctggtggggctgagcaagtcgccaaaaggttgtgttcggacaaccgccactgcagcgagcaacttaattgaagtttttgtggatgggcaatctgtgatggtggagcccggcacgaccgtactgcaggttgtggcagcttgcgcaatgccagtgatgaagggatggaacatattaaccaacagcgagaagtctaaaaaggccagagagggtgttatggagttccttttggccaaccatcctctcgattgccccatatgcgatcagggcggagaatgtgatcttcaggatcagagtatgatgtttggtaacgaccgctcgcgctttttggagggaaaacgggctgttgaggacaaaaacataggccccctggtaaaaacgataatgacaaggtgtatccagtgtactcgatgcatacgctttgcatctgaaatagcaggcgtcgatgatctggggacgacgggtaggggcaatgatatgcaagtgggtacttacattgagaagatgtttatgagcgaattgtctggtaacatcatagacatttgccccgtcggcgccctaacttcaaagccctacgcctttacagccagaccatgggaaactaggaagactgaatcaatcgatgtgatggacgctgtcggctctaacatcgttgtctcaactaggaccggcgaagtgatgcggatactcccacgcatgcacgaggacatcaacgaggagtggattagcgataaaactagattcgcatatgacgggctcaagcgtcaacgactaaccgaaccgatggtccgcaacgaaaaagggctcctaacttacactagctgggaggatgctcttagcagggtggccggtatgctgcaatctttccaaggcaaagacgttgcggcaattgctggcgggttggtcgatgcagaagccctcgtggctctgaaggacttactcaaccgtgtcgatagcgacacgctatgcactgaggaagtatttcctaccgcaggtgccggaactgacctgcgatccaactacctcctgaataccaccattgctggagtggaggaggctgatgtcgtgctgttggtggggacaaacccccgctttgaggccccgctgtttaacgccaggatcaggaaatcttggttacacaacgatctaaaggttgccctgatcgggagcccggtggatctcacctatacctacgatcatcttggtgactcccctaagatccttcaagatattgcaagcgggagtcaccctttctctcaggttctgaaagaggctaagaaacctatggtggtgcttggtagcagtgccctgcaaagaaatgacggtgcggccatcctggccgctgttagctccattgcccagaaaattcggatgacatcgggagtgaccggcgactggaaagtcatgaacatcctgcaccgaattgcgagccaggtggctgccttagacctgggttacaaacctggagtagaggcgataagaaagaacccccccaaggtgttattcctcctgggagccgacggtggctgcattacccgccaggacctgccgaaagattgtttcatcatctaccagggccaccatggagatgtcggggcccccatcgcagatgtaatcctccccggggcggcctacaccgagaaaagcgctacgtacgtgaacaccgagggacgcgctcagcaaacaaaggtcgccgttacccccccgggtctggctagagaggactggaaaatcatccgtgcactttccgagattgccggaatgactctgccatacgacacactcgatcaggtcagaaacagactggaggaggtgtcacctaatctggtccggtacgacgatatcgagggggctaattattttcagcaggccaatgagctgtccaagctagtgaaccagcagctgctcgcagatcctctagttccaccccagttgaccattaaggacttctacatgactgattccatctccagagcatcgcagaccatggcgaaatgtgtcaaagccgttaccgagggagcacaggccgtcgaagagccttctatctgctag

SEQ ID NO: 125764 - DNA, 2184 bp, synthetic construct
  misc_feature 1..2184: note = Description of Artificial Sequence: Synthetic coding sequence
  source 1..2184: mol_type = other DNA
atgttaagaatccctgtccgcaaggccctcgtgggcctgtccaagtcccctaaggggtgtgtaagaacaaccgctacagctgcgagcaatctaattgaagtcttcgtggatgggcagtctgtaatggtggaaccaggaacaaccgtgctgcaagcatgtgagaaagtcggcatgcagataccaaggttttgttaccatgaaagactgtccgtggccgggaattgtcggatgtgcctggttgagatcgagaaagctcccaaggtggtcgctgcatgcgcaatgcctgtgatgaaaggctggaacatcctgaccaacagcgaaaagtccaaaaaggcccgtgaaggggtgatggagttcttactagccaaccaccccctcgactgtccaatatgcgatcagggcggcgagtgcgacctgcaagaccagtcaatgatgtttggtaacgaccggtccaggtttttagaaggtaaaagagcagtcgaagataagaatattggtcctctggtaaaaactatcatgactagatgcattcagtgcacccgttgcatcaggtttgcttcggagatagccggcgtagacgacctgggcacaactgggcggggtaatgacatgcaagtgggtacctacatcgagaaaatgttcatgtccgaattgagcgggaacatcattgacatctgccctgttggggccctaacgtccaaaccttacgctttcaccgcccgtccttgggagactcgaaagacagaatccatcgacgtaatggacgcagttggatccaacattgtcgtgtcaacccggacaggtgaggtgatgcgaattctacctcggatgcacgaagacattaatgaagagtggatatccgataaaacgcgatttgcgtacgacgggctgaagagacaacggcttaccgagcccatggtccgaaatgagaagggcctgctgacctatacctcatgggaggatgccctgagtcgggtagccgggatgctacagtcttttcaaggaaaagacgtggcagccatcgctggtgggctggtcgatgccgaggctctggtcgcattaaaggacttactcaatcgggtggacagcgatacactgtgcaccgaggaagtattcccaactgcaggggccggcacagacctgagatccaactacctgctcaatactaccatcgcaggagtggaagaggcggacgtcgttctcttggtagggactaaccctcggtttgaggctcctctgtttaacgctcgtattaggaaaagctggctccacaatgacctgaaggtcgcacttattggttcaccagtcgatctcacctatacttatgaccatcttggggactcacctaagatactccaggacatcgcatctggaagccatccattctctcaagttctgaaggaggctaagaagcctatggtagtcctgggatcaagcgcattgcagagaaacgatggtgcagctatcctcgccgccgtgagctcaattgcacagaagatccgcatgacaagcggggtcacaggagattggaaggtaatgaatatcctgcaccgcatcgcctcacaggtggcggctttagatttgggatataaaccaggggtagaggctattcgcaagaacccaccaaaagtcctctttctgcttggggccgacgggggatgcattacaagacaggacctgcccaaagactgcttcatcatataccagggccatcacggtgatgtcggggcacctattgcagacgtgatcctgccaggggccgcttacaccgagaaatcagctacttacgtaaacactgaaggcagagcacaacaaacaaaggtggcagtgactccgcctggcctggctagagaagactggaaaattattcgcgccctgagcgaaatagccggcatgactcttccctacgataccctggaccaggtgcgcaaccgacttgaagaggtaagcccaaatctggtgcgttacgacgatatagagggagccaactatttccagcaggcaaatgaactgtctaaactcgtaaatcagcagttactcgcagaccccctggtgccgccccagcttacaatcaaagacttttatatgacagacagtattagcagggccagccagaccatggccaagtgcgtgaaagccgtcactgaaggcgcccaggctgtggaagaaccgtctatatgctag

SEQ ID NO: 125765 - DNA, 393 bp, synthetic construct
  misc_feature 1..393: note = Description of Artificial Sequence: Synthetic coding sequence
  source 1..393: mol_type = other DNA
atgctcaggattcccgtgaggaaggctctcgttggcctgtccaaatcgccaaaaggatgtgtccggaccactgcaaccgccgccagtaacctaattgaagttttcgtcgatggacagtctgtcatggtggaaccgggcactacagtgctgcaggcgtgtgaaaaggtcggcatgcagattccacgattttgctaccatgaacggctctccgtggcgggcaactgccgcatgtgtctggtggaaatagagaaagcacctaaggtggtggctgcctgcgcgatgcccgtcatgaagggatggaacatcctgactaacagtgaaaagtcaaagaaagcgcgcgagggcgtcatggaattcttactggccaatcatcctcttgactgcccaatttag

SEQ ID NO: 125766 - DNA, 2226 bp, synthetic construct
  misc_feature 1..2226: note = Description of Artificial Sequence: Synthetic coding sequence
  source 1..2226: mol_type = other DNA
atgagaatcagggggagcagtggaaccctgagccggattaacatgctgcgaattcccgtgagaaaggcactagtgggactctccaagtccccgaaggggtgtgttcggaccacagccacagctgccagtaacttgatagaggttttcgtggatggccagtcagtcatggttgaaccagggaccacagtgctccaagcatgcgagaaggtgggaatgcagatccctcggttctgttatcacgagaggctgtcagtggccggcaattgccggatgtgtctggtcgagattgaaaaggccccaaaagtggtcgctgcatgcgctatgccagttatgaaaggctggaatattctcacgaattctgaaaaatctaagaaggctcgggagggcgtcatggagttcctgctcgctaaccatccactcgattgcccaatttgcgaccagggtggcgagtgcgacttacaggatcagtcaatgatgtttgggaacgacagaagtcgattcttggaaggtaaacgagccgtcgaggataagaacatcggacctttggtgaagacaatcatgactcgctgcatacagtgcacccgctgcatccgatttgcttccgaaatcgccggagtggatgatttagggaccacaggcagaggcaacgacatgcaggtggggacgtacatcgaaaaaatgttcatgtctgagttaagcgggaacatcattgacatttgtcctgtgggggctctgacctctaagccatacgctttcacagcccgcccatgggagaccaggaagactgagtcaatcgatgttatggacgcagtgggaagtaacattgttgtgtccacccggactggtgaggtcatgcggatcttgccaagaatgcatgaagacattaacgaagagtggatctctgacaagacacggttcgcgtacgatggactgaagagacagaggcttaccgagccaatggtccggaatgagaaggggctgctcacatacacatcctgggaggatgccctaagccgagtcgccggcatgctgcagagcttccagggtaaagatgttgctgcaatagcgggaggcttggtcgacgcagaagctctggtggctttgaaggacctgctgaaccgagttgactcagatacactctgcacggaggaggtctttcccaccgccggggccggaactgatctgcgctctaactatctgttgaataccaccatcgctggggtcgaggaagccgatgtggttctgctagttggaacaaatccacgttttgaagcgcctctcttcaatgctaggatccggaaatcttggttgcacaatgatctgaaagtggctctgatcgggagtccagttgacctaacatatacttacgaccacctgggagactcaccgaaaatccttcaggatatagccagtgggtcccatcctttttcccaggtccttaaggaagcaaagaaaccaatggtagtcctggggagttccgccctccagcgaaatgacggagctgcaatactcgcggcagtcagctctatcgcacagaaaattaggatgacatccggcgttactggcgattggaaggtcatgaacatcctacaccggattgcaagccaagtggcggccctggaccttggctataagcccggagttgaagctatcaggaaaaatccgccaaaggtccttttcctgctgggggcagatggggggtgcattacccggcaggatttgcccaaggattgtttcatcatctaccagggccaccacggggacgtgggcgctcccattgctgatgtcatcctgcctggggccgcttataccgagaagagtgctacctatgtcaatactgaaggtagggctcaacaaaccaaagttgctgtgaccccccctggcctcgcccgtgaagactggaaaatcattcgagccctgagtgagatagccggcatgacacttccctacgataccctggatcaagtccgcaatcgactggaagaggtgagcccgaacctggtacggtatgacgacatcgagggggcgaactactttcagcaagccaatgagctctcaaagcttgtgaaccagcaattgctggctgaccccttggtacccccacaactaactataaaggatttctacatgactgactccattagtcgagctagtcaaactatggcaaaatgtgttaaagctgtcaccgaaggtgcccaagccgtggaagagcccagtatctgttag

SEQ ID NO: 125767 - DNA, 1836 bp, synthetic construct
  misc_feature 1..1836: note = Description of Artificial Sequence: Synthetic coding sequence
  source 1..1836: mol_type = other DNA
atggaatttttgctagcgaaccatcccctagattgtcccatctgcgatcagggcggtgaatgcgatttgcaggatcagtccatgatgtttggtaatgacaggtcgcgcttcctcgaaggcaaacgggcagtggaagataagaatattgggcccctcgtgaaaaccatcatgacccgctgcattcagtgcacacgatgcattcggtttgcaagtgagatcgcaggcgtcgatgaccttggaactaccgggaggggcaacgatatgcaggtgggtacctacatagagaagatgtttatgagcgaattgagtggcaacattattgatatctgccccgtcggcgcgcttacttccaaaccttacgctttcacagccaggccgtgggagaccaggaagacggaatctatcgatgtcatggatgccgtcggctctaacatcgtggtttctacaagaaccggagaagttatgcgcattctcccacggatgcacgaagacattaacgaggagtggatcagcgataagacacggtttgcctatgatggtctcaagcgccagagactcacggaaccgatggtgagaaatgaaaagggtttactgacatatacgagctgggaagatgctctgagccgggtggccggcatgcttcagtctttccagggcaaagacgtggccgccatcgccggggggttggtagacgcagaggccctggttgctctgaaggatctcttgaaccgcgtggacagcgacacactgtgcaccgaagaagtgttccctaccgctggggctgggaccgacctccgaagtaactacctgctcaatacaactattgctggcgtcgaggaggccgacgtagtgttgctcgtcggaactaatccgcgcttcgaagcccctctctttaatgcccgtatccggaagtcgtggctgcacaacgatctaaaggtagctctgatcggttcccccgttgacctcacttatacctatgaccacctcggagattcccctaaaattttgcaggatatcgccagcggaagccatcctttcagccaggttctaaaggaagcgaagaagccaatggtggtccttgggagttccgctttgcagagaaacgatggagctgcaattctggcggccgtgtcatcaatagctcagaaaattagaatgacgtccggtgtcactggggattggaaggtgatgaacatcctccatcgcatcgcaagccaagtagctgcacttgaccttggttataaacctggagtcgaggcaattcggaaaaatcctccaaaggtgctcttccttctgggggctgacggcggatgtataacacgtcaagacctgcccaaagactgtttcatcatctatcagggccaccacggcgacgtgggtgcgccaattgcagatgttattttgcctggggccgcctatacagagaaatctgccacttacgtaaatacagaagggcgggcacagcagacaaaagtggcagtgacaccccccggcctggctcgcgaggattggaagataatcagggctctgagcgaaattgccggtatgaccctgccctatgacaccttggaccaggtccggaatcgcttagaggaggtatctccaaacctggtgagatatgacgatattgaaggagcgaactatttccaacaagctaacgagctatccaagttggtgaatcagcagcttcttgcagatcctcttgtgcctccacagctcacgatcaaagatttttacatgactgactcaatctctcgggcatctcagacaatggccaaatgtgttaaggccgtaacggaaggagcacaggccgtggaggaaccaagcatctgctag

SEQ ID NO: 125768 - DNA, 1392 bp, synthetic construct
  misc_feature 1..1392: note = Description of Artificial Sequence: Synthetic coding sequence
  source 1..1392: mol_type = other DNA
atggcagctctaagagccctgtgtggcttcagaggagtggccgcccaggtcctccgccctggggccggcgttaggctgccaattcagccaagccgaggtgtgagacagtggcagcccgatgtagaatgggctcagcagttcggtggagccgtgatgtacccttctaaagagaccgcccattggaaaccaccgccttggaatgatgtggatccccccaaagacactattgtcaaaaatatcaccctcaactttggtccgcaacaccccgctgcccatggggtcctgaggctggtgatggagctatccggagagatggtccgaaaatgtgatccacacatcggcctgctacatcgtgggactgaaaagttaatagagtacaaaacttacctccaggctctcccatacttcgacaggctagactatgtctcgatgatgtgtaatgaacaggcttactcccttgcagtggaaaaactgctcaacatcagacccccccctagggcacagtggattcgggtgctattcggggaaattacgcgtctgctcaatcatataatggctgttacgactcatgccctggatctcggagccatgacccccttcttttggctgttcgaggagcgcgaaaaaatgttcgagttctatgaaagagtgtctggcgcccgtatgcacgccgcatatatacgccctgggggggtacatcaggacctacctctgggccttatggacgatatctatcagttttcaaaaaatttttccctgcgactggatgagctggaggaacttcttaccaataatagaatctggcgaaacagaaccattgacattggagttgtcaccgctgaggaggcgctgaattatggcttcagtggcgtcatgctgcgcggcagcggaatccagtgggacctgagaaagacccaaccctacgacgtgtacgatcaggtggaatttgatgtccccgttggcagccggggagactgctatgatcgctacctatgcagggttgaagaaatgcgacagagtctcagaatcattgcccaatgcctgaacaagatgccacctggcgaaattaaagtggacgatgcgaaagtgtcaccacctaaaagagccgagatgaagaccagcatggagtccctcattcaccacttcaaattatatacagagggctatcaagtccctcctggggctacttacaccgctattgaggcccctaagggcgagttcggggtgtatttggtttcagatggaagttcgcgcccctataggtgcaagatcaaggcacccggctttgcccatctggccgggctggataaaatgagcaaaggacatatgctggcggatgtcgtggccattatcggaacccaggacatcgtgttcggagaagttgataggtag

SEQ ID NO: 125769 - DNA, 1374 bp, synthetic construct
  misc_feature 1..1374: note = Description of Artificial Sequence: Synthetic coding sequence
  source 1..1374: mol_type = other DNA
atggctgcactgcgcgccctgtgtgggtttaggggtgtcgctgcacaagtgctcagacctggggccggcgtgcgactgcctatacagccttctcgcggtgtccgccagtggcagccggatgtagaatgggctcagcaattcggtggggcggtgatgtatccatccaaagaaacagcacactggaaaccaccaccctggaacgacgtagaccctccaaaagatacaattgttaagaacatcactctaaattttggtccacaacacccggccgcccatggcgtgctccgtctggtcatggagctctctggcgaaatggtgcgcaagtgcgatccacatatcggcttgctgcatagggggacggagaagctgattgagtataaaacatacctgcaggctctcccttatttcgaccgattggattacgtgtctatgatgtgcaacgagcaagcctactcattggccgtcgaaaaactcctgaatatacggcctcccccacgcgctcagtggatcagagtgctatttggggagatcacccgccttttaaatcacatcatggcggttaccacccacgcgctcgatttaggagcaatgacgccgttcttctggctgttcgaggagagggagaaaatgtttgagttttatgaaagggtcagcggagcccggatgcacgctgcctacatccggccaggcggcgtgcatcaggatctccccctcgggctcatggacgacatataccagttttcaaaaaacttttctctgcggctggacgaactcgaggagcttctgacaaataaccggatttggcggaaccgtactattgacattggagtggttacggctgaagaggctctaaattacggtttttcgggcgttatgttgagagggtctggcatccagtgggatctcagaaaaacccaaccatatgacgtgtatgatcaggtggagtttgacgtccctgtcggcagccggggagattgctatgacaggtatctttgtcgcgtcgaagagatgagacagagcctgcgcatcatcgcacaatgcctgaataaaatgcctccaggcgaaattaaggtcgacgacgccaaggttagtcccccgaaaagggccgagatgaagacaagtatggaatcgctcatccaccacttcaaactgtacaccgagggctatcaggtgccccccggtgccacttacacagcgatcgaagcgccaaagggcgagtttggagtttatctcgtctcagacggatcgtccagaccctatcgttgtaagatcaaagcacccgggttcgcccatctggccggcctggacaagatgtccaaagggcatatgctcgcagatgtggtcgctatcatcgggactagacccattgtttag

SEQ ID NO: 125770 - DNA, 696 bp, synthetic construct
  misc_feature 1..696: note = Description of Artificial Sequence: Synthetic coding sequence
  source 1..696: mol_type = other DNA
atggaactctctggcgaaatggtgcgtaaatgtgaccctcacattggtctgcttcacaggggtaccgagaaacttattgagtacaagacctacctgcaggcccttccatactttgacagactagattacgtctctatgatgtgtaacgaacaagcttactctttagccgtggagaaactgctcaacataagacctccacccagagctcagtggataagggttttgttcggcgagattactcgtctgctcaatcacattatggccgtcacaacccatgctctggatttgggtgctatgactcctttcttctggctgttcgaagagcgagaaaaaatgtttgaattctacgagagagttagcggcgcccgcatgcatgctgcatacatcagacccggaggggtccaccaggatctccccctggggctgatggatgatatttatcagttcagcaagaatttctccctacgcctcgacgaactcgaagagttactgactaacaaccggatctggagaaaccgtactattgacatcggggtcgtgaccgctgaagaggcactgaattacgggttctccggcgtgatgttaaggggaagcggtattcaatgggacctgcgcaaaacccaaccatatgatgtgtacgatcaggttgagtttgatgtccccgtcggttccagaggggactgctacgatcggtag

SEQ ID NO: 125771 - DNA, 162 bp, synthetic construct
  misc_feature 1..162: note = Description of Artificial Sequence: Synthetic coding sequence
  source 1..162: mol_type = other DNA
atgttcgagttctacgagcgggtgagtggggctcggatgcatgccgcttacatacgccccggaggggtgcaccaagacctgcctctgggcctcatggacgatatctaccagttcagcaagaatttcagtctgaggttagacgagctggaggaggtttcttag

SEQ ID NO: 125772 - DNA, 795 bp, synthetic construct
  misc_feature 1..795: note = Description of Artificial Sequence: Synthetic coding sequence
  source 1..795: mol_type = other DNA
atggctgccgcagcggtggcacggctgtggtggcgcggcatactgggagcctctgccctcacaagagggaccggccgcccttctgtgcttcttctcccagtaaggagagagagcgcaggggccgatacacgccccactgtacgaccgcggaatgacgtggctcacaaacaactgagcgcatttggcgagtatgtcgcagagatactgcccaagtacgtccaacaggtccaagtgagctgtttcaatgagctcgaggtttgtatccatcccgacggagtaatcccggtactgacctttctgcgagatcacactaacgctcagttcaagagtctagtcgacctgaccgctgtggatgtgccaactagacaaaaccggtttgagatcgtgtacaacctactgtctctgcgtttcaattcgagaatacgcgtcaagacatataccgatgaactgacccctatagagagcgccgtgtctgtgtttaaggccgcaaactggtatgagagggagatttgggacatgtttggcgtgttcttcgcaaaccacccagatctgcgcagaattctcacagactacggctttgagggacatccatttcgaaaggacttccctttgagtggttatgttgagctccgctacgatgacgaggttaagagagtggttgctgagcccgtggagctggcgcaggaatttcgtaagtttgatctcaactcaccttgggaggcgtttcctgtgtataggcagccacccgaatcgctaaagcttgaggccggagacaaaaaaccagacgctaagtag

SEQ ID NO: 125773 - DNA, 528 bp, synthetic construct
  misc_feature 1..528: note = Description of Artificial Sequence: Synthetic coding sequence
  source 1..528: mol_type = other DNA
atggccgcagtctccatgtccgtggtccttcggcagacactatggcggagacgggcagtggctgtcgccgccctgagcgtctcgcgtgtccccactagatcccttcgaacatcaacgtggaggcttgcacaggaccagacacaggacacgcagctgattaccgtggacgaaaaactggatatcacaaccctgacaggagtccctgaggagcacattaagacgagaaaagttcgcatttttgtcccagctagaaacaacatgcagtctggcgtcaataacacgaagaaatggaaaatggagtttgatactcgggaaaggtgggagaaccccctgatgggatgggcttctacagcagacccactgagcaatatggtgctgaccttttcaaccaaggaagacgcagtttcgttcgctgaaaagaacggctggtcttatgatatcgaggaaaggaaggtccctaaacctaagagcaagtcttacggggctaatttctcatggaataagcgcacccgagtcagtactaaatag

SEQ ID NO: 125774 - DNA, 321 bp, synthetic construct
  misc_feature 1..321: note = Description of Artificial Sequence: Synthetic coding sequence
  source 1..321: mol_type = other DNA
atgccattcctcgatattcaaaaacgttttggtctgaatatcgacagatggctgacaatccagagcggcgaacagccatacaaaatggcggggcgctgccatgcttttgagaaggagtggattgagtgcgctcatggcatcggctacaccagagcggagaaagaatgtaaaattgagtatgacgacttcgttgaatgcctcctgcgccagaagaccatgcggcgggccggcacaatccggaagcagcgggataagctgatcaaagagggcaagtatacaccacctccccatcacatcggtaaaggcgaacctcgtccttag

SEQ ID NO: 125775 - DNA, 321 bp, synthetic construct
  misc_feature 1..321: note = Description of Artificial Sequence: Synthetic coding sequence
  source 1..321: mol_type = other DNA
atgccgttcctggacatacagaagcggttcggcttgaatattgatcgctggctgaccatccagtctggggagcaaccttataagatggccggcaggtgccatgccttcgagaaagaatggattgagtgcgctcatggaattggatacactagggcagagaaggaatgtaaaatagaatacgacgattttgtggagtgtctgctcaggcagaagaccatgaggagagcaggcactattcggaaacaacgcgataaactcatcaaggaaggaaaatacactccccctccacaccacatcggaaagggagagccgcggccatag

SEQ ID NO: 125776 - DNA, 375 bp, synthetic construct
  misc_feature 1..375: note = Description of Artificial Sequence: Synthetic coding sequence
  source 1..375: mol_type = other DNA
atggctgccgctatgacattttgtagactcttgaatagatgcggagaagcagcacgctctctgccccttggcgcacgatgcttcggagtcagagtgtcacctactggagagaaagtcactcatacagggcaggtgtatgacgacaaggattaccggagaattcgcttcgtgggcaggcaaaaggaggtcaacgagaactttgccatcgacctgattgcagagcagcctgttagcgaggtcgaaacacgggtgatagcttgcgatgggggcggaggtgcccttggtcacccgaaagtgtacatcaacttggacaaggaaaccaagaccgggacatgtggctactgcggactgcagttccgacagcatcatcactag

SEQ ID NO: 125777 - DNA, 1560 bp, synthetic construct
  misc_feature 1..1560: note = Description of Artificial Sequence: Synthetic coding sequence
  source 1..1560: mol_type = other DNA
atggctccgatccctaaaaccgtagggaggattaagctggattgctccctgcggccttcatgcccgctcgaagttgctgcagcacccaagctgtgcaaggaatttggccccgaggattacggcgaagaggacatcgtggatttccttcgcaggttggtcgaatcagacccgcagggactgcaccgaatacatgtggacgggagttccggaaggcttcagttatggcatcatgattatctcctgggccacctggacgacgaagggaaaagcacaggacagtccgacagaggcaagggggccgaagggcttggtacatattgtggccttcgcaagtcatttttgtatcccccccaggagtcagagccatgtccccagagtccttctgcatctgctacgtttccttccgtgagtgacagcctactacaggtggccatgcctcaaaaactcctggtgaccgaagaagaggcaaatcggttagcggaggagttggtcgccgaggaagaaaggatgaaacaaaaggctgaaaaaaaacggttgaaaaaaaagagacagaaggaacgtaagcggcaggagaggctagaacagtactgcggggagcccaaagcatcgactactagcgacggggatgaatcaccgccctcaagtcccggtaatccagttcagggccaatgcggggaagaggaagattcgcttgatcttagttcgacgttcgtcagtctggcactccgcaaagtcggggattggccactttctgccaggagagagaaaggcttgaaccaggaacctcaagggaggggccttgccctgcaaaaaatggggcaggaagaggaatcaccaccccgtgaggagaggcctcaacagtctcctaaggttcaggcctccccgggcctgcttgctgctgccctccagcagtctcaagagctggcgaagctcggcacttcctttgcccagaatggcttctatcacgaggctgttgtgctcttcacccaggcactcaaactgaacccccaggatcatcgcctctttgggaatcgatctttttgtcacgagcgattaggccagccggcatgggctttggcagacgcacaagtggccttgacattgcgtcctggttggccacgcggcctgttcagactagggaaggcactcatgggactgcagcgctttagagaggccgccgcggtgttccaggagacactgcgcggcggcagccagcccgatgccgcacgagaactgagatcttgcctgctgcaccttaccctgcaaggccagagagggggtatatgcgcgcctccactatcacctggagctcttcagccacttcctcacgccgagttagctccaagtgggcttccatcactccggtgtcctaggtccacggcgctgagatcacccggcctcagccctctcctccactacccaagttgtcaccgctcacaccccaaccagccgctctcacaaacgcagtcaaggcgtccacatcctctgaaaccacaagatccgtctaagggctgggacattttggggctcggactgcagcacctgagccaggctagatag

SEQ ID NO: 125778 - DNA, 621 bp, synthetic construct
  misc_feature 1..621: note = Description of Artificial Sequence: Synthetic coding sequence
  source 1..621: mol_type = other DNA
atggcagtgctgagtgcacctggcctaaggggctttcgaattctggggctgcggtccagtgtgggccctgcagtccaggcaagaggagtgcaccagtcagtagccactgacggcccatcctctacacagcccgctctgcccaaagcccgagccgtagcacccaagccctcatctagaggggagtacgtcgtggctaagctcgatgacctggtcaactgggcgaggcggtcttccctgtggccaatgaccttcgggcttgcttgttgcgctgtagagatgatgcacatggcggcacctaggtacgatatggatcggtttggggtggttttccgcgcttccccgcgtcagtcggacgtgatgatcgtggcaggtacactaacaaataagatggcccccgctttacggaaagtgtatgaccaaatgccagaaccacgttacgtggtttcaatgggtagttgcgccaacggtggcgggtactaccattattcttactcggtggtcaggggctgcgaccggatagtgccggttgacatttacatccctggaagagctgggaccgccccccccacacgtgagcttgagaccgggccagcacctcacggagctcggcgcccactgtag

SEQ ID NO: 125779 - DNA, 885 bp, synthetic construct
  misc_feature 1..885: note = Description of Artificial Sequence: Synthetic coding sequence
  source 1..885: mol_type = other DNA
atggctgtgttaagcgcccctggcctgcgtggtttcagaatacttgggctgagatccagtgtgggcccggccgtgcaggcacggggggtgcatcagagtgttgcaacagatggtccctcaagcacgcagcccgccctccccaaagcacgtgccgtggcaccaaaacctagttctcggggtgagtatgtcgtggctaagctcgatgaccttgttaactgggccaggagggtgagtaccatgtcatgccggccgagtagctcagcccgggcctcccttcatacacacagacatactcacactcacaccaacgttcagacacgaacgcacaccacgcacgcttgtactctgacttgtgctcatgtgcatgcaagttcccacgtttggactgacgtgtacacagatcatacccatacacacgctcataatgctcacatgcacactcggacccacgctcacctgcatacacacgctcataccagcacgtgtgctcacactctggctcacatccatacatgcacgctggctcttatgcacactcacgcacacatctacacttgtaccagaacattagcccatacctgcacttacatgcactcacacgcccacacttgcactctcactcatatgcatacaaggccctgcgttgacacctgtatgtgtgcatgctggcacgcttgtacccaggcccattccctgatgcacactcacccatgtgggagaggggctggccgtactctgcctgaggctcccgttttagcctggtggcccgtggtgcctagtgaggactcagaccccgccggggacgatccgtccgtgagcgtgattctgttcttggcgtctgtgtgtagcagttgttttagctttaaggttaaagccgtcttctag

SEQ ID NO: 125780 - DNA, 645 bp, synthetic construct
  misc_feature 1..645: note = Description of Artificial Sequence: Synthetic coding sequence
  source 1..645: mol_type = other DNA
atggccgtattgagtgcccccggactgcgagggttcagaatccttggcctcagatccagcgttgggcccgctgtgcaggctagaggcgtgcatcaatccgtcgccactgacggccccagcagcacgcagcctgcgttacccaaggcccgtgccgtggcccctaaacctagtagccgaggcgaatacgtggtcgcgaagttggacgacttggtcaactgggcccggagatcttctttgtggcctatgactttcggcctggcttgctgcgctgtcgaaatgatgcatatggccgctcctcgctacgacatggatagattcggggtagtcttccgagctagcccccgccagagcgacgtgatgatcgttgctggcacactgaccaataaaatggctcctgcacttcgcaaaagcagcctgcgccctgacgccggggcggcactgcggggactgcacggagagcttaggcagcgaaggagattgctccctttgttcctattagggggagagggattgcggcctcaccgggcccgggggcatctacacccgcggttaccaactaccgccgaagcactactctacggaattctgcaacttcagcgtaaaatcaaaagggaacgacggctgcaaatctggtatagacgctag

SEQ ID NO: 125781 - DNA, 621 bp, synthetic construct
  misc_feature 1..621: note = Description of Artificial Sequence: Synthetic coding sequence
  source 1..621: mol_type = other DNA
atggcggtcctgtccgcccccggattaagagggtttcggatactgggactgaggtcctctgtgggccctgccgtgcaagcgcggggcgtacaccaatcagttgccaccgatggcccgtcatccactcagccagccttaccaaaagcgcgggccgtggctcccaaaccctctagcagaggtgaatatgtcgttgcaaaactggatgatctggtgaactgggctcgccgatcgtcactgtggccgatgaccttcggactagcatgttgcgccgtggaaatgatgcacatggccgccccccgctacgatatggatcggtttggtgttgtgtttcgcgcctccccgagacagtccgatgttatgatcgtcgccgggacccttaccaacaagatggcgccagctctgaggaaagtgtacgaccagatgccagagccccgttatgtggtgtccatgggaagttgtgcaaatggaggcggatactatcattattcctattccgttgtgagaggctgtgataggattgtgcctgtcgacatctacatacccggtagggccgggacggcaccaccgacaagagaactggagactgggcccgctcctcacggcgccaggaggccactctag

SEQ ID NO: 125782 - DNA, 633 bp, synthetic construct
  misc_feature 1..633: note = Description of Artificial Sequence: Synthetic coding sequence
  source 1..633: mol_type = other DNA
atgagatgcttgacgacccctatgctgcttcgtgccttagctcaggccgccagagcaggcccccctggaggccggagtctgcattccagcgcggtggctgccacctacaaatacgtcaacatgcaggatcctgagatggatatgaagagtgttactgaccgcgctgcacggaccttactgtggacagaactgtttcgaggcctgggaatgactctcagctacctgttccgggaaccagctactataaactatcctttcgaaaagggacccctgagtcctcgctttaggggtgagcacgccctccggcggtatccttccggggaagagcgatgcattgcttgcaaactctgcgaggcaatttgtccagctcaggccattactatcgaggcagaaccgagggctgatggctcacggcgcaccacgaggtacgatattgatatgactaaatgcatctattgcggcttttgtcaagaagcatgcccagttgatgccattgtggaggggccaaacttcgaattctctacagagacccatgaggagctactgtacaataaagagaagctgcttaataacggggataaatgggaggctgaaatcgcagctaatattcaggccgattacctgtacagatag

SEQ ID NO: 125783 - DNA, 375 bp, synthetic construct
  misc_feature 1..375: note = Description of Artificial Sequence: Synthetic coding sequence
  source 1..375: mol_type = other DNA
atgcgatgtctgacgacccccatgctgctgagagcccttgcccaggcggccagggccggcccccccggtggaaggtccctacactcttctgccgtcgccgccacatacaaatacgtgaatatgcaggacccggaaatggacatgaagtctgtaaccgatcgtgcggctcgtacactgttgtggactgaactgtttagagggcttggcatgacgttaagttatctctttagagaacctgccactatcaactatccgtttgaaaagggtccactttccccacgcttccggggagagcacgccctgcggcggtatcccagcggggaggagcgctgtatcgcatgtaagttatgcgaagccatatgtccagcccagtag

SEQ ID NO: 125784 - DNA, 333 bp, synthetic construct
  misc_feature 1..333: note = Description of Artificial Sequence: Synthetic coding sequence
  source 1..333: mol_type = other DNA
atgcggtgcctgacgacccctatgctgcttcgggcactggcccaggccgctcgggctggcccaccagggggacggtcattgcactcatcagcagtagcagctacctacaaatatgtcaatatgcaggaccctgagatggacatgaaatctgttaccgaccgagcagctcgaactttgctgtggacggagttgtttagaggtttaggcatgaccctctcttatctattccgcgagccagctacaattaactatccttttgagaaaggacccttgtcacctcgatttcgcggagaacacgccctccgcagatacccctccggtgaggagcgctag

SEQ ID NO: 125785 - DNA, 555 bp, synthetic construct
  misc_feature 1..555: note = Description of Artificial Sequence: Synthetic coding sequence
  source 1..555: mol_type = other DNA
atgagatgcttgaccactcctatgctgttaagagccctggctcaggccgcgcgagcaggccccccaggtggacggtcgttgcactcaagtgccgtagccgcaacatataagtatgttaatatgcaggatccagagatggacatgaaatctgttactgaccgggctgcacgcacccttttgtggactgagctgtttaggggcctcggcatgacactttcctacctttttcgagaacccgccacaatcaactacccgttcgagaaaggtcccctgtcgccaagattcagaggcgagcacgccttaagacgttacccctcaggggaagaacggtgtatagcttgcaaattgtgtgaggcaatatgtccggcacaggccatcactatcgaagctgagcctagggctgacggctctagacggaccactaggtacgatatcgacatgaccaaatgtatctattgtggattttgtcaggaggcttgcccggtggacgcaatagtcgaaggccccaatttcgaattctctacggagacacacgaggagctcctttacaattag

SEQ ID NO: 125786 - DNA, 195 bp, synthetic construct
  misc_feature 1..195: note = Description of Artificial Sequence: Synthetic coding sequence
  source 1..195: mol_type = other DNA
atgacaaaatgcatctactgtggattctgtcaggaagcctgccctgtggatgccatagttgaggggcccaacttcgaattttcaacagagacccatgaggagctgctgtacaacaaggagaagctactgaataacggagataagtgggaggcggagattgctgccaatatccaggcggactacctatacagatag

SEQ ID NO: 125787 - DNA, 1395 bp, synthetic construct
  misc_feature 1..1395: note = Description of Artificial Sequence: Synthetic coding sequence
  source 1..1395: mol_type = other DNA
atgctggcaacacgccgcctcctgggctggagcctccctgcacgggtgtccgtaagattctcaggcgataccactgcaccaaagaaaactagtttcggaagcctcaaagacgaggaccggatttttacaaatctgtacggccgccacgactggaggctcaaaggatctttatcccggggggactggtataagacaaaagagatcctcctcaagggtccagactggatcctaggagagattaaaaccagtggcctgagaggtcggggcggagccggcttcccaacaggactgaagtggagcttcatgaacaaacccagcgatggccgccctaagtatttggtcgtcaacgcggatgaaggagagccggggacttgtaaagaccgtgagatcctgaggcacgatcctcacaaattgttagagggttgcctagtgggaggtcgtgcaatgggtgctcgcgccgcttatatctacatcaggggcgagttttataatgaggcatccaacctgcaggtggcaatcagggaggcctacgaagcaggcctgatcggcaaaaacgcatgtggatccgggtacgatttcgacgtatttgtcgtcagaggagcgggtgcatacatctgcggcgaggaaaccgccctgatcgagtccatcgagggcaaacagggaaagccccgcctgaagccgcccttccctgccgacgtgggtgtcttcggctgccccacaacggtcgccaacgtagagaccgttgcggtgagtcccaccatctgcaggcgtggaggcacctggttcgccggattcggccgtgaaagaaactccgggacaaagctgttcaacatatccggacacgtgaatcatccgtgcacggtcgaggaggaaatgagcgtgcccctgaaggaattgattgagaagcacgccggcggggtcacaggggggtgggacaacttgctcgctgtgattccagggggatcttctacaccactgatccctaaatccgtgtgtgagacagtacttatggactttgacgccctggtccaagcccaaactggacttggaacagccgccgtcatcgttatggaccggtctacagacattgtaaaagctatcgcccgactaatagaattttacaaacatgagtcatgcggtcagtgcacaccatgccgggagggggtggattggatgaataaggtgatggccaggtttgttagaggagatgctcggcccgctgagatcgactccctttgggagatctccaagcagattgagggccacactatctgcgcactgggcgacggggctgcgtggcctgttcagggcctcatcaggcacttcaggccagagctggaagagagaatgcaacgcttcgcacaacagcaccaggcccggcaggccgctagttag

SEQ ID NO: 125788 - DNA, 1374 bp, synthetic construct
  misc_feature 1..1374: note = Description of Artificial Sequence: Synthetic coding sequence
  source 1..1374: mol_type = other DNA
atgctagctacacgtagacttctcggttggtctctgcctgcaagagtttccacagccccaaaaaagacctcgtttggctcactgaaagatgaggaccgaatcttcacgaacctgtacgggaggcacgactggaggctgaaaggctccctctctagaggagattggtacaaaaccaaggaaatcctcctgaagggcccagactggattctcggagagattaaaacctcaggcctgaggggcaggggaggcgccgggtttccgaccggtcttaaatggagcttcatgaataaaccatccgacgggagacctaagtacttggtggtgaatgccgatgagggagaaccggggacgtgcaaagaccgtgaaatcctgaggcatgaccctcacaagcttctagaggggtgtctggttggggggcgggctatgggagccagagccgcttatatatacatacggggcgaattctataacgaggctagcaatttgcaggtggctatccgtgaggcatacgaagccggcctgattggaaagaatgcttgcggaagcggctacgatttcgacgtgttcgtggtccgtggcgctggggcctacatttgcggggaggaaaccgctttgatagaaagcatcgaagggaagcaaggaaagcccagactgaaacctcctttcccagcagacgttggagttttcgggtgtcccacaactgtagctaacgtggaaacagtggcagtttcacccacaatttgcaggagggggggtacgtggtttgctgggttcggtcgcgaacggaattccggaaccaaactgttcaatatcagcggccacgtaaaccacccgtgcacggtggaggaagaaatgagcgtgcccctaaaggagctcatcgagaagcatgccgggggcgtaaccggtggatgggataacctcctggcagttatacccgggggctccagcactcccctcatcccgaaaagtgtctgtgaaacagtgctcatggacttcgatgccctcgtgcaggcccagacaggactggggacagccgcggtaatcgtgatggaccgatcaacagatatcgttaaggccattgctcgactcatcgaattctacaaacacgaaagttgcggacagtgcactccttgcagagagggagtcgactggatgaacaaggtgatggctaggtttgtgaggggcgatgcgagaccagcagagatagactccctgtgggaaatttcaaaacagatcgaagggcacaccatttgcgccttaggcgatggcgcggcgtggcccgtgcaggggctcatccgtcactttcgccccgagttagaggaacgtatgcaaaggttcgcccagcagcaccaggcacgtcaggctgctagctag

SEQ ID NO: 125789 - DNA, 1008 bp, synthetic construct
  misc_feature 1..1008: note = Description of Artificial Sequence: Synthetic coding sequence
  source 1..1008: mol_type = other DNA
atgctagccacaaggcgactcctcgggtggagcctacctgccagggtgtctgtgagattttcaggggacaccaccgcaccaaagaagacatcttttgggagcctgaaggatgaagaccggatctttacaaacctatatggcaggcatgactggcggctgaaagggagcctatcaagaggggactggtataagacaaaagaaatcttgctcaaggggccagactggattcttggagagatcaagaccagcggcctgcgcgggagaggaggagctgggttcccaaccgggctcaaatggagtttcatgaacaaacctagcgatgggtcaccaaccacggtggctaatgtggagacagtcgcggtttccccaacaatctgtaggagaggcgggacttggttcgcaggcttcgggagagagcgaaattcaggcaccaagctattcaatattagcggacacgtcaaccatccctgcaccgtagaagaagagatgagcgttcccttgaaggaactcatagagaaacacgcgggaggagtcacgggtgggtgggacaacctcctggctgttattccggggggcagctcaacaccgcttatccccaaaagcgtctgtgagactgtgctgatggatttcgatgccctggtgcaggcccagaccggcttaggcacagctgccgtgattgtgatggatcgctcaaccgacatcgtaaaagctattgcgcgactcatagagttttacaagcacgagtcatgcggacagtgcaccccttgtagagaaggggtcgattggatgaataaggtgatggctagattcgtgaggggtgacgcaagacccgcagaaatagactcattgtgggagatttcaaagcagatcgaagggcacacaatctgcgccctcggggacggggccgcctggccagtgcagggcctcatcagacactttaggcctgagttagaggagcgaatgcaaagatttgcgcaacaacaccaggctcgacaagcagcctcttag

SEQ ID NO: 125790 - DNA, 1368 bp, synthetic construct
  misc_feature 1..1368: note = Description of Artificial Sequence: Synthetic coding sequence
  source 1..1368: mol_type = other DNA
atgctggccacacggcgattgcttgggtggtcactccctgcccggaccgcccctaagaaaaccagcttcggatccctgaaagacgaagatagaatctttacgaatctgtatgggaggcacgattggcgcctgaaggggtcgctgagtcgcggcgattggtataaaaccaaggagattctgctcaaaggaccggactggatactaggggagataaagacgtctggtttgcgggggaggggtggcgctggcttcccgaccgggctgaagtggtcatttatgaataagcccagtgatggtcgtcccaaatatttagtcgttaatgccgatgagggagagccagggacatgcaaagaccgcgagatcctgcggcacgacccacataaattgttggagggttgcctggtgggcggacgagctatgggggcccgggctgcctatatctacattaggggggaattctacaacgaggccagcaatttgcaggtggcgattcgggaggcctatgaggcagggctgattggaaagaacgcctgtggtagcgggtacgacttcgatgtctttgtggtgcggggggccggcgcctacatttgtggcgaggaaacagccctcattgaatccatcgaggggaagcagggtaagcccaggctcaaacctccttttccagccgatgtgggcgtgtttggttgccccacaaccgttgctaacgtcgaaactgtggcagtgtcccccacaatctgtaggcggggaggcacgtggtttgccggttttggaagggagcggaattccggtactaaactcttcaacatttctggacacgtgaaccacccgtgcaccgtcgaggaagaaatgtcagtgcccctgaaggaacttatcgagaagcacgctggaggcgtcactgggggttgggacaacctgctcgcagtgatccccggcggttccagtactcccctgattcctaagtccgtgtgtgaaactgtgctcatggactttgatgccctagtgcaggctcagaccgggcttggcaccgctgccgtcattgtcatggaccggtccacagacatcgtcaaagcaattgcgcggctcatcgaattctataaacacgagagctgcggtcagtgcacaccttgtcgcgagggtgtagattggatgaacaaagtgatggcccggttcgtcaggggagatgctcgacctgccgaaatcgattccctgtgggaaatctccaagcagattgaaggccataccatttgtgctctcggtgacggagccgcctggcccgtccagggcttgattcggcactttagacctgagctggaagagagaatgcaacgctttgcacagcagcatcaggctaggcaagccgccagttag

SEQ ID NO: 125791 - DNA, 1092 bp, synthetic construct
  misc_feature 1..1092: note = Description of Artificial Sequence: Synthetic coding sequence
  source 1..1092: mol_type = other DNA
atgaacaagccaagcgacgggagacccaagtatttagtggtcaacgcagatgaaggggaacccgggacctgtaaggatcgggaaatactgaggcatgatcctcacaagctcctggagggttgcctggtcggggggagggcaatgggagccagagcagcttacatttacatccggggggagttttataacgaggccagtaatcttcaagttgctatacgcgaagcctatgaagcaggactcatcggtaaaaatgcttgtgggtccgggtacgattttgatgtgttcgtcgtgcggggagccggcgcttacatctgcggcgaggaaacagcccttatcgaaagtatcgagggcaagcagggcaaacctcgactgaaaccgccgttccctgccgatgtcggtgttttcggctgtccgacaactgttgccaatgtcgagactgtcgcagtctcacctaccatctgtaggagaggcggtacttggtttgcaggattcggccgggaaaggaatagcggtactaagctgtttaatattagcggtcacgtgaaccacccttgcacagttgaggaagagatgtctgtgcctctaaaagagctgatagaaaagcacgccggaggagtgactggcggttgggacaatctgctggccgttattccaggcggatcgagcacaccactaataccaaaatccgtctgtgaaactgtgctgatggactttgacgctttagtgcaggctcaaaccggcctcggcaccgctgctgttatcgtgatggatcgatccaccgatattgtaaaagcgattgcaaggttaattgaattttataagcatgaatcttgtggacagtgcacaccatgcagggagggagtggattggatgaacaaggtgatggctagatttgtgaggggggatgctaggccggccgagatcgactccttgtgggaaatctctaaacagatagaaggtcacactatatgtgcgttaggagacggggccgcatggcccgtgcagggtctgatcaggcattttcgaccagagctagaagaacggatgcaacggtttgcccagcaacaccaggcaaggcaggcagcgagctag

SEQ ID NO: 125792 - DNA, 750 bp, synthetic construct
  misc_feature 1..750: note = Description of Artificial Sequence: Synthetic coding sequence
  source 1..750: mol_type = other DNA
atgtttttttcagcggcattgcgagcccgagcagccggattaacagcacactggggccgccacgttaggaatctgcataagactgtgatgcagaacggtgccggcggcgccctgttcgtgcaccgggatacgcccgagaacaatcctgatacccctttcgattttacacctgaaaactacaaacggatagaagctatcgtgaaaaattacccagaagggcataaagccgctgcagttctgcctgttctcgacttggctcaacgacagaacggctggttgccaatctctgctatgaataaggtcgccgaagtcctgcaggtcccaccgatgagggtttacgaagtggctaccttttacaccatgtataatcgaaagcccgttggcaaataccatatacaggtgtgcaccactactccttgtatgctccgcaactccgacagcattctcgaagcaatccagaagaagctcggtattaaggtcggagaaaccactccggataaactgttcacactcattgaagtagaatgcctgggagcctgcgtcaatgcaccaatggtccagataaacgacaactactacgaggatcttactgcaaaggatattgaagagatcattgacgagttgaaggcaggaaagatccctaagccgggcccacgatccggacgatttagctgcgaaccagccggaggattaacatctcttactgaaccacccaagggacccgggtttggtgtccaagcgggattgtag

SEQ ID NO: 125793 - DNA, 327 bp, synthetic construct
  misc_feature 1..327: note = Description of Artificial Sequence: Synthetic coding sequence
  source 1..327: mol_type = other DNA
atggcggccccatgtcttctccgccaagggcgagcaggcgctctgaagactatgctgcaggaagcccaggtcttccgcgggctcgcttcaacagtgtcactgtccgctgaaagcgggaaatcggagaaaggtcaaccacaaaacagtaaaaagcagtctccacccaagaaacccgcacccgtccctgcggagcccttcgacaataccacctacaaaaacctacagcaccatgactatagcacatatacttttctggaccttaatctggagctttccaaatttcggatgccccagccttcatctggcagagagagccccagacattag

SEQ ID NO: 125794 - DNA, 1422 bp, synthetic construct
  misc_feature 1..1422: note = Description of Artificial Sequence: Synthetic coding sequence
  source 1..1422: mol_type = other DNA
atggccgccccatgcctcctgcgtcagggtagagctggagcactgaaaactatgctgcaggaagcccaggtgttcaggggcctagcctccaccgttagcctaagcgctgaatccggtaagtccgaaaaagggcagccacagaattccaaaaagcagagtccacctaaaaacgtcgtggagcctaaggaacgtggaaagttactggccactcagacagccgcagagctcagcaagaacctgtcgtcccctagctcctacccgcccgctgtaaacaaagggaggaaggtggcgtcaccctctccttcaggcagtgtgctgtttaccgacgaaggagtgcccaaatttttgtcccgaaagaccctggtggaattcccccagaaggtgctatctccttttagaaaacagggctcagactcagaagcccgacaggtggggcggaaggtcaccagtcccagtagttcttcatcatccagctcatccgattcggagtcagacgatgaagccgatgtgtcggaagtaaccccacgagtggtctcaaaaggaagggggggactgaggaagcctgaagcgagccatagttttgagaatcgcgcacccagggtaactgtgagtgcaaaggaaaaaaccttgttgcaaaaaccccatgtggacataacagaccctgaaaagcctcatcagccaaaaaaaaaggggagcccagctaaaccttcagagggacgtgagaacgcacgtccgaagaccaccatgccgcgctctcaggttgacgaggaattcctgaagcagtctctgaaagagaaacagctacagaagactttcagactgaacgagatcgacaaagagtcccagaagccctttgaggtaaaaggcccacttcccgtccacacaaagtccggacttagcgccccccccaaggggtctcccgctcctgccgtgctggctgaggaagcccgggcagaagggcagctccaggcgtcccccccaggcgcagccgagggacaccttgagaaacccgtgccagaacctcagcgaaaagcggccccgccattacctcgtaaagaaacttctgggactcagggcattgaggggcaccttaaaggcggccaggctatagttgaggaccagattccaccttcaaacctggagacagtcccggtcgagaataaccacggattccatgagaaaacggctgctctgaaactcgaggctgaaggtgaggcgatggaggacgccgcagccccgggcgatgaccgcgggggaacacaggaaccagcccctgtcccggccgagccctttgacaacacaacttacaagaatctgcagcaccacgactactctacctatacgttcctggacctgaatctggaattaagtaaatttagaatgcctcagccatcctccggcagggaatctccccgccactag

SEQ ID NO: 125795 - DNA, 339 bp, synthetic construct
  misc_feature 1..339: note = Description of Artificial Sequence: Synthetic coding sequence
  source 1..339: mol_type = other DNA
atgctccaagaggctcaggtgttccgtgggcttgcgagcacggtgtcactgagtgcagaaagtggaaagagcgaaaaaggtcaacctcagaactcaaagaaacagagccctcctaaatccgtgcccaccccgcatagacggtactcaccctgtggagattggaaagatgctagttctttgaagccagctccagtcccagccgagcctttcgataatactacctataagaaccttcagcatcatgattattctacttacactttcctggacctcaacttggagttatctaaattccggatgcctcagccatccagtggacgcgagagcccgcgtcattag

SEQ ID NO: 125796 - DNA, 2223 bp, synthetic construct
  misc_feature 1..2223: note = Description of Artificial Sequence: Synthetic coding sequence
  source 1..2223: mol_type = other DNA
atggagaaacttggggtggagcctgaagaagagggcggtggggatgacgatgaggaagatgctgaggcctgggctatggagttggccgacgtcggagctgcagcctcctcacaaggtgtgcacgaccaggtactgcccaccccaaatgcttcctctagagtaatagttcatgttgacctggactgcttctatgcacaggtggaaatgatctcaaaccccgagctcaaagataaaccattaggcgtgcagcaaaagtatctcgtggtgacctgtaattacgaggcccgcaagctgggcgtgaaaaaactcatgaatgtgcgggacgccaaagaaaaatgcccacagttggttctcgttaacggcgaagacctgacccggtacagagagatgtcatataaagtcacagagctgttggaagagttttctcctgttgtggagaggctcggttttgacgagaattttgtggacctgacagagatggtagagaagcgtttacagcaattacagtctgacgagctctccgcggtgacagtcagcggccatgtgtataacaaccaatcaattaatttactggatgttctgcatataagactgctagtcggcagccaaatcgcagctgagatgagagaagccatgtacaaccagctgggtctgacaggttgtgccggggtggccagcaataagctattagctaaattggttagcggtgtcttcaaacccaatcagcaaacggtgctcttgcccgaatcatgtcagcacctcatacactccctgaatcatataaaagagatcccaggtatcgggtataaaactgctaaatgcctggaggctctgggcatcaactccgtcagagacttgcagacatttagcccaaaaatactcgagaaggaactcggtatatccgtagctcagcgcattcagaaacttagctttggcgaggataattcccccgtgatattatcaggccctcctcaaagcttctcagaggaggactcttttaaaaaatgttccagcgaggtggaggctaaaaataagatcgaagagctgctggccagccttttaaaccgcgtttgccaggatggaagaaaaccccatactgtccggttgataatccggcgatactcctctgagaaacactacgggcgagagtctagacaatgtcccatcccatcccatgtcatccaaaagctgggaacgggaaactacgacgtgatgaccccaatggtcgatatcctgatgaagctcttcaggaacatggttaacgtgaagatgcccttccatcttaccttgctgtccgtttgcttctgcaatctcaaagccctgaacacagccaaaaagggcctgatagactattacctgatgccttcgttgtctactacatcaaggtctggaaaacacagttttaagatgaaagatacgcacatggaagatttcccgaaagacaaagagactaatcgggacttcctcccctccggccgcatcgagtctactcgcacgagagaatcacccttggacaccaccaacttcagcaaggagaaggatattaatgagtttccgctctgctcactacctgagggcgtggaccaagaggttttcaaacagcttccggttgacatacaagaggagattctgtcggggaagagcagggagaaattccagggtaaaggaagtgtttcatgtcccctgcatgctagtaggggcgtgctcagctttttcagcaaaaaacagatgcaggacatcccaattaacccaagggatcatctttctagctcaaagcaggtttccagcgtgtctccctgcgaacccggaacctctggctttaacagcagttcctccagctacatgtctagccagaaggattattcctactatctcgacaaccgactgaaggatgaacgcatttctcaaggacccaaggagccgcagggtttccactttaccaatagtaaccccgccgtgtccgctttccacagctttccaaatcttcagagtgaacaattattcagcaggaaccataccacagattcacacaagcagacagtagcgaccgattcccacgaaggactgaccgagaacagggagccagattccgtggacgaaaaaataacgttcccgtctgacattgacccacaggttttctacgaacttcctgaagccgtccagaaggagttgctcgccgaatggaagcgtgctggcagcgattttcacatcggacacaaatag

SEQ ID NO: 125797 - DNA, 540 bp, synthetic construct
  misc_feature 1..540: note = Description of Artificial Sequence: Synthetic coding sequence
  source 1..540: mol_type = other DNA
atgaacaagagaggtttctctatggaagtcggccagtatatcttcgtcaattgcccatccatcagccttctcgagtggcatccattcacccttacatccgcacctgaggaggactttttttctatacatattagggcagcgggggattggaccgagaacttgattcgagcttttgagcagcagtattctccaattcctcgtattgaagtggacgggccctttgggaccgcatcagaggatgtgttccagtatgaggttgccgtattagtaggcgctggcatcggtgtgacccccttcgcctcaatcctgaagtcaatctggtataagttccagtgtgctgaccacaatctgaagaccaagaagatctatttctattggatctgccgagagactggagcatttagctggttcaacaaccttttgacttctctggaacaggagatggaagaactgggaaaatccctgcggaaatgttgccaccgctactcctccctagaccctaggaaggtgcagttttattttaataaggagaacttctag

SEQ ID NO: 125798 - DNA, 1584 bp, synthetic construct
  misc_feature 1..1584: note = Description of Artificial Sequence: Synthetic coding sequence
  source 1..1584: mol_type = other DNA
atggggaactgggtggtgaaccactggttctcagtgctgtttttggtggtgtggcttggcctgaatgtatttctgttcgtggatgctttcctgaaatacgagaaagcagataaatactattacacaagaaaaatactaggcttctgtagcaggactctgcgcaaacagcttgatcataatcttacattccataagctggtagcatacatgatctgccttcatactgccattcacattattgcccacctgttcaacttcgactgctatagtcggtctaggcaggccactgatggttccctggcctccattttaagctcactaagccacgatgagaagaagggtggctcttggctgaatcctattcagtcccgaaacactaccgttgagtatgttactttcacaagcattgcgggactcactggggtgattatgacgatcgcactgatactcatggtgacctcagctaccgagtttattcggaggagctactttgaagttttttggtatacacatcacctgtttatcttttacatcctgggactgggcatacatggcatcggaggcatagtaagaggtcagacagaagagagcatgaatgagtcccaccccaggaagtgcgctgagagcttcgaaatgtgggacgatagagattcccattgtcggaggcctaaattcgaagggcaccccccagagtcatggaagtggatcctagcgcccgtaatcttatatatatgcgaaaggattctcaggttctacaggagccaacagaaggttgtgatcaccaaggtggtgatgcacccatcaaaagtactcgagctccaaatgaataaacgtggattctcaatggaggtggggcaatacatttttgtaaactgtcctagcatcagtctgctagagtggcatccctttaccttaacatcagctcccgaggaggatttcttcagcatccacatccgggcggccggggactggacagagaatttaattcgggcattcgaacagcagtactcccctatcccacggatagaggttgatgggccgttcgggactgccagcgaggacgtgttccaatatgaagtcgcagtgctcgtcggggccggaattggtgtgaccccgtttgccagtattctgaaaagtatctggtataaatttcaatgcgccgaccacaacctcaagactaagaagatctacttttactggatctgccgagagactggggcctttagctggttcaataacctcttaacttcactagagcaggagatggaggaactgggaaaggtgggattcttgaactatcggctgttcctgaccggatgggatagtaacattgtaggccacgcagccctaaacttcgacaaggcaacagatatagtcactgggctgaaacaaaaaacgtctttcgggagacctatgtgggacaatgagttttcaacaatcgccaccagccacccaaagtcagtcgtgggggtctttctttgtggacctagaaccctcgcaaagtctctgcgaaagtgctgtcacagatattcctctttagaccccagaaaagtgcagttttacttcaataaagaaaatttctag

SEQ ID NO: 125799 - DNA, 579 bp, synthetic construct
  misc_feature 1..579: note = Description of Artificial Sequence: Synthetic coding sequence
  source 1..579: mol_type = other DNA
atgggcaactgggtggtgaatcactggttcagcgtcctctttcttgttgtgtggctgggcctcaatgtgtttttgttcgtggacgcttttctgaaatatgagaaggcagacaagtactattatacccgcaaaattctgggaagcaccttagcttgcgctagagcctcggccttgtgcttaaatttcaacagtaccctgatcctgttgccagtatgtagaaacctgctgagctttttgcgcgggacttgtagtttctgctccagaacgcttcgaaagcagctggaccataacctgacttttcacaaactcgtggcatacatgatttgccttcacactgccattcacatcatagcccacctttttaattttgattgttactcaaggagccgacaggctactgacggttcactggcctccattctcagtagcttgagccacgatgaaaaaaaaggcgggtcgtggctgaacccaatacatccacacattacccccacagtgtacatgtttacagtaacatttgatatggtactgtccagtgttaattccaatctgttcctgttcctccttattaaaaagtag

SEQ ID NO: 125800 - DNA, 579 bp, synthetic construct
  misc_feature 1..579: note = Description of Artificial Sequence: Synthetic coding sequence
  source 1..579: mol_type = other DNA
atgggcaattgggtggttaaccactggttctcagtcctcttcctggttgtgtggctgggactgaatgttttcttatttgtggacgccttcctcaagtatgagaaggctgataagtattactatactagaaagatcctgggttctaccctggcctgcgcccgggctagcgccttgtgcttaaatttcaatagcacactgattctactccctgtctgtcggaacttgctgagctttctcagaggcacctgttctttttgctcccgcaccttgcgcaaacagctggaccacaatctcacctttcacaagctggtggcttacatgatttgcttacatacagcaatccacatcatcgcacatttatttaacttcgattgttactctcggagcagacaggcaactgatggatctcttgcgagtattttgtctagtctgagccacgacgagaagaagggaggctcttggctcaatccaattcatccccacattacccccactgtttatatgtttaccgtgaccttcgatatggtcctctctagcgtcaattcaaacttgttcctgttcctgcttatcaagaaatag

SEQ ID NO: 125801 - DNA, 1695 bp, synthetic construct
  misc_feature 1..1695: note = Description of Artificial Sequence: Synthetic coding sequence
  source 1..1695: mol_type = other DNA
atgggcaattgggtagtgaatcactggttcagcgtacttttcctcgtcgtctggcttggcctcaacgtcttcctgtttgtggacgcctttttgaagtacgagaaagctgacaagtactactatactcgtaaaatcctaggaagcacacttgcctgtgccagagccagcgcactctgcctgaacttcaactcaacactgatcctgctgcccgtgtgccgcaatctgttaagtttcctgcggggaacctgcagcttttgctctagaacgcttcggaaacagctggaccataacctaacgttccacaagctggtggcatacatgatttgtctgcacacagcaattcatattatcgcgcatttattcaatttcgactgttattctagatctagacaagccactgatggcagcttggcttccattcttagttccctctcgcatgacgagaagaaaggggggagttggctgaacccaatacaatcccgcaataccactgtggaatacgtcactttcacttccattgcgggcctcaccggagtcattatgactatcgccctaatcctgatggtgacttcggccaccgagttcatccgaaggagctatttcgaggtgttctggtatacacatcacctgttcattttttatatactggggctcggcatccacggcatcggcggcattgtgcgcgggcagactgaggagtcaatgaatgagtcacacccaaggaagtgcgctgagtcatttgagatgtgggacgacagggatagccactgccgccgtcctaagtttgagggccacccgcctgaatcatggaaatggatccttgcacctgtgatactgtatatctgtgaacgaatcctccgattctaccggagccaacaaaaggttgtgataacgaaagtggtgatgcatccctctaaggtgctggaactccaaatgaacaagagaggattcagcatggaagtgggtcagtacatcttcgttaactgcccaagtattagccttctcgagtggcacccttttacactgactagcgcaccagaagaagactttttttcaattcatatccgagccgctggcgactggaccgagaatctcatacgtgccttcgagcagcagtattcacccattcctagaatcgaggtggatggccccttcgggactgcatccgaagatgtgttccaatacgaggtggcagttcttgttggagccggcatcggagtgacccccttcgctagcattcttaagtcaatctggtacaagtttcagtgcgccgaccacaacctgaagaccaaaaagatatacttctattggatttgccgcgaaactggcgcattctcttggttcaataatctgctgacatccctggaacaggagatggaggaactgggtaaggtgggcttcctgaattaccgtttgtttcttaccgggtgggatagcaatatcgtggggcacgcagctctgaacttcgacaaggctaccgatatcgttactggactaaagcaaaagacatcatttggccgccctatgtgggacaatgagttcagtacaatcgctacaagccaccctaagagcgtggtgggcgtgtttctgtgcggccctaggactctagctaaaagtttgagaaaatgctgtcaccggtactcttctctcgatccccgcaaggttcaattctactttaataaggagaacttttag

SEQ ID NO: 125802 - DNA, 528 bp, synthetic construct
  misc_feature 1..528: note = Description of Artificial Sequence: Synthetic coding sequence
  source 1..528: mol_type = other DNA
tagttttcgatggaggtggggcagtatatctttgtgaattgcccaagcataagcctcctcgagtggcaccccttcactctgacatccgctcccgaagaagattttttttcaattcatataagggccgcaggggattggacagaaaatcttatccgggcgtttgaacagcagtactcgcctattccacgtatagaggtggatggcccattcgggactgcttccgaagatgtattccagtacgaggtagccgttctcgtaggagctgggatcggggtgaccccctttgccagcatcctgaaatcgatctggtataaatttcagtgtgccgaccacaacctaaagaccaaaaaaatctatttctattggatctgtcgcgaaactggggcattctcttggttcaataacctgttaacctcactcgaacaagagatggaggagcttgggaagagtcttagaaagtgctgccaccgatacagttccctcgatccacgtaaagtgcaattctatttcaataaggaaaatttctag

SEQ ID NO: 125803 - DNA, 1707 bp, synthetic construct
  misc_feature 1..1707: note = Description of Artificial Sequence: Synthetic coding sequence
  source 1..1707: mol_type = other DNA
atgatgggctgctggatcctcaatgaagggctgagcactattctcgtcctgagctggctggggatcaacttctacttatttatcgacactttctattggtacgaggaggaggaatcattccattatacccgtgttatcctggggagtacactggcgtgggccagagcttctgcgctgtgccttaatttcaactgcatgttaatcctgatccctgtgagtcggaatcttatttcatttatccggggaactagcatctgctgtcggggcccctggcgaagacaactcgacaagaacctcaggtttcacaagctggtggcctatgggatcgcagtcaacgccaccatccacatcgtggcacactttttcaacctggagaggtatcactggtctcagtccgaagaagcccagggcctgctcgctgctctaagcaagttaggcaacaccccgaacgagtcttacttgaacccggttcggacatttccaacgaatactaccaccgaattgctcaggacaattgccggtgtcaccggtcttgtgatctctttggcgctcgtgctgatcatgacaagctccacagagttcatccggcaagcaagctacgaactcttctggtacactcatcatgtgttcattgtattctttctctcgctcgcaattcacgggacaggacgcatcgtgcgaggtcaaacacaggacagtctgtcactccataatattaccttctgcagggacagatatgccgagtggcagacagtggcccagtgccccgtcccccagttttcaggaaaggagcccagcgcttggaagtggatcctcgggcctgttgtactgtacgcctgcgagaggatcatacgcttctggcgcttccaacaggaggtggtgatcactaaggtggtatcacatcccagtggtgtgttagagttacacatgaagaaacgaggatttaaaatggccccggggcaatatattcttgtgcagtgtcccgccatatcttcacttgaatggcacccctttaccttgacctccgcaccccaggaggacttcttctcagtgcacatccgtgccgcaggggactggaccgccgctctgttggaggcttttggggccgaaggacaagcattacaagaaccttggtcactgccccggctggccgtggatggaccctttgggaccgcacttaccgatgtcttccactaccccgtgtgcgtatgtgtcgccgctggcattggggtgacacctttcgctgccttgctgaagagtatatggtataagtgttccgaagcccagacaccgcttaaactcagcaaggtctatttttactggatctgccgtgacgccagagcattcgagtggttcgctgaccttctcctgtctctggaaacccgcatgtcagagcagggcaagacccacttcctctcataccatatctttctcactgggtgggatgaaaatcaggccctgcacatcgcactccactgggatgagaacacagacgtgattacggggctaaagcagaagaccttctacggacgaccaaattggaataatgagttcaaacagattgcatataaccaccctagcagcagcattggcgttttcttctgcggtccaaaggccctgtctaggaccctacaaaaaatgtgtcatttgtacagcagcgctgacccccggggggtgcatttctactataataaggaatcattttag

SEQ ID NO: 125804 - DNA, 1737 bp, synthetic construct
  misc_feature 1..1737: note = Description of Artificial Sequence: Synthetic coding sequence
  source 1..1737: mol_type = other DNA
atggccgtgtcctggcgctcgtggctcgctaatgaaggcgtcaaacacttatgcctcttcatctggctgtctatgaacgtcctactgttctggaagacattcttgctctataaccaggggccagagtaccactacctccaccagatgctgggcttggggctctgcctctcacgagcctcagccagtgtattaaacctcaactgttcgctgatacttctgccaatgtgtcgtaccttattagcatacctccggggctcccaaaaggtcccctctcgacggactagaaggcttttagataaaagcaggacatttcatatcacatgtggcgtgacgatctgcatatttagcggagtccatgttgctgcccatctggttaatgccctgaacttcagcgtaaactattcagaggacttcgtggagctgaacgccgcacggtacagggacgaagatcctagaaaactcttattcacaaccgtccccggattgaccggggtgtgcatggtcgtggtgctgttcctgatgataacagcgtccacgtacgccattcgagtgagcaactatgacatcttttggtatactcacaacctcttttttgtgttctacatgctgctgaccctccacgtttccggcggactgctcaaataccaaacaaatctcgatactcaccccccaggctgtatctcgctcaaccgaacaagctctcagaatatcagtctccccgagtacttcagtgagcatttccacgagccattccctgaagggtttagcaaacccgcggaattcacccagcacaaatttgtgaaaatttgtatggaagagcccagattccaagccaatttccctcagacctggctctggataagtggccccctgtgtctctactgcgctgagcgcctgtacaggtacattagatccaacaaaccggttaccatcatctccgtcatgtcacatcccagtgacgtcatggaaatccgtatggtgaaggaaaacttcaaagcgcggccagggcaatacattaccctgcattgtcctagtgttagcgccctggaaaatcacccttttaccctgaccatgtgtccaacagagactaaagccacattcggtgtccacctaaaaatagtcggagactggacagaacggtttcgcgatctgctgctgccacctagttcccaggatagcgagatcctgccctttattcaaagtaggaactaccccaaactgtacatcgacggccccttcgggagtcctttcgaggagagcctgaactatgaggtgtccctgtgtgtcgcgggaggtattggcgttaccccatttgctagcatccttaacacccttctcgacgactggaaaccctataagcttcgaagactttacttcatctgggtatgccgcgacattcagtcattccggtggtttgccgatcttctgtgtatgctgcacaacaagttctggcaagagaatcgtccggactatgtgaacattcagttgtacctgagtcagaccgacgggatccagaagatcatcggagagaagtatcatgccctcaactctcgcctgttcataggtcgcccccggtggaaattactgtttgatgagattgctaagtataaccgtgggaaaactgtcggtgtattctgctgcggtcccaactccctgagcaaaactctgcataaacttagcaaccagaacaacagctacggcactcgctttgagtataataaagagagcttcagctag

SEQ ID NO: 125805 - DNA, 1665 bp, synthetic construct
  misc_feature 1..1665: note = Description of Artificial Sequence: Synthetic coding sequence
  source 1..1665: mol_type = other DNA
atgaatgtgctcctgttttggaaaacctttttgctttacaatcagggacctgagtaccattacttgcaccagatgctgggcttgggcctttgcctctctagggctagcgcgagcgtcctaaatctcaactgctcactcatactgctaccaatgtgcagaactttgcttgcctacctcaggggaagtcagaaagtaccaagcaggcgcacaaggcgtctcttggacaaatctcgcacgttccacatcacctgcggcgtaactatttgtatcttttcaggcgtgcatgttgcagcccacctggtgaacgccctgaacttcagcgtgaattatagtgaagatttcgttgagcttaacgcagccagatatcgagatgaggaccctcgcaaacttttgttcaccacagttcccggcctgactggggtatgtatggtggttgtattatttctcatgatcaccgcctccacttatgccattcgtgtgtcgaattacgacatcttctggtacacacacaatctcttctttgtcttttacatgctacttacactgcatgtgtctggtggcctgctaaaataccagaccaatttggacactcacccccccggatgcatcagtctgaatcgaacatcctcccagaatatctcccttccggagtattttagtgagcatttccacgagccgtttcccgagggctttagcaagcccgcagaatttacccagcacaaatttgttaagatatgtatggaggaaccaaggtttcaggccaactttccacagacttggttatggatcagtggccccctgtgcctctattgcgccgagagattgtaccgctatatccgctcaaataagcctgttactattatctccgtaatgtcacatccatcagatgtgatggagattcgaatggtgaaggaaaatttcaaagcgcggcccgggcagtacatcacgcttcactgccccagcgtatctgcactggaaaaccacccctttacattgacaatgtgcccaactgagactaaggcaaccttcggcgtccatctcaaaattgtcggtgattggacagaacggtttcgggaccttctcctgccaccctcgtctcaggacagcgagatattgccttttattcagtctcgtaattacccgaaactttacatcgacgggccgttcgggagcccattcgaggagtcactgaattatgaggtgtcactgtgcgtcgccggaggtattggagttacgccctttgccagcattctgaacacactcctcgacgattggaaaccttacaagctgaggaggctgtacttcatctgggtgtgcagagacattcagagtttcaggtggttcgctgacctcttgtgcatgctccacaacaagttttggcaggaaaataggccggactatgtgaatatccagctatatctgtcccagaccgatggcatccagaagattattggcgaaaagtatcatgcccttaactctcgcctattcatcggacggcctcgctggaagcttctcttcgatgagatcgcaaaatataacaggggcaaaactgttggggtcttttgctgcgggccaaactctctaagcaaaaccttgcataagctctccaatcagaacaatagttacgggacccgttttgagtataataaagagagtttcagctag

SEQ ID NO: 125806 - DNA, 816 bp, synthetic construct
  misc_feature 1..816: note = Description of Artificial Sequence: Synthetic coding sequence
  source 1..816: mol_type = other DNA
atggcagttagttggcgctcatggctggccaacgaaggggtcaagcacctgtgcctgttcatttggctatctatgaacgtattgctcttttggaaaactttcttgttgtacaatcagggacctgaataccactacttgcatcagatgcttggctgcccgaccgagaccaaagccacttttggcgtgcatctgaaaattgtaggcgactggacggagagattcagggatttactgctccccccctcttcacaggattctgagatcctccccttcatacaatcaaggaattatccgaaactgtacatagacggaccctttggctccccctttgaggaaagtttgaactacgaggtgagcttatgtgttgcaggcggtattggcgttacaccgtttgcctccattttaaatacactcttggatgactggaaaccttacaagttgcgccggctgtattttatttgggtgtgtcgcgacatccaatccttcaggtggtttgcggacttgctttgcatgttgcacaacaaattttggcaggaaaacaggcctgactatgtgaatatccagctgtatctgtcacagacagacggaattcagaagattattggcgaaaaatatcatgccttgaatagtagactgtttatcggtcgcccccggtggaaactgttatttgacgaaattgctaaatacaaccgtggaaagacagtcggcgtgttttgctgtggaccaaattctctgagtaagactctgcataagttgtctaaccaaaataattcatacggaactagatttgagtataataaggagagcttttcgtag

SEQ ID NO: 125807 - DNA, 165 bp, synthetic construct
  misc_feature 1..165: note = Description of Artificial Sequence: Synthetic coding sequence
  source 1..165: mol_type = other DNA
atggccgtatcctggcgctcctggctcgcaaatgaaggcgtgaagcatttatgtctttttatttggctaagtatgaatgtgttgttgttttggaagacctttttgctctataaccaggggccagagtaccattacttgcatcaaatgctgggggaactcagctag

SEQ ID NO: 125808 - DNA, 1800 bp, synthetic construct
  misc_feature 1..1800: note = Description of Artificial Sequence: Synthetic coding sequence
  source 1..1800: mol_type = other DNA
atgggagagatgtggaggaagagagaagaggtcatctttcgtgaatatagtttctctttctacccactcaatatctttgcgccctttgtgctattcccagactacttctgcctgctcggcttcatatggctgtctatgaatgtgcttttattttggaaaactttcttactatataaccagggcccagaatatcactatcttcaccagatgctgggtctgggcctttgcctaagcagggccagtgcctctgtactgaatctgaattgcagcctgattctactgccaatgtgtagaacactgttagcatatcttagaggctcacagaaggtaccctctcgccggacacggagattgctggacaagagtcgaacatttcatatcacttgtggcgtgactatttgcatattttcaggcgtgcatgtcgccgcacatttggtaaacgccttaaatttctccgtgaactattccgaagactttgtcgagcttaatgcagcccgataccgagatgaggatccccgtaaattgctttttacaacagtgccaggtttgacaggtgtttgtatggtggtcgtgctcttcctcatgatcaccgcctctacatatgccattagggtctccaactacgatattttctggtatactcacaacctcttttttgtgttctatatgctgctcactttgcatgtgtcggggggactgctgaagtaccaaacaaatttagacacacacccgccagggtgtatatctctgaacaggacttctagtcagaatatctcgctgccggaatatttttcagaacatttccacgaacctttcccagaggggttcagtaaacccgccgagttcacccagcataaatttgttaagatttgtatggaagagcctcgattccaagcaaactttccgcaaacctggctgtggatttccggtcccttgtgcctatattgcgcagaacggctttaccgctacatccgatctaacaagcctgttactatcatctccgtgatgagtcatccctctgacgtcatggagattaggatggtcaaagagaatttcaaagcacgcccgggccagtacatcaccctgcattgcccgtctgtgagcgcactggagaatcatccattcaccctaaccatgtgtcccaccgaaacaaaagctaccttcggcgtacacctcaagatcgttggtgactggacagagcggttccgcgacctgctgctgcctcccagctcacaggattccgaaattttgccctttatacagtcgagaaattaccccaaactgtatatcgatggcccgtttggtagcccattcgaagagagtctaaattacgaggtgagtttgtgcgtggccgggggtataggagtgactcccttcgcctcgattttaaacactttacttgacgattggaaaccgtacaaattgagacgcctgtactttatatgggtctgtagagacatccagtctttcaggtggtttgcagatctactgtgcatgttgcataacaagttttggcaggaaaataggccggactatgttaatatacagctgtacctttcccaaaccgacggaatccaaaagatcattggggaaaagtaccacgcactgaatagccggctgttcatagggcggccacggtggaagctactcttcgacgagattgctaaatacaaccgcggaaagaccgtcggggtgttctgttgtggcccgaattccctgagcaagaccctgcataaactgagtaaccagaacaactcctatgggacccgattcgaatataacaaggaatctttcagttag

SEQ ID NO: 125809 - DNA, 1665 bp, synthetic construct
  misc_feature 1..1665: note = Description of Artificial Sequence: Synthetic coding sequence
  source 1..1665: mol_type = other DNA
atgaatgtcctcctcttttggaaaacattcttactctataatcagggccccgagtatcactacctacaccagatgctcggtctgggtctatgcctttcccgggcatctgcatcagtcctgaatttgaactgcagcctcatccttttacccatgtgtaggacactgctggcttatttgcgaggcagccagaaggtccctagccgacgcacccggcgtctgctggataaaagtcggaccttccacatcacttgcggagttacaatctgcatcttcagcggagtgcacgtcgcagcgcacttggtaaacgcattgaacttcagtgtcaattacagtgaagacttcgtagaactgaacgctgcccgataccgcgacgaggatcctcggaagttgttgttcacaactgttccaggccttaccggtgtgtgtatggttgtggttctgtttctaatgatcaccgccagcacctacgcaataagggtgtcgaactatgatatcttttggtacactcataacctctttttcgtgttctatatgctgttgacgctgcacgtgtctggcggattgttgaaatatcaaacaaacctggacactcacccccccggatgcataagcctgaaccgaacttcttctcagaatatatcactgcctgaatacttctctgaacattttcacgagcccttccctgaaggattttccaagccagcagagtttacccaacacaaattcgttaagatctgtatggaggaaccgagatttcaggctaatttcccccaaacttggctgtggataagcggccctttgtgtctctattgtgccgagaggctctatcgttatatccgcagcaacaagccagtgacaattatttccgttatgtcccacccttctgatgttatggaaatccgaatggtgaaagagaatttcaaggcccggccaggccagtatatcacgctgcattgcccttcagtcagcgcgctggaaaatcatcctttcaccttgaccatgtgcccaacggaaacaaaagcgacattcggcgtgcatctgaagattgtcggcgattggaccgagcggtttcgggacttactgctgcccccaagctcccaggattctgagatactacctttcatccagagccgaaattatcccaagttgtatatcgatggacccttcggcagtccattcgaggagagccttaattacgaagtgagcttgtgcgtagcaggagggattggtgtgactccatttgcaagtatcctgaataccctgcttgatgactggaaaccctacaaacttcgccggttatactttatatgggtgtgtcgtgatattcaaagcttcagatggtttgccgacctgctctgtatgctccataacaagttttggcaggagaatagacccgattacgttaacatccaactctacctcagccagacggacgggatacagaagatcataggggaaaagtatcacgccttgaatagccgcttgttcatcggaagacctaggtggaaactgctgtttgacgagatcgctaagtataaccggggaaagaccgtgggcgtgttctgctgtggcccaaatagcctatctaaaacgctgcataaactgagtaaccagaataacagctacggaactcgattcgagtacaataaagaaagcttctcctag

SEQ ID NO: 125810 - DNA, 1665 bp, synthetic construct
  misc_feature 1..1665: note = Description of Artificial Sequence: Synthetic coding sequence
  source 1..1665: mol_type = other DNA
atgaatgtcctgctgttctggaagacctttttgctgtataatcaaggacccgaataccattatcttcaccagatgttgggactagggttgtgcttgtcgagggcctcggcctccgtcctgaacctgaattgtagtctgatcctactgcccatgtgtaggacgctcttggcctacctgagagggagtcagaaggtgccctctcgaagaactaggcgattgcttgataaatctagaacgttccacattacatgcggtgttactatctgcattttctctggcgtccacgtagcagcgcatcttgttaatgctcttaacttcagcgtgaactacagtgaggactttgtggagctcaatgccgcgaggtatagggatgaggatccccgcaagctacttttcaccactgttcccgggctaaccggagtgtgcatggtggtcgtactcttcctgatgataacagcaagcacctatgcaattagagtcagcaactacgatatcttctggtatacccacaacctctttttcgtgttttatatgttgctcaccctgcatgtcagcgggggactgctgaagtaccagaccaatctggatacccaccctccagggtgtatcagccttaataggacttcatcccaaaacatctcactcccagaatacttttccgagcatttccacgagccttttcctgagggtttttctaagcctgctgagttcacccaacataaatttgtgaagatctgcatggaagagccacggttccaggccaacttcccccagacctggctgtggatctccggccccctttgtctgtactgcgctgaacggctatacagatacatccgcagcaacaaacccgttacaattattagcgtgatgtctcacccttcagacgttatggaaatccggatggtcaaggaaaactttaaagcaaggcccggccaatatatcaccctgcactgtccctcagtgtccgcgctcgagaaccaccccttcacactgaccatgtgtccaactgaaactaaggccacctttggagtgcacctgaaaatcgttggggattggaccgagcgatttcgggacctgctgctgccgccctcaagtcaggactcggagatactgccctttattcagagcagaaactaccctaagctttacattgacggccccttcggcagcccgtttgaggagtcactgaactatgaggttagtctttgcgtggctggcggtatcggtgttacaccattcgcttcaattctcaacaccttgctggacgactggaagccctacaagctgcggcgcttatacttcatctgggtctgccgggacatccagagctttcgatggttcgctgacctcctgtgtatgctacataataagttctggcaggaaaaccgacctgactacgtaaacattcagctgtacctctcacagacagacgggatacagaagatcattggcgagaaatatcatgcccttaacagcaggctgttcatcgggcgtcctaggtggaaacttctgttcgatgaaatcgctaaatataatcgcggcaagacagtcggcgtgttctgttgcggcccgaatagtcttagtaaaaccctccacaagttaagtaaccagaataattcttacggaaccagattcgaatataataaagagagcttttcctag

SEQ ID NO: 125811 - DNA, 696 bp, synthetic construct
  misc_feature 1..696: note = Description of Artificial Sequence: Synthetic coding sequence
  source 1..696: mol_type = other DNA
atggctgtgtcttggagatcttggttggcaaacgaaggcgtcaaacatctgtgtctcttcatttggctgtcaatgaatgtgttactgttctggaagacattcctgctctacaatcagggccctgagtatcattatcttcatcagatgctcggttgccccacggagacaaaggccacgtttggggtccacctcaagatcgtcggtgactggaccgagcgattccgcgacttactgctgcccccttcaagtcaggactccgaaatattacctttcattcagtccagaaattaccctaaagatgattggaaaccctacaaactccgaagactgtatttcatttgggtttgtcgggacattcagagctttcggtggtttgctgacctgctgtgtatgttacataataagttttggcaagagaatagaccagactatgttaatattcagttatatctgtcacagacggacggcatacagaaaatcatcggcgaaaagtaccacgcacttaatagtcgcctgttcatcggtcggccacgttggaagcttctcttcgacgagatcgccaagtacaatcgcggcaaaactgtaggggtattctgctgtggccctaattctctctctaaaacactgcacaagctgtctaaccaaaacaattcctacggcacccgcttcgagtacaataaagaaagtttttcctag

SEQ ID NO: 125812 - DNA, 1617 bp, synthetic construct
  misc_feature 1..1617: note = Description of Artificial Sequence: Synthetic coding sequence
  source 1..1617: mol_type = other DNA
atggccgtgagctggagaagttggctcgcgaacgagggcgtgaagcacctgtgcctctttatttggctgtccatgaatgtacttctcttctggaagacctttctgctttacaatcagggcccggagtatcactatctacatcagatgctgggcctgggtctgtgtttatctagggcaagcgcgagtgtcctgaaccttaactgttccttgattttgctaccaatgtgccgtacactgctggcctacctgagaggtagtcagaaggtgcctagtcggcggacccggaggctcctggataagtccagaacctttcatattacgtgtggcgtaaccatttgcatcttctctggcgtgcatgtcgccgcacatctcgtcaacgctctgaatttttccgtcaactactccgaggactttgttgaactaaatgccgcccgataccgggatgaggacccacgtaaactgttattcactaccgtgccaggcttaacgggagtatgcatggtcgttgtgctattcctgatgattactgcgtccacatacgccataagggtgagcaactacgacatcttttggtatacacataacctgttctttgttttctatatgctccttactctacacgtgtctgggggcctgttgaaatatcaaaccaatcttgacacacatcctcccggatgcatctcattaaatcggaccagctctcaaaatatttcactgcctgaatatttttcagagcattttcatgagccattcccggaaggtttcagcaagcccgccgagtttacacagcacaagttcgtgaaaatctgcatggaagagcctcgattccaggctaactttccgcagacgtggctctggatctctggaccactttgcctctattgtgctgagagactgtacagatacattagatctaataagcctgtcacaattatctccgtcatgtcacatccttcagatgtgatggagattaggatggtgaaagaaaactttaaagcccgccctggtcaatacatcacgttacactgtccatcggtatcagccctagaaaaccaccccttcaccctcacaatgtgccccaccgaaacgaaagctacatttggagtccacctcaaaatcgtcggcgactggactgagaggtttcgcgaccttctgctgccccccagctctcaggactctgagattttacctttcatacagagccgcaattatccaaaagacgattggaagccctacaagctgagacggctctacttcatttgggtgtgtagggacatccagagcttcagatggtttgcggacctgctgtgtatgctgcacaacaaattttggcaagagaatcgcccggactatgtgaacatccagctttatctatctcagaccgatggaattcagaaaatcattggcgagaaataccatgcgctgaacagtaggctttttatcggccgtcctaggtggaagctactgtttgatgagatcgccaagtataatagaggaaaaacagtcggagtgttctgttgcggtcccaacagcttgtctaagactctgcacaagctcagcaaccaaaacaactcctatgggacaaggtttgagtataacaaggaaagctttagttag

SEQ ID NO: 125813 - DNA, 1665 bp, synthetic construct
  misc_feature 1..1665: note = Description of Artificial Sequence: Synthetic coding sequence
  source 1..1665: mol_type = other DNA
atgaacgtacttcttttttggaagacatttttgctgtataatcaggggcccgagtaccattacctgcaccagatgctggggcttggcctgtgtctctcgagggctagcgcctccgtgctaaatttgaattgttccctgatattactgcccatgtgccgaaccctcctggcctatctgcggggtagccaaaaagtgccctcccgcaggacacgaaggctcttggataagtctcgcacttttcacattacttgcggagtaacaatttgtatcttcagcggcgtgcatgttgcagctcacttggtgaacgccctgaacttcagcgtaaactattctgaggattttgtggagctaaatgccgcccgctatagagacgaggacccccgcaaactgttattcacaacagtcccgggacttaccggtgtgtgtatggtggtggtgctcttcctaatgataacagcttccacatacgccatacgcgtgtcaaactatgacatcttttggtacacacacaacttgttcttcgtgttttacatgctgttaacattgcatgtgtcaggcggtctgctgaagtaccagactaacctagacacccatcctcccgggtgtatctctcttaatcgcactagcagtcagaacattagtcttccggagtacttcagcgaacacttccacgaaccatttccagaaggattctcaaagcccgctgagttcacacagcataagtttgtgaaaatttgtatggaggagcctcggttccaggcaaatttcccgcagacctggctttggatctctgggcccctctgtctctactgcgcagagcgcttgtatcgctacatccggagtaataaaccagttactatcatcagcgttatgtcacatccctctgatgtcatggaaattcgaatggtcaaggaaaatttcaaggcacggccaggtcagtatattaccctacactgcccgtccgtatccgctcttgaaaatcatccttttaccttaactatgtgtcccacagagacaaaggccacctttggtgttcacttgaagatcgtgggcgattggaccgaaaggttccgtgacctcctgctcccaccgtcatctcaggacagcgagatcttgccgttcattcagagccgaaactatcctaagctgtacattgacgggcccttcggttcccctttcgaggagagcctgaactacgaagtgagcctttgtgtcgccgggggaattggggtgaccccttttgcaagcattcttaacactcttctggacgactggaaaccctataaactgcggaggctctatttcatttgggtctgtagagacatccagtcctttcggtggttcgccgacctgttatgcatgctgcacaataaattctggcaggaaaaccggccagactatgtgaacattcagttgtacttgagtcagactgacggaatccagaaaattattggcgaaaagtatcatgcgttgaacagccgattatttattggccggcccaggtggaagctgctcttcgatgaaatcgctaagtataataggggtaagactgtgggcgtgttctgttgcggtccaaattctctgtccaagacactgcacaaactgtccaatcagaataattcctacggcacccgctttgaatataacaaggaatccttttcatag

SEQ ID NO: 125814 - DNA, 1665 bp, synthetic construct
  misc_feature 1..1665: note = Description of Artificial Sequence: Synthetic coding sequence
  source 1..1665: mol_type = other DNA
atgaacgtcctgctgttttggaagacattccttttgtacaaccaaggtccagagtaccattacctgcaccagatgctgggcctgggtctgtgtttgtcaagggcatccgcctccgttctcaacctcaattgtagcttaattctgttgccaatgtgccgaactctgcttgcgtacctgcgcggtagtcagaaggtaccgagccgtcgtaccaggaggctcttggacaaatcccggactttccacatcacatgcggcgtgaccatctgtatattcagtggagtgcatgttgccgcccatctggtgaatgcactcaacttctcggtgaactactcagaggactttgttgagctgaacgccgccagatatagggatgaagatcccaggaagcttctgtttacaaccgtgccaggcctcaccggcgtgtgcatggtcgtcgtgctcttcctgatgatcacggctagcacatatgccatccgcgtgagcaattacgatatattctggtatacccacaacctgtttttcgtattctacatgttactgaccctgcatgtgagcgggggtttactgaagtaccagaccaatctggacacccatccaccgggttgcatctctctcaatagaacatccagccaaaacattagcctccctgaatatttctcagaacactttcacgagccatttcctgagggatttagcaagccggcagagttcacacaacacaaatttgtaaaaatttgcatggaggaacccagatttcaggctaatttccctcagacatggctctggatcagcggaccgctgtgcctctattgtgccgagcgattgtacaggtatatacgctcaaacaagccagtcaccatcatttctgtaatgtcccacccttctgacgttatggaaattcgcatggtgaaggagaacttcaaagctcgacccggccaatacattacattgcactgtcccagcgtgagcgctctggaaaatcatcctttcacattgacaatgtgcccaaccgaaaccaaagcaacttttggtgtgcacctgaaaattgtgggagattggaccgaacgcttccgtgatcttcttctgccaccatcatcccaagactctgagatcttgccgttcattcagagccgcaattatccaaagttgtacatcgacgggccctttggcagcccattcgaggaaagcctgaattacgaggtgtctctgtgcgtggcaggcggcatcggagtaactccgtttgcatctattctcaatacgctgctggacgactggaaaccgtataaactgaggcgactgtatttcatatgggtgtgtagagatatccaatctttccgttggttcgcagaccttctgtgtatgttgcataataagttttggcaggaaaaccgtcccgactacgtgaatatccagctctacctgtcacagacagatggtattcagaagattatcggggagaaatatcacgcccttaattcccgactgtttatcggcaggccccgctggaagcttctatttgacgaaattgccaaatacaaccgcgggaaaaccgttggcgtgttttgctgcggtcctaattcgctctcaaaaacgctccacaaacttagtaatcagaataattcctacgggacaaggtttgaatataataaggagagcttttcctag

SEQ ID NO: 125815 - DNA, 2193 bp, synthetic construct
  misc_feature 1..2193: note = Description of Artificial Sequence: Synthetic coding sequence
  source 1..2193: mol_type = other DNA
atggccttcgtctgtgcaggacttagtgatactatgtccgctgaggaagatgcccgatggctgcgctgggttacccagcagtttaaaaccatagccggagaagatggtgagattagccttcaggaatttaaggcagccctccatgtcaaggagtccttttttgccgagagattttttgcactttttgactccgacagatctggcactattaccttacaggaactgcaggaggctttgactctcctcatccacggctctcccatggataagctgaaatttctgttccaagtttacgacatcgacggttcaggaagcatcgatcctgacgagctgaggaccgtgttgcagtcctgcctgagagaatccgccatttctctccctgacgagaagttggaccagctcactctggcactgtttgagtctgcagacgctgacggaaacggcgccattacattcgaagaactccgggacgaactccagaggtttccgggcgtcatggaaaacctcacgatcagcgccgcacattggctcaccgccccagcacccaggcccagaccacgccgtccgaggcagctcactcgggcgtattggcacaaccacaggtcccagctgttctgtctggccacctatgcgggcctgcacgttctcttattcggactggctgcttccgctcaccgcgacctgggagcctctgtaatggtggctaaagggtgcggccagtgtctgaactttgactgtagttttatcgccgtactcatgttacggcgatgtctaacctggctccgcgctacctggctggcccaggtactgcctctggaccagaacatccagttccaccaactgatggggtacgtcgttgtgggcctatcccttgtgcataccgtggctcatacagtgaactttgtgttacaggctcaggccgaggcttctcccttccagttctgggagctcctgctcaccacaaggcccggcattggctgggtccacgggtcagcctcccctacaggcgtagccctcctgttgcttctgctcctcatgttcatttgtagctccagctgtatccggaggtcagggcattttgaggtcttttattggacccacctgagctaccttctggtttggcttctgctgatatttcatggacctaatttttggaaatggctcctggtgccggggatcctgttttttcttgagaaggccatcggactggccgtgtcacggatggctgccgtctgcattatggaagtaaacttgctcccttccaaggtgactcacctgctgatcaagcgtcctcccttttttcattaccgacctggggactatctgtacctgaacattccgacgattgctaggtatgaatggcatccttttaccatcagctcagcacctgagcaaaaggacacaatttggcttcacatccgcagccaaggtcagtggactaaccgtctctatgaaagttttaaagccagcgatcccctgggacggggtagtaaacgattgtcccggtccgtgacaatgcgaaaatctcagagatcctctaagggctcagagatcctgctcgaaaagcataagttttgcaacatcaaatgttatatcgacggcccctacgggaccccaactcggcggatcttcgcctctgaacacgcggtgttgattggcgcaggaataggtatcaccccatttgccagtattttacagagcattatgtaccggcatcagaaacgaaaacatacatgcccaagctgccagcactcttggattgagggggtgcaggacaatatgaagttacacaaggttgacttcatctggataaatagagaccagcgatcctttgaatggttcgtttcactcctgacaaagttggaaatggaccaagctgaggaagcccagtacggaagatttctagaactccacatgtacatgacctcagccctgggcaagaacgatatgaaagctattggactgcagatggcactggacttattagccaacaaagagaagaaggattccataactggactccaaacaaggacccagccaggccgacccgattggagcaaggtgtttcagaaggtggccgcggagaaaaagggcaaagtgcaagtgttcttttgcggcagtcccgccttggccaaagtgcttaaggggcattgtgagaagtttggattccggttcttccaggagaatttctag

SEQ ID NO: 125816 - DNA, 2298 bp, synthetic construct
  misc_feature 1..2298: note = Description of Artificial Sequence: Synthetic coding sequence
  source 1..2298: mol_type = other DNA
atgaatacatccggtgaccctgcccagaccggtccggagggttgcaggggaactatgtccgctgaggaggatgcccggtggttgagatgggttactcagcaatttaaaacaattgctggagaagatggagagatcagcctgcaggagttcaaggccgcactccacgttaaggagtcttttttcgctgagcgattcttcgcactgtttgacagcgatcgctccggaacaataacgctccaagaactccaggaggctcttacgctgttgatacacgggagtcctatggacaagctgaaattcctgttccaggtgtacgatatagacgtttgcgcccgccagggtgctagtgcaggaaccgagtggggagcaggggctggaccccactgggcaagctcacctttaggtaccgggtccgggagtattgacccagacgaattacgaacggtactacagagctgcctgcgggagtcagctatctcgctgccagacgagaaactcgaccagctgactcttgccctttttgaaagtgcggacgctgacgggaacggagctattacttttgaggagttgagggatgaactgcaaaggtttcccggagtcatggagaatctcactatctccgccgcacactggctgacagcgcctgctccacgcccacgcccgaggagacctagacagcttactcgggcgtactggcacaaccacaggtcccagctgttctgcctggcgacatacgctgggcttcatgtcttactttttggtcttgccgcctctgcacaccgggacctgggagcatcggtcatggtggctaagggttgcggccagtgtctgaacttcgattgttccttcatcgctgtgctcatgctcaggcggtgtctgacctggctgcgggctacatggctcgctcaggtgctacccctagaccagaatatacagtttcaccagctgatgggctacgtcgtggtggggttgtctcttgtgcatacagtggcccacaccgtgaactttgtcctgcaggcccaggccgaagcttccccctttcagttttgggagctactgctgacgacccgcccggggataggatgggtccatggctcagcatcgcctactggagtggctttactgttgctactgctcctgatgttcatttgctcttccagttgcatacggcggtcaggacattttgaagtgttttattggactcatctgtcatacctgctggtgtggctgcttttgattttccacggccctaacttctggaagtggctgctggtcccggggattctattcttcctcgaaaaggctatcggcctggctgttagtaggatggccgccgtgtgtataatggaggtaaatcttttaccctcaaaggttacgcacttattaattaaaagaccgccgttctttcactatcggcccggagactatctttatctgaatataccaactattgccagatatgagtggcatccattcaccatctcttccgctcctgagcagaaagataccatatggctacacatcagatcccaaggacagtggacaaacagattatacgagagctttaaggcttccgatccattagggcgcggcagtaaacggctgtcaagaagcgtcaccatgaggaaatctcagaggtcatcaaagggttccgaaattctccttgagaaacataagttttgcaatataaagtgttacatagacggcccttatggtaccccaacccggcgcatcttcgcctcagaacacgctgttttaatcggcgctgggattgggatcacaccatttgcgtccattctgcagagcatcatgtaccggcaccagaagaggaaacatacatgtcctagttgccagcactcatggatcgaaggcgttcaggataacatgaaactccataaggtggactttatttggattaaccgggatcagaggtctttcgaatggttcgtcagtttactcaccaaactggagatggatcaggcagaggaagcccagtacggccgcttcctggagctccacatgtacatgacttctgcgctaggaaaaaatgatatgaaggcaataggtctgcaaatggcactggatctgctggccaacaaggagaaaaaggactcaatcaccggacttcagacaaggactcaaccaggcaggcccgattggagtaaagtttttcaaaaagtggctgctgaaaagaagggcaaggtgcaggtcttcttttgcggatctcctgcgctcgctaaagtgctcaaggggcattgcgaaaagtttggcttcaggttctttcaggaaaacttctag

SEQ ID NO: 125817 - DNA, 2214 bp, synthetic construct
  misc_feature 1..2214: note = Description of Artificial Sequence: Synthetic coding sequence
  source 1..2214: mol_type = other DNA
atgaacacgagcggagatcccgcccaaactggacctgaaggctgtcggggtaccatgagcgccgaggaagacgccagatggctccgctgggtaacacagcagttcaagactattgcaggtgaggacggggagatctctttgcaggagttcaaagcggctctgcacgttaaggaaagttttttcgcggaaagatttttcgcactgtttgatagcgataggagtggtacaatcactctccaggaattgcaagaagccctgacgttacttatccacgggagtccaatggataaacttaagttcttgttccaggtttacgatattgacggtagcggaagcatcgatcctgatgagctgcgcaccgtcctgcagtcgtgcctgcgcgaaagcgcaatttccctacccgatgagaagctcgaccagctcactctcgccttatttgaatctgctgacgcagatggcaacggagcaatcacctttgaggagctgcgagacgaactgcaacggttccccggtgtcatggagaacctgacaattagtgcagcacactggctgaccgcccctgcgccccgtccacggccccggcggcccagacaactgacccgggcatattggcataatcaccgtagccagttgttctgcctcgcaacctatgcaggcctccacgtgctgttattcggtctggctgcatcagcccatcgtgatctgggcgcttctgtcatggtggccaaggggtgcgggcagtgcttgaacttcgactgctcgttcatcgccgtcttgatgctgaggcgatgtctaacctggctcagggctacttggctggcccaggtcttacctctagatcaaaatatccagtttcatcaattgatgggttatgtggtcgttgggctgagtctggtacacaccgtcgcccacacagtcaacttcgttcttcaggctcaggcagaagcttcaccctttcagttttgggaacttttgctcactactcgccctggaatcggctgggtacatggatctgccagccctacaggcgtggccctcctcttgctccttttactaatgttcatttgctcatcgtcttgcatcaggcgatctgggcattttgaggtattctattggacccatctcagctacttattggtctggctcctccttatctttcacggaccgaacttttggaaatggctgctcgtccccggcatcttattctttctcgaaaaggcaattggattggcggtaagcagaatggccgccgtctgtatcatggaagtcaacttattgccatcaaaggtcacccatcttctgataaaaaggccccctttctttcattatagaccaggcgactacctgtatctcaatatccccacaatagcccgttacgagtggcacccctttaccatcagcagcgcaccagagcagaaagacacaatctggttgcatattcggagccagggacaatggactaaccgcctgtacgagtcattcaaagccagcgatccactcgggcggggttcgaagcgcctgtctagaagtgtaacaatgcggaagtctcagcgtagttctaagggtagtgagattctgcttgaaaagcataaattctgcaacattaagtgctacatcgacggtccctatggaacacctacacggcgcatctttgcttccgagcatgccgtgctcataggggccggaatcggaattactccgtttgcatcaatcttacagtccataatgtatagacaccagaagaggaagcacacctgtccttcctgccagcactcctggatcgagggcgtgcaggacaacatgaaactgcataaagtcgatttcatctggatcaaccgcgaccagcgaagctttgagtggtttgttagcctcttaaccaagctggagatggaccaggccgaagaggcacagtacgggcgatttctcgagctgcatatgtacatgacctcagccctcggaaagaatgatatgaaagcgatcggactgcagatggctctggatctgctggctaacaaagaaaagaaggacagcatcaccggcttgcagacccgaactcagccgggacggccggactggtcgaaggttttccagaaagttgcagccgaaaaaaagggcaaggtccaagtgtttttttgcggaagccctgccctagctaaggtgttaaaaggccactgcgagaagttcgggttccggttttttcaggagaacttctag

SEQ ID NO: 125818 - DNA, 4419 bp, synthetic construct
  misc_feature 1..4419: note = Description of Artificial Sequence: Synthetic coding sequence
  source 1..4419: mol_type = other DNA
atggataatgccctcttctgtcttgccgctgtgtctaatctcgacattgagtccaagctctccgtgtattatcgcgcgccctggcaccagcaacgtaacatttttttacctgctacaagaccaccctgtgtggaggagctgcacagacatgccaggcagagcctgcaagccctccgacgcgagcacaggtcaaggagcgaccggcgtgagcagagagccgccgcgccgctgtccatagccgctccacccctccccgcctatcctcctgcacatagtcaacgccgacgcgagttcaaggacaggcatttcctgactttcaattcaacaagatccccgtccccaacagagtgctgtcatatgacgccatggagtaggaagtctcacccaccggaggacgaggacacagatgttatgctgggccagcgccctaagaatcccattcacaacatcccatctactctcgacaaacagaccaattggtcaaaagccctcccccttccaaccccagaggaaaaaatgaaacaagacgcacaggtgatatccagttgtataattcctattaacgtcaccggggtgggcttcgaccgggaagcatctattcgatgctctctggtgcactcgcagtccgtcctccagcgccgcagaaaattgaggcgaagaaagaccatatccggcattccacgcagagtgcaacaggagatcgactcagatgagagtcccgtggcacgcgagagaaacgtgatagtccacaccaacccggacccgagcaacacagttaatcgaatctcaggcaccagggatagcgagtgccagactgaggatatcctcatcgccgctccttctagacgtcggattagagctcagagggggcagagtatcgctgcatctctgagtcatagcgcagggaatatcagcgcccttgctgacaaaggtgataccatgtttacccctgccgtatcgtcaaggaccaggagtcgctcccttcccagggaaggaaacaggggaggcgacgcagagccgaaggtgggtgctaaacctagtgcatatgaggagggcgagtcattcgttggcgatcatgaacgaaccccaaatgacttctctgaagctcccagtagtccatctgcgcaggaccatcagccaaccctcggcttggcttgttcgcagcacctgcactcacctcaacacaagctttcagagcgtggcagatcccgactgagcagaatggctgcggattccggctcctgcgacatatccagcaacagcgatacctttgggtctcccatccactgcatttccacggccggggtcttactttccagccatatggaccaaaaagacgatcatcagtcttcatcaggtaattggtcaggcagctcttcgacatgccctagtcagactagcgagaccatccctcctgctgccagtccacccctcactggaagttcgcactgcgactctgaattatctctcaacaccgctccacacgccaacgaggatgcctctgtgttcgtcacagaacaatataacgaccacctggataaggtccgcggccatagagcaaactcattcacatccaccgttgccgacttgcttgacgaccctaataattccaatacttcggatagtgagtggaactatctgcaccaccatcacgatgctagctgccgccaggatttcagccctgagcgaccgaaggccgattcattagggtgtcctagtttcaccagtatggcaacctacgatagcttcttagagaagtccccttcagacaaagcggacacttcttcacatttttcagtagacaccgaaggatattatacctccatgcatttcgattgtggactgaagggtaacaaaagctacgtctgtcattatgcggcactaggaccagaaaatgggcaaggagtgggggcctctccaggcttgcctgactgtgcatggcaggactatctggaccacaagaggcagggtagaccctccatcagctttcgcaagcccaaagcgaagccgacccctccgaaacgtagctcctcccttagaaaatctgatggcaatgccgacatcagtgagaaaaaggaacctaagatctctagcggtcagcatctgccccattcatcacgcgaaatgaaactcccactggacttcgcaaacacgcctagccgcatggaaaacgcaaatttgcccacaaaacaggaaccatcctggattaatcagagtgagcagggcattaaggagcctcagctggacgcatcggatattcccccatttaaagatgaagttgcagagtctacccactacgccgatctgtggctgctgaatgatctgaagactaacgatccatataggtccctgtccaacagttctacagccacaggaactaccgtgatcgagtgtattaagtctcctgagagttccgaatcccagacaagccagagcgagtccagggccacaacaccgtccctcccctccgtcgataatgagttcaagttggcctcaccggagaagttggccggattagctagtccgagctctggttacagcagtcaatcagaaacccccacttcctctttcccaacggcgttcttcagtggccctctgtccccagggggatcaaagaggaaacctaaagtgcccgagcggaaatcaagcttgcagcaaccttcgctgaaagacggaacaatctccctatctaaggacctcgagctgccaattattcccccgacacatttagacttgtccgctctccacaacgtgctcaacaagccgtttcatcatagacacccacttcacgtcttcacccataacaagcagaataccgtgggcgagaccctccgaagcaatcctccaccgtccctggccataacgccaacaattctgaagtctgtgaatctgcgtagtatcaacaagtccgaagaagtgaaacagaaagaggagaacaatacagatttgccttacctcgaggagtcaactctgaccacagctgccctgtccccgagcaagatcagaccccacactgccaacaagtctgtgagtcgacagtattctactgaggacacaatactcagctttctggattctagcgctgttgaaatgggtcctgacaaacttcatctggagaaaaattcaacctttgatgtgaagaatagatgcgatcccgaaaccatcacgtcagccggtagcagtttactagattctaacgtgaccaaggatcaggtacggacagaaacggaaccaattccagaaaatacccctacaaagaactgcgctttccctacggagggttttcagcgagtgtctgccgcccggcctaacgacctggacgggaagattatccagtatggccccggacctgatgagactctggaacaggtccagaaggcaccctctgccggtctcgaagaggtggcccagcccgaatccgtggacgtgattacaagccaatctgattccccgacacgagcgactgacgtgtccaatcagtttaagcaccaattcgtgatgagcaggcatcatgacaaagtccccggcacaatcagctacgagagcgagatcacttcagttaactccttccccgaaaagtgctccaagcaggagaacatcgcaagcggcatcagtgcaaagagcgcttcggacaattctaaagccgaggagacccaggggaacgtggacgaagcttctcttaaagagagtagcccatctgatgatagcatcatctcccccctgagcgaagatagccaggcggaggccgaaggggtgtttgtgagcccgaacaagcctcgtacaacagaagacctcttcgcggtaattcaccgatctaagcgtaaggttctcggtcgtaaggactcaggggatatgtcagtgagaagcaagagtagggcccccctctcttcatcaagcagcagcgcgtcatctatcacctctccctcgtctaatgtaactacaccaaactcccagaggtcacccggcctaatctatcggaatgccaagaagtctaatacttcaaacgaagaattcaagctcctgctgctcaagaaagggtcaagatccgacagcagttataggatgagtgctactgagattctcaaatccccaatcttgcccaaaccacccggagagctgaccgctgagtcccctcagtccactgacgatgcgcaccagggatcccagggggccgaggcactaagccctctgtcgccctgtagccctagggttaacgccgaagggttcagttctaaatcctttgccacaagtgcatctgcccgggtggggcggtctcgcgccccccctgcagccagctcgagccgatattcagtgcgctgccggctgtacaacaccccaatgcaggctatcagcgagggtgagaccgagaactcagatgggagccctcatgatgacagatcctcacagtcttccacgtag

SEQ ID NO: 125819 - DNA, 4893 bp, synthetic construct
  misc_feature 1..4893: note = Description of Artificial Sequence: Synthetic coding sequence
  source 1..4893: mol_type = other DNA
atgccttttgccaaaaggattgtagaacctcagtggctgtgtcgtcagcgcagacccgctccaggtcctgcggtggacgcgagcggcgggtccgcagaacccccgccaccgctgcagccgcccggcagaagggacctggacgaagttgaggctcctggccctgaagaacccgccagagctgtgcccgcgccctcgggtctccctcccccccctcccccgcttcctgcacctgcagaccagacacagcccccgcacggtgaagcctccgtggccggagaggagagcaccgccgggataccagaggccgctccggcagctggagaggctagtagcgcagccgccgccgccgccgtgttgctgatgctggatctatgtgccgtttctaacgccgccctggcccgcgtactgcgacagcttagtgacgtagcacggcatgcgtgtagcttattccaggagcttgagagtgacatacagctgacgcaccgacgggtttgggccctgcaaggcaaattaggaggagtgcagcgtgtactcagtaccttggatccaaagcaggaagcagtcccagtgagtaatctggacattgaatcaaagctcagcgtgtactaccgggccccctggcaccagcaacggaacatttttctgccagctactagaccaccctgcgtggaagagctgcatagacacgcacgccagtccctccaggctcttcgcagagagcatcggtcacgcagtgatcgacgcgagcagcgggcagccgcgcctctgtccatagctgccccacccctgcccgcatacccccctgcacactcccaaaggaggagagaattcaaggacaggcactttctgacctcacatccccccgaggatgaggataccgatgtgatgttaggccagcgcccaaagaatcccatccacaatatccccagcacccttgataagcaaaccaattggtctaaggccctccccctcccgacaccggaggagaagatgaaacaggacgcccaggtcataagctcctgtatcattcctatcaacgttacaggagttggtttcgatagggaggcttcgataagatgtagccttgtgcattctcagtcggtcttacagcggaggaggaagcttcggcggagaaagacaatctcagggatccctcgacgggtgcagcaagagatcgactctgacgagtctccagtggcccgggaacgcaacgtaatcgttcataccaatcccgacccatctaatacagtgaatagaatcagcggtacgagagacagtgagtgccaaacggaagatatcctgatcgctgccccctcgaggcgaagaataagagctcagagaggccaatccattgcggcatctctttcccattcagcaggaaacattagcgctcttgcagataaaggcgacactatgttcacgcctgccgtgtcttccagaacgcgatctaggagtctgccccgggagggcaaccggggaggcgacgcagaaccaaaagtgggcgctaagccttcagcgtatgaagagggagagtcctttgtgggagatcacgaaagaactcccaatgacttttcggaggcgccaagcagtccaagcgctcaggaccaccagcctactcttggactcgcttgtagccaacaccttcatagcccacagcacaaacttagtgagagggggagaagcagactatctcggatggccgcggattcaggcagttgcgatatatctagcaattctgatacgtttggttctcctatccattgcatcagcaccgccggcgtgctcttgtcatctcacatggaccagaaagacgatcaccaaagctctagcgggaattggtccggctcttcttctacctgtcccagtcagacttctgaaaccatcccgccggcagcgagccccccattgacaggaagcagccattgcgacagcgaattatccctcaacaccgctccgcacgcaaacgaagatgcctccgtgtttgtcactgaacagtacaatgaccatcttgacaaagttagggggcacagggcaaactcgttcacatccacagtagccgacctgcttgacgaccctaacaattcaaacacaagtgattcggagtggaactatctccaccatcatcacgatgcctcttgtagacaggacttctcgcccgagcggcccaaggcagatagtttggggtgtcccagctttaccagcatggcgacgtacgattcatttcttgagaagtcgccttcagacaaagccgacacttcaagccacttcagcgtcgacaccgagggctactatactagcatgcatttcgattgcggcctgaaggggaacaaatcctacgtgtgtcactacgcagcactcggacctgaaaatgggcagggcgtgggcgcatcgcccggcctgcccgactgtgcatggcaggactatttggaccacaagagacagggaaggccaagcattagctttcgtaagccaaaggccaaaccaacacctcccaaacggtcttcttctctacggaagtcagatggcaacgctgatatcagcgaaaagaaggaacctaaaatatccagtggccagcacttacctcatagctcccgggaaatgaaactccctctggacttcgcgaacactccttctagaatggagaatgctaatctgccaactaaacaggagccatcctggatcaatcaaagcgaacagggcatcaaagaaccccagttagatgccagcgatattcccccttttaaagacgaagttgccgagtcgactcactatgccgacttgtggttgctcaacgatctcaaaacgaacgatccataccgttcactgagcaatagtagcacagccactggcacgactgtaatcgagtgcattaagtccccagagtcctcagagtcacaaacatctcagtctgagagccgggccaccactccttcgcttccatcggtagacaatgaatttaaattggctagcccagagaaactggcaggtctagcttcacctagcagcggctattccagtcagagcgaaacccctacaagctccttcccaacggcatttttctctggcccattgtctcctggagggagtaagcgcaagccgaaagtgcctgagagaaaaagcagcctgcagcagccctccttgaaggacggtactatcagtctgagtaaagatctggagttaccaattattcccccaacgcacctggatctcagcgcgctgcataatgtcctgaataaacctttccatcacaggcatcctttgcacgtgttcacacacaacaagcagaacaccgttggcgaaacgctgaggtctaaccctccccccagcctggccattactccgactatcctgaaatcggtcaatctgcggtctataaataagtccgaagaggttaaacagaaagaggaaaacaacacagacctgccatacttggaggagtcaactcttaccacagctgccttatctccctctaaaatacgcccacacaccgcaaacaaatcggtgtcgagacagtatagcacggaagacactatactctctttcttagactcatcagcagtcgagatgggacccgataagctgcatctggagaagaactccacatttgatgtcaagaatcgctgcgacccggaaacaatcaccagtgctggatctagtcttctggacagcaatgtcacaaaggatcaagtgcgcaccgagaccgagcccataccagagaacacacctaccaagaattgcgcatttccaacggaaggcttccagagagtttctgccgcgcggcctaatgatttggatgggaagataatccagtacggccctggtccagacgagaccctcgaacaggttcagaaggcacctagtgccggacttgaggaggttgcccagcctgaatcggtggatgtcataacatcgcaaagcgattcaccaaccagagccaccgatgtgagtaaccaattcaaacatcagttcgtgatgtctcgccaccacgacaaggtccccggcacaataagttatgagagtgaaatcacgagcgttaattcatttcctgaaaaatgtagcaagcaggagaacatcgcgagtggtatctccgccaagtcagcttctgataatagcaaggcggaggagactcaagggaacgtggatgaggcctctttgaaagagtcctctccgtcagacgactcaataatctctcctctttccgaggatagtcaggccgaagctgaaggggtctttgtaagtcctaataagccccgtacgacagaggacctgtttgcagtgattcatcgcagcaagaggaaagtcttagggagaaaagactcgggcgacatgtcggtgagaagcaaatcccgtgcccctctgtctagtagcagctcttctgctagctcaattaccagcccatctagcaatgtgaccaccccaaacagccaaaggagtcccggccttatctaccggaacgccaagaaaagcaacaccagcaacgaagaattcaagctgctgctgttgaaaaaaggaagccgcagtgactcaagttatcgtatgtccgcgacggaaatcttgaaaagcccaatcctccccaaaccgccaggggaactgaccgccgaatcccctcagtctaccgatgatgcccatcagggcagccagggagccgaggccctgagccctttgagtccatgcagtcctcgtgttaacgcagaggggttttcaagcaagagcttcgctacatctgcgtctgccagagtgggaagatccagagctcctcccgcagcgtcgtcctcccgatacagcgtgaggtgccgcctgtacaatacgcccatgcaggcgatttcagagggcgagaccgaaaactcagacggcagtccacacgacgataggagttctcagagctcaacctag

SEQ ID NO: 125820 - DNA, 4425 bp, synthetic construct
  misc_feature 1..4425: note = Description of Artificial Sequence: Synthetic coding sequence
  source 1..4425: mol_type = other DNA
atggccctggcgtgttgtatgcctaaaaacgccgccgtaagcaacctcgatattgagagcaaactgagcgtttactatcgcgccccatggcatcagcagaggaacatctttctccctgctacccgacccccttgcgttgaggaactgcaccggcatgccagacaaagcctgcaggctcttcggcgggagcatcgcagcaggtccgacaggcgcgagcagcgtgccgctgcccctctctccattgcggctcctcctctccccgcgtacccccctgcccatagccaacgccggagggaattcaaggacaggcattttcttacattcaattccacccggagtccatccccaaccgagtgttgtcacatgaccccatggtctcggaaatcccaccccccagaggatgaagacacggatgtgatgttgggtcaacgacccaagaatcccatccataatataccttctactctggacaaacagacgaattggagtaaagccctgccccttccgaccccagaggagaaaatgaagcaggatgctcaggtcatctcaagctgcataatccccattaacgtaactggcgtgggcttcgaccgagaggcaagcattcgttgctcccttgtccactcccagtccgtcctccagagacggaggaagctgcgaaggaggaagacaatctcagggattccgagacgagtccagcaggaaattgattctgatgaatctcctgtagcccgagagaggaatgtcattgtgcacaccaaccctgacccaagcaacacagtaaacagaattagcggaacgcgagattctgagtgccagaccgaggatatccttatagccgcgccttcacggcgccggatccgggcgcaaagaggtcagtccatcgcggcctcactgtcacatagcgccggtaacatctcagcgctcgccgataaaggcgatactatgttcacaccggctgtgtcctcgaggacacgaagtcgctccctcccacgagagggcaatcgggggggggacgccgagccaaaggtcggtgcaaagccatccgcttatgaggaaggcgaatcatttgtgggagatcatgaacggacacccaatgatttcagtgaggcccccagttctccgtccgcccaggaccatcagcctactctcgggcttgcctgttctcaacacctccactccccacaacacaagctatccgagagaggtcggagcagactgtccagaatggccgctgacagtgggagttgcgacatatcaagcaactctgacacgttcgggagtcccatccactgtatttctacggccggcgtcctcctgtccagtcatatggatcagaaggacgatcatcaatcttccagtgggaactggtccggatcctcttctacttgcccatcccaaacatccgaaactattccacctgccgcctctcctccgctgactggctcatctcattgcgacagtgagttgagcctgaatacagcccctcacgccaacgaggacgcatcagtgttcgtcacagaacagtacaatgatcacttagataaagtccgggggcaccgtgccaattctttcacaagcaccgtggccgatttattggatgacccaaacaattccaacacgtcagattccgagtggaactatctccatcaccaccatgacgcctcttgtcggcaggactttagccccgagcggccaaaagccgattctcttgggtgcccttcattcactagcatggcaacctatgatagtttcctcgagaagagtccttcagataaggccgatactagttcgcatttctccgtggatacggaaggctactatactagtatgcattttgactgtggattaaaaggaaacaaatcctacgtatgccattatgccgcactggggccagagaacgggcagggtgttggtgcttcacctggcctgcctgattgtgcttggcaagattacctcgaccacaaaagacagggtagaccctccatcagcttcagaaagccgaaagcaaagcccaccccccctaagcgtagtagctctctgaggaaatcagacggcaatgctgacataagcgagaagaaagaaccgaagatcagcagcgggcagcatctgccacacagttcacgagagatgaaactgcccttagacttcgccaacaccccttctcggatggagaatgccaatcttccaactaaacaggaaccatcttggataaatcagtccgagcagggaattaaggaaccacagctggatgcctccgacattccgcctttcaaggatgaggtggccgagagtacacactacgccgatctctggctgctcaatgacctgaaaaccaatgatccctaccggagcctgagcaacagcagtacagcgacgggtactaccgtgattgaatgtattaagagtcctgagtcaagtgaatctcagacgtctcagtccgagagcagggccacaaccccgtccttgcccagcgtggataacgagttcaaactagcttcacccgagaaattggcaggactcgcctccccatcctccgggtacagcagtcagtcggagacacccacatcctcctttcccaccgccttcttttccgggcctctgtcacccggtgggtccaagagaaagcccaaggtacccgagcgcaaaagctcattgcaacagccatcgctgaaagacggcacaatctcgttgtctaaagacctggaattgccaatcatcccaccaacccatcttgatctcagtgccctgcacaatgtacttaataaaccctttcaccatagacacccactgcatgttttcacccacaataagcagaatacagtcggggaaactttgcgatccaacccaccccccagcttggctatcacaccaacaattctcaagagtgtgaatcttaggtctatcaacaaatctgaagaggtgaaacagaaggaagaaaacaataccgacctgccttatttagaggaatctaccctgacaacagccgccctctcaccatcaaaaattagaccccacaccgcgaataagtctgtgtctagacagtactcgacagaggacaccatcctgtcctttttggactcctctgctgtagagatgggtccagacaagctccatctggaaaagaacagcacctttgacgtgaagaatagatgcgaccctgagaccataacctctgccggatcttcattactcgattcgaacgtgacaaaagaccaagtacgtaccgagacagagcccattcctgagaatacccctacaaaaaactgcgctttccccaccgagggatttcaacgcgtgtctgctgcacgccctaacgaccttgacggtaagattattcagtatggcccaggcccggatgaaactctggagcaggtacagaaggcaccttcggccgggctcgaggaggttgcccagcctgagagcgtggacgtgatcacctctcagtccgattctcctacacgagccaccgatgtgtctaaccaattcaaacatcagtttgtaatgagccgccaccacgacaaggtgccggggactatttcctacgaatcagagattacatcggtgaactctttccctgagaagtgttccaagcaggaaaatattgccagcggtatttctgctaagtcagcttctgataattctaaagccgaggaaacacagggaaatgttgatgaagcatcccttaaagagtcatctcccagcgacgacagcattatcagtccactcagcgaggattctcaggccgaggctgagggagtgtttgtatctcctaacaaaccaagaacgacggaagacctgtttgccgtaattcatcgctccaagcggaaagtgctggggcgtaaggactctggcgacatgtccgttcgatcaaaatcccgtgccccgctcagttcatcctcctctagtgcatcctctattacatcacccagttccaacgtgacaactcccaatagccagcgaagtccagggctgatctatcggaatgctaaaaagtccaacaccagcaacgaggagtttaaactgttgctcctcaaaaagggaagtagaagtgatagtagctaccgcatgtccgctaccgaaatccttaaaagccccatcctgcccaaacctccaggagagctcaccgcagaaagccctcagagtaccgatgatgcccaccagggctcacagggtgccgaggcactgtcccctttgagcccttgttcaccgcgagttaacgcagaaggattttcttccaaatcttttgccaccagcgcgagcgcaagggtgggacgctccagagctcctcccgccgcctcttcttcacggtacagcgtgcggtgccggctgtataacactcccatgcaggctatcagtgagggggagacagagaattcagacggcagccctcacgacgatcgcagttctcagtccagcacatag

SEQ ID NO: 125821 - DNA, 255 bp, synthetic construct
  misc_feature 1..255: note = Description of Artificial Sequence: Synthetic coding sequence
  source 1..255: mol_type = other DNA
cccgaactccaggtgtgcgtgttttgccgtaacaacaaggaagccatggccttgtatactacacatatactgaaggggcctgacggtcgggtcctgtgccctgtgttgcgccgatatacttgcccactgtgtggagcttcgggcgataacgcccacaccataaagtattgtcctctgtcaaaggtcccaccccctcctgccaggccccccccacgttccgctagagacggtccacctggtaaaaagcttagatag

SEQ ID NO: 125822 - DNA, 879 bp, synthetic construct
  misc_feature 1..879: note = Description of Artificial Sequence: Synthetic coding sequence
  source 1..879: mol_type = other DNA
atggaggctttcccttgggcccctcgtagtccccggcgggggcgggcgccccctcctatggcgctggtcccaagtgcaaggtatgttagcgccccaggtcccgcccacccacaaccgttcagctcatggaacgattatctcggtctggccaccttgatcacgaaggccgtggacggtgagccccgcttcggttgtgcgaggggcgggaatgggggcggcggcagccccccgagcagctctagttcttcctgctgtagcccgcacaccggagcaggccctggggccctcggacccgcccttgggccacctgactacgatgaggacgacgatgacgactccgacgaacccgggtcaagaggacgatatttggggagtgcattagaacttcgggccctcgagctatgtgcaggccccgccgaggccgggctcttggaggagcggttcgcagaactttctccttttgcgggaagagcagctgctgtcttgttaggctgtgctcctgccgcagccgccgccgccactaccacctccgaggccaccccaagggaagagcgagccccggcatgggcagctgagccgcgactgcacgcagcttcgggagctgccgccgcccggcttctgaaaccagagctgcaggtgtgtgtcttttgtcgtaataataaagaggcaatggctctgtacaccacccacattctgaaaggcccagatggaagggtgttgtgtccggtgctgcgccggtatacttgccccctctgtggcgcaagcggtgacaacgcccacacaataaagtactgcccgctgtcaaaggttcccccgccacccgcccgacctcctcctcgctccgcccgcgacggcccaccaggcaagaagcttagatag

SEQ ID NO: 125823 - DNA, 3456 bp, synthetic construct
  misc_feature 1..3456: note = Description of Artificial Sequence: Synthetic coding sequence
  source 1..3456: mol_type = other DNA
atgctcagacgcgtgaccgtggccgcggtgtgtgcaaccaggagaaaattatgtgaggccggccgggagctagctgcactttggggaatcgagactagggggcggtgcgaagactccgcagctgctcggcccttccctattcttgccatgccgggtcgcaataaggcgaagagcacttgttcctgtcctgaccttcaaccaaacggacaggatctcggtgagaactcaagagtagcgaggctgggggccgacgaaagcgaagaggaggggaggcgagggtctttgtctaatgctggtgaccccgagatagtgaagtctccatcagacccaaagcagtaccgatacattaaactccagaacggtctacaggccctcctgatctctgacctctccaatatggaagggaagacagggaacaccactgacgatgaggaggaggaagaggttgaggaggaagaagaggatgatgatgaggacagcggggcagagattgaggacgacgatgaggaaggcttcgacgatgaggacgagttcgatgatgaacacgatgacgacctagatacagaggacaacgaactcgaagagctggaggagcgggctgaggcccgaaaaaaaacgaccgaaaaacagagcgctgccgcactgtgcgtcggagtgggatcctttgccgaccccgatgacctcccaggactcgcccactttctcgagcatatggtattcatgggtagcctgaagtaccccgacgagaacggctttgacgctttcctcaaaaaacatgggggctcggacaatgcatctaccgactgcgaaagaactgtgtttcaattcgacgtgcagaggaaatacttcaaagaggcactcgacaggtgggcccagttcttcattcatccccttatgatacgagacgccatagatagggaggtggaagccgtggacagtgaataccagctggcccgcccatccgatgccaaccgaaaagaaatgctgtttggcagccttgccagaccggggcaccctatgggcaagtttttttggggcaacgccgagaccctgaagcacgagcctagaaagaataacatcgatactcacgcgcgccttcgcgagttctggatgagatattatagtagccattatatgacgttagtagttcaaagcaaagagacccttgatacccttgagaaatgggtgactgagatattttctcaaattccaaataacggcctgcccaggccaaattttggccacctgaccgacccgtttgataccccggcttttaacaagctgtacagagtagtacctatcagaaagatccatgcgctcaccataacctgggcactgcctcctcaacaacagcactatcgggtgaagccattgcattacattagctggctggttggccacgaaggcaaaggctccatactgagcttccttagaaaaaaatgctgggcactggcattgttcggcggaaatggcgagaccggctttgagcagaactcaacgtattcagttttttccattagcatcactttgactgacgaagggtatgagcatttctatgaggtcgcctacactgtgtttcagtacctgaaaatgctgcaaaagttaggcccagagaagaggatctttgaggagatccgaaagatagaggacaacgagttccactatcaggagcagaccgaccctgtggaatatgtggagaatatgtgcgaaaatatgcagctctatccactccaggacatccttacgggggaccagctcttgtttgagtataaacccgaagtgatcggggaagccctgaaccaactcgtcccccaaaaggctaatctcgtgttactcagtggcgcaaatgagggtaagtgcgatcttaaggaaaagtggtttggaacccagtacagcattgaagacattgagaacagctgggctgagctctggaatagcaattttgaattgaacccagatctccatcttcccgcggagaacaagtatattgccacggacttcaccttgaaagcctttgattgtcccgagacagagtatccagtaaagatagtgaacacgccacaaggctgtctttggtacaaaaaggataacaaatttaagatccctaaggcttacattcggttccatcttatttccccactgatccagaaatccgccgcaaacgtggtcctgtttgatattttcgtgaacattctcacccataacttggcagaacccgcgtatgaagctgatgtagcacaattagagtacaagttagttgcgggcgaacacgggctgattatcagagttaaagggtttaatcacaagctgcctcttctgttccagctgatcatcgactatcttgctgagtttaatagtactcccgcggtctttaccatgatcacagagcagctgaagaagacctacttcaacatactgattaagccggagacattggcaaaggatgtccgtctgctgattctggaatatgctcggtggagcatgattgacaagtatcaggctttgatggatggcctcagcctcgaatctctcctctcctttgtcaaagaattcaagagccagctttttgtggagggactcgtgcaggggaatgtaacaagcactgaaagtatggacttccttaagtatgtggtcgataaattgaattttaagccactcgagcaagagatgcctgtccagtttcaagtggtcgaactccctagcgggcaccatctttgcaaggtcaaggctctgaataaaggcgacgccaactcagaagtaactgtgtactaccagtccgggacaaggagtttgcgcgagtacactcttatggagcttctggtaatgcatatggaagagccatgcttcgattttctgcgcactaaacaaacactggggtaccatgtgtacccaacctgcaggaacacctccgggattttggggttttctgttaccgtaggtacccaggcgaccaaatacaactcagaagtagtggacaaaaagattgaggaattcttgagttccttcgaagaaaaaattgagaacttgacagaagaggcctttaatactcaggtgaccgcacttatcaaattgaaagagtgtgaggatacacacctgggcgaggaggtggatcgcaactggaacgaggtggttacccagcaatatctgttcgacaggctagcccatgaaattgaagcactgaagagcttctccaaaagtgacctcgtcaactggttcaaggcccacaggggccccgggtctaaaatgctatcggtgcatgtcgtggggtacggaaaatacgagctagaggaagacggtacccccagcagtgaagactcaaatagcagttgtgaagtaatgcagctgacatatcttcccaccagcccgttattggctgattgcatcatacctatcactgacattagagccttcactacgactttgaatttgttaccctatcataaaatcgtgaaatag

SEQ ID NO: 125824 - DNA, 3660 bp, synthetic construct
  misc_feature 1..3660: note = Description of Artificial Sequence: Synthetic coding sequence
  source 1..3660: mol_type = other DNA
atgttgcgccgagtgaccgtggccgcagtatgtgcaacccgaaggaagctctgcgaggctgggcgggaactggccgcactgtggggaatagaaacccgaggcagatgtgaggactctgcagccgccagacccttccctattctggccatgccggggcggaacaaagctaaaagtacctgttcctgcccggatctccagcccaacggccaagacttaggtgaaaatagtagggtggccagactgggggcagacgaatctgaggaagagggacgacgcggatccctatcaaacgctggggatcccgagatcgtgaaatcaccctctgacccaaagcagtataggtatatcaagctgcagaacggattacaagctctgctgatttctgatctgtctaatatggagggaaaaactggcaatactaccgacgatgaagaggaagaggaggtagaggaggaggaggaagacgatgatgaggactcaggcgcggagattgaggatgacgacgaggaggggtttgatgacgaagatgagttcgacgacgaacatgatgacgacttggataccgaagataacgagcttgaagaactggaggagcgagccgaggcacggaagaaaactacagagaagcagcaacttcaatcactctttctgctgtggagtaagctcactgaccgcctgtggtttaagtccacctacagtaagatgagcagcacactgctggtcgagacccggaacctctacggggtggtgggggcagaaagtcgttcagcgcccgtgcagcacctcgcgggatggcaggccgaggagcagcagggcgagacagataccgtccttagtgctgccgccctgtgcgtgggggtcgggagctttgcggatccggacgacctgcccggcctggcccatttcctcgagcacatggtgttcatgggctcattaaagtaccccgacgagaatggcttcgacgcctttctcaagaaacacggcgggtctgacaacgccagcacagactgtgagcggaccgtctttcagttcgacgttcaacggaagtacttcaaagaggccctggaccggtgggctcagttttttattcacccccttatgataagagatgcgattgacagagaggttgaggccgtagacagcgagtaccagctagccagacccagtgacgccaaccgaaaggaaatgctgttcgggtcgctggcaagacccgggcaccctatgggaaagtttttttgggggaatgcggaaaccctgaagcacgagccacgcaagaataacattgatactcacgcccggttgagggagttctggatgagatactactccagccactacatgactctcgtggtacagtccaaggagacgctggatacactggagaagtgggttacagaaatatttagtcagatcccaaacaacggactcccaaggcctaatttcgggcatttgacagatcccttcgatactcctgccttcaataaactgtacagggtggtgcctatcaggaaaattcacgctctgaccattacctgggccctgccaccccaacagcagcactaccgagtgaagcccctgcattacatttcttggctggtgggtcacgaaggaaaaggctcgatcttgagctttttgagaaagaagtgttgggctctggccttatttggcggtaatggagagactggtttcgagcagaactctacctacagcgtatttagtattagtatcacactcacggatgaaggatacgaacacttctatgaggtggcttataccgtatttcagtatctgaagatgctccagaagctgggaccagagaagcggatctttgaggagattcgcaaaattgaagataacgaattccactatcaagagcagacagatcccgttgagtacgtggaaaatatgtgcgagaacatgcaactgtacccccttcaggatatcctgaccggcgatcagttgctatttgagtataagcccgaagtgatcggcgaagctttgaaccagttggtgccccagaaggcgaatctagtgctcctttcaggcgctaacgaaggtaagtgtgatctgaaagagaagtggtttgggacacagtacagcatagaagatatagagaactcctgggctgaactgtggaattcaaacttcgagctaaatcccgacttacatctgcccgccgaaaacaagtacatagccaccgactttactctgaaggcctttgactgccctgagaccgagtaccccgtgaaaattgtcaacactccacagggctgtctatggtacaagaaagataacaagtttaagattcctaaagcctacattcgcttccacctgatctctcccctgattcaaaaatctgcagctaacgtggtgttgttcgatatctttgtcaacatcctgacacataatttggccgaacccgcgtatgaggccgacgttgcccaactggaatataaacttgtcgcaggtgagcatgggctgattatccgggtcaaaggttttaatcataaattgccacttctgttccagctgatcatcgattacttagcggagttcaattcaacacccgctgtcttcaccatgatcacggagcagctgaaaaaaacgtatttcaacattctgattaaacctgaaacactagctaaggatgttcgtctgttgatactcgagtatgcccggtggtcaatgattgacaagtaccaggcacttatggacggcctctcactggagtcattactgagttttgtgaaggagttcaagtcacagctttttgtggaggggctggtccagggaaacgtgacgagcactgaaagcatggactttctcaaatatgtcgtggacaagctcaattttaagcctcttgagcaagagatgcccgtacagtttcaagtagtagagctcccgtccggccatcatctttgcaaagtcaaggctctcaacaagggagacgccaattccgaggtgactgtctattaccaaagcggcactcgcagccttcgggagtacacgctcatggagctgttagttatgcacatggaggaaccctgtttcgatttcttgagaactaaacaaaccctagggtatcatgtgtaccctacctgtaggaacacgagcggaatattggggttctccgtcaccgtaggcactcaggcaaccaagtacaactctgaagtggtggacaaaaaaatcgaggaatttctgtcatcgttcgaggagaagatcgagaacctgaccgaggaagcatttaatactcaagtgactgccctcatcaaactcaaagaatgtgaagatacgcatcttggcgaagaggtagacaggaattggaacgaggtggtgacccagcagtacctgttcgataggctggcccacgaaatagaagccctgaaatcctttagcaagtccgatttagtgaactggttcaaggcacacagaggccccggctctaagatgctgagtgttcacgtcgtgggatatggaaagtacgaacttgaggaagacgggaccccctcctctgaggattccaactcatcctgtgaggtgatgcagctgacatacttacccacgtcccctctcttagccgactgcatcatccccatcacagacatccgagcatttacaacaaccttgaacttactcccctatcacaagatcgttaaatag

SEQ ID NO: 125825 - DNA, 1662 bp, synthetic construct
  misc_feature 1..1662: note = Description of Artificial Sequence: Synthetic coding sequence
  source 1..1662: mol_type = other DNA
atgttgcaaaaactaggacctgagaaacggatattcgaagagatcagaaaaatcgaggacaacgagtttcactatcaggagcagacagacccagtagagtacgtggagaatatgtgtgagaacatgcagctttaccctctccaggacatcttaaccggcgatcaactcctatttgaatacaagcctgaggttatcggggaagcactgaaccaacttgtgccacagaaagccaacctggtgctgctctctggagccaatgagggcaaatgtgatctcaaggagaaatggtttggcactcagtattccatagaagatatagagaactcatgggccgagctgtggaattcaaattttgagctgaatcctgatctgcatctccctgcagaaaacaagtacatcgcttacatccgttttcacctgatctctcccttaatccaaaagtccgccgctaacgtggttctgttcgatattttcgtaaatatcttgacacataacctcgcggagcctgcgtacgaggcagatgtggcccaactcgaatacaaactggtggccggggagcacggtttgataattagagttaaggggttcaatcataagctgccactcctgttccagctaatcatcgattatctggccgaattcaatagcaccccggctgtgtttacaatgataacagagcagcttaaaaaaacgtacttcaatattctgatcaagcctgagactttggctaaggacgtacgcttactgatcctggaatacgccaggtggagcatgatcgataagtatcaagccttgatggacggtctgagtctggagtcactgctgtcttttgtgaaggaatttaaatcgcagctgtttgtggaggggctggtgcaggggaacgttacctctaccgagagtatggacttcctgaagtacgtggttgacaaactcaacttcaaacccttagagcaggagatgccagtgcaatttcaagtggtcgaattaccctccggtcatcatctgtgcaaagttaaagcactgaataagggcgatgccaattctgaggtgactgtctattaccagtcggggactagatccctgcgcgaatatacccttatggaactgctggtgatgcacatggaggaaccgtgtttcgatttcctgagaacgaagcagactctggggagcgaggtggtggacaagaaaatcgaggagtttctaagctcatttgaagagaagatcgagaacctcaccgaggaagctttcaacactcaagtgacagcccttattaagctgaaagaatgcgaggatacccatcttggggaagaggtagaccgcaattggaacgaggttgtgacacagcaatacctcttcgaccgactagcgcacgaaattgaagccttgaagagcttctccaagtctgatctggtaaactggtttaaggctcaccgcggacccggctctaaaatgctgtccgtccatgttgtcggttacggtaagtacgagctcgaggaagatggcaccccctcctccgaggactctaattcttcctgtgaggtgatgcagctcacctatctcccaacgagtcccctgctcgccgactgcatcatccctatcactgatattcgagctttcaccacaactctaaatcttcttccttatcacaagatcgtaaaatag

SEQ ID NO: 125826 - DNA, 1617 bp, synthetic construct
  misc_feature 1..1617: note = Description of Artificial Sequence: Synthetic coding sequence
  source 1..1617: mol_type = other DNA
tagaagattgaagataatgagtttcactaccaggagcagactgatccagttgagtatgtcgaaaatatgtgcgaaaacatgcagctgtaccccttgcaggacatccttactggggaccagctgctctttgagtataaaccagaggtcatcggcgaagctcttaatcagttggtgccccagaaagccaacctggtgctactttcaggcgcaaatgaaggaaaatgtgacctcaaagagaaatggttcgggacccagtatagcatcgaagacatcgagaatagttgggcagagttatggaatagtaacttcgagctaaaccccgatctgcatcttccggccgaaaataagtatattgcttacataaggtttcatctaatctctccgctgattcagaagtctgctgcaaacgtggtgctgtttgatatatttgtgaacatactcacccacaacctcgctgagccagcatacgaggccgacgtcgcacagcttgaatacaaacttgtggctggtgagcatggactcatcattcgggtgaagggctttaaccacaagctgccgcttctgttccaacttattatcgactacctagcagagttcaatagcacccccgctgtgttcacaatgatcacagaacagctgaaaaagacttactttaatatcttaattaagccagagacattggctaaagacgtacgcttgctaattctggagtatgcccgctggagcatgattgacaagtaccaggctctgatggatggcctgtcgctggaaagtctgctgtcatttgtcaaggagttcaagagccaactgttcgttgagggattggtgcaggggaacgtgacatccacagaatccatggattttttaaagtacgtggtagataagctcaactttaaacctctcgaacaagaaatgcccgttcagttccaggttgttgaactgccaagcgggcatcatctctgtaaggtgaaggcccttaataaaggagacgctaattccgaagtgaccgtatactaccaatccggcacccgctcactgcgggaatacaccctgatggaactgttggtgatgcacatggaagaaccgtgttttgacttccttaggaccaagcagacactgggtagcgaagtcgtggacaagaagatagaggagttcctgtcatcctttgaagagaaaattgagaatctcactgaggaggcattcaatactcaggtaacagctctgatcaagctgaaggaatgtgaagatactcacttgggagaggaagtggaccgcaattggaatgaagttgtgacccagcaatatcttttcgacagattggctcatgagatcgaagcactcaaaagtttcagcaaaagcgatcttgtgaattggttcaaagcccacagaggcccagggagcaaaatgctctcagtgcacgtagtgggctatgggaagtatgaactggaagaagacggcaccccctcgtccgaggattctaactcttcctgcgaggtcatgcagcttacgtacctccccactagccctctgctcgccgactgcattatcccaattactgacattcgagccttcaccacaacactgaacttgctcccttatcataagatagtcaagtag

SEQ ID NO: 125827 - DNA, 3264 bp, synthetic construct
  misc_feature 1..3264: note = Description of Artificial Sequence: Synthetic coding sequence
  source 1..3264: mol_type = other DNA
atggaaggaaagacaggcaatactactgacgacgaggaggaagaggaagtcgaggaagaggaagaggatgatgacgaggacagcggggccgaaattgaagacgatgacgaagaggggttcgacgacgaagatgagtttgacgatgagcacgatgacgatcttgataccgaagacaacgaattggaagaactcgaggagcgcgcagaagcccgcaagaagacaacagaaaaacaacagctgcagagtctgttcttgctgtggagcaaacttactgacagattgtggttcaagtccacctattctaaaatgagctcaacactcctagttgaaactcgcaatctgtatggcgtcgtcggcgcggagtctagatccgcacctgtgcagcacctggctggctggcaggcggaggaacagcagggagagacggacactgtgctgagcgctgccgctctctgtgttggagtcggcagttttgctgacccagacgatttaccagggttggcacacttccttgaacacatggtcttcatgggttcattaaagtatcccgatgaaaatggatttgacgccttcctgaagaagcacggtggcagcgacaatgccagcaccgactgtgagcgcactgtctttcagttcgatgtgcaaaggaaatatttcaaagaagcactcgatagatgggctcagttctttatccaccccctgatgatcagggatgctatagaccgcgaggtggaggctgtcgatagcgagtaccaactagcccggccctcagatgcgaatcggaaggagatgctattcgggtccctggctagaccaggacacccgatgggaaagtttttctggggaaacgcggaaaccctgaaacacgaaccacggaagaacaatatcgacacacatgctcgattaagagaattttggatgaggtactactcttcccattatatgacgctcgttgtgcagtctaaggaaaccctggacactcttgagaagtgggtgacagaaattttcagccaaattccaaacaacggactaccacggcccaactttgggcatctgaccgaccccttcgacaccccagcttttaataaactctatcgggtggtgcccattaggaaaattcacgctcttactatcacttgggctctgcctcctcagcaacaacattaccgcgtgaagccccttcattacatttcctggttggtcggtcacgaggggaaaggatctatcctgtccttcctgcgcaagaagtgctgggcccttgcgttgtttggcggtaatggcgagacaggctttgagcagaattcgacctacagtgtgtttagtatatctataaccctgactgacgagggatacgaacatttctacgaggttgcttacaccgtgttccagtacctgaaaatgctgcagaagctgggacccgagaagagaatttttgaggagattaggaagatcgaagacaatgaatttcactatcaggagcagaccgaccctgttgaatacgtcgagaatatgtgcgagaacatgcagctttaccccctgcaggatatcctcactggagaccaactcttgtttgaatataagcccgaggtgatcggagaagccttgaatcagctggtcccccagaaggcaaatcttgtattgctgtcaggagccaatgaaggtaagtgcgatctcaaagagaaatggtttggtacacagtattcaatcgaggatattgagaacagctgggctgaactgtggaactcaaacttcgaactaaacccggatctgcacctgccagctgaaaacaagtatatcgcaacggattttaccctgaaagctttcgattgtccagaaactgaatacccagttaaaatcgtgaatacccctcaggggtgcctgtggtacaagaaggataataagttcaagatccccaaggcttacattcgctttcatctgattagtcctttgatacagaaaagtgccgcaaatgtggtattgtttgacatctttgtgaacatcctgactcacaacctggctgagcccgcgtatgaggctgacgttgcacagctggagtacaagctcgtggcgggtgaacacggactgattatcagagttaagggcttcaatcataagctaccgctgctattccaactgatcatcgactacctcgcggagtttaacagcacgccagcagtattcaccatgatcacagaacagctcaaaaaaacctattttaacatcctaatcaagcccgagaccctggccaaggacgtgagactgcttatccttgaatacgctcgctggtccatgattgacaagtatcaggccctgatggatggcctcagcctggaaagcctcttgagctttgttaaagagttcaagtcgcaactgttcgtcgaaggactagtacaggggaacgtgaccagcacggagagcatggactttttaaaatatgtggtcgacaagctcaattttaagcctttggaacaggagatgcccgtgcaattccaagtggttgagctgccatcaggacaccacctctgcaaggtcaaggcgcttaacaaaggggatgctaattctgaagtgacagtgtactatcagagcgggacaaggagcctcagagagtacacacttatggaactgttggttatgcacatggaagaaccctgcttcgactttcttaggaccaagcaaactctggggtaccacgtctaccccacttgccgaaatacgagcggcattctcggcttcagcgtgaccgtgggcactcaggcaaccaagtataacagcgaggtggttgacaagaaaattgaggagttcctcagttcgttcgaagagaagatcgaaaatctcaccgaagaagccttcaatactcaagtaacagccctgattaaactcaaagaatgtgaagatactcacttgggggaggaagtggatagaaattggaacgaggtcgtcacccagcaatatctgttcgaccggctcgcccatgaaattgaagccctaaagagcttctccaaatcagacctggtgaactggtttaaagcacacagggggccaggtagtaaaatgctgagcgtccacgtagtggggtatgggaagtacgaattggaagaagatggtacccctagcagcgaggactcaaacagcagttgcgaggtgatgcagctcacttacctccccacgagtcccctcctcgcagactgcatcatccccatcacggatattcgggccttcactactacactgaacttactgccctatcacaagattgtgaaatag

SEQ ID NO: 125828 - DNA, 2244 bp, synthetic construct
  misc_feature 1..2244: note = Description of Artificial Sequence: Synthetic coding sequence
  source 1..2244: mol_type = other DNA
atggaaggaaaaaccggaaacaccactgatgacgaggaagaggaggaggtagaagaagaggaggaggatgacgatgaggacagcggggcagagatagaggatgatgatgaagaaggctttgatgacgaagatgagtttgacgacgagcatgacgacgacttggacacagaggataacgaattggaagagctagaggagcgggccgaggcaaggaaaaagacaaccgagaaacagagtgccgctgccttgtgcgtcggcgtaggctcgttcgcagacccagacgacctgcccggcctagcccacttcctggagcacatggtgtttatgggcagcttaaaatacccagacgagaatgggttcgatgcgttcctgaaaaagcatggcggcagtgacaacgcaagtaccgactgtgaacgtacggtcttccaatttgacgtgcagcgcaaatattttaaggaagctctagacagatgggcacaatttttcattcaccccttgatgattagagatgccattgatagagaggtcgaagcggtggattccgagtaccagctagcgagacctagcgatgccaacagaaaggagatgctgttcggatcactggcaagaccagggcatcccatgggaaagttcttttgggggaacgccgagactttgaagcacgaaccccgaaagaacaatatcgatacgcacgcacgtctgcgcgagttttggatgagatattatagctcacactacatgaccctggtggtacagagtaaagagacactggacacgcttgagaagtgggtgaccgaaatattctcacagatccctaacaacgggcttccaaggccaaacttcggtcacctgactgacccgtttgatacaccagcgtttaacaagctgtatcgagtagtaccaatccggaaaattcatgctttaaccatcacctgggcgttgcctcctcagcagcagcactacagagtgaaacccctgcactacatttcgtggttagtgggacacgaaggtaaaggcagcattctgtccttcctacgaaaaaaatgctgggctcttgccttattcggaggcaacggagagaccggcttcgagcaaaattccacctacagcgtattttctatatccattacgctaactgacgaggggtatgagcatttctatgaagtagcctacactgtgtttcagtacttaaagatgcttcaaaagttggggccagagaaaagaatctttgaagaaatacgcaagattgaggacaatgagtttcattatcaggagcagacagatcccgtggagtacgtggaaaatatgtgtgaaaacatgcagctttaccccttgcaggatatattaaccggcgaccaactgctgtttgagtataaaccagaggttataggcgaggctctgaatcagctggtgcctcaaaaggccaatctggtgctactgtccggagcaaacgaagggaaatgtgatctgaaggagaagtggtttgggactcaatacagtatcgaggacattgagaactcttgggcagaactttggaatagcaacttcgagctgaatccagacctgcatctgccagctgagaataaatacatcgccaccgattttacacttaaagcgttcgactgtcctgaaaccgaatacccagtgaaaattgtcaacacaccgcaaggttgcctctggtacaagaaagacaataaattcaagatccctaaagcatacatcaggttccatctgattagcccactgattcagaaatccgcagccaatgtagtgctgtttgatatttttgtgaatattctcacccacaatttggctgagccagcttacgaggccgatgtcgcacagctggaatataaactggttgccggtgagcatggcctcatcattagagtgaaggggtttaatcacaaactccccctcctgtttcagctcatcatcgattacctggcagagtttaattccaccccggccgtgtttacaatgatcacagagcagctgaagaaaacatacttcaacatattgatcaagccggagactctagcaaaggacgtgagactcctgatcttagagtatgcccgctggtccatgatcgataagtatcaagccttaatggacggcctgtcactagagagtctgttgtctttcgtcaaggagttcaaatcacagcttttcgtggaaggtctcgtgcaaggaaacgtgacaagtacggtgctgtgtcaatgggctcaagactccgaaacatag

SEQ ID NO: 125829 - DNA, 3447 bp, synthetic construct
  misc_feature 1..3447: note = Description of Artificial Sequence: Synthetic coding sequence
  source 1..3447: mol_type = other DNA
atgcttcggagagtgacagttgccgccgtgtgtgccacccggagaaagctgtgtgaagccgggcgagagctggccgccctgtggggcatcgaaacacggggtcggtgcgaagacagcgcagcagcccgtcccttcccaattctagccatgcccggtcggaataaagccaagagcacgtgtagctgtcctgacttacaaccgaacgggcaggatttaggggagaactcaagggtggcaagactgggagccgatgaaagcgaggaggaaggacgtagaggtagcctttctaacgcaggggatcccgaaatagttaagtccccctccgaccctaagcagtaccgctacatcaaactccagaatggactgcaggccttactaattagtgatctaagcaatatggaggggaaaactggaaatactaccgacgacgaagaagaagaagaagtggaagaagaagaagaggacgatgatgaagattctggcgccgaaatagaagacgacgatgaagagggctttgatgatgaagatgagtttgatgatgaacacgacgatgacctggatactgaggataacgaactggaagagctggaggaaagggccgaggcgcgaaaaaagaccacagaaaagcagagcgcagccgcactgtgcgtcggagttggatctttcgcagatcccgatgacctgccggggctggctcactttctggaacatatggtttttatgggctcactgaaatacccggatgagaatgggttcgacgcttttctcaagaagcatggcgggtctgacaacgcttccacagactgcgaaaggactgtgttccagtttgatgtccaaaggaagtacttcaaagaagcattggaccgatgggctcagtttttcattcaccctctgatgatcagggacgctattgacagagaagtggaggccgttgatagtgagtatcagctcgcgagaccctccgatgccaaccgaaaggaaatgctgttcgggtcccttgccaggccaggccaccccatgggaaagttcttctggggcaacgcggagaccctgaagcatgaacccaggaagaataatattgatacccacgcaaggctgcgggagttttggatgcgctactactcttctcattatatgacactggtggtccaaagcaaagaaactctagacaccttagaaaaatgggtgaccgagatcttttctcagattcccaacaacggattgccaagacctaactttggacatctaaccgatcccttcgacacccctgccttcaataagttgtaccgcgtcgttcccatcaggaagatccatgcactgactattacttgggccctccccccacagcagcagcactaccgcgttaaaccattgcattacatcagttggcttgttgggcatgaagggaaaggaagcattctgtccttccttagaaaaaaatgctgggctctcgcgttatttggagggaatggcgaaacaggatttgaacaaaattcaacctactcagtattcagcattagcattaccctgacagacgaagggtatgaacacttctatgaggtggcttacacagtctttcagtatctgaaaatgctgcagaagctgggccctgaaaaacgtatctttgaggaaattcggaagatcgaagacaacgagttccattatcaagagcagactgaccctgtagagtatgtcgagaacatgtgcgagaatatgcagctttaccccctgcaagacatcctgaccggggaccaactgctgtttgaatataagccagaagtgatcggagaggccctgaatcagcttgttccccagaaggccaatctggtgctgctctcaggtgcaaatgaaggcaagtgcgaccttaaagagaagtggttcggcacccagtatagcatagaagacattgaaaatagctgggctgagctgtggaatagcaatttcgagcttaatcccgacctccatcttcctgccgagaacaagtatatcgcgaccgactttaccttaaaggcatttgactgccctgagaccgagtaccctgtgaagattgttaataccccacagggttgcctgtggtacaagaaagacaataagtttaagatccccaaagcgtatattcgcttccacctcatttccccccttattcagaaatccgccgccaacgtcgtgctgttcgacatctttgtcaatatcttaacacacaacctggctgagcctgcttacgaagccgacgtcgcccagttggagtataagctggtcgctggtgagcacggactcatcattcgggtgaagggttttaatcacaagctacccctgctttttcagctaattattgattacctcgctgaattcaacagtacccctgccgtgttcaccatgataacagagcaactgaaaaagacgtattttaacatccttataaaacctgaaacattggccaaagatgtgagacttctcatccttgaatacgctaggtggtcaatgattgataagtaccaggccctcatggacggactctccctggagtcactcctgtctttcgtcaaggagtttaagtcccagctgtttgtggaaggcttggttcaggggaacgtgactagcaccgagagcatggattttctgaagtacgtcgtggacaagcttaatttcaagccgctggaacaggagatgcctgtccagttccaagtggtggaactgccatccggccaccacctttgcaaagttaaagcactcaacaaaggggatgccaactccgaggttaccgtctattaccagtctggaaccaggtcattacgcgagtataccttgatggagctcttagttatgcatatggaggagccttgctttgactttctgagaacaaaacagaccctgggatatcacgtgtacccgacttgtaggaacaccagcggcatcttagggtttagtgtgactgttggtactcaagctacaaaatacaatagtgaggttgtggacaaaaaaatcgaggaattcctctctagtttcgaggagaaaatagagaatctgactgaagaagctttcaacacacaggttactgccctgatcaagctgaaagaatgcgaggacacacacctcggagaagaggtggaccgcaactggaatgaagtcgtcacgcaacaatacctgttcgaccgtctagcccacgaaatcgaggcgcttaagtctttcagcaagtcagatctggtgaactggtttaaagcccacagaggaccaggaagcaaaatgttgtcagtgcacgtggttggatatgggaaatacgagctggaggaagacgggacaccttccagcgaggactccaattctagctgcgaggttatgcaactgacctacctgcctaccagccccctgctggccatcgttagttctcctctgctgattagtggtcttagccaacagcatagcacttttagtcccaccatcaagtag

SEQ ID NO: 125830 - DNA, 1587 bp, synthetic construct
  misc_feature 1..1587: note = Description of Artificial Sequence: Synthetic coding sequence
  source 1..1587: mol_type = other DNA
atgggcgctgccgcgtcccggcgacgtgctttgagaagcgaggctatgtcaagtgtggctgctaaggtgcgggccgccagggccttcggcgagtatcttagccagagtcatcccgagaatagaaacggtgctgatcacctccttgcagatgcatactcaggacatgacggtagccccgagatgcagcccgccccccagaataagcggcggcttagtctcgtgtccaatggatgttacgaggggagtcttagcgaggagccatcaattagaaagcctgccggcgagggtccacagcctcgggtttatacaatatccggagagccggccttgctgccatcccctgaagccgaggccatcgagctggcagtggtgaagggaagacggcagcgccatccccatcatcattcacagccactgagggcgagcccggggggtagtcgggaggatgttagtcggccctgccaatcctgggccggatcacggcaggggtcaaaagaatgcccgggctgcgcacagctggctcctggccccacaccaagagcgttcggccttgaccagcccccactgccggaaacgtcgggcagacgcaagaagctagagaggatgtactctgttgaccgcgtgtcggacgacatcccgatccgcacatggttccccaaggaaaatttgtttagctttcaaacagcaacgactaccatgcaggccgtttttcggggatatgctgagcgcaaacgtcggaaacgcgagaacgacagtgcgtctgtcattcagcggaactttaggaaacacttgaggatggttggaagtcggcgagtcaaggcacagacctttgcagagagacgcgaacgatcattctcacgaagctggagtgacccaacccctatgaaagccgacacatctcatgactcaagggattcttccgacctgcagtcctcacactgcactctggacgaggctttcgaggacctggattgggacacggagaaaggtctcgaggcagtggcttgtgacactgaaggttttgtccctcccaaagttatgctgatcagttcaaaggtacccaaagcggaatacatacctacaattatcagacgggacgatcccagcatcatacccatcctgtatgatcacgaacatgctacctttgaggatatcttggaggagatcgagcgaaagctgaacgtgtatcataaaggcgccaaaatctggaaaatgctgattttttgccagggcgggcctggtcacctctatttgctcaagaataaggtcgctactttcgccaaggtcgaaaaagaagaagatatgatccatttttggaagcgactaagtcggttgatgtcaaaagtgaatcccgagcctaacgtgattcacattatgggctgctatatcttgggcaaccccaatggtgagaagctgtttcagaaccttaggaccttgatgaccccctatcgcgtcacatttgagtcaccgctggagctttctgcccagggtaagcagatgatcgagacctactttgacttcaggttgtatcgtctctggaaatcgaggcagcatagcaaactcctggattttgacgacgtgttatag

SEQ ID NO: 125831 - DNA, 984 bp, synthetic construct
  misc_feature 1..984: note = Description of Artificial Sequence: Synthetic coding sequence
  source 1..984: mol_type = other DNA
atgtactctgtcgacagagtgtcagatgacatacccatacggacctggtttcccaaagagaacctcttctccttccagaccgcaaccactactatgcaagcagttttcaggggatacgcagagcggaaacgtaggaaaagggagaacgacagcgcatccgtcatccagcgaaactttcgaaagcatctgcggatggtagggagccgccgtgtgaaggcacagaccttcgccgaaaggagggaaagatctttttcccggtcgtggtctgatcccacaccaatgaaggctgacacgtcccacgatagcagggactcaagcgacctgcagtccagccattgtacactcgacgaagcttttgaggatcttgattgggacacggagaagggattggaagcagtcgcctgcgacacagagggattcgtcccacccaaggtaatgctgataagctccaaggttcctaaggcagaatacatcccaacgatcatcaggcgagacgacccaagcattatcccgattctttacgaccacgagcacgcaacgtttgaggacattttggaggagatcgaacgaaaactgaatgtttaccacaaaggtgccaagatttggaagatgctgattttctgtcagggcgggccaggacacctgtacctgcttaagaacaaggtggcgacattcgccaaggtagagaaggaggaagatatgatccatttctggaagagactttcaagacttatgtcaaaagtcaaccctgaaccaaacgtgattcacattatggggtgttatatcctcgggaacccaaatggggagaagttatttcaaaatctgcgcactcttatgacgccttacagggtgactttcgagtcacctctggagctctccgctcaaggtaagcagatgatcgaaacgtacttcgattttcgcctttacaggctgtggaagagcaggcagcacagtaagctgttggactttgatgatgtcctatag

SEQ ID NO: 125832 - DNA, 438 bp, synthetic construct
  misc_feature 1..438: note = Description of Artificial Sequence: Synthetic coding sequence
  source 1..438: mol_type = other DNA
atggtgggatctagaagggtaaaagcccagacgttcgcagagcggagagaaaggagcttcagtagaagttggtctgatccaacgcccatgaaagccgacacttcgcatgatagcagggattcttccgatctgcagagcagccactgtaccttagacgaggctttcgaagatctcgattgggacactgagaagggcttagaggcagtggcttgtgataccgagggcttcgtgccaccgaaagttatgctgatttcttctaaagtgccaaaagccgagtatatcccaactatcatccggagggacgatcccagcataatccccattttatatgtttcccctgcccccggccttccacccaccgatgccctactacggccccaccctgggcctgcacctgccccacaggtcccaagggtgctatggcgatgctggctttag

SEQ ID NO: 125833 - DNA, 1587 bp, synthetic construct
  misc_feature 1..1587: note = Description of Artificial Sequence: Synthetic coding sequence
  source 1..1587: mol_type = other DNA
atgggagccgctgctagtcggcgtcgtgctctgcgcagtgaggccatgtccagtgtggccgccaaagtgcgcgctgctcgcgcctttggcgagtatttgtcccagtctcatcccgagaatcggaatggtgccgatcatttgttagccgacgcctacagcggtcatgatggaagccctgagatgcagcctgccccacaaaataagagaagacttagcctcgtttcaaatgggtgctatgagggatccctgagcgaggaaccgtccattaggaaaccagctggagaaggcccccagcctagggtgtacactatttccggcgaaccagccctcctgcctagccctgaggcggaggccattgagctggctgtggtgaaaggacgtcgccaacggcacccccatcaccatagccaaccgttaagggccagccctggcggctctagagaggacgtgtcccggccttgtcagagctgggcaggatcacgccagggttctaaggaatgcccgggatgcgcacaactcgcacctggaccaaccccacgcgccttcggcctggatcagccacccctgcccgagacgtccggtcgtcggaaaaagttggagaggatgtatagtgttgatagagttagtgacgatattccaattcgcacctggtttcccaaagagaatctgtttagttttcaaaccgctactacgactatgcaggccgtctttcggggttatgctgagagaaaaaggcgaaagcgggagaacgattctgcttcagtgatccagcggaatttcagaaaacacctgagaatggtaggttcaaggcgggttaaggcgcagacattcgccgaacgacgggagaggtctttctctaggagttggagcgatccaacccccatgaaggctgatacgagtcacgactcccgagacagttctgaccttcagtcaagccactgcacattggatgaagcttttgaggatctggattgggacacagagaagggcctggaagcggtggcttgtgatacagaggggttcgtgccgcccaaggttatgctcatttcctcaaaagtgcccaaggctgaatatatacctaccattatcagacgtgacgaccccagcatcattccaatactgtacgaccatgagcacgcaactttcgaagatattctagaagaaatcgagcgcaagttgaatgtgtaccacaagggggcgaaaatctggaagatgttgattttctgtcaaggtggtcctggccacctgtatctgttgaagaataaagtagctacatttgctaaagtagagaaggaagaggatatgatccacttctggaagcgactgagtagactgatgtcaaaggtgaaccccgagccaaacgttattcacataatgggttgctacatcctcgggaacccaaatggcgagaagctgttccagaatctcagaacgcttatgactccgtatagggtcacgttcgagtcccccctggaattgagtgcacagggcaagcaaatgattgagacctatttcgacttccggttgtacaggctgtggaagagccggcagcactcaaaactgctggattttgacgatgtgctttag

SEQ ID NO: 125834 - DNA, 1503 bp, synthetic construct
  misc_feature 1..1503: note = Description of Artificial Sequence: Synthetic coding sequence
  source 1..1503: mol_type = other DNA
atgggcgctgccgccagcagacggcgcgccttgcgaagcgaggcaatgtccagtgttgccgcaaaggtgagggccgcgcgcgcatttggagagtacctgagccagtcgcaccccgaaaatcggaacggcgctgaccatctcctagccgacgcttattccggtcatgatggctccccggagatgcagcccgctccccagaataagagaagactttcgcttgtgtcaaacggatgctatgaaggttcactatcagaggagccctcaattcgcaaaccagcaggggagggaccgcagcccagagtgtataccatctccggcgaacccgctcttctgccgagccccgaggccgaagctatagaactggccgtcgtaaaggggcgcaggcagaggcatccacaccaccattcacagcctctgcgcgcaagccctggcggatctcgcgaggacgttagccggccctgccagagctgggcaggtagcaggcagggtagcaaggagtgccccggatgcgcccagctggccccagggccaaccccacgcgcctttggtctggatcagccaccactgccagaaacttccggaaggcgtaagaagctggagcggatgtacagcgtggatagagtaagcgatgacatcccgatcaggacttggttcccaaaggagaacctttttagcttccagacggccacaacaaccatgcaagccatttctgtgtttagagggtatgccgagaggaaaagacgcaagagggaaaacgacagcgcatctgtaatacagagaaacttccggaaacacctcaggatggtcggttcacgccgagtgaaggcccagtcaagtgacctgcagtccagccactgtactcttgacgaagcctttgaggatctcgattgggacaccgagaagggcctggaagctgtagcctgtgatactgaaggcttcgtccctcctaaggtcatgctgatcagctcaaaagtgccaaaggcagaatatatacctacaattatcagacgagatgatcccagcataattccaatcctgtatgatcacgagcacgccacctttgaagatattcttgaggaaattgaaagaaaactaaatgtctatcacaagggcgccaagatttggaagatgctcatcttttgccagggaggacccggacatctctatctgctgaagaacaaagtggccacattcgctaaggtcgagaaagaggaggatatgatacacttttggaaaaggctgagcagactgatgagtaaagttaatcctgagccaaacgttatccacatcatgggatgttacattctgggcaacccgaatggtgagaaactgttccaaaacctgaggaccctgatgaccccgtaccgagtcacttttgagtccccactggaattgagcgcccaaggaaagcagatgatcgagacgtacttcgacttccgcttatatcggctctggaagtccagacagcatagcaaactgctggatttcgatgacgtactgtag

SEQ ID NO: 125835 - DNA, 1518 bp, synthetic construct
  misc_feature 1..1518: note = Description of Artificial Sequence: Synthetic coding sequence
  source 1..1518: mol_type = other DNA
atgggggccgcagcttcccggcggagagccctgcgctcagaggccatgtcctccgtagccgcgaaagttcgggccgcccgcgcgtttggcgagtaccttagtcagtcacatcccgaaaaccgcaatggggctgaccatcttttagccgacgcatactccggccatgatggctctcctgagatgcaaccagcgccacagaacaagagaaggctgagtctcgtgtcgaatgggtgctacgagggtagcctaagcgaagaaccaagtatccgaaaacctgcgggggaaggaccccaacccagggtgtacaccatttctggtgaacctgccctgctccccagcccagaagccgaagcgatcgagctggcagtggtgaagggacgacgtcagcgtcacccgcaccatcatagccagcctttgagggcgtctcctggcggctctagagaagacgttagcagaccatgccagtcatgggcaggctcccggcagggatctaaagaatgcccaggctgtgctcagctcgcgccagggcccactccacgtgctttcgggctggaccagcccccccttccagagacatctggtagaagaaaaaaactcgaacgcatgtactccgtggaccgtgtgagcgatgatattcctattcggacctggtttcctaaagaaaacttattcagttttcagactgcaaccaccaccatgcaggctaacttccgcaaacacttgagaatggttgggagcagacgggtgaaggcccaaacttttgccgaacggagggaacggtcattctccagaagctggagtgatcccacacctatgaaagccgatacgtcacacgactcccgtgattcctctgacctgcagtctagccactgtactctcgatgaggcttttgaggacttggactgggacacggaaaaggggctcgaagccgttgcatgtgatactgagggattcgtgcctccaaaggtcatgttgataagctcaaaagtgccaaaagccgagtatattccaacaattattcgacgcgacgatcccagtattatccccattctatacgatcacgagcacgcaactttcgaggatatcctggaagaaattgaacggaagctcaatgtctaccacaagggagccaagatctggaagatgcttatattttgtcaggggggccccggccacctctatttactgaagaacaaggttgctacctttgcaaaagttgagaaggaagaggatatgatccatttttggaagagactgagcagactgatgtccaaagttaatcctgaaccaaatgtcattcatataatgggctgttacattcttggtaatcctaacggtgagaaactatttcagaatcttcggacattgatgacaccttaccgcgtcacgttcgaatcccctttggagctttcggctcaaggcaaacagatgatagagacatacttcgactttagattataccgcctatggaagagtagacagcattccaaactgctcgacttcgatgatgtcctctag

SEQ ID NO: 125836 - DNA, 1593 bp, synthetic construct
  misc_feature 1..1593: note = Description of Artificial Sequence: Synthetic coding sequence
  source 1..1593: mol_type = other DNA
atgggcgcagcagcctctcggcgacgtgccctgcgctctgaggctatgagtagcgtggccgccaaagtccgggcagcccgcgcttttggagagtatctgagccaaagccaccccgagaatagaaatggcgcggatcacctgttagcagatgcttactctgggcacgacggcagtccagagatgcagccggcccctcaaaacaaacgccggctaagcctggtgagcaacggatgctacgaaggctcactcagtgaggagcccagcataaggaaacctgctggcgaaggaccgcagcccagggtgtacaccatatccggtgagccagctttgcttccttcccccgaggccgaggctatcgagcttgctgttgtgaaaggcaggcgtcaaaggcatccacaccatcattcccaaccattacgcgccagcccgggcgggtcccgggaagacgtgagcagaccttgccagtcatgggccgggtcacgacaggggtctaaggagtgcccaggctgtgctcagttagctccagggccgacccctcgtgccttcggcctcgatcagccaccgttacctgaaacctcagggaggcggaagaaactggagaggatgtattcagtggacagagtatcagacgacattccaatcaggacttggtttcctaaagaaaatctgttctccttccagacagctaccacaacgatgcaagccatctccgtcttccggggctatgctgaacggaaacgccgaaagagagagaatgactcggcctcagtgattcagagaaattttagaaagcatttgaggatggtggggtcaaggcgcgtcaaagctcaaacattcgctgaacgccgcgaaagatcctttagccgaagctggagcgacccaactccaatgaaagctgatacaagccatgactctcgcgactcttctgatctgcagtcctctcactgtacccttgatgaagcattcgaagatttggattgggatactgaaaagggtctggaggctgtggcttgcgataccgaagggttcgtgcctccaaaggtgatgctaatcagctcgaaggttcctaaggccgagtacattccgactatcattcgaagggacgacccaagtatcattccaatcttatacgatcatgaacatgccacgtttgaggacattttggaggagatagaacgtaagttgaatgtgtaccataagggagccaaaatatggaagatgctgatcttctgtcagggcggacccggccatctctacttgctcaaaaataaggtggctactttcgccaaagtagaaaaagaggaggacatgatccatttctggaagcggctctccaggctgatgtccaaagttaaccctgaacccaatgttattcacatcatgggatgttacatattggggaaccctaacggtgagaagttattccagaatcttaggacactaatgaccccttatagggttactttcgaatcacccctggaactcagcgcccagggcaagcagatgattgaaacgtacttcgacttccgactttacagattatggaaatcccggcaacactccaagctcctcgactttgacgatgttttgtag

SEQ ID NO: 125837 - DNA, 585 bp, synthetic construct
  misc_feature 1..585: note = Description of Artificial Sequence: Synthetic coding sequence
  source 1..585: mol_type = other DNA
atggggcttgggcctctgtcctcatcactgagcccacagttgatatcctccaaagtacccaaggctgagtacattcccacaataatccggcgggacgacccgagtatcatacctatcttgtatgatcacgagcacgctactttcgaggacattctggaggagattgaacgcaaactgaatgtgtaccataaaggcgccaaaatttggaaaatgttgattttctgccagggcggacctggacacctgtatctcctgaaaaataaggtggccacctttgcaaaagtcgagaaggaggaagatatgattcacttttggaagagactatcaagactcatgagtaaggtcaatcccgagccaaacgtcattcacattatggggtgctatatactaggcaaccctaacggggaaaagctttttcagaaccttaggacgctgatgacaccctatcgcgtcacctttgagagccccttagagcttagcgcgcaggggaaacagatgatcgaaacctactttgacttcagactctacagactctggaaatccagacaacactctaaactcctcgattttgatgacgtcttatag

SEQ ID NO: 125838 - DNA, 1524 bp, synthetic construct
  misc_feature 1..1524: note = Description of Artificial Sequence: Synthetic coding sequence
  source 1..1524: mol_type = other DNA
atgggcgctgccgcctcgcgccgccgggctttgaggagtgaggctatgagtagcgtcgccgcaaaagtccgcgctgcccgggcatttggtgagtacctaagccagtcacatcctgaaaaccggaatggagccgaccatctactggcagacgcctacagtggccacgatggttcacccgagatgcaacccgcaccacagaacaagcggcgccttagccttgttagcaatggatgctacgaggggagcctgtcagaggagccttcaattaggaaacccgccggcgagggtccgcagccgcgagtctacactatcagcggtgagccagcactgctccctagccccgaggccgaagccatcgagctcgcagtggtaaagggccggcgccagaggcatccccatcaccatagtcaacccctgagagcatcaccaggcggcagtcgcgaggacgtatcaaggccctgtcagagctgggcaggcagccgacaaggtagtaaggaatgccccggctgtgctcagctggcacccggccctacacctcgcgccttcggcctcgatcaaccgcctctacctgagacgtccggccgccgcaagaaactggagcggatgtacagcgtcgatcgggtgtctgacgatatacccattcgcacctggttccctaaggagaacctgttctctttccaaaccgctacaacaaccatgcaggcagtgggaaacttcaggaagcaccttaggatggtgggaagccgccgagtaaaggcacagaccttcgccgagcgtcgcgaaagatccttctccaggtcttggtctgatcctacgcctatgaaagccgatacgagccatgactctcgtgacagcagcgatttgcagtctagccattgtactctggacgaggcgtttgaggaccttgattgggacaccgagaaaggactagaagccgttgcatgcgatactgagggcttcgtccctcctaaagtgatgctgatcagtagtaaagtgccgaaagcagagtatattccaaccataataaggagggatgacccgtccattattcctatcctgtacgaccacgaacatgccaccttcgaagatatcttggaagagatcgagaggaaacttaacgtgtaccacaagggggctaaaatttggaagatgctcatcttttgccagggcggcccaggccacctgtacttgcttaaaaataaagttgctacctttgcaaaagttgagaaagaggaggacatgattcacttctggaagaggctttcacgactgatgagcaaagtaaatcccgagcccaacgtcatccatataatgggatgctatattctgggtaatccaaatggcgaaaagctgtttcaaaatcttcgcacgttaatgacaccatatagagtgacattcgaatcgcccttggaactatctgcgcaggggaagcagatgatcgagacatacttcgactttagactataccgtctgtggaagagtaggcagcatagtaaattgctcgattttgatgatgtcctgtag

SEQ ID NO: 125839 - DNA, 1524 bp, synthetic construct
  misc_feature 1..1524: note = Description of Artificial Sequence: Synthetic coding sequence
  source 1..1524: mol_type = other DNA
atgggcgcagccgcatcacgccgtcgggccctgagaagtgaagccatgagttctgtggcggccaaagtacgcgccgctagagcctttggcgagtatctgtctcagtcccatcccgagaatcggaatggagccgaccatcttttggctgatgcttacagcggccacgacgggtcgcccgagatgcaacctgcgccgcagaacaagagacgactcagcttggtttccaacggatgttacgaggggagccttagtgaagagcccagtatccgaaaaccagccggggaggggccacagccccgggtttacaccatcagcggggaacccgcgctactcccttcccctgaagcagaggccattgagttggctgtagtcaaggggaggagacagcgccatccgcaccaccattcacagccgcttcgggcatcgcccgggggatctcgggaggacgtgtccagaccatgccagtcctgggcggggtcacggcaagggagcaaggagtgtccagggtgtgcccagttggcccccggtccaacacctcgcgcttttggactagaccaaccgcctttgcccgagacttccgggcggagaaaaaaattggaacggatgtactccgttgaccgcgtatccgacgacatacctataagaacatggtttccgaaagagaatctgttctccttccagaccgccactacaaccatgcaagccatatcaaattttaggaagcatttgagaatggtgggttcaaggcgcgtaaaggcacaaacctttgctgaacgacgggagaggtccttctcacggagctggtccgaccctacccccatgaaagcggacacctcccatgacagtcgagatagttccgacttgcagagctcccactgcacgctggacgaagccttcgaggatcttgactgggacaccgaaaaaggtctcgaggcagtcgcttgtgacactgagggattcgtgccaccaaaagtcatgctgatctcctcaaaggtgccgaaggctgagtatatccccaccatcatccggagggacgatcccagcattataccaatcctttacgaccatgaacacgccactttcgaagacattctggaggagattgagagaaaattaaacgtttatcacaagggcgctaaaatctggaagatgctgattttttgccaaggaggaccagggcacttatacctcttaaaaaacaaagttgccaccttcgcgaaggttgagaaggaggaggacatgattcatttctggaagcgactctcaaggcttatgagcaaggttaatcccgagccaaacgttatccacatcatgggttgctatatattggggaaccctaatggcgagaaactcttccagaatttgcggacattgatgacaccctatcgtgtgacattcgagagtcccttagaactctccgcgcaagggaagcagatgatcgagacctactttgattttagattgtatagactttggaaaagccgccagcattccaagctgcttgatttcgatgatgtgctgtag

SEQ ID NO: 125840 - DNA, 984 bp, synthetic construct
  misc_feature 1..984: note = Description of Artificial Sequence: Synthetic coding sequence
  source 1..984: mol_type = other DNA
atgcagttgggacgccgccttgatcccgagagacaagcactccacctgtgctcaggggttgaaggggaaccttggaaagccgtcgctgggcgtgcactcggaggaatctgcctgtgggtagggggcggcgccagaagccagggggagcactggctgccaactcccaaggggaacttccgcaaacacctgagaatggttggcagccgccgggtgaaagcccaaaccttcgctgagcgcagagaaagatccttctcccggtcctggagtgacccaacacccatgaaggccgatacgtcccacgactcgcgggactcctctgacctccaaagtagccactgcactttagacgaagccttcgaagacctggactgggataccgagaaaggacttgaagccgtagcctgcgacactgagggattcgttccaccaaaagtcatgttgatcagcagtaaggtgccaaaggctgaatatatcccgacgattattcgaagagacgacccaagcatcatccctatactgtacgatcatgaacatgcgacatttgaagatattctggaggaaatagagcgcaagctcaacgtgtaccacaagggagcaaagatctggaagatgctgatcttctgtcagggtggacccggccatttgtacttactgaagaataaggtcgctacttttgctaaggtggagaaggaggaggacatgatccacttttggaagcggcttagccgcttgatgagtaaggtcaaccccgaacctaatgtgatacacattatgggctgttacatcctcggcaacccaaacggggaaaagctcttccaaaacttgcggacactgatgactccctatcgcgtcaccttcgaatcacctctggagctgtccgcacaaggtaagcaaatgatagagacatatttcgatttccgtctgtatagattgtggaaatctcgtcaacacagcaagctcttggactttgatgatgtactttag

SEQ ID NO: 125841 - DNA, 648 bp, synthetic construct
  misc_feature 1..648: note = Description of Artificial Sequence: Synthetic coding sequence
  source 1..648: mol_type = other DNA
atgcctggtgaggcgaccgaaacagtaccagcaaccgagcaagaacttccacaaccccaagcagagacaggatccggcactgaatcagattccgacgaatcagtgcctgagctagaagagcaggactctacacaggcaactacccaacaggcccaattggctgcagctgcagagatagacgaggaacctgtcagtaaggccaagcagagcaggtctgagaaaaaagctcggaaggccatgagcaaactcggattgagacaggtcacaggggtgacacgggtgaccatccggaaatctaagaacatcctgttcgtcataaccaaacccgacgtatacaaaagtcccgcctccgatacttacatagtgttcggcgaagcaaagattgaagacctttcccaacaggctcagctggctgctgcagaaaaatttaaggtccagggggaggctgtgagcaatatccaggagaacacccagactcccactgttcaggaagaaagtgaggaggaggaggtggacgaaaccggtgtggaggttaaagacatcgaactagttatgagtcaggccaatgtctcaagagcaaaggctgtgagagccctgaagaacaattccaatgatatcgtaaacgctataatggagctcacaatgtag

SEQ ID NO: 125842 - DNA, 648 bp, synthetic construct
  misc_feature 1..648: note = Description of Artificial Sequence: Synthetic coding sequence
  source 1..648: mol_type = other DNA
atgcccggagaggctacagagactgtcccagccacagagcaagagctcccccagccccaggccgagaccggctctggaacggaaagcgatagcgatgaaagtgtccccgagcttgaagagcaggattccacacaggctactactcagcaagctcagctcgctgcggcagctgaaattgacgaagaacccgtgagtaaagccaagcagtcacgctccgaaaaaaaggcccgaaaggccatgagcaagttgggattaagacaagtgactggagttaccagagttactatcagaaagtctaagaacatccttttcgtgattaccaagcctgacgtctacaagagcccggcttcagacacctatatagtcttcggagaggccaagatcgaggatttgtctcagcaggcacagctcgctgccgccgagaagtttaaggtccaaggcgaagccgtgtccaacatccaagagaacacgcagacgccaactgtacaagaggaaagtgaagaggaggaagtcgatgaaacgggagtggaagtgaaggacatagaactcgtaatgagtcaggcgaatgttagccgggccaaggcagttcgcgccctcaaaaacaacagtaacgacattgtgaacgccattatggaactgactatgtag

SEQ ID NO: 125843 - DNA, 6237 bp, synthetic construct
  misc_feature 1..6237: note = Description of Artificial Sequence: Synthetic coding sequence
  source 1..6237: mol_type = other DNA
atgccaggagaggcaaccgagactgtgcccgcaaccgagcaggagttgccacagccgcaggcagaaaccgcagtgcttcctatgtcttccgcgctgagcgtgaccgctgccctgggccagccagggcccacattgccccctccttgctcccccgcccctcaacagtgcccactgtctgccgctaaccaagcatctccttttccaagcccgtccacaatcgcctccactcccctggaagtgcctttcccccaaagctcgtctgggaccgcactgcccctcggcactgctccagaagcccccactttcttgcccaacctgattggccctccaattagcccggccgccctggctctggcaagtccgatgatcgcacccaccctaaaagggaccccttcatctagcgcacctctggccctggtggcattggcaccacattcagtccagaagtcttccgcatttcctcctaacttgctcacttccccgccgtccgtggccgtcgcagagtccggaagcgttatcaccctgagtgcccccatcgcaccatccgagcctaagactaatttgaacaaagtccctagtgaggtggtgcccaaccctaaagggactccttccccgccttgcatagttagcaccgtgccatatcactgcgtaacccccatggcttctattcaaagtggtgtggccagccttcctcagaccacgcctaccacaaccctggcgatagctagcccgcaggtgaaggacactaccatctcttctgtgctaatctccccccaaaacccgggaagtctgagcttaaaaggccccgtatcccctcccgccgcattgagcctctccacccagtcactgccagtggtcaccagttcacagaagaccgcggggccaaatactccacctgatttccctatatcactgggcagccacctggccccgctgcatcagtcctcattcggaagtgtgcagctccttggacagaccggaccatccgccttgtcagaccccacagtgaaaactatcagcgtggatcacagctccactggggcctcatacccctcgcagcgtagtgtgattccccctctcccaagccggaacgaagtggtgccagccactgtcgctgctttccccgtggtggctccatcggtggacaaagggccctcaactatctcttcaatcacctgctccccctctggttcccttaatgtggctacctcattctccctctcacccactaccagtctcattctgaaatcttcccctaatgcgacataccactacccgctagtggcacagatgccagtttctagtgtagggactacacctctcgtagtcaccaatccatgtacgatcgctgctgcgccaacaaccacattcgaagtggcaacttgtgtgtctccgccgatgtcaagcggccctatctcaaacatcgagcccacctcacctgcagcactcgtgatggcaccggtggctccgaaagagcccagtacacaggtcgcgacaaccctgcggatcccagtcagccctccactgcctgacccagaagatctcaagaatttgccctcctcagttcttgtaaaatttcccacacaaaaggacttacagactgtcccagccagcctcgagggggctcccttcagtccagcgcaggctgggctgacaaccaaaaaagaccctacggtgctgcctctcgttcaagcagcccctaagaattcaccaagttttcagtccacctctagctctcctgaaattcctctgtcccccgaggccacactagccaagaaaagcttgggggaacccctgcctattggcaagcctgcctcctctatgacctcccccctcggagtgaactcttcagcctcagttatcaaaactgacagctatgccggccccgactctgctggaccactgcttaagtccagtctaattacgcctacagtagccgcgtttccccttgagtccgccgaccctgcaggcgttgcacctactactgctaagggtacaagcacatataccaccactgccagtcctttcttagaaggtaccgttagtctcgctcctaagaatcatccagtcaaggaaggtacactcacgacccttccacttgttccaaccgctagtgagaactgccctgtggccccctctccacaaaacacctgtgcccctctggcaaccctcgtgctggctcctgagatacccaagagtgtcccttctccgagtctgcctccggcaggcacccccccagggaccaagaaagtggatggcatttctcacacctccgctctcgcacctgtggcctcctctcctaaggagtgtcccactgaggacagcggtgccagcgccaccgcaagctctaagggtactctcacctaccttgccgacagcccctcacccttgggcgtgtctgtgtccccccagactaagcgccctcctactaaaaagggctcagcggggccagatactcctatcgggaatctgagctcccctgtttctcccgtcgaagcttcatttctgcccgagaacagtcttagcttccaggggagcaaggactcccctgctaccacccacagccccacccccccctcgccaaagggtgccccaacaccgagtgccgtcacgcctctcagtcccaagggtgtcacgctgccgccgaaggagacaccaaccccaagtgtggtgaacctcccttttcctaaagaaggccccgccacacctgctcctaaacaagcgccggccttgtccatgacctccagctctccaaagaaagcccgggcaacccccgcccccaagggtatccctgcctcaccatcacctaaaggggccccaaccccccccgctgcaacccctccctctcctaaaggtggccccgctacaccttctccaaaatgggcccctacccctccagccgccaccccaccatccccaaaggggggcccggccacaccatcaccaaaaggtgcacctactcctcccgcggccactcctcctagtccaaaggggggaccggcgactccttccccaaagggagctcccaccccaccagccgtgactcccccgtcaccgaaaggatctcctgcggccacgccttttcctaaaggagcctcaacccctccagccgcgacccctccatcccccaaggggagtcccgccgcgacacccctcccaaagggcgcaccgaccactcccgcagcaacacttccttctcccaaaggcggacccgccaccccctcactgaagggcgccccaacaccacccgcagctacccccccaagccctaagggaggaccggcaactccttctccaaaaggcgcaccaatgccccccgccgcgactccaccttcccctaagggaggcttggccactcctccgcataaaggcgcccctacaactcctgctgccacaccaccgagtccaaaaggtggattagctacacctccccctaaaggtgctcctactactcccgccgccacacctccctctcccaagggaggtctggccaccccccctccgaagggcgcacctacaactccagctgccactccgcccagtcccaagggggggttggcaacccctagtcctaaaggggcccccacaactccagctgcgacccccccaagtccgaagggcggattggccacgccctcacccaagggggcgccaactactcctgcggccactcctccgagcccgaagggaggtcttgctactcccagccctaaaggagcacccacaacaccagctgccactcctccgtccccaaagggtgggccagcaacaccgccacccaagggcgccccaaccccccctgccgccaccccaccgtccctgaaaggtggcctcgctactcccccccacaaaggggcacctaatccagccgtcgtaactccccctagcccaaaggggggccccgccacttcaccccctaaaggtgctcccacacccccagctgcaacccctcccagtcccaaagggtctcctgggactccgccgccaaagggagcaccaaccccaccagcggttaccccccctagccctaagggaacacctaccctcccagccactacccctagcagcaagggcggccctaccacaccgagttcaaaggaggggcctacacctcccgcggcaactccaagtcataaggggggccctgccatgacacccccctctcccaagcgcggacccgccatccccagccccaagggtgacccaaccagcccggccgtaattcccctgagcccaaaaaaggcgccagcgacccctgttaccagagaaggggccgctaccccatctaaaggcgatctgacacctcccgccgtcactccggtttctctgaaaaaagctcctgcgacttctgccccaaagggaggccccgccacccctagttcaaagggtgaccctacacttccagctgtaaccccccctagtccaaaggagccccctgcccccaagcaggtagctacctcgtccagccccaagaaggcacccgctacacctgcccctatgggcgccccaaccttgcctgctgtcatcccatcctctcctaaggaggtccccgccactccttctagtagacgagatccgatcgcaccaactgcaaccctgttgagtaagaaaaccccagccacccttgcccctaaggaggctctgataccacccgctatgacagttcccagccccaaaaaaacacctgcaatccctaccccgaaagaggccccagccacaccttctagcaaagaggcaagtagccctcccgcggtcacccctagtacatacaagggggccccatccccaaaggaactcctcatccctccagccgtgaccagccccagtccaaaagaggcacctactccaccagcggtgacacctcctagcccagaaaagggccccgcgacccccgcacccaaagggacccctacgtccccccccgtgactccatcgtcactgaaggacagtccaacatcacctgcatctgtcacctgcaagatgggagccaccgtcccacaggcctccaagggtctgcccgctaaaaagggacccactgccttgaaggaggtgctcgtggctcccgctcctgagagcactcctattataaccgcccccaccaggaagggtcctcaaaccaaaaaatcttccgcgacctccccaccaatctgtccagatccttctgctaaaaacggtagcaaagggccactgagtaccgttgctcccgcgcctctcctgccagtgcagaaggactcaagcaagacggccaaagggaaggacgcatcacattctcctaagggtccactggcgccgccagagagcaaagccagcactccacttacggctgcagcttttgagaaggtgctccccaaaccggagtccgccagtgtttctgctgccccgtcccctcctgtgagcctgccgctcgcaccttccccagtccccaccctaccccccaaacagcagttcttaccttcaagccccggcctggtccttgagtccccgagcaagcctttggctcccgcagatgaagatgagctgcttcctctaattcccccagagccaatctcaggtggggtccctttccaaagcgttctggtcaacatgccaacgcccaaaagtgctggtattcctgtaccaaccccttccgctaaacagccggtcaccaagaataacaaagggagcggcacagaaagcgattccgatgaatccgtaccggaactggaggagcaggatagcactcaggctaccacccagcaagcacaactggcggctgctgctgaaatcgatgaggaaccagtgtctaaggctaaacaatcccgcagcgaaaagaaggccagaaaagctatgtccaagctggggctgaggcaggtcacaggagtgacacgggtaactattaggaagtccaagaacatcctctttgtcattactaagccggacgtctataagagtcccgcatcagacacttacatcgtctttggagaggcaaagatcgaggacctgagccagcaggcccaattagcagcggctgagaagttcaaggtgcagggcgaagctgtgtctaatattcaagaaaacacgcagactccaacagttcaggaggagagcgaggaagaggaggtggacgaaactggcgtggaggtaaaagatatcgagttagtcatgagccaggcaaacgtctctcgtgcaaaggcagtcagggctctcaagaacaactctaatgacatcgtgaatgcgatcatggagctaacaatgtag

SEQ ID NO: 125844 - DNA, 648 bp, synthetic construct
  misc_feature 1..648: note = Description of Artificial Sequence: Synthetic coding sequence
  source 1..648: mol_type = other DNA
atgccaggggaagcaaccgaaaccgtgcccgccacggaacaggagcttccgcagccacaggctgagacaggctctggcactgagtccgattccgacgaatccgttcccgaacttgaagagcaggactctactcaggccactacccagcaggcccagttggctgccgccgctgagattgacgaagagccagtatcaaaagccaagcagagtagatccgagaagaaagctcgaaaggccatgagcaagttgggactgcggcaagtgaccggggtgactcgcgtcaccattagaaaatctaaaaatattcttttcgtcatcactaaaccagacgtgtacaagtcccctgcctccgatacttatattgtctttggcgaggcaaagatcgaagacttgtcacagcaggctcagttagctgctgccgagaagtttaaggtccaaggagaagctgtgtcaaacatccaagagaatactcagactccaaccgtgcaggaggagagtgaggaagaagaggttgacgaaactggggtggaagtgaaagatatagagctggtaatgagccaagcaaacgtctccagagccaaagctgtgcgtgccctcaagaataattctaacgacatagtgaatgccatcatggaactcaccatgtag

SEQ ID NO: 125845 - DNA, 21 bp, synthetic construct
  misc_feature 1..21: note = Description of Artificial Sequence: Synthetic coding sequence
  source 1..21: mol_type = other DNA
atgccaggcgaggccacgtag

SEQ ID NO: 125846 - DNA, 597 bp, synthetic construct
  misc_feature 1..597: note = Description of Artificial Sequence: Synthetic coding sequence
  source 1..597: mol_type = other DNA
atgcccggcgaggccacagaaacagtgcccgcaacagagcaggagctcccacagccccaggcagagactggctctgggaccgagtccgacagcgatgaatctgtccccgaacttgaggagcaggactccacccaagctaccacccaacaagcccaattggctgcagctgctgagatcgacgaggagccggtgagcaaggccaagcagtccagatcagagaaaaaggcacgtaaggcgatgtccaaactgggtctgaggcaggtcaccggagtcactcgcgtaactattcgcaaatccaaaaacatcctgttcgtgattactaaaccagacgtgtataagagtcctgccagtgacacctacatagtgtttggagaagctaaaatcgaagatctgagccagcaggctcagctggccgcggccgagaaattcaaagtccagggcgaagctgtatcaaatatccaggagaatacccaaactcccacggtgcaggaagagtccgaagaagaagaagtggacgaaactggagtcgaggtgaaggacattgagctcgtgatgtcacaggcaaatgtgtcgagggctaaggcggttcgagcctag

SEQ ID NO: 125847 - DNA, 381 bp, synthetic construct
  misc_feature 1..381: note = Description of Artificial Sequence: Synthetic coding sequence
  source 1..381: mol_type = other DNA
atgcccggcgaggccacggagacggtaccagccacggagcaggaactgccacagccacaggccgagactggatccggcactgagagcgactccgacgaatcggtgcccgagctggaagagcaggacagcacccaggccacaacccagcaggcccagctcgccgctgccgcagaaatagacgaggagcctgtgtcgaaggcaaaacagtccaggagcgaaaaaaaagcgcgtaaggccatgagcaaactgggcttgcggcaggtgaccggtgtgacccgcgtgactataagaaagtctaagaacatactgtttgtgattactaaaccagacgtgtacaagagcccggccagcgatacttacatcgtatttggagaagcctag

SEQ ID NO: 125848 - DNA, 648 bp, synthetic construct
  misc_feature 1..648: note = Description of Artificial Sequence: Synthetic coding sequence
  source 1..648: mol_type = other DNA
atgccgggtgaagccacagaaacagtgccagctactgagcaggagctacctcagcctcaagccgaaactgggagtggcacagagtctgactccgacgaatctgtgcctgagctcgaggagcaagactcaacccaggccaccacacagcaggcccagttggctgccgcagctgaaattgatgaagagcccgtgtctaaagccaaacagtcacgctcggagaagaaggccagaaaggctatgagtaaattgggactgcgtcaggttacaggagtcacaagggtcacaatccggaagtctaaaaatattctgtttgtgatcaccaaaccagatgtttataagtctcctgcgtctgacacctacatcgtgtttggcgaggctaagatcgaagacctgtcgcagcaggcacaacttgcggctgccgagaagttcaaagtacagggggaagccgtgagtaacatccaggagaacacccaaactccaaccgtgcaggaggaatcagaggaggaggaggtggatgagactggagtcgaggtaaaggatattgaattggtgatgtctcaggctaatgtctcccgcgcaaaagccgttagggctctgaagaataattcaaatgacattgtaaacgctataatggagttgaccatgtag

SEQ ID NO: 125849 - DNA, 2778 bp, synthetic construct
  misc_feature 1..2778: note = Description of Artificial Sequence: Synthetic coding sequence
  source 1..2778: mol_type = other DNA
atgcccggggaagcaacagagaccgtgccagcaacagagcaggaactgcctcaaccacaagccgagacagcggttttaccaatgagcagcgctctgagtgtcactgcagcactggggcagcctggtcccacactaccaccgccatgctcccctgccccccagcaatgccctctgtcagccgcgaaccaggccagtccgttcccatcccctagcacaattgcctctacccctttggaagtaccattcccacagagttcctctggaaccgccctccccctggggactgcccctgaggcccctacctttctgcccaacttgatcggtcctcctatatccccagccgcactggcccttgcatcgcctatgattgctcctactctaaagggaaccccaagctcctccgccccgttggctctcgtagcgctcgccccacattcggtgcagaaatctagcgcattcccccccaatctactcacgtccccaccatccgtcgccgtggcggagagtgggagtgttattactctaagtgcccccatcgccccatctgaaccaaagactaacctgaataaggtgccctccgaggttgtccccaatccgaaagggacgccatccccaccttgtatagtgagcacggtaccctatcactgcgtgaccccaatggccagtatccagtccggagtggcttccctgccacagactactcccactaccacgctggctatcgcgagtccccaagtgaaggataccacaatctcttccgttctcatcagcccgcagaaccccggcagtctgagcctgaagggaccggtctcaccaccagcagccctttcactgtctactcaatcactgcctgttgtgactagctcccaaaagacagccggcccgaacaccccacctgactttcctatttccctggggtctcacctagcccctttacatcagtcctccttcggttctgtccagctgcttggccagacgggtcctagcgccctctcagacccaacagtgaagacaattagtgttgaccattcatctactggagcctcctacccgtcccagaggagcgtcataccccctctgccgtcacgcaatgaggtcgtacctgccaccgttgcggcattcccagtggtagcgccctcagtggataagggccctagcacaatttcatcaatcacttgtagccctagcggcagcctgaacgtggccacaagtttctcactgtcccccactacatctctgatactgaaaagttccccgaacgccacctatcactacccccttgtggcccagatgccagtcagctccgtgggtacaacaccgctggtggtgaccaatccatgtacgatcgcggctgctccaaccaccacctttgaggtcgccacatgtgtgagcccacccatgtccagcggaccaattagtaacatcgagcctacatcgcctgctgctttagtgatggcgccggttgcgccaaaggagcccagcacccaggtcgccacaacattgagaattccagtttcccccccattgccagatcccgaggatctgaaaaatttaccatcatccgtgctcgtcaaattccccacccagaaggatctgcagaccgtccccgccagtctggagggagctcctttctcccccgctcaagccggtctgactacgaaaaaagatcccacggtgctcccactggtccaggctgctcccaagaattcccccagctttcaaagcacgtcaagttcacccgagatcccgctgtcacctgaagcaacactggctaagaaatcactaggggagccattgcccatagttgccgcttttcctctcgagtcagccgatcctgccggggttgccccgaccaccgcaaaggccgcagcctttgagaaggtcctgccaaaacctgagtcagcaagcgtgagtgcggctccctccccgccagtgtccctgcccctggccccctcacctgtgccaactctgcctccgaagcagcagtttctgccctcttctccaggattagttctcgagagtccaagtaagccgctggcccctgctgacgaggatgagttgctccctctgattccccctgagccaattagcggcggtgtcccttttcaatcagtcctggtcaacatgcccaccccaaaaagtgccgggattcctgttccaactcctagcgcaaagcaacctgtgactaagaataacaagggatcaggaacggaatccgacagcgatgaatccgtgcctgaactggaggaacaggatagcacgcaggcgaccacgcaacaggcccaactagctgcagcagccgaaattgacgaggagcctgtgagcaaagcaaaacagagccgctcagaaaaaaaggccagaaaagctatgtcaaagctgggcttgagacaagtgactggggtgactcgagtgaccatccgaaaatccaagaatatcctgtttgttatcacgaagcctgacgtttataaatcgccagccagcgacacctatatcgtctttggcgaagctaaaatagaggatctttcacaacaggcccagttggcagcagctgagaaattcaaagtgcagggggaggcggtgagcaacattcaagagaatactcagacacctacagtgcaggaggagagcgaagaagaagaggtggatgagactggcgtcgaagtgaaggatatcgagctggtgatgtcccaggcaaacgtgagcagggcaaaagctgtgagggccctgaaaaacaacagtaatgatatcgtaaatgctataatggaacttaccatgtag

SEQ ID NO: 125850 - DNA, 306 bp, synthetic construct
  misc_feature 1..306: note = Description of Artificial Sequence: Synthetic coding sequence
  source 1..306: mol_type = other DNA
atgcctctagaggatgaggtcgtgcccccccaagtcctgtcagagccaaatgaagaagccggggccgcgctgagcccattgccagaggtacccccctggaccggggaggtttcacctgcccagagagacggaggcgccctcgggcggggcccatgggactcttctgaccgcagcgcactgttaaaatcaaaattgagagccctcctcaccgcccccagatcactccgccgctcttcatgctttggagggcgaatggaccggattggagcccagagtgggttggggtgtaatagctttcgctactag

SEQ ID NO: 125851 - DNA, 456 bp, synthetic construct
  misc_feature 1..456: note = Description of Artificial Sequence: Synthetic coding sequence
  source 1..456: mol_type = other DNA
atgagctccttttcgaccactactgtgtcctttctcttgttgctggcatttcagctactcggccagactagggccaatcccatgtacaacgccgtctctaacgctgacctgatggactttaagaacctcctcgaccacctcgaagagaaaatgcctctcgaagacgaggtagttccgccacaggtgctgtccgaacccaacgaagaagcaggcgcagccttgtctcctctgcctgaggtgccaccttggactggagaggtgtctcccgcacagcgggatggaggtgcactgggacgaggaccctgggactctagtgacaggtcagctctcctcaaatcaaagttgagggccctgctcacggctccccgaagcttgcgtagaagcagttgctttgggggaaggatggaccgcatcggcgcccagagcggtctgggctgcaattcttttagatactag

SEQ ID NO: 125852 - DNA, 768 bp, synthetic construct
  misc_feature 1..768: note = Description of Artificial Sequence: Synthetic coding sequence
  source 1..768: mol_type = other DNA
atggaacagtacgccaacaatttagaggaactggttgaagagcgaacccaggcgtaccttgaggagaagcggaaggcggaggcgttgctataccagatcctacctcacagtgtggcagagcaactcaaaagaggcgaaactgtgcaagcagaagccttcgactccgtgaccatctatttcagtgatatcgtgggcttcactgccttgagcgcggagtctacgccaatgcaggtggtgactctgttaaatgatctctacacctgcttcgatgccgtgatcgataactttgacgtctacaaggttgaaaccataggcgatgcatatatggtagtcagtggcttgccagtccgtaatggccggcttcatgcctgcgaagttgctcgaatggctctcgccttacttgatgcagtccgttctttcaggatccgtcatcggcctcaggagcaacttcggctccgtatcggtatacacaccggacccgtgtgcgctggagttgtaggcctcaaaatgccacgctactgccttttcggggatacggtcaacacagcgtcccgcatggagagcaacggtgaggcactgaaaattcacttgtcctcagagaccaaggcggttctggaagagttcggcggatttgagctagagctgcggggagacgtggaaatgaaagttgaaggggaggcatccgcccttcccactttctgggggccaagaggctcttatcccagccaagccgctaacgctacacctattccgaaagccctgatatag

SEQ ID NO: 125853 - DNA, 3186 bp, synthetic construct
  misc_feature 1..3186: note = Description of Artificial Sequence: Synthetic coding sequence
  source 1..3186: mol_type = other DNA
atgcccggcccacggcgacccgccggttcccgattgcgcctacttctcctgctgctcctaccccctttgttgttgttgctgaggggatcccatgccggaaatttgactgtcgcagtggtgcttccactggcgaataccagttacccctggagctgggcacgcgtgggacccgctgtggagcttgccctggcccaggtgaaagctcgcccggacctcctgcccggctggacggtacgcaccgtgctgggaagtagcgagaacgcgctgggagtctgttccgatactgcagcgcctcttgctgccgtggatcttaagtgggaacataatccagccgtctttctaggccctggctgcgtgtatgccgccgcacccgtgggacggtttaccgcccactggagagtgccactactcactgcaggggccccagcactagggttcggagtcaaggacgaatatgctctgacaacaagggcgggaccaagctatgccaaattaggcgactttgttgcggcactccaccggcggctgggatgggagaggcaggctctgatgctctatgcatatagaccaggtgatgaggagcattgcttctttcttgtggagggcttgttcatgcgtgtgcgggaccggctgaacattacagtggatcacttagagttcgctgaggatgatctgtcacattacactaggcttctgagaaccatgccaagaaaagggcgggtgatctacatctgtagttcaccagacgctttcagaacgctcatgcttttagccctggaggccggtctctgcggggaggactacgtatttttccacctggacatatttggccagtcactccagggcgggcagggtcctgcccctaggagaccgtgggagcggggcgatggacaggatgtgtcggcacgccaagctttccaagccgctaaaataatcacctacaaagaccctgataatcccgaatatttggagtttctgaaacagctcaagcatctcgcctacgaacagtttaatttcacaatggaagacgggcttgtgaacaccataccagcgtcttttcacgatggccttctcctttatatccaggccgtcacagagaccttagctcatgggggcaccgtcacggacggtgagaatatcacgcaaaggatgtggaatcggtccttccagggagtgacgggttacctgaagattgactcttcaggagacagggagacagatttctctttgtgggacatggacccagaaaatggcgcattcagggtggtactcaattacaacgggaccagccaggaactagtggccgtttctggccgaaagctcaattggcctctggggtacccgcctccagacataccaaagtgcgggtttgataatgaagatccagcttgtaaccaggaccatctgagcactctggaagtgctggcattggtaggatcactcagcctgctgggtattctcatcgtgtctttcttcatttaccgcaaaatgcagctggagaaagagctcgccagcgaactgtggcgagtgcgctgggaagacgttgagcctagttctttggagaggcatttgcgatcagctggaagccgcctgacattgtctggcaggggatctaactatggttctctcttgaccaccgagggccagttccaagtcttcgctaagacggcctactataaggggaacctggtcgcggtcaaacgtgtaaatcggaaaagaattgaactgactcgaaaagtgctatttgagctcaaacatatgagagatgtgcagaatgaacatttgacaagatttgtgggtgcatgcacagaccctcctaacatctgcatcctgacagagtactgcccccgaggttcccttcaagatattctggagaacgaaagtatcacgttggactggatgtttcggtacagcctgactaacgacatcgtgaagggtatgttatttctccacaacggcgccatctgtagccacggaaacttaaagtcctctaactgtgtcgtggatggtagatttgtgctgaagatcaccgactacggactcgagagttttagagatctcgatcctgagcaggggcataccgtttacgccaagaaactgtggaccgccccggagctactgcgaatggcctccccccctgtccgcggtagccaggcaggagatgtttactcgttcggcataatccttcaagagattgccctacggagtggagtgttccatgtggaaggactggacttgtcgcccaaggagattatcgagcgtgtgacaagaggcgagcagccaccatttcgcccctctcttgccctccagagccacttagaagagctgggcttgctcatgcaacgctgttgggcagaggatcctcaggagagaccccctttccagcagatccgactcactctaaggaagtttaacagggagaattctagtaacatcctggacaatctgctgagcaggatggagcagtacgctaataacctggaagagctcgtcgaggagcgcactcaagcctacctagaggaaaaacgcaaagccgaagccctgctttaccagatcctgcctcacagtgtcgctgagcagctgaagcggggtgagacggttcaggcagaagccttcgactcagtgaccatctacttcagtgatatcgtgggatttacggccctgagtgcagagtccacgcctatgcaagttgtcacgctattgaacgacctgtacacatgctttgacgcagtgatcgacaacttcgatgtgtataaggtagaaaccattggggacgcgtatatggttgtgagtgggctccccgtcaggaacgggcggctgcacgcttgcgaggtggctcggatggcactggcgctgctcgatgccgtgcgctcattccggatcaggcaccgcccccaagagcagctgaggctaagaatcggcattcacactggtcccgtgtgcgccggagttgtgggattgaagatgcctcgctactgtttatttggcgacacagtcaacactgcctctagaatggaatccaacggcgaggctttgaagattcatctgtctagcgagacaaaggcagtgctggaggaatttggcggctttgaactcgaacttagaggcgacgtggagatgaaaggtaagggtaaagtgcgcacctactggctcttaggcgaacgcggctcaagcactcgggggtag

SEQ ID NO: 125854 - DNA, 1623 bp, synthetic construct
  misc_feature 1..1623: note = Description of Artificial Sequence: Synthetic coding sequence
  source 1..1623: mol_type = other DNA
aaaatgcagcttgaaaaggagctcgcatctgagttgtggagggttcggtgggaagacgtggaaccaagctctttagaaaggcatctaagatcagccggcagtcgccttaccctctcaggaaggggttccaattatgggtccctgttaacaactgagggccagtttcaggtattcgctaagacggcatactataagatgcgggatgttcagaacgaacacttaaccaggtttgtgggggcctgtaccgacccacctaacatctgtattctgaccgaatactgtcctaggggctctttacaggatattctcgagaacgagtccattactctcgactggatgttcagatatagcctgactaacgacattgtcaaaggtatgctgttccttcataatggagcaatctgtagtcatggaaacttgaagagctccaactgcgtcgttgatggcagattcgttctgaaaattactgattacggacttgagtccttccgtgatctggaccctgaacagggccacacggtgtatgcaaagaagttgtggacggcccccgagcttctgagaatggcatcaccccccgtgagaggaagtcaggctggcgatgtctactcattcggaatcattctccaggagatcgcactgcgctctggcgtctttcacgtggaggggctcgacctgagtcccaaagagattattgaacgagttactcggggggagcagcctccttttcggccctctctcgcacttcagtcgcatttagaagagctaggactgttgatgcagcgatgttgggccgaggatccccaggagcgtcccccgtttcaacaaataaggctgacactacggaagtttaatcgcgaaaactccagtaacatcctggacaacttactgtctaggatggaacaatatgctaataacctggaagagctcgtggaagaaagaacacaggcatacctcgaagaaaagagaaaggccgaagctcttctgtatcagatcttgccccacagcgtggcggaacaattaaagaggggagagactgtccaggctgaagcattcgactcagtaactatctacttctcggacatcgtgggctttacagccctatcagccgagagtacccctatgcaagtggttacactcttgaacgatctgtacacctgtttcgatgcagtcatcgacaactttgatgtgtataaagtggaaacgatcggtgacgcttatatggtggtttccgggcttcccgttagaaacggcaggcttcacgcttgtgaggtggcacggatggctcttgccctgctcgacgccgtgcgcagcttcagaattagacatagaccacaggaacagctgcgtctgcgcatcgggattcacacagggcctgtttgcgcaggagtcgttggacttaagatgcctcggtactgcctatttggcgacaccgtgaataccgcttcacggatggagagcaatggcgaggcattgaaaatacacttgagttctgaaacgaaggccgtgctcgaggaattcggcggcttcgagttggagctgagaggcgacgtggaaatgaagggcaagggcaaagtcaggacgtactggctacttggcgagcgcggcagcagtacccgcggttag

SEQ ID NO: 125855 - DNA, 3144 bp, synthetic construct
  misc_feature 1..3144: note = Description of Artificial Sequence: Synthetic coding sequence
  source 1..3144: mol_type = other DNA
atggccctcccaagtttattgctgctagtcgcggctttagctggcggagttaggccccctggggcacgaaacctgacactcgcagtggtactgccagaacacaacctttcctatgcctgggcctggcctagggttgggccggcagtagctttggctgtcgaagccctaggtagggccctgcccgtggatctccgctttgtcagttcagagctggaaggagcctgctccgagtatctggcgcccctatcagccgtcgacctcaagctttatcatgatcctgacttgctgttggggcctggatgcgtataccccgctgccagcgtggcccggtttgcatctcactggcggcttcccctgctgactgctggcgccgtggcatccgggttcagcgctaagaatgatcattaccggacattggtgcgtacaggcccttccgctccaaagctgggcgagtttgtagttactcttcacgggcattttaattggaccgccagggctgccctgctgtacctggatgctcggactgatgaccggccccattatttcacaatcgaaggcgtgtttgaagcactacaggggagcaacctttccgtgcagcaccaggtgtatgcaagagaaccaggtgggcctgaacaggctacacacttcatcagggccaatggccgcatcgtatatatctgtggaccgctcgagatgctgcatgaaatactgctgcaggctcagcgagaaaatctcaccaacggggactacgtgtttttttacttggatgtgttcggggagagcctgcgcgccgggcctaccagagctacaggacggccctggcaggataaccgcacacgcgaacaagctcaggcgctgagggaagcctttcaaactgtgctcgttattacctaccgggaacccccaaatccagaatatcaggagttccagaatagacttctgatacgtgcccgggaggatttcggggtagaacttggtccatccctgatgaaccttatagctggatgtttttatgacggcattctgttatatgccgaagtccttaacgaaactatccaggagggaggtacccgcgaagacgggctgaggattgtggagaagatgcagggtaggagatatcacggagttacaggcctggttgttatggataaaaataacgatcgcgagacagacttcgtgttgtgggctatgggcgatctcgatagcggagatttccagcccgcagcgcactacagcggagcggaaaaacagatatggtggaccggacggccaatcccttgggtcaaaggggcaccccctagcgataaccctccctgtgcattcgacctggacgatcccagctgcgacaagacacctctgagcaccttggctattgttgccttgggtacgggcattacgttcattatgtttggggtctcttccttcttgatcttccgcaaactcatgctcgaaaaggagctggcttcaatgttatggcgaataagatgggaagagctccaatttggaaactcagagagatatcataagggggctgggtcccggcttacactcagtctaagagggagctcctacgggtccctgatgacagcgcatggaaaataccagatctttgcaaacactggacactttaaagggaacgttgttgcaatcaagcatgtaaataagaagaggatcgaactgactcggcaagtcttgttcgagctgaaacatatgcgtgacgtccaatttaaccacctgacaaggtttatcggcgcgtgtatcgaccctccgaacatctgcattgtcactgagtactgccctagagggagtctccaagacattctggaaaacgattctattaatctcgactggatgttccgctatagccttatcaacgacttagtaaaaggcatggcttttctgcataactcaattattagcagccacgggtctttaaaaagctccaactgcgttgtggatagtcgtttcgtgctcaaaatcacggattatgggttggcctcatttcggagcaccgcggagccagatgatagtcatgccctctatgccaaaaagctgtggaccgcaccagagctgctgtcaggcaatcccctcccgacaacaggcatgcagaaagccgatgtctattcctttgggattatactacaagagatagcacttagatctgggccgttctacctcgaaggattggacttgtctcctaaagaaatcgtccaaaaggtgagaaatgggcaacggccatacttccgtccctctatcgacagaactcagctgaatgaagagctcgttctgctcatggagagatgctgggcgcaggacccagcagaacggcccgactttggccagatcaagggattcattaggcgcttcaataaagagggggggacgagtatcctggacaacctgctactgagaatggaacagtacgctaataacctcgagaaactggtcgaggagagaacacaggcctatctggaggagaaaagaaaagccgaggcactactgtatcagattctcccccatagcgttgctgagcagctcaaacggggggaaaccgtacaagcggaggccttcgactctgtgaccatctacttctccgacattgtcgggtttactgcattgtccgctgagtcgacaccaatgcaagtagtgacccttcttaatgatctttacacatgctttgatgccatcattgataattttgatgtatacaaggtggagacaattggtgatgcctatatggttgtgtctggactgccaggtagaaacgggcagcgccacgctcctgagatagctaggatggctctggccctcctcgacgctgtcagcagttttcgaattagacaccgacctcacgaccagctccgcctccgtataggagtccacacagggcccgtgtgcgcaggagttgtcggacttaagatgccgagatattgtctgttcggcgataccgtcaacacagctagccggatggaatctaatggccaggctttgaagattcacgtctcctctactactaaggatgcactcgatgagctgggctgcttccagctagaactccgaggagacgtggagatgaaagggaaaggcaagatgaggacctattggttgttgggcgaacggaaaggacccccaggtttgctatag

SEQ ID NO: 125856 - DNA, 1626 bp, synthetic construct
  misc_feature 1..1626: note = Description of Artificial Sequence: Synthetic coding sequence
  source 1..1626: mol_type = other DNA
atgccttccctgctagttctgaccttctccccctgcgttctactgggctgggctctgctcgcaggtggaaccggcggtgggggcgtagggggagggggagggggagccggaattggaggggggcggcaggaacgcgaagctttgccaccgcaaaaaatcgaggtccttgtcctcctgccacaggatgactcatacctcttttccctgaccagggtaagacccgccatcgagtatgctttaagatctgtcgagggtaacggaaccggtagaaggctgcttccccctggaacgaggttccaggtggcctatgaagactccgattgtggcaatcgcgccctgttctctctggtggatcgagtggcagccgccagaggcgctaagccagacctaatacttggacctgtatgtgagtatgccgcggccccggtggcccggctcgcctctcattgggacctgcccatgttaagtgccggggccctcgctgccggcttccagcacaaggattcagaatatagtcacctgacgagggtcgctcctgcctacgcaaaaatgggtgagatgatgctggccctttttaggcaccaccactggtccagggccgctttagtgtactcagatgacaaactcgagaggaattgctacttcaccctcgaaggggttcacgaggttttccaagaggagggtctccatacttcgatttacagcttcgatgagaccaaagaccttgacttggaggatattgtgcgaaacattcaagcatcagaaagagtggtcataatgtgcgccagttcagatactattcgctccatcatgttagtagcacaccgacatggcatgacttcaggcgactacgccttctttaatatcgaactgttcaactcatcaagctatggtgacggctcttggaaacgaggggacaagcacgattttgaagccaagcaagcttattcttccttacaaactgttacccttctccggaccgtgaagcccgagttcgagaagttctctatggaggttaaatcttcagtggaaaaacagggactcaatatggaggactatgttaacatgtttgtcgaagggttccatgacgctattctgctctacgtcctggccctgcacgaagtcctaagggcagggtacagcaaaaaggacgggggaaagatcatacagcagacatggaataggactttcgagggcattgcgggccaggtcagtattgatgcaaatggggatcgttatggagatttttctgttattgctatgacagatgtggaagctggcacccaggaggtgattggcgactacttcggtaaagaaggaagatttgaaatgcgccctaatgtcaaatatccttggggccctcttaaactccgcatcgatgagaataggatcgtcgaacatacaaattcgtccccatgcaagtcatctggcggcctcgaagaatccgctgtgactggaattgtcgtcggtgcactactgggcgcgggcctgttgatggcgttctatttctttagaaagaaatatcgaataaccatcgagcggcggacccagcaggaggagtcaaatctcggaaagcaccgagaacttagagaggacagcattaggagccacttttccgttgcctag

SEQ ID NO: 125857 - DNA, 1623 bp, synthetic construct
  misc_feature 1..1623: note = Description of Artificial Sequence: Synthetic coding sequence
  source 1..1623: mol_type = other DNA
atgccctccctgttagtgctgactttttcaccctgtgtcctgctaggttgggcacttctggccgggggaaccggtggaggcggggtgggaggtggcggcggaggtgccggaataggcgggggacggcaagagagggaggctttgccaccacagaagatcgaggtgctagtcctgctgccccaggatgatagctatttgttttcacttacgcgcgttcggccagccatcgaatatgcccttcgtagcgttgaggggaacgggacagggagacgtctcctgccaccgggtacaagatttcaagtggcttatgaagattcggattgcggcaatagagctctgttcagcctagtagaccgcgtggctgccgcacggggcgccaagccagatctcatcttaggacctgtctgtgaatacgccgcagcgcccgtggccagattggcctcgcattgggatctgcccatgctcagcgctggggctttggcagctggatttcagcacaaggactctgagtactctcacctgacacgagtcgcacctgcgtacgcgaagatgggggagatgatgctggcgttatttcggcatcatcattggtcaagagccgccctggtgtacagcgatgataaactggaaagaaattgctacttcacactcgagggggtccacgaagtattccaggaagagggactgcatacatcaatctattcatttgacgagacaaaagacctagacctggaggacattgtcagaaacatccaggcttcagaaagggttgtaatcatgtgtgctagttcagacactattcgctctattatgcttgttgcgcacaggcatggtatgacctctggcgactacgccttctttaatatcgaacttttcaatagctcttcatatggggatgggtcatggaagaggggtgataagcatgatttcgaggccaaacaggcctactcaagcctccagactgtgactctgctgcgcactgtgaagcctgagtttgaaaagttctcgatggaggtgaaaagctcagtggagaagcaggggctgaacatggaagactacgtcaatatgttcgtcgaagggttccacgatgcaattctcctgtatgtgcttgctctccatgaagtgctgcgggcaggatactccaagaaggatggaggaaagatcattcagcagacctggaatcgcacattcgaaggaatcgccggacaagtgtctatcgatgcaaatggagaccgctacggtgacttctcagttattgcaatgactgacgttgaagccgggacccaggaagtgatcggcgattactttggaaaggaagggagatttgagatgcggcctaatgtgaaatacccttgggggcctctaaagctgaggatagacgaaaacagaatcgtcgaacacaccaattcctctccttgtaaaagctgcggcctggaggaatccgccgtaaccggcattgtcgtgggggccctacttggggctggcctgctgatggcattttatttctttaggaaaaagtatcgcattaccattgagcgtaggacacagcaggaagaatccaacctgggtaagcatagagagctacgtgaggatagtatacgaagccacttctccgttgcatag

SEQ ID NO: 125858 - DNA, 975 bp, synthetic construct
  misc_feature 1..975: note = Description of Artificial Sequence: Synthetic coding sequence
  source 1..975: mol_type = other DNA
atggagccctccgctctgggcccctggagcctctttcccgatctggcaccacgagaccaagaaggacaggtgcttgcgccaagacgttgctttaggcgggagtgcggccagaatgaaaaggttgtgattatgtgtgcctctagtgacaccatccgcagcattatgttagtagctcaccgccatgggatgacttctggggactatgcctttttcaatatcgagttatttaactcaagctcttacggcgatggaagttggaagcggggggacaagcacgatttcgaagcgaaacaagcctattcctctctgcagactgtcacactgttgcgtactgtgaagcctgagttcgagaagttctcgatggaggtgaagtcatccgtggagaaacagggcttgaacatggaggattacgtcaacatgtttgttgaggggtttcatgacgccatcttgctgtatgtgctggccttgcacgaggtgctaagagcaggttactcaaaaaaagacggaggtaaaataattcagcagacctggaaccggacctttgaaggcatagccgggcaggtgagcatcgacgcaaatggagatcggtacggcgatttctcggtgatagccatgaccgatgtggaagccgggacacaggaggtgattggcgattatttcggtaaggagggtcgctttgagatgcgcccaaacgtgaagtatccatggggtcctttaaagctgcgcattgatgagaacagaatcgtggagcacaccaattcttctccatgtaaaagctgcggcctggaggagagcgcggtcactgggatcgtggttggcgcacttctaggcgccgggttactgatggccttttactttttccgaaagaaataccggatcaccatcgaaaggcgcacacagcaggaggagtcaaacctgggaaagcaccgcgagcttcgagaagattctattagatcacacttttcagtcgcgtag

SEQ ID NO: 125859 - DNA, 915 bp, synthetic construct
  misc_feature 1..915: note = Description of Artificial Sequence: Synthetic coding sequence
  source 1..915: mol_type = other DNA
atgtcatctacactgcctgccttgttatgcgtgggtctctgtcttagccaacggatttccgcccagcagcagacactgcccaaaccgttcatctgggcagaaccgcattttatggtgccaaaggagaaacaggtgacaatttgctgtcaaggcaactacggggcggtggaataccagctgcacttcgaagggagtctctttgccgtggatcgaccaaaacctccagaacgcatcaacaaagtgaagttctacatccctgacatgaattcccgcatggcgggtcagtactcttgcatatacagggtgggggagttgtggtccgagccctccaatctgcttgatctggtggtgactgagatgtacgacactccgacactgagcgtgcacccaggacctgaggttatctcaggagagaaggtcacattctattgccggctcgatacggctactagcatgtttctgctgctgaaggaaggacggtctagtcacgtgcagaggggttatggcaaagtgcaggcagaatttcccctcgggcccgtgaccacagctcacagagggacgtatcggtgctttggttcgtacaacaatcatgcctggagctttccaagcgagcctgttaaactcttggttaccggagacatcgagaataccagtctcgctcctgaggaccctaccttccctgccgacacatggggaacatatctgctgactactgagacaggcttgcagaaagatcacgctctttgggaccacacagcgcaaaacttgttacgcatggggctcgccttcctggtcctggtggctctggtgtggtttctggttgaggactggctgtcgcggaagcggaccagggaacgtgcaagccgagcatcaacctgggaaggtaggcggaggctcaatacccaaaccttatag

SEQ ID NO: 125860 - DNA, 864 bp, synthetic construct
  misc_feature 1..864: note = Description of Artificial Sequence: Synthetic coding sequence
  source 1..864: mol_type = other DNA
atgtcatcaaccctccccgccttactgtgtgtcggtctgtgtctgtcccagcgaatttccgcacagcagcagaccttgcctaaaccattcatttgggccgagcctcattttatggttcccaaagagaagcaggtcacaatttgctgccagggcaattacggggcagtcgagtaccagctgcatttcgaaggttccttgttcgcagtcgacagacccaagcctccggagcgcatcaacaaggtaaaattctacatcccagacatgaacagtaggatggcagggcagtacagctgcatctatagagttggggagttgtggtcggagccgtctaacttgttggacttagtggtcactgaaatgtacgacactcccactctctctgtccatcctggccccgaggtgatttctggtgagaaggttactttctactgccgcctggatactgccacttccatgttcctgcttctaaaagagggacgctcaagtcatgtgcaacggggctatggcaaggtgcaggctgaatttcccctgggtccagtgacgaccgcccaccggggaacctaccgctgcttcggctcctataacaatcacgcatggagcttcccttctgagccagttaaactgctggtgactggtgacatcgaaaacacatcactggccccggaagatccgaccttccctgaccacgccctgtgggatcacaccgctcaaaacttgctgaggatgggcctggcattcctggtgctagtagcactggtgtggttcttggtagaagactggctctccaggaagcggacgcgcgaaagagccagtagagcttccacttgggaaggacggcggagattgaatacacagacactctag

SEQ ID NO: 125861 - DNA, 630 bp, synthetic construct
  misc_feature 1..630: note = Description of Artificial Sequence: Synthetic coding sequence
  source 1..630: mol_type = other DNA
atgtcttcaacactgcctgctctcttatgtgtggggctctgtctttcccaacgaatatctgcgcagcagcaaatgtacgatacgccgactctttcagtacatccgggtcctgaggtcatatccggagagaaagtgacattttactgcaggctagatacagcaacttccatgtttctgctgctgaaagaaggacgctctagtcacgtgcagcgcgggtatggaaaagtacaggccgagttcccattgggccctgtaacaacagcccatcgcggcacctaccgctgctttggctcttataacaatcacgcatggagtttcccctccgaacctgtaaagctcttagtgacaggcgatatcgagaacacatcactcgccccagaggatcctacgttccccgcagacacatggggcacgtacctcctgacaacagaaacaggtctccagaaggaccacgccctgtgggatcacaccgcacaaaacctgctgcggatgggcctggctttcttggtgctcgtggctctcgtgtggttcctggtggaagactggctctcaaggaagagaacccgcgaacgggcatctagagctagtacctgggaagggcggcgcagactgaacactcagactctgtag

SEQ ID NO: 125862 - DNA, 594 bp, synthetic construct
  misc_feature 1..594: note = Description of Artificial Sequence: Synthetic coding sequence
  source 1..594: mol_type = other DNA
atgtcctccacattgcctgccctcctctgtgttgaaatgtatgacacccccactctatccgtgcatcctggccccgaggttatatccggcgagaaggtgaccttttactgtaggctggataccgccacctcaatgtttttactgctaaaggagggaagaagctcccatgtccaaagaggatatgggaaggtccaggccgagtttcctctgggaccagttaccacagctcatagagggacatacaggtgttttggaagctacaataaccatgcttggagttttcctagcgagccagttaagctgcttgtcaccggagatatagaaaatacctccctggcacccgaagacccaacttttccagccgatacttggggaacttatctcctcactaccgagacgggacttcaaaaggaccacgctctatgggatcatacggcgcagaacctgctgagaatgggccttgctttccttgttctcgtcgcgctggtctggttcctggtggaagactggttgagtcgtaaaaggactagggaacgagctagcagagctagcacctgggaggggagaagacgactgaacacccagactttatag

SEQ ID NO: 125863 - DNA, 912 bp, synthetic construct
  misc_feature 1..912: note = Description of Artificial Sequence: Synthetic coding sequence
  source 1..912: mol_type = other DNA
atgagcagcacattgccagccctgctgtgcgtagggttgtgtctttcccaaaggatctctgcacaacagcagactctgcccaagccctttatctgggcagaacctcactttatggtgcccaaagaaaagcaggtgacaatatgctgccagggcaactatggagccgtggagtatcaacttcacttcgaaggaagtctgtttgccgtggacagaccaaaaccccccgagagaatcaacaaggtgaagttctacatccctgacatgaacagtagaatggcaggccaatacagctgcatctatcgggtgggcgaattgtggtctgaaccaagtaatctgttggatctggtggttacagaaatgtacgacacaccgacactgtcggtgcaccctggacccgaggttataagcggagagaaggttaccttctattgccgactggacaccgctacgagtatgtttctgctgctgaaagagggccgctcatcgcacgtccagcggggctatggaaaggtgcaagcagagttcccactaggcccggtgacaaccgcccacagggggacttacagatgttttggcagctacaacaatcacgcttggtcttttccttctgaaccggtaaagctgctcgtgactggcgacatcgagaacacgagtttagcgccagaggatccgacatttccggacacttggggcacctacctgttgacgaccgagactggacttcaaaaggatcatgcactctgggaccataccgcccagaaccttctgcgcatgggcctggctttcctggttctggtggcacttgtgtggtttctagtagaagattggctttcacgtaagcgcacacgtgaaagggctagtagagcatcaacctgggagggcagaaggcggcttaacacgcagacactctag

SEQ ID NO: 125864 - DNA, 777 bp, synthetic construct
  misc_feature 1..777: note = Description of Artificial Sequence: Synthetic coding sequence
  source 1..777: mol_type = other DNA
atggcttggagggccctccaccctttactactgctgctcctcctgtttccgggcagccaggcacagtccaaggcccaagtgctgcaatccgtcgcgggacagaccctcaccgtacggtgtcagtatcctcccaccgggagtctttatgaaaaaaaagggtggtgcaaggaagcctccgccctggtctgtataagacttgttaccagctcgaagccacggactatggcatggacatcccgctttactatctgggacgacccggatgctgggttcttcactgtcacaatgaccgacctcagagaagaagattcggggcattattggtgtcgtatttacagaccctccgataacagcgtaagtaaatctgtgcgattctacttagtagtgtccccagcctcagctagcacccagacgagttggacaccgagagatttggtgagctcccagacccagacccagtcctgtgtgcccccaactgccggcgctcggcaggcccccgagagtccgagcaccattcctgtcccttcccagccccagaactctacactgaggcccggccctgcagccccaattgcgctggtgcctgtattttgcggcctcctcgtcgccaaatccctggtgctgagcgctctcctagtgtggtgggtgctccggaacagacacatgcaacaccagggcaggtccctccttcaccccgctcagcccagacctcaggctcataggcattttcctctgagtcatagagcgccaggcggaacctacgggggaaagccttag

SEQ ID NO: 125865 - DNA, 813 bp, synthetic construct
  misc_feature 1..813: note = Description of Artificial Sequence: Synthetic coding sequence
  source 1..813: mol_type = other DNA
atggcctggagggccctccacccactgcttttgctgttactgctctttcctggaagtcaagctcagtctaaggcgcaagttctgcaatccgtggccgggcagactttaactgtgcggtgccagtaccctcctaccggttccctctatgagaagaagggctggtgtaaggaagcttctgccctggtgtgcattcggttagttacatcatctaagccacggactatggcctggacctcgcggttcactatctgggacgatccagacgccggattctttacagtcaccatgaccgacctgagagaggaagactccggccactattggtgccggatctacaggccatctgacaactctgtatccaagtcggtgaggttttacctcgtagtctcacccgcctctgctagtacgcaaacctcatggaccccacgagacctggtatcgtcacagacacaaactcagagctgcgtgccccctaccgccggagctcggcaagcacctgaatccccttccacaattcctgtaccttctcatccttccagtccgctacccgtgcccctgccatcccgcccccagaactccacactccgccccggccccgccgcgcccattgcattggtgccagtcttctgcggactcttggtggccaagagtttggtactgagtgctctgctggtctggtgggtcctgcgcaaccgacatatgcagcatcagggcagatcactactgcatccagcacaaccaaggccccaggcacacagacacttcccactctcacaccgggcacctggcggaacttacggcggaaagccgtag

SEQ ID NO: 125866 - DNA, 831 bp, synthetic construct
  misc_feature 1..831: note = Description of Artificial Sequence: Synthetic coding sequence
  source 1..831: mol_type = other DNA
atggcatggagggccctgcacccactgctcctgcttttgctgctattccctggatcacaggctcagtctaaggcacaagtgctccagagcgtcgcaggtcaaacactgactgtgaggtgtcagtatccccctaccggcagcctgtatgagaaaaagggttggtgcaaggaggccagtgccttagtgtgtattcgcctggtcacctcctctaaaccccgaacaatggcatggacatcgcggttcacgatctgggatgacccagacgctggctttttcacagtcactatgacagatctgagagaagaagactcaggccactactggtgtagaatttatagaccctcagacaacagtgttagcaaaagcgtccgcttttatctggtcgtgagccctgccagcgcgagtacgcaaacaagctggaccccccgcgacctcgtttcgtcacagactcagacacaatcatgtgtaccacctaccgcaggcgccaggcaggccccggagtcccctagcactattccggtgccgagtcagccgcagaacagcacgcttagacccgggcctgccgcccccattgcgctggttccggtgttttgcggcctcctcgttgcaaagagccttgttttgtcagctctgctcgtttggtggggagacatttggtggaagaccatgatggagcttcgttccttagacacacagaaagctacttgtcatcttcagcaggtgaccgatcttccatggacctccgtgtcatcccctgtggaaagggagattctgtaccacactgtggctaggaccaagatatctgatgacgatgatgagcacaccctgtag

SEQ ID NO: 125867 - DNA, 606 bp, synthetic construct
  misc_feature 1..606: note = Description of Artificial Sequence: Synthetic coding sequence
  source 1..606: mol_type = other DNA
atggcctggatgctcctgctgatcctcattatggtgcaccccggttcctgcgcactatgggtgtcgcagcccccagagatccggacgcttgagggtagcagcgcttttctcccttgttcttttaacgcttcccaaggcagactcgccattggatcggtaacgtggtttagagatgaggtggtccctggcaaagaagtgagaaatggaacgccagaattccgcggccgccttgcaccgctcgctagttcgcggttcttgcacgaccaccaggccgagcttcacatccgtgacgttcgggggcacgacgcctcaatttatgtctgcagggtggaggtgctgggcctcggcgtgggtaccggtaacggcactagactcgtagtggagaaggagcacccccagttgggcgctggaaccgtgctcctcttaagagccggattttacgctgtgtcctttttgtcggtcgccgtggggtccactgtttactaccaggggaagtgtctgacatggaaagggcccagacggcagctgcctgcagtcgttcccgcgcccctgccccccccctgcggtagcagcgcccacctgctccctcccgtccccggcgggtag

SEQ ID NO: 125868 - DNA, 498 bp, synthetic construct
  misc_feature 1..498: note = Description of Artificial Sequence: Synthetic coding sequence
  source 1..498: mol_type = other DNA
atggcctggatgcttctgctaatcttgatcatggtgcaccccgggtcctgcgctctgtgggtcagccagccccctgagatccgcactctggaggggtcctcagcgttcttaccttgtagtttcaatgcgtcccaaggtcgccttgccattggcagcgtgacatggttccgagatgaggtggttccgggcaaagaggcagagttacacatccgagatgtgcggggtcatgacgctagcatctacgtgtgcagagtcgaagtgctgggcctgggtgttggcacaggcaatggaacacgcctagttgtggagaaagaacacccccagctcggagcaggtaccgtgctcttgctgcgcgctggattttacgcagtgtcatttctctccgtggctgtcggaagtaccgtctactaccaggggaagtgtcattgccacatgggaactcactgccatagttctgacggcccacggggcgtcatccccgagccccggtgcccttag

SEQ ID NO: 125869 - DNA, 573 bp, synthetic construct
  misc_feature 1..573: note = Description of Artificial Sequence: Synthetic coding sequence
  source 1..573: mol_type = other DNA
atggcatggatgctgttactgattctgataatggtgcaccctggctcctgtgccctctgggtgtctcagccccccgagatccggaccctggaaggcagcagtgcgttcctgccctgttcgtttaatgcctcacaaggacgcctggctatcgggtcagttacttggtttcgggacgaggtggtgcccggcaaagaggttaggaatggaacacccgaatttaggggtcgattggctcccctcgcaagcagcagattcctccatgaccaccaggctgagctgcatatcagagatgttcgcggacacgacgcatctatttatgtatgtcgcgtggaagtactggggctcggcgtgggaaccggcaacgggacacgcttggtggtcgagaaagagcacccacagctgggtgcggggacagttctgttgctcagagcaggcttctacgccgtcagttttctgagcgtggccgtcggatctacagtgtactaccaaggcaaatgtcactgccacatggggacacattgtcactcctccgacggtcccagaggggtaatccccgaaccaagatgcccttag

SEQ ID NO: 125870 - DNA, 534 bp, synthetic construct
  misc_feature 1..534: note = Description of Artificial Sequence: Synthetic coding sequence
  source 1..534: mol_type = other DNA
atggcctggatgctgctcctgatccttataatggtccaccctgggagttgtgccctgtgggttagtcagcccccagaaatacgcactctggaaggcagtagcgcgtttctgccctgttcttttaatgcttcccaggggagattagctatcgggagtgtaacttggtttagggatgaagtggttcctgggaaagaggtgcggaatggcactcccgagttccgagggcgccttgccccgctggcttcttctagatttctgcatgatcaccaggctgaactacatattcgtgacgtgaggggccatgatgccagtatctatgtgtgtagggtcgaagtgttgggcctgggagtgggtacaggcaacgggacgcgccttgtcgttgagaaggaacatccgcagcttggggcaggtactgtcctgcttctccgggcaggtttctacgcggtgtcttttttgagtgtcgcagtcgggtccacagtctattatcagggaaagtatgctaaaagtactctttctggcttccctcaactctag

SEQ ID NO: 125871 - DNA, 573 bp, synthetic construct
  misc_feature 1..573: note = Description of Artificial Sequence: Synthetic coding sequence
  source 1..573: mol_type = other DNA
atggcatggatgctgctgcttatcctaataatggtgcaccctggctcttgcgctctctgggtgtcacaacctcctgaaataagaaccctggagggcagctcagccttccttccctgctcctttaatgctagccagggacgcttggcgattggcagtgtgacctggtttcgcgacgaagtcgtgccagggaaggaggttcgcaacggcacaccggagtttcgtggccggctggcccccttggcttctagcagattcttgcacgatcaccaggccgaactgcacataagagatgtgcgtggccatgatgcatccatctacgtttgcagggtggaggtgctgggcctgggcgtgggtacaggaaacggaacccgcctggttgtggaaaaagaacaccctcaactcggcgctgggacagtcctgctactaagggcaggcttttacgcggtgtcctttttgagcgtggccgttggtagtaccgtttactatcagggcaaatgtcattgtcacatgggcacccactgccattcttccgacggcccgcgcggcgtaataccggagccacgctgtccctag

SEQ ID NO: 125872 - DNA, 606 bp, synthetic construct
  misc_feature 1..606: note = Description of Artificial Sequence: Synthetic coding sequence
  source 1..606: mol_type = other DNA
atggcctggatgctgctgctgatcctgattatggtgcatcccggcagctgcgccctctgggtgtcacagccaccagaaatcagaacactggagggaagttccgcctttctgccttgtagctttaatgcttcacaggggcgtctggctatcgggagcgttacctggttccgagacgaagtggtgcccggcaaagaggttcgaaacggaacacccgaattcaggggcagactcgcccccctcgcctcctctcgcttcctgcatgatcaccaagctgagctacacattcgcgatgtcagggggcatgatgcatctatctacgtttgtagagtcgaagttctgggactaggtgttggcacaggaaacgggacccgactcgttgtggagaaggaacacccgcaactgggcgcaggcactgtgctgctccttagggccgggttttatgccgtaagctttctcagcgtggccgtgggatcgacagtgtattaccaggggaagtgccttacttggaagggaccgcggaggcaattaccagccgtggtccccgcgccacttccaccaccctgcggcagcagtgcgcacttgctgcctccggtgcccggtgggtag

SEQ ID NO: 125873 - DNA, 534 bp, synthetic construct
  misc_feature 1..534: note = Description of Artificial Sequence: Synthetic coding sequence
  source 1..534: mol_type = other DNA
atggcgtggatgctactgctcatcctgattatggtgcaccccgggtcttgtgccctgtgggtatctcagccacccgagatcaggactctggaaggctcctctgcttttcttccatgcagtttcaacgcctcccaagggcgactagcaattggctccgttacctggttccgcgacgaagtggtgccggggaaagaagtgcggaacggaactcctgagttcagaggacggctggcacccctggcctcaagccgatttctgcatgatcaccaggccgaactgcacatcagagatgtacgggggcacgatgcatcaatttacgtgtgccgtgtggaagtgctcggattgggggtcggaactggaaacggtactaggttggtggtggaaaaagaacacccccagctcggcgccggaaccgtcctgctgcttagagcagggttctacgcggtttcctttttgagtgtggctgtaggatctaccgtctactaccagggcaaatatgctaagtccaccctgtctggctttccccaattatag

SEQ ID NO: 125874 - DNA, 498 bp, synthetic construct
  misc_feature 1..498: note = Description of Artificial Sequence: Synthetic coding sequence
  source 1..498: mol_type = other DNA
atggcctggatgctgcttctgatcctgatcatggtgcatcctggttcctgcgcgctgtgggtgtcacaacccccagagatcagaaccctcgagggttcaagcgccttcctcccgtgctcattcaacgcgtcccagggaagactcgctattggatccgtcacctggtttcgcgacgaagttgtgcctggcaaggaagctgagctgcatattcgtgacgtccggggccatgacgccagcatttacgtgtgcagagtcgaggttctcggattgggtgtgggaactgggaatggtacaaggctggtggtggagaaagagcatcctcagctgggggccgggacagtcctgctgctgagagcaggcttctacgccgtctcttttttgagtgtggcagttggatccactgtgtactaccagggcaagtgccactgtcacatgggaactcattgtcactcctcagacggaccaagaggagtaatccccgagccgcggtgtccgtag

SEQ ID NO: 125875 - DNA, 573 bp, synthetic construct
  misc_feature 1..573: note = Description of Artificial Sequence: Synthetic coding sequence
  source 1..573: mol_type = other DNA
atggcttggatgctgcttttgatccttatcatggtacaccctggcagttgtgcactgtgggttagccagcctcccgagattcgcacactggaggggtcctcagcctttcttccctgctcctttaacgcatcgcagggtcgcctagccataggatccgttacgtggtttcgcgacgaagttgtgcctggcaaagaggtgcggaatggaactcctgagtttcgcggcagactggcccccctagcttccagccgattcttgcacgatcaccaagccgagctgcatatacgcgacgtcagaggccatgatgctagcatttacgtgtgtagggtggaggttctgggactgggagtcggaactggcaatggaacccgcctggttgtggagaaagaacaccctcaattgggtgccgggaccgtgctgttactgcgcgccggattttacgcagtgtccttcctctcggttgcggttggttctaccgtgtattaccagggaaaatgtcattgccatatgggaacccactgtcactcttcagacgggcctaggggcgtgatcccagagcctcggtgtccgtag

SEQ ID NO: 125876 - DNA, 606 bp, synthetic construct
  misc_feature 1..606: note = Description of Artificial Sequence: Synthetic coding sequence
  source 1..606: mol_type = other DNA
atggcatggatgctgcttctgattcttatcatggtgcaccctggctcgtgcgccctgtgggtgtcccagccacccgagataaggacactggaaggatcctccgcattcctcccgtgcagtttcaacgcctctcagggtagactggcaatagggtcagtcacctggttccgggatgaggtagttcctggcaaggaggttcgtaatggcactcccgagttcaggggacgactggctccactcgcaagtagcaggtttctacacgatcatcaggccgagctccacatccgggacgttcggggccatgacgcctccatatatgtgtgtcgagtggaggtgctcggcttgggggtgggaaccggcaatggtacaagactggttgttgagaaggagcacccccaacttggtgcaggcactgtcttgttgctgcgagccgggttttatgctgtctccttcctcagtgtggccgtcggaagcactgtttactaccagggtaagtgtctgacctggaagggcccaagacgacagctgcctgctgtggtgccagcaccactgcctcccccctgtgggagtagcgcccatttgctgcctcctgtccctgggggctag

SEQ ID NO: 125877 - DNA, 573 bp, synthetic construct
  misc_feature 1..573: note = Description of Artificial Sequence: Synthetic coding sequence
  source 1..573: mol_type = other DNA
atggcctggatgctgctactgattctaataatggtgcacccaggtagctgcgcactatgggtgagtcaacctccagaaatcagaacattagaaggatccagtgcttttcttccatgctcgtttaacgccagccagggtcgactggcaatcggcagtgtaacatggttccgcgatgaagtggtccccgggaaggaagtacgcaatggtacaccggaattcagaggccgactggctccactggcaagttccaggtttttacacgaccaccaggcggagctgcacatccgggatgtgaggggccacgatgccagcatctatgtctgtagagtcgaagtgttggggctgggagttgggactggcaatggcactcgtctcgtcgtggagaaagagcaccctcagcttggtgctggcaccgtgctcctcttacgcgctggattctacgccgtgtctttcctctctgtggcagtcggctcaacggtctattaccagggcaagtgccattgccacatggggacgcattgccacagttcggatggtccgagaggcgtgatacctgaacccagatgcccttag

SEQ ID NO: 125878 - DNA, 498 bp, synthetic construct
  misc_feature 1..498: note = Description of Artificial Sequence: Synthetic coding sequence
  source 1..498: mol_type = other DNA
atggcatggatgctgctgcttattctgatcatggtgcatccaggatcttgcgcactgtgggtatcccagccaccggagattcgaactctggaaggctcttctgctttcctgccatgctcattcaacgcctcgcagggtaggttggcaatcggatcggtgacttggttcagggatgaagtcgtgccagggaaagaagctgaactgcatattcgggatgtccggggtcacgatgcctctatttacgtctgtcgggtcgaagttcttggactcggcgtcggaacaggtaacggtactcggctggttgtcgagaaagaacatccccagctcggcgctggtactgttctgctgctgcgagcaggcttctatgccgtgagcttcctctccgttgcggtaggatccacagtttactaccagggaaaatgtcactgtcacatgggcacccactgccactccagtgacggccccagaggcgttattccggagccacggtgtccttag

SEQ ID NO: 125879 - DNA, 498 bp, synthetic construct
  misc_feature 1..498: note = Description of Artificial Sequence: Synthetic coding sequence
  source 1..498: mol_type = other DNA
atggcttggatgcttctccttatcctgatcatggtccatccaggctcgtgtgccctatgggtgtcacaacccccggagatcaggacacttgagggctcttctgccttcttgccctgttcttttaatgcctcccagggaagattggctattggctcagtcacctggttccgggacgaggtagtgccagggaaagaggccgaactgcatatacgcgacgtcaggggccatgatgcttcaatatatgtgtgcagagttgaggtactgggtctgggtgttggcaccggcaacgggaccagactggtagttgagaaggagcatccacagctgggcgccggtactgtgttgttactgagggcgggattttacgccgtctccttcctaagcgtagcagttgggagtactgtctattatcagggcaagtgtcactgccatatggggacccattgccacagcagcgatggtcctagaggagtgatccccgagcccagatgcccttag

SEQ ID NO: 125880 - DNA, 498 bp, synthetic construct
  misc_feature 1..498: note = Description of Artificial Sequence: Synthetic coding sequence
  source 1..498: mol_type = other DNA
atggcgtggatgcttttgctcattctgattatggtgcatcctgggtcctgtgcactgtgggtcagccagcctcctgaaattcggacactggagggcagttcagcgtttctgccgtgtagtttcaatgcctctcaagggaggctagcaatcgggtccgtcacatggttccgtgacgaggtggtacccggcaaagaggctgaactccacatccgagacgtgcggggccatgacgcatccatatacgtttgtcgcgtggaggtgctaggtttgggggtgggcacaggcaacggaactaggttggtagtagagaaggagcacccacagctgggggccgggaccgtcctcctgctgcgtgctggtttctatgcagtgtcgtttttaagcgtggcggttggctccaccgtctactatcagggaaagtgccactgccacatggggacacactgtcatagttcggacgggcccaggggggtgatcccagaaccacgctgcccttag

SEQ ID NO: 125881 - DNA, 606 bp, synthetic construct
  misc_feature 1..606: note = Description of Artificial Sequence: Synthetic coding sequence
  source 1..606: mol_type = other DNA
atggcttggatgctcttactgattctcataatggtacatcccggttcctgtgccctgtgggtgtcccaaccacctgaaatcagaactctggagggcagtagtgccttcctaccgtgctcctttaacgctagccagggccgacttgccattggaagcgtgacctggttccgcgacgaagtggtcccgggcaaagaagtgaggaacggcaccccagaatttaggggcagacttgctcccctggccagctcaagattcttgcatgaccatcaggccgagttacatatcagggatgtccgaggtcatgacgccagcatttatgtctgtcgcgtcgaagttctcggacttggtgtcggaaccgggaatggcactcgtttggtcgtggaaaaagagcacccccagctgggcgccgggacggtgttactcctccgggctggattttatgccgtgagctttctcagtgtggcagtggggtcaacggtgtactaccagggaaagtgcctgacctggaaagggccgcgaagacagctgccggccgtggttcccgctcctctgcctcctccatgcggatcaagtgcacacctgctcccacctgttcctggcgggtag

SEQ ID NO: 125882 - DNA, 606 bp, synthetic construct
  misc_feature 1..606: note = Description of Artificial Sequence: Synthetic coding sequence
  source 1..606: mol_type = other DNA
atggcttggatgttgttgctcatcctgattatggtgcaccctggctcgtgtgctctctgggtgtcccagccaccagagatacgcacactcgaaggttcatccgccttcctgccctgcagcttcaatgcttcccagggtcggctggcaatcgggtcagtcacctggtttagggatgaggtagtcccggggaaagaagttcggaacggcacacccgagttcaggggcaggctcgccccactagccagctccagatttctgcacgatcatcaagctgagctgcatattagagatgttaggggacacgacgcctccatctatgtgtgtagggtggaggtgctgggcttaggtgtcggtacgggaaatggcacccgtttagtggtggagaaagaacacccccagctgggcgcgggaacagtcttgctgctgagggcaggcttctacgccgtgagtttcctgtcggtggccgtggggagcactgtgtactaccagggaaagtgcctgacgtggaagggcccgcgtcggcaactgcccgcggtagttccagcccccttgcctcccccctgtggatcgagcgctcacctcctgcccccagtgcctggaggttag

SEQ ID NO: 125883 - DNA, 534 bp, synthetic construct
  misc_feature 1..534: note = Description of Artificial Sequence: Synthetic coding sequence
  source 1..534: mol_type = other DNA
atggcgtggatgctcctcctgatacttatcatggttcatcctggcagttgcgcactgtgggttagtcagccacctgagatccggaccctcgagggctcttccgcctttctgccttgttcgtttaatgctagccaagggcgattagccatcggttcagtcacgtggtttagagatgaggtggtacccggaaaagaagtgcggaatgggacaccagagtttcgcggcaggttggcccccctggcgtcttccaggtttttgcatgatcaccaggcagagctgcacattagggacgtacgaggtcacgacgcatctatatatgtctgtagggtggaggtcctgggtttaggggtgggcaccggtaatggcaccagactcgtggtggagaaggagcaccctcagcttggagcagggaccgtgctactgctccgcgcaggcttttacgccgtgtcgttcctatccgtggctgtgggctctaccgtatattatcaaggcaagtacgctaagtccacactctcaggcttcccccagctctag

SEQ ID NO: 125884 - DNA, 534 bp, synthetic construct
  misc_feature 1..534: note = Description of Artificial Sequence: Synthetic coding sequence
  source 1..534: mol_type = other DNA
atggcctggatgctcctgctgatactcatcatggtgcatcctggttcttgcgccctatgggtgagccagcccccagagatcagaaccctggagggctcctccgccttcctgccttgttcgtttaatgcctctcaagggcgtcttgctatcggatctgtgacctggttccgggacgaagttgtgccgggtaaagaggtgagaaacggcacccctgagttcagggggagactagctcccctcgcctcctctagatttcttcacgaccatcaggcagagctccacattagggacgtgcgaggacacgacgcttctatctacgtgtgccgagtggaggtcctgggactcggcgttggtacaggaaacggtaccaggctcgtggtcgaaaaagagcaccctcagctcggagccggcacagtcctcttgctgagggccggcttctacgcagtcagctttttaagcgtggccgtgggatctactgtgtactaccaggggaagtatgccaagtctaccttatctggattcccccagctctag

SEQ ID NO: 125885 - DNA, 606 bp, synthetic construct
  misc_feature 1..606: note = Description of Artificial Sequence: Synthetic coding sequence
  source 1..606: mol_type = other DNA
atggcttggatgctgctgctgatactcattatggttcatcctggatcctgcgccctatgggtgtctcagccccctgagattcggacattagaaggatcttccgcctttttgccctgcagctttaacgcatcccagggccggcttgctatagggtccgtgacttggttccgcgacgaggtggttcccggaaaagaggttcgcaacggcacacctgagttccgcggacggctcgcccctctcgctagctcaagattccttcatgatcatcaggcagaactccatatacgagacgtccgggggcatgacgcctcaatctacgtgtgcagagtggaggtgcttggcctgggggtcggcaccggcaatgggactcgtctggtggttgaaaaggaacatccacaactgggcgcaggcacagtcttgcttttgcgcgccgggttctacgccgtgagttttctcagcgtggccgtcggtagtactgtctactatcagggcaagtgcctcacttggaagggccctcggagacagttgcccgctgtggtgcccgcccccctcccaccgccgtgtgggtccagcgctcatcttcttcctcccgttccagggggctag

SEQ ID NO: 125886 - DNA, 534 bp, synthetic construct
  misc_feature 1..534: note = Description of Artificial Sequence: Synthetic coding sequence
  source 1..534: mol_type = other DNA
atggcttggatgcttcttctgattcttattatggtgcatccgggaagttgcgccttgtgggtatctcagccacctgaaattaggaccctggagggaagctctgcatttcttccttgttctttcaatgcctcccagggccggctggcaattggtagcgtgacttggtttagagatgaggtcgtaccaggcaaggaagtgaggaatgggacccctgagttccgcggtcgcctggcccccctagccagttctcgttttctccatgatcatcaggccgagctgcatataagagatgtgcgcggacatgacgcctccatctatgtatgtcgggtcgaagtccttgggctaggagtcggtacggggaatgggactcgattagtggtggaaaaagaacacccccagttgggcgccggcaccgttctgctgttacgggccggattttatgctgtctcttttctgagcgtggcagtgggaagtactgtgtactatcaaggcaagtacgccaaaagcacactgtccgggttccctcagctgtag

SEQ ID NO: 125887 - DNA, 573 bp, synthetic construct
  misc_feature 1..573: note = Description of Artificial Sequence: Synthetic coding sequence
  source 1..573: mol_type = other DNA
atggcctggatgttgctacttatcttaattatggtgcatcccggctcatgtgcactgtgggtctcccagccccctgaaattagaacactggagggcagctccgcatttcttccatgctcatttaatgccagtcagggaagactcgccatcgggtcggtcacgtggttccgggatgaggtggtcccaggaaaggaggtacgcaacgggacacccgagtttagagggcgcttggccccccttgcctcttctcggtttctgcatgaccatcaggctgaactgcacatccgcgatgtgaggggccatgatgcctctatttacgtatgcagggtggaagttttagggttaggggtgggaaccgggaacggaacaaggttggttgtagagaaggaacacccccaactgggcgccggtactgtgctgctgttgagggcaggtttttatgctgtgtcctttctgtctgtggcggttggatctacagtctattaccagggaaagtgccattgccacatggggacccattgtcacagctcagatgggccacggggggttatccctgagccgcggtgcccatag

SEQ ID NO: 125888 - DNA, 606 bp, synthetic construct
  misc_feature 1..606: note = Description of Artificial Sequence: Synthetic coding sequence
  source 1..606: mol_type = other DNA
atggcctggatgcttctcctgatcctgattatggtgcaccctggaagctgtgccctttgggttagccagcctcccgaaatacgaacccttgagggctcctccgcttttctgccttgctcatttaatgcttctcaaggaaggctggccatcgggtccgttacatggttccgtgacgaagtggtccctggtaaggaggtgcgtaatggaactcccgagttcagggggaggctggcccccctcgctagcagtagattcttgcacgaccaccaggccgagctgcacattcgggacgttagggggcacgatgcttccatttacgtgtgtcgggtagaagttctcggcctgggcgtcggcaccggtaatgggacaaggttagtagtagagaaagaacatccacaacttggtgccgggacagttttgcttctgagggccggattctatgccgtaagtttcctgtctgtcgctgtcggcagcaccgtgtactaccaaggcaagtgcctgacctggaagggcccgaggcggcagctgcccgccgtggtccccgccccattgcccccaccctgtggttcttctgctcatctcctgcccccggtccccgggggatag

SEQ ID NO: 125889 - DNA, 498 bp, synthetic construct
  misc_feature 1..498: note = Description of Artificial Sequence: Synthetic coding sequence
  source 1..498: mol_type = other DNA
atggcctggatgttattattaatcttaattatggtccaccccggctcatgcgcgttatgggtttctcaaccgcccgagatccgcaccctggaggggagcagcgcattcctgccgtgcagcttcaacgcctcacagggaaggttggccattggatccgttacatggtttagagatgaagtcgtccctgggaaagaggccgaactccacatacgtgacgtcagaggccacgatgcatcaatttacgtgtgccgcgtggaagtgctggggctgggggtcgggacgggtaacggtactaggctggttgttgagaaggaacacccccaacttggagccgggacagtgcttcttctcagagcagggttctatgccgtgtcatttcttagcgtggctgtgggtagtaccgtctactatcaggggaaatgccactgtcacatggggacccactgccattcctccgacggaccaagaggcgtgatccctgagcctagatgtccttag

SEQ ID NO: 125890 - DNA, 534 bp, synthetic construct
  misc_feature 1..534: note = Description of Artificial Sequence: Synthetic coding sequence
  source 1..534: mol_type = other DNA
atggcctggatgttattattgatcctgattatggtccaccccgggtcttgcgctctctgggtgtcccagccaccggagattaggaccctggaaggatcctccgccttcctgccctgcagcttcaatgccagtcagggacggctcgccataggctcagtaacttggttcagggacgaagtggtaccgggcaaagaggtgcgtaacggcacccctgaatttcgggggcggcttgcacctctcgccagctccagattccttcatgaccatcaggcggagctgcatattagagacgtcaggggtcacgatgcttcgatctacgtgtgtcgggtggaagtcttgggcttgggcgtaggaacgggcaacggtacccggttggtcgtcgagaaagagcaccctcagctcggcgccggtacagtcctgctgctgcgcgcgggcttttatgcagtgtcattcctttccgtggcagttgggagcacagtttactatcagggcaagtacgccaaatccacactgagcggatttccgcagctgtag

SEQ ID NO: 125891 - DNA, 573 bp, synthetic construct
  misc_feature 1..573: note = Description of Artificial Sequence: Synthetic coding sequence
  source 1..573: mol_type = other DNA
atggcttggatgctgctgctgattctgataatggtgcacccaggttcttgtgccttgtgggttagccagccaccggaaatccgcaccctggagggttcctcggctttccttccatgtagcttcaatgcttcccaagggcggctggctattggctccgtaacgtggttccgcgacgaggtggtccccggtaaggaagtgcggaatggaactcccgagttccggggtagactcgcgcccctagcttcctctcgattccttcacgatcatcaagctgaattgcacataagggatgtgaggggtcatgacgcctctatttacgtgtgtagagtggaggtgctgggactcggagttggcacaggaaacggcactcgactggtggtcgagaaggagcatcctcagctgggggctggcaccgtgctactcctacgagcgggattctacgcggtaagcttcctttctgttgcggttggatccactgtctactatcaggggaagtgtcactgtcatatgggcacccactgtcacagttccgatggaccgcggggagtcatacccgagccacggtgtccatag

SEQ ID NO: 125892 - DNA, 534 bp, synthetic construct
  misc_feature 1..534: note = Description of Artificial Sequence: Synthetic coding sequence
  source 1..534: mol_type = other DNA
atggcgtggatgctcctgctgatactcatcatggtccatccaggtagttgcgccctgtgggtatcacaacccccagagattagaaccctcgagggatcctctgcctttctcccttgctccttcaatgcttctcaaggcagactcgccatcggaagtgttacttggtttcgcgatgaggtggtacccggcaaggaagtgaggaacggcacgccagaatttagaggacgacttgctccacttgcaagctctcggtttttgcacgaccatcaggccgagttacacatcagggacgtccggggacacgacgcttcaatctacgtgtgcagggtggaggtgctgggccttggcgtgggtaccgggaacggcacgcgactggtggtcgaaaaggagcacccccagctcggggccggcacagtcctcctgctgcgcgcagggttttacgcagtctctttcctctccgttgccgtggggtccactgtatactaccaagggaaatacgcaaaaagcacgctgtcgggtttcccgcagctatag

SEQ ID NO: 125893 - DNA, 606 bp, synthetic construct
  misc_feature 1..606: note = Description of Artificial Sequence: Synthetic coding sequence
  source 1..606: mol_type = other DNA
atggcttggatgctactactgatcctgatcatggtccaccccggttcctgtgccctgtgggtctctcagccaccagagatcaggacactggagggttcgtccgcctttctaccttgcagtttcaacgcttcgcaagggcgactggctatcggctctgtgacctggttccgtgacgaagtggttcctggaaaggaagtgcggaacggaaccccagagttccggggcagactcgctcccctcgctagtagccggttcctgcacgaccatcaagcagagctgcacatccgcgatgtccggggtcatgacgcttctatttatgtctgcagggtcgaagtgctaggactgggcgtagggaccgggaatggaaccaggttggtggttgaaaaagagcaccctcagctgggagctgggactgtcttgctcctgcgggccggcttctatgcggtgagctttctcagcgtggccgtgggtagcaccgtctactatcaaggaaagtgtctcacatggaagggcccaaggcggcagctaccagcggtggtccctgcaccgttgcccccaccctgtggtagctctgcccacttgctccccccagtgccagggggttag

SEQ ID NO: 125894 - DNA, 573 bp, synthetic construct
  misc_feature 1..573: note = Description of Artificial Sequence: Synthetic coding sequence
  source 1..573: mol_type = other DNA
atggcctggatgctgttgcttatcctcattatggtccaccccggcagttgcgctctctgggtgagccagccacctgagataaggaccctggagggcagctcagctttcctcccctgcagttttaacgcttcacaaggcagacttgccatcggatccgttacatggtttcgcgacgaagttgtgcctggcaaggaagtccgcaatggaactcccgagttcagaggccgactggctccattggcctcaagccgattcctccacgatcaccaggccgagctccatataagggatgtcagaggacacgatgcctcgatctacgtgtgccgcgtggaagtgctgggtctcggcgtggggaccgggaacggtacaaggctggtggtggaaaaggaacacccgcagctgggcgctggaacagtgttgctgctgcgggcaggattctatgctgtttcttttctgtctgtggccgttgggtctacagtatactaccaggggaaatgccactgtcacatgggaactcactgccacagctccgacggacctagaggtgtcattccagagccccggtgtccttag

SEQ ID NO: 125895 - DNA, 498 bp, synthetic construct
  misc_feature 1..498: note = Description of Artificial Sequence: Synthetic coding sequence
  source 1..498: mol_type = other DNA
atggcctggatgctgctcttaatactcatcatggtgcacccaggcagttgtgccctgtgggtgtctcaaccccctgaaattcgaacactcgagggtagctcagcatttctgccttgttcttttaacgcaagtcaaggtcgacttgctattgggtccgttacctggtttagggatgaagtggtgccaggaaaagaggccgagcttcatatccgcgacgtgcggggccacgatgcctctatctacgtttgtagggtggaggtcctggggcttggggtcggcacaggcaacgggactcgacttgttgtggagaaagaacaccctcaacttggagcaggcacagtgttgctgttgagagctggattctatgccgtaagcttcttgtcggtcgccgtgggcagcacagtatactaccagggtaagtgtcactgtcatatgggcacccactgccattccagcgatggacccaggggagtgattccggaaccccgatgcccatag

SEQ ID NO: 125896 - DNA, 498 bp, synthetic construct
  misc_feature 1..498: note = Description of Artificial Sequence: Synthetic coding sequence
  source 1..498: mol_type = other DNA
atggcatggatgctgttgctaatactcatcatggtacaccctggctcctgtgctctttgggtttcacagcccccagaaatccggacattggaggggtcctctgcttttcttccgtgctctttcaacgcaagccaggggcggctggccatcgggtctgtgacttggttccgcgacgaggtcgtgcccggtaaggaagcagagcttcacattagggatgtgcgcggtcatgacgcgtccatctatgtctgccgcgtagaggttcttggtctgggcgtcggcaccggcaacggcacccgccttgtcgtagaaaaagagcacccccaattgggagccgggaccgtcctactgctgcgcgctgggttttatgccgtgagttttctcagtgttgccgtcgggtcaactgtttactaccagggaaagtgccactgtcatatgggtacccattgccacagcagcgacggccccagaggtgtcattccagaaccacgttgtccttag

SEQ ID NO: 125897 - DNA, 534 bp, synthetic construct
  misc_feature 1..534: note = Description of Artificial Sequence: Synthetic coding sequence
  source 1..534: mol_type = other DNA
atggcatggatgctgctcctcatcctcataatggtgcatccgggctcttgtgcattgtgggtcagccagccccccgaaatccgaactctggaaggcagttctgccttcctgccctgctcctttaatgcctcccagggccgcctggcaataggtagcgtaacatggtttcgagatgaagtggtgcctgggaaggaggtgcgtaacgggacccctgagttccgcggcagattggcaccattggctagctctagattcctacacgatcatcaggccgaactgcacatacgggacgttagaggacacgacgctagtatctatgtgtgtagggtggaagtgcttgggttgggagtggggacaggaaacgggacaaggttggtggtcgagaaggagcatccacagttgggcgccggaactgtcctcctcctccgcgctggtttctatgcggtcagttttttaagcgtggccgtcggctcaaccgtgtactatcagggcaaatatgcaaaatctacattgtccgggtttccacaactgtag

SEQ ID NO: 125898 - DNA, 573 bp, synthetic construct
  misc_feature 1..573: note = Description of Artificial Sequence: Synthetic coding sequence
  source 1..573: mol_type = other DNA
atggcttggatgctgctgttaatcctgattatggtccacccagggtcctgcgcactttgggtgtcacaaccccccgagattcgaaccctagaaggcagttccgcgttccttccatgcagcttcaatgccagccagggacgccttgccatcggctctgtcacttggtttcgcgatgaggtggtccctggtaaggaggtacggaatgggaccccggaatttcggggacgactcgcccctctggcctcttccagatttctgcacgaccaccaggctgaactgcatattcgtgatgttcggggtcacgatgcatcaatttatgtgtgtagagttgaagttctcggccttggcgtgggtactggcaatgggactcgtctagtcgtggaaaaagaacacccgcaattaggagccggcacagtgcttttgttgagagctgggttctatgcggtgtccttcctgagcgtggccgtaggatctaccgtgtattaccaggggaagtgccactgtcacatgggaactcactgtcatagtagcgatgggcccaggggcgttattccagaaccccgatgcccctag

SEQ ID NO: 125899 - DNA, 486 bp, synthetic construct
  misc_feature 1..486: note = Description of Artificial Sequence: Synthetic coding sequence
  source 1..486: mol_type = other DNA
atggatgacatctataaggccgcggtcgagcagcttacggaggaacagaagaatgagttcaaggctgcatttgatatcttcgtgcttggggccgaagacgggtgtatcagcacaaaagagcttgggaaagtaatgaggatgctcggacagaatccgacccccgaagagctgcaagaaatgatagatgaggtggacgaggacggaagcggtaccgttgatttcgatgagttcctggtaatgatggtccgctgcatgaaagacgattccaagggaaaaagcgaagaggaactgtccgatctattccgaatgttcgataaaaacgcggatggctacattgatctcgacgagctgaaaatcatgctacaagctaccggcgaaacgatcaccgaggacgacatcgaggaactgatgaaggatggcgacaagaataatgacggcaggattgactacgatgaattcttagaattcatgaagggagtcgaatag

SEQ ID NO: 125900 - DNA, 315 bp, synthetic construct
  misc_feature 1..315: note = Description of Artificial Sequence: Synthetic coding sequence
  source 1..315: mol_type = other DNA
atgggggcccaagatcggccccaatgccacttcgacatcgagatcaacagggaaccagtcggacgaatcatgtttcagttattctctgatatctgccccaagacatgtaagaacttcttatgcctgtgctctggcgaaaagggtttgggcaaaactaccggtaagaaactgtgttacaagggcagtacgttccacagagtcgtgaagaactttatgatccaaggcggtgatttctcagaggggaacgggaaaggcggagagtccatctatggcggatatttcaaggagaatgtggtgttctgtaagatgaaatag

SEQ ID NO: 125901 - DNA, 2805 bp, synthetic construct
  misc_feature 1..2805: note = Description of Artificial Sequence: Synthetic coding sequence
  source 1..2805: mol_type = other DNA
atggctgtccagccgaaagagactctgcagttagagagtgctgccgaggtcggcttcgtaaggttctttcaaggaatgcccgaaaaaccgactactaccgtgcgcttattcgaccgtggggacttttacactgcccacggagaggatgccctgctggccgctagggaagtattcaaaacacagggggtaattaaatatatgggaccagctggtgctaaaaacctccagtcagtagtgctctcaaagatgaatttcgagagtttcgtcaaagacctgttgctggtgcggcagtaccgagtggaagtatacaaaaaccgggccggcaataaagccagcaaggagaacgactggtacctcgcgtacaaggctagtccgggcaatctgtcacaattcgaagacattttgtttggcaacaacgatatgtccgcttcgataggcgtcgtcggcgttaagatgtctgcggtggatggccaaagacaggtaggcgtcggctacgtggattctatccaacggaagttaggcctgtgcgaattccccgataacgaccaatttagcaaccttgaagccctgctcatccagattggccctaaggaatgtgtgctccccgggggggagacagctggggacatgggcaagctcagacagataatccaacgtggcggcattctgattacagaacggaagaaggccgactttagtacaaaagacatctatcaggacttgaacaggcttttaaaaggtaagaaaggagaacagatgaactctgccgtactgccggaaatggaaaatcaagttgccgtttcttcgctgtctgccgtgatcaaatttctggaactgctgtccgatgactcaaactttggccagtttgagctgacgactttcgatttctctcagtatatgaaattggatatcgcggcggtccgagccctgaatctattccagggctcagtggaggacactactgggtctcagagtctggccgccctactcaacaagtgtaaaaccccccaggggcagcggcttgtgaaccagtggattaagcagcccctgatggacaagaatcgcattgaagagcggctcaatttggtcgaggcctttgtcgaagacgccgagctgcggcagacactgcaagaagatcttctgagacgattccctgatctcaatcggcttgccaagaagtttcaaaggcaggctgcgaacctccaggattgttaccggctgtaccaaggtattaatcagctacctaatgttatccaggctcttgaaaaacacgagggcaagcaccaaaagctgctgttggctgtgttcgtgaccccactaactgacctaagatccgatttttctaaatttcaggaaatgattgagactacattggacatggatcaagtggagaatcatgagttccttgtcaaacctagcttcgatcctaatttatccgagctgagagaaataatgaatgacctggaaaagaaaatgcagtccaccttaatttccgctgctcgtgatttaggactcgatccggggaagcagatcaaactcgattcttctgctcagtttggatactactttcgtgtaacctgtaaagaggaaaaggtcctgaggaacaacaaaaatttttccacggtggacatccagaaaaatggggtgaagttcaccaactctaaactgacctccctgaacgaggagtataccaagaataaaactgaatatgaagaggcacaggatgctatcgtcaaggagatcgtgaatatcagctcagggtacgtggaacccatgcagacgctaaacgatgtgctcgcacagttagacgcggtcgtctcctttgcgcacgtttctaacggagcacctgtgccttatgtgaggcccgccatactggagaaaggacagggtcgaatcatcctgaaagcaagtaggcacgcttgcgtagaggtgcaggacgaaatcgcattcatcccgaacgacgtgtacttcgagaaggacaaacagatgttccatattattaccgggccgaacatgggcggcaagtctacatatattcgtcaaactggagtgatagttcttatggcacagatcggttgctttgtcccttgcgagagcgcagaagtgagcatcgtggactgcatcttggctagagttggcgcaggcgatagtcagttgaagggagtttctacatttatggccgagatgctggagaccgcttccattctgcggtctgcgactaaagattctttgataattatagatgaactgggtcgcggaacatcaacttacgatggatttgggctcgcatgggccatcagtgagtacatagccacaaagattggcgctttctgcatgtttgcaacacactttcacgaacttacagcactggctaaccagataccaactgtgaacaacctgcacgtcaccgccctaacaacagaggaaaccctgaccatgctgtaccaggtgaaaaaaggagtgtgtgatcagagttttggaattcatgtcgccgagctggctaacttcccgaaacacgttatcgaatgtgccaaacagaaggccttggaacttgaggagttccagtatataggcgagtcccagggatacgacattatggaaccagccgcaaaaaagtgctatttggagagagagcagggagagaagattatacaggaattcctcagtaaagtaaagcaaatgccattcacagaaatgtcggaggagaatattacaatcaaactgaaacagcttaaggcggaggtgatcgcaaagaataactcctttgtgaatgagattatcagtaggatcaaagtaacaacgtag

SEQ ID NO: 125902 - DNA, 435 bp, synthetic construct
  misc_feature 1..435: note = Description of Artificial Sequence: Synthetic coding sequence
  source 1..435: mol_type = other DNA
atgacagaggaagtaatcgtcattgccaagtgggattacaccgcccaacaggatcaggaactggatattaagaaaaacgagcgactgtggcttctcgacgactccaagacgtggtggagagtgcgaaacgcggccaatcgcacgggctacgtgccttccaactacgtggaacggaagaactccctaaagaagggatctctggttaaaaatttaaaggatactctggggctcggcaagacacgccggaaaacttcagcacgggatgcgagccccacaccctccaccgacgccgagtacccggccaatgggtctggagcagatcgtatctatgatctgaatatccccgctttcgtgaagttcgcctacgtggctgagcgggaagacgagttaagtttagtgaaggggtctcgggtcaccgtgatggagaaatgctag

SEQ ID NO: 125903 - DNA, 1143 bp, synthetic construct
  misc_feature 1..1143: note = Description of Artificial Sequence: Synthetic coding sequence
  source 1..1143: mol_type = other DNA
atgactgaggaggtcatcgtgatcgcgaagtgggactacaccgcccagcaggatcaggaactcgatatcaaaaagaacgaaagattgtggctgctcgacgactctaagacctggtggagagtccggaacgccgcgaacagaactggatacgtgccatccaactacgtggagcgaaagaatagccttaaaaaaggatccctggttaaaaatctaaaggatactctgggattgggcaaaacccgtcgtaagacaagcgcacgggatgcgtcgccaactccaagtaccgacgcggagtatccagccaatggttcgggggcagataggatatacgacctcaatatcccggctttcgtgaaattcgcctatgtcgccgaaagagaggacgaactgagcctggtcaagggttcccgagtgaccgtgatggagaagtgcagcgacggctggtggcgtggctcctataatggtcagatcggctggttccctagcaactatgtcctcgaggaggtcgacgaagcggccgccgagagtccaagcttcttatctcttcggaagggggccagcctgtccaatgggcaggggtctcgcgtcctccacgttgtgcagaccctgtatcccttctcttctgtcaccgaggaagaactgaattttgaaaagggcgaaacaatggaagtgatagagaagccagagaacgaccctgagtggtggaagtgcaaaaacgcccgtggccaggtaggtctcgtccctaaaaactacgttgtggtgttgtctgatgggcccgccttgcacccggctcatgccccacagattagctatactgggccttcttcttctgggcggttcgctggacgggagtggtactatggtaacgtgactagacatcaggccgaatgcgctctgaatgagcgaggcgtggaaggtgatttcctgattcgggacagcgaatctagccctagtgacttttctgtgagtctcaaggcctccggcaaaaataagcactttaaagttcagctcgtggataatgtgtactgtatcggacaacgccgctttcataccatggacgaacttgtcgagcattacaagaaagcaccgatcttcaccagcgagcatggcgagaagctatacctagttagagctttgcagtag

SEQ ID NO: 125904 - DNA, 333 bp, synthetic construct
  misc_feature 1..333: note = Description of Artificial Sequence: Synthetic coding sequence
  source 1..333: mol_type = other DNA
atgactgaggaggtaatagtaatcgctaaatgggactacaccgcgcagcaggatcaggaactggatatcaagaagaacgaacggttgtggttgctcgatgattctaaaacatggtggagagttcgcaatgcggctaatcggaccggatatgttccatcaaactacgtggaacgcaagaattctttgaagaagggttcccttgtcaaaaatctgaaggatacactggggctcggaaaaacccgaagaaagacatctgcgcgcgatgctagccctacaccgtccaccgacgcggagtatccagctaatggatctggtgccgaccgcatctattag

SEQ ID NO: 125905 - DNA, 252 bp, synthetic construct
  misc_feature 1..252: note = Description of Artificial Sequence: Synthetic coding sequence
  source 1..252: mol_type = other DNA
atgactgaggaagtgattgtgatcgctaaatgggactacaccgcacagcaggaccaggagctggacatcaagaagaacgagcgcttatggctgcttgatgattctaagacctggtggcgcgttcgcaatgccgcaaatcgaactggctatgttccctcgaactacgtggaaagaaaaaactccttgaaaaaaggaagcttggtcaagaacctgaaagacaccctcgctcaacgcctgttgcgggtgccatag

SEQ ID NO: 125906 - DNA, 252 bp, synthetic construct
  misc_feature 1..252: note = Description of Artificial Sequence: Synthetic coding sequence
  source 1..252: mol_type = other DNA
atgactgaggaggtgatcgttatagccaagtgggactacacagctcagcaggaccaggagcttgatataaagaaaaacgagagattatggctgcttgatgactccaaaacatggtggcgcgtccgaaacgccgccaatcgaacaggttacgttccatctaactacgtagagcggaagaattctttaaaaaaaggctcactcgtaaagaatctgaaggataccctggctcagcggttgctacgagtgccatag

SEQ ID NO: 125907 - DNA, 2169 bp, synthetic construct
  misc_feature 1..2169: note = Description of Artificial Sequence: Synthetic coding sequence
  source 1..2169: mol_type = other DNA
atgtacagagccctttacgcgtttcggagcgcggagccaaacgccctggcttttgccgccggcgaaaccttcctggtactggaacggtcctccgcccactggtggctggccgctagggcccggagcggcgagaccggctacgtcccgccggcttacttacggagacttcaaggactcgaacaagatgtgctgcaggccattgaccgcgccattgaggcagtgcacaatacagcaatgagggacgggggaaaatactccctggagcaacgcggagtgttgcagaagttaattcaccaccggaaagaaaccctatcaagaagaggccctagcgcttcaagcgtcgctgtgatgacttcctcaacgagtgatcatcatctcgacgccgcagctgcacgtcaacccaacggagtctgccgcgcggggttcgaacggcaacactcgttgccatcctcagagcaccttggggcggacgggggtctttaccagatcccactgcctagctctcaaatcccaccccagcctcgacgagccgcccctaccactcctcccccccccgtcaaacggcgcgaccgagaggccctgatggcttctggttccggggggcataacacgatgccatctggcgggaacagtgtgagctctggtagtagtgtgtcctcgacaagtcttgacacactgtataccagtagttctccatccgaacccgggagcagctgctccccaactccccctcctgtgccccgcagggggacacataccactgtttcccaggttcagccacccccttccaaggcgtccgcgccggagcctcccgctgaagaagaggttgccaccgggacaaccagtgcttctgacgatcttgaagcgctggggacgctaagtctggggactacagaagaaaaagctgccgccgaagcagccgttccacgcactattggcgcggagctcatggaactcgtgcggcggaataccggccttagccacgaactgtgtagagtcgcaattggaatcatagtgggccatatccaggcgagcgtacccgcctctagtcctgttatggaacaggtgctgctttccctggtggaaggaaaggacttgagcatggccttgccctcaggacaggtctgtcacgatcagcaacgactagaggtgatttttgcggacctggcccgcagaaaagacgacgcacaacaacgcagttgggcgctctacgaagacgagggagttatccgctgctatctggaggagctgcttcatatcctgaccgacgccgacccagaggtgtgcaaaaagatgtgcaagcgcaatgagttcgagtccgtcctagcgctggtggcctattaccagatggagcatagggcatccctgaggctactactcctgaaatgtttcggggctatgtgcagtctagacgcagctataatctcaactctcgttagctcagtgctgccagtggaactggcacgggatatgcaaaccgatacacaggaccatcagaagctgtgctacagcgcgttgatcctcgcgatggtatttagtatgggcgaggctgtaccctacgcacattacgaacacttggggaccccctttgcccagttcctgctgaacattgtcgaagatggtctacccctggacaccacagagcagttacccgacttgtgtgtgaatctgctcctcgccctgaacttacacctgccggcggccgaccaaaatgtgataatggctgcgctttcgaaacacgcaaacgtgaagatcttcagtgagaagttactcttactcctgaacaggggtgacgatccagtccgtattttcaaacacgagcctcaacccccccacagtgttctcaagttccttcaggatgttttcggcagtcccgctaccgcagccatcttctaccatacggatatgatggccctgattgatatcacagtccgccacatcgccgacctcagcccaggagataagctgagaatggagtacctatctctcatgcacgcaatcgtccgcactacaccgtacctccagcacaggcacagattacctgatctgcaggcgatcctacggaggatcctcaatgaggaagagactagcccacagtgccagatggatcggatgatcgttagagaaatgtgcaaggaatttctggttttaggggaagctccaagttag

SEQ ID NO: 125908 - DNA, 2169 bp, synthetic construct
  misc_feature 1..2169: note = Description of Artificial Sequence: Synthetic coding sequence
  source 1..2169: mol_type = other DNA
atgtatcgcgccttgtacgcttttcggtcagctgagccaaacgctctcgccttcgccgctggggagacgttcctggttctagagcgtagttcagcccattggtggctggcggctcgggcccgatctggagagacaggatatgtgccacctgcttacctgcgcagattgcagggtctggaacaggatgttctgcaggctatcgacagggccatcgaagcagtccacaataccgcaatgagagacgggggcaaatattcactggaacagcggggagtcctgcagaagctcattcaccatcgaaaagagacactcagcagaagagggcccagcgcctcttctgtggcggtcatgacaagcagtaccagcgaccatcacttagacgccgccgctgcccggcagcctaacggggtttgtcgggcagggttcgaacgacaacatagtctccccagctcagaacatctcggcgctgacggtggtttgtaccagattccactccccagttcacagattccgccccaaccccgccgggccgcccccacgaccccacccccacctgtgaagaggagggatcgcgaagctttgatggccagcggctccggcggacataatacaatgccgagcggcggtaattccgtgtcatccgggagctccgtttctagcacttcgctagacaccctctataccagcagttcaccctctgagccggggagttcctgttctcctacacctcctcccgttcctagacgaggcacccacactaccgttagccaagttcagccaccaccttcaaaggcgagtgcacctgagccaccagcagaggaggaggttgcgactggaaccacgtccgcctctgatgacctcgaggccctgggcaccctgtcactgggaaccacagaagagaaagccgccgcagaggccgctgtgcctcgtactataggcgcggagctcatggagctcgtccgccgcaacactggactgtcacatgagctgtgccgcgtggcgatcggcattatagtgggtcacatacaggcctcagttcccgcatcctccccagtgatggaacaggtgctattaagcctggtagaaggaaaagatctcagcatggctttaccgtcaggccaagtgtgtcatgaccaacagcgtctggaggtgatctttgctgatctggcacgccggaaagacgatgctcagcagaggtcctgggcgctctacgaggatgaaggtgtgatcagatgttacctcgaggaactccttcacatcctgacagatgcagaccccgaagtgtgcaaaaagatgtgtaaacgcaacgagttcgaaagcgtgctcgcgttagtggcatattaccagatggaacatagggcctcactgcggctgttgctgctgaagtgctttggcgccatgtgctccttggatgcagccattatctcaactctggttagtagtgtacttcccgtggagctcgcccgtgacatgcagaccgacacccaagaccatcagaagctttgttactccgcccttattctcgccatggtgttctcaatgggcgaagctgtgccttacgcccactacgagcatctcggcaccccattcgcacagtttctgctgaatatagttgaggacggcttgcctctggacactacagagcaactcccggacttatgcgtcaacttattgttagccctcaacctgcacctcccggcagccgatcaaaatgttattatggcggcactaagcaaacacgccaacgtgaagatcttctctgaaaagctcctgctcctgttgaacagaggagatgatcctgtgcggatctttaaacacgagccgcagccacctcatagcgtgctaaagtttctgcaggacgttttcggctcgccagcaacggctgctatcttttaccatacagacatgatggccctaattgacattactgtgcgccacatcgcagatctgtctcctggggacaagggcccgtttggggccgggcagcgtccctggccaggggtccccagactccttgagcctggtagcacaccatcccgcgagccccaccctgtggagaggtctggcgtacctgctctcacgagctcctgggcgtccggttgtcccaggccacttcaccctgctctgcagcttgttatcgactccgctttcggcgggaggtctgtatag

SEQ ID NO: 125909 - DNA, 2148 bp, synthetic construct
  misc_feature 1..2148: note = Description of Artificial Sequence: Synthetic coding sequence
  source 1..2148: mol_type = other DNA
atgtaccgggccttgtatgcgttcagatccgccgagccgaatgccctggcgttcgcagcgggcgagacctttttagtccttgagaggtcttccgcacattggtggttggccgcccgcgcgagatccggcgagacaggatacgtccctcctgcctatctgaggaggttgcagggtttggagcaggatgtgctgcaggctatcgaccgtgccattgaggcggtgcataatacagccatgcgggatggggggaagtactccctagagcagaggggagtcctgcaaaaactaatacaccatcggaaggaaactctctcaaggcgtgggccttccgcatctagcgtggccgtgatgacatcttctacatctgaccaccatctggacgccgccgccgctcgtcaacccaacggggtgtgtagggcgggctttgagcgccaacattctctccctagcagcgagcacctgggtgcagacggtggattgtaccagatccctccccaacctcgtcgcgccgcccccaccacgccccccccgcccgtgaagcgcagggacagagaggcactgatggcgtccggcagcggggggcataataccatgccatcgggtggaaacagtgtcagttcggggagctcagtcagctccaccagcctggacactttgtacacaagctccagcccatccgagccagggtcaagctgtagtcccacacctcctccagtgccgcggagagggacccacacaactgtcagccaggtacaaccccccccgtctaaggcctcggcacccgaaccacccgcagaagaagaggtagccacagggacaacatctgctagcgatgatctggaagccctcgggacactttctctcgggaccacggaggagaaggccgccgccgaggccgcggtgcctaggacgatcggcgcagagctgatggagctcgttcgtcgaaacactgggctcagtcatgaactctgcagggtggctatagggatcattgttgggcacattcaggctagtgtcccagcttccagtccagtcatggagcaagtcctgttgtcactcgtggaaggaaaggacctctctatggcactacctagtgggcaagtgtgccatgaccaacagaggctggaggtgatctttgccgacctggcaaggagaaaagacgacgcacagcaacgttcgtgggccctgtatgaggacgaaggtgtgatcagatgctaccttgaagagctgctccacatcctaacagacgctgacccagaagtgtgcaagaagatgtgtaagcgcaatgagtttgagagcgtactggcgttagtggcttattatcagatggagcaccgcgcttccttgcggctgttgctgttgaagtgttttggggcaatgtgcagcctcgacgcagccatcatcagcactctcgtgagctccgtcctgccagtggagctagcccgtgacatgcagaccgacactcaggaccatcagaaactatgttactctgcactgattctggctatggtgttctccatgggagaggcagtcccttatgcccactacgaacacctcgggacgcctttcgcacagttcttgctaaacatcgtggaggacggcctgccgctcgacactactgagcagttgccggatctttgcgtgaatctgctgctcgctcttaacctgcatctgcccgccgccgatcaaaatgtgattatggcggcactgtctaaacacgcgaacgtgaagatcttcagtgagaaactcctactgttgctgaatcggggagacgaccctgtgaggatcttcaagcatgaaccgcagccgcctcacagcgttctcaaatttttacaggacgttttcggatcacccgcgacggcggccatcttttaccataccgacatgatggcccttatcgatatcaccgtgcgtcacatcgctgatttgtcaccaggtgacaaactgcgtatggaatacctgagcctgatgcacgcaatcgtgaggaccaccccttatcttcaacaccgacaccggctgcccgatctgcaggccatcctgagacgtatattgaatgaagaggaaacttcgccccagtgtcagatggatcggatgattgtaagagaaatgtgcaaggagttcctggtcctgggagaagctcctagctag

SEQ ID NO: 125910 - DNA, 3405 bp, synthetic construct
  misc_feature 1..3405: note = Description of Artificial Sequence: Synthetic coding sequence
  source 1..3405: mol_type = other DNA
atgagtaggtccgtgctacagccctcacaacagaaactcgctgaaaagctgaccatactaaacgacagaggcgtagggatgctaacccggctatacaatatcaagaagcaaggacaagtatggaaagcctgtggcgaccccaaagcaaaaccttcatacctcatcgacaagaacctggaaagcgctgtaaaattcatagtgaggaagtttcccgctgtcgagacgaggaacaacaaccaacagctcgcccagctgcagaaagagaagagcgaaattttgaagaatctggccctctactatttcacttttgtagatgttatggagttcaaagaccacgtgtgcgagctgttgaataccatagacgtctgtcaggtgtttttcgatatcacagtcaatttcgatctcaccaagaactatctcgatctgatcataacatatacgactcttatgatattacttagcaggatcgaggaacggaaggccattatcgggctttacaactacgcccacgagatgacccacggcgcatccgatcgggaatatccccggctggggcaaatgatcgtggactatgagaaccctctcaagaagatgatggaggagttcgtcccgcactctaaatctctgtccgatgccctgattagtttgcagatggtgtatcctagaagaaatctttcagctgatcaatggaggaacgcacagcttttatccctcatttctgcacccagcacaatgcttaatcccgcccaaagcgacactatgccttgcgaatatctgtccctggatgctatggagaagtggatcatttttggcttcatcctgtgccacggtattttaaacacagacgccacagctctgaacctgtggaagctcgcattgcaatctagctcatgtctctcgctttttcgtgacgaagtgttccatatacacaaggctgccgaggacctcttcgtcaatatacgaggctacaacaagcgcattaatgatatacgcgagtgtaaggaagctgctgtgtcccacgccggatccatgcaccgagagcgtcgtaagtttttacgaagtgccttgaaagaactggcgactgtcctcagcgaccaacccgggctgcttggtcctaaagcgctgtttgtgtttatggcgctgtccttcgctcgtgatgaaatcatatggttgctgcgacatgcagataacatgcccaagaaatccgcggacgattttattgataagcacattgcggagctgatcttttacatggaggagttgagggctcatgtaagaaaatatggacccgttatgcagcggtactacgtgcagtatttaagcggatttgatgcagtggtgctgaacgagcttgtgcaaaacctcagtgtttgcccagaggacgaaagcatcatcatgtcctctttcgtgaacactatgactagtctgagtgtcaagcaggtggaagacggggaagtttttgacttccgcggtatgagactggactggtttcggctccaggcgtatactagcgttagcaaagcctcactcggactcgctgatcatcgtgaactgggtaagatgatgaataccatcatattccatactaagatggtggactctctcgtcgaaatgctggtggagacttcggatctctctatcttttgtttctatagtagggctttcgagaaaatgtttcagcaatgtctcgaattgcccagtcagtcccggtatagcatcgctttcccactcctgtgcacgcactttatgtcctgcactcacgagctgtgtcctgaggagcgacaccatattggagatcgtagcctgtcactgtgtaatatgtttctcgatgagatggccaagcaagctagaaatctcattaccgatatatgcaccgagcagtgcacacttagtgatcaactgcttcctaaacactgcgctaagaccatctcacaggccgtcaacaagaaaagcaaaaaacagaccgggaaaaaaggggaacctgagcgtgaaaagccgggagttgaaagtatgcggaaaaaccgtctggtggtcaccaatctcgacaaacttcatactgctctgtctgagctctgcttctctatcaattacgtgccgaatatggtcgtgtgggagcatacttttactccaagagaatacctgacgtcacacctggaaatccgttttaccaagtcaatcgtcgggatgacaatgtataatcaggctactcaggagattgccaagccaagtgagttactcacttccgtgcgcgcctacatgaccgtactgcagagtatagagaactacgtgcaaattgatattaccagagtgtttaacaatgtgctgttgcaacaaacccagcacttagatagtcatggcgaaccaaccatcacctcactgtacaccaattggtacctggagaccttactgcgccaggtatcaaacgggcatattgcatacttccccgccatgaaagccttcgtgaacctccccactgaaaacgagctgaccttcaacgccgaggaatactccgacataagcgaaatgaggtctctatcagagctcctgggcccctatggtatgaagttcctgtctgagagtttgatgtggcacatcagctctcaggtagctgaactgaaaaaactggtcgtcgagaatgtggatgtgcttacccaaatgcggacctcattcgataaacccgaccaaatggccgcattgtttaaacgcctctcaagcgtggatagcgtactcaagcgaatgacaattattggcgtcattctgtcatttaggtcactggcacaagaagcgctccgggacgtactgtcctaccacatccccttcttagtatcttccattgaggatttcaaggaccacataccgagagagacagacatgaaagtggctatgaacgtctacgaactgagttcagccgcaggcctcccctgcgaaatcgatcctgccttagtcgtcgctctgagtagccagaagagcgagaatattagccccgaggaggagtacaaaatcgcgtgcctgctcatggtctttgtcgccgtgtccctcccaaccctcgcgtctaatgtgatgtcccagtactcccctgccatagagggccactgcaacaacatccactgcctggccaaggccattaaccaaatcgccgcagccctgtttacaatccacaaggggtctatcgaagatcgactgaaggaattcctggcacttgcatcctcaagccttttgaaaatcgggcaggagacagacaagactacaacccgtaatcgcgaatcagtgtacctccttctcgacatgattgtgcaagagagtccctttcttaccatggatcttctggaaagctgcttcccgtacgtgttacttcgaaatgcttaccacgcagtgtacaagcagagtgtcaccagtagcgcctag

SEQ ID NO: 125911 - DNA, 3387 bp, synthetic construct
  misc_feature 1..3387: note = Description of Artificial Sequence: Synthetic coding sequence
  source 1..3387: mol_type = other DNA
atgagtagatccgtattgcagccaagtcaacagaagcttgcagagaagctgaccattttgaacgacaggggcgtcggaatgctgacccggctttataacattaaaaaagcctgtggtgacccaaaggccaagcccagttacctcatcgataaaaatttggagagcgctgttaagtttattgtcaggaaattccctgcagtggaaaccaggaataataatcaacaactggcacagctgcagaaagagaagagcgaaatcctcaagaacctggcactttattatttcacatttgttgacgttatggagtttaaggaccacgtgtgtgaactgttgaatacgatcgatgtgtgccaggtgttttttgacatcacagtaaacttcgacctcactaagaattatctggacttgatcattacctataccactttgatgatcttactgtcccggatcgaagagcggaaagcaattattggactatacaactatgcccatgaaatgacccacggcgcttcagacagggagtatccccgcctaggccagatgattgtggattacgagaatccactcaagaaaatgatggaggagtttgtccctcactctaaatccctcagtgatgccctgatatcactccagatggtgtatccaagacgcaatctgagcgccgaccaatggaggaacgcccagctgttgtccttaatatccgcccccagtaccatgttaaacccagcacagagcgatacgatgccctgtgaatatctgtcactcgacgctatggaaaagtggataattttcggatttattctctgtcacggcatactaaatacagacgcgaccgcactgaatctttggaaattggccctccagtccagttcctgtctcagcctcttccgggacgaggtcttccatatacacaaggcagcagaggatctatttgtgaatatcagaggatacaataagcgtatcaacgatattcgtgagtgcaaagaagcagctgtgtcacacgctggcagtatgcacagggaaaggcgaaagtttctgcgcagtgccctaaaagagctcgccactgtcctctccgatcagccagggctgctcggtcccaaagctctgtttgtgtttatggccctcagcttcgctcgggacgagataatttggctcctcaggcacgccgataatatgccgaagaagtcagctgatgactttatcgataaacatatagctgaactgattttctatatggaggagctccgggcacatgtgagaaagtatggacccgtcatgcagcgttactacgtgcaatatctcagcggatttgacgccgttgtactgaatgagcttgtgcagaacctgtccgtgtgccccgaggatgagtcaatcataatgtcctccttcgtgaataccatgacttctctgtctgtaaagcaggttgaggacggcgaagtgttcgactttaggggaatgcgcttagattggtttcggctacaggcttacacatccgtctctaaagcgagtctgggcctggccgatcatagagagctcggcaagatgatgaataccatcatcttccacacaaaaatggtggatagcctcgtggaaatgctggtcgagacatctgacttgtctattttttgtttttattcccgggcatttgagaagatgtttcaacagtgtctggagctgcctagccagtcccggtactctattgccttccccctgctgtgtacccatttcatgtcttgcacgcatgagctgtgtcccgaagagaggcaccacataggcgatcgcagtctgtcactgtgtaacatgtttctggacgaaatggccaagcaggccaggaatctcattacagatatttgcactgaacaatgtactttaagcgaccagctgctgcctaaacactgtgcgaaaactatcagtcaagccgtgaacaagaaaagcaaaaagcagaccggcaagaagggggagccagaaagagagaagccaggagtggaaagcatgagaaaaaaccggctcgtggtgaccaacctcgataagctgcacacagctctgagtgaactctgcttctcaatcaattacgtcccaaatatggtggtctgggagcatacattcactccccgcgaatatcttacctcgcacctcgaaatccggtttaccaagagtatagtcggcatgaccatgtataaccaggcgactcaggagattgctaaaccttcagaattactgacttcagtgcgagcctatatgacagtgctacagagtatagagaattacgtgcaaattgatattacccgcgtgttcaacaatgtgctgcttcaacagactcagcacctagacagtcatggagaacctactatcactagtctctacacgaattggtaccttgaaacattgctccgacaggtgagcaacggtcatatcgcctatttcccggctatgaaagcttttgtgaatttaccaactgagaatgaactgactttcaatgccgaagagtattcggatatctctgaaatgagatctctgtccgagctcctggggccctatggcatgaaatttctgtctgaaagcctgatgtggcatatttccagccaggtggctgaacttaagaagcttgtggttgaaaatgtagacgtgctgactcagatgagaaccagcttcgataagcccgaccagatggccgccctgtttaagagactctcgtcggtcgattccgttttgaaaaggatgaccattatcggcgtgatcttgtctttccggagtctggctcaggaagcacttagggacgtcttgtcctatcacatacccttcctggtgtctagtatcgaggacttcaaggatcacatcccacgggagactgacatgaaggtcgccatgaacgtgtacgagttgagttccgccgcaggtttaccatgtgagatagacccagctctcgtcgtagctctctcctcacaaaagtcggagaacatttctcccgaggaagaatacaaaatcgcatgtctgctaatggtcttcgtcgctgtgtcactcccgacactggccagcaatgttatgagtcaatacagcccggctattgaaggacactgtaacaacatacactgcctcgccaaagcaataaatcagatcgctgccgcgctcttcactatccacaaaggctctatagaagacagactgaaagagttcttggccctggcaagctcctcactcttgaaaatcggtcaagaaacagacaaaacaaccacccgcaatagagagtctgtgtaccttcttctggacatgatcgtccaggaatcgccgtttctaaccatggatctcctcgagtcttgtttcccatacgtactgctccgcaacgcctaccatgcagtgtataagcaatcggttaccagtagtgcttag

SEQ ID NO: 125912 - DNA, 2649 bp, synthetic construct
  misc_feature 1..2649: note = Description of Artificial Sequence: Synthetic coding sequence
  source 1..2649: mol_type = other DNA
atgcctgctctagcttgcctcaggcggttgtgccggcatgttagtccacaggccgttcttttcttattgtttatcttctgcctcttcagcgtattcatcagcgcctactacctttacggttggaagcgagggcttgaaccgtcggcagatgctcccgagccagattgtggggatccacctccagtggcacctagcagactcctgcccctgaagccggtgcaggcagctacaccaagtcggaccgatcctctcgtgttggtcttcgttgagtctctgtactcgcagctcggccaagaggtcgtggctatcctggagtcaagcagatttaagtacagaaccgagatagcccctgggaagggcgatatgcccactctgactgataagggcaggggcaggtttgccttgattatttacgagaacattctgaaatatgtgaacctcgacgcatggaatcgtgaactattagacaagtactgtgtggcatacggcgtaggaattattggttttttcaaagcgaacgagaactccctcctcagtgcccaactgaagggcttcccgctctttcttcacagtaacctcggattaaaggactgttctattaatcccaagtcacctctgttgtacgtgacacgtccaagtgaagtggaaaagggcgtcctcccaggtgaagattggaccgtgtttcagtccaatcacagtacttacgagccggttttgctcgcaaagacaaggagttccgaatccataccacacctcggcgctgacgccggattacatgccgccctgcacgccacagttgtgcaggacttagggctccacgacggaatccagcgggtcttgtttggaaacaatctgaatttctggctgcataagctggtgttcgtcgatgccgtggccttcctgacaggaaaacgcctcagtctgcctcttgatcgttatattcttgtggatattgacgacattttcgtaggaaaggaaggcacgaggatgaaggtcgaagacgtgaaggccctgttcgacactcagaatgagctgcgcgcccacattcctaactttacttttaaccttgggtactcaggtaagttctttcatacgggcactaacgcagaggacgccggcgacgacctcctgctctcttacgtcaaagagttctggtggtttccccatatgtggtcacacatgcaaccgcaccttttccataaccagtcagttctggccgagcaaatggccttgaataagaaatttgctgtggagcacgggattccaactgatatgggctacgccgtcgccccgcaccatagtggggtgtaccctgtgcacgtgcagctgtacgaggcctggaagcaagtatggagcatccgagtgaccagtactgaggagtacccccacctgaagcccgcaagatatagacgaggctttatccacaacggcatcatggttctgccacgacagacttgcggtctctttacacacaccattttctacaacgaataccccggtggctccagtgagttagacaaaattatcaatgggggcgaactatttttgactgttttgctgaatcctatttctatctttatgacccatctctcaaactacggcaatgataggctgggactttacacctttaagcacctcgtacgatttctacacagctggactaatttgcgactgcagactctaccaccagttcagctggcccagaagtactttcagatcttcagcgaggagaaggaccctctatggcaggacccatgcgaggataagcgacacaaggacatatggtccaaagagaagacttgcgatcggttccccaagctcttaatcatcggaccgcagaagactgggacaacagctctgtatctattcctgggtatgcatcccgatctcagcagcaattatccctccagcgagacctttgaagaaatccagtttttcaacggccacaattatcataagggaattgattggtacatggagttcttcccaatcccttctaatactacgtctgacttctacttcgagaagagtgccaactattttgatagcgaagtggcacctagacgcgcggctgctctcctgcctaaagctaaagtgttaacaatactgattaatccagcggacagggcctattcttggtaccagcaccaaagggctcatgatgatcccgtagcgctcaaatataccttccacgaggtcattaccgcaggcagcgacgcttcctctaagctccgtgccctacagaaccgatgtctcgtgcctggatggtatgccactcatattgagaggtggctgagcgcttatcacgctaaccagatcctggtcttggacgggaagctgttgcgcactgaacctgcaaaagtgatggacatggttcagaaatttctcggggtcactaacacgattgattatcacaaaactctagctttcgacccgaagaagggtttctggtgccaactgctggaaggggggaaaaccaaatgccttggtaagagtaagggacggaagtatcccgaaatggacctggattctagagcgtttcttaaggattattaccgggatcacaacattgaactatccaagctgctgtataagatgggccaaacattacctacctggctgcgcgaagatcttcaaaacacgcgttag

SEQ ID NO: 125913 - DNA, 72 bp, synthetic construct
  misc_feature 1..72: note = Description of Artificial Sequence: Synthetic coding sequence
  source 1..72: mol_type = other DNA
atgccagcgctggcatgtctcaggcgcttgtgtcgccacgtctccccccaggcagttttgttcctgctgtag

SEQ ID NO: 125914 - DNA, 480 bp, synthetic construct
  misc_feature 1..480: note = Description of Artificial Sequence: Synthetic coding sequence
  source 1..480: mol_type = other DNA
atgccggccctcgcatgtcttcgacggctgtgtcggcacgtcagcccccaggccgtgctgtttttgctgttcattttctgcctgttttccgtgtttattagcgcttattatctttacgggtggaagcggggcttagaaccttccgccgacgctcccgaacccgactgtggtgatccccccccagtggccccttcaaggcttctgccactgaaaccagtgcaggcagcaactccttcccggaccgatcctctggtgctggtcttcgtggagagcctgtactcccaactggggcaggaagtagtggcaatccttgaatcttctcgctttaaatataggacagaaatagctcccggcaaaggggatatgcccacactaacagataagggcaggggaagattcgcactaatcatatacgagaatatcctgaagtacgttaatctggatgcctggaatcgggagctcctcgacaaatactgctag

SEQ ID NO: 125915 - DNA, 207 bp, synthetic construct
  misc_feature 1..207: note = Description of Artificial Sequence: Synthetic coding sequence
  source 1..207: mol_type = other DNA
atgcccgctctggcttgtctgcgacggctgtgccgccacgtgtcacctcaggctgtgctattcttgctcttcattttttgcctgtttagtgtttttatttccgcatactatctttatggctggaagagaggtctggagccctcagccgacgcccccgagcctgattgcggtgaccctccgcccgtagctccaagcaggctgctatag

SEQ ID NO: 125916 - DNA, 2283 bp, synthetic construct
  misc_feature 1..2283: note = Description of Artificial Sequence: Synthetic coding sequence
  source 1..2283: mol_type = other DNA
atgccaaccttaacagacaatacacatggacggtatgtgttggtcatttacgaaaacctcctgaagtatgtgaacctagatgcatggagtagggaactcctggacaggtattgtgtggagtatggggtcggaataatagggttttttagagcccacgagcattcccttcttagtgcacagttaaaaggatttcccctgttccttcattcaaaccttggtttaagagactaccaggtgaatccttcagctccgctcctccacctcacgcggccctccaggctagagccaggccctttgcccggggacgactggacaatctttcagtccaaccactctacctatgagcccgtgcttctagcctcgctgcggcccgccgagccagctgttcccggtccagttctgcggagagcaaggctgccaacagtggtccaggacctggggcttcatgatggaatccagagagtactctttggacacggtctctccttttggctccacaagctgattttcgtagatgcagttgcctatctaaccggcaaacgtctgtgtctggacctggatcgctatatcctcgtggacatagatgatatttttgtgggaaaagaaggtactcggatgaaggtggctgacgtggaagccctgctgaccacccagaataagctcagaacactcgttcctaactttacctttaacttgggattctccggcaagttctatcatacaggaacagaggaggaagacgccggagatgatatgttgctgaaacacaggaaggaattctggtggtttccacacatgtggtcacatatgcaacctcatctcttccataaccgttcagttctggcggaccaaatgcgcctgaataagcaattcgccctggaacacggcatccctacggatctcgggtatgccgtggccccacaccatagtggggtgtatcccattcacacccagttatatgaagcttggaagtccgtttggggcattcaggtgacctccaccgaagagtatccccacctacgtccagcccgctatcggcgcggcttcatacataatggaatcatggtgctgcctaggcagacgtgtggactttttacacacactattttctacaatgagtatccgggcgggtcccgagagctggataggtctatcaggggcggcgagctgttcctgacggtgctgctcaaccctatttctatctttatgactcatctcagtaactacggcaatgaccgattagggttgtatacattcgagtcactggttagattcctgcaatgctggacccggcttagattacaaaccctgcctccagtgccgctggcgcagaagtacttcgagctgtttccccaggaacggtctcctctttggcagaacccctgtgatgataaaaggcataaggacatctggtcaaaagagaaaacctgcgaccggttaccgaaattcctaatcgtgggccctcagaagacagggaccacagcaatccacttcttcctgtcactccatccagctgtcacttcatcctttccctctcccagcactttcgaagaaatacagtttttcaacagcccgaattaccacaagggcatcgattggtacatggactttttcccagtcccctctaacgcgagtacagacttcctttttgaaaaaagcgccacatattttgattcagaggtggttcctcggcgcggggctgctctgctgccacgagcaaagatcatcactgtcctgacaaaccccgccgatcgcgcctactcttggtaccagcatcagcgggctcacggcgaccccgtggcgttgaattacactttctatcaggtgatatccgcatcctcccagactcccctagccctgcgatccctgcagaaccggtgcctggtcccgggttactattccactcacttgcagcggtggcttacatactatccaagcggtcagctgctcattgtggacggacaggaactgcggaccaaccccgctgcaagcatggaaagtatccagaagtttttagggatcactccgtttctaaattatacacgaactctaagatttgacgacgacaaagggttctggtgccagggtctagaaggggggaaaacacgctgtctgggccgatccaagggtcgccgctacccggacatggacactgaaagccgtctcttcctgaccgatttcttcaggaatcataatttagagctatcaaagctcctttcacgtctgggccaacccgtgccctcatggcttagggaagagctgcagcactcatcactcggatag

SEQ ID NO: 125917 - DNA, 2652 bp, synthetic construct
  misc_feature 1..2652: note = Description of Artificial Sequence: Synthetic coding sequence
  source 1..2652: mol_type = other DNA
atgctgcaactctggaaggtggtcaggcccgcaaggcaactggagttgcaccgattaatcctgctcctcatcgccttcagcttgggctcgatgggattcttagcctactacgtgagtacctcccctaaagcgaaggagccactgccacttccgttgggggattgttcctccgggggagcagcaggtcctgggcctgctcgcccccccgtgcctccccgcccccctcgacctccagaaacggcaagaaccgagccggtggtcctggtgttcgttgagtcggcctactcccagttgggacaggagatcgtggccatccttgaatcttctcggttccgttacagtacggagctggcacctggacgcggagacatgcccacccttactgataatacacatggcaggtacgtgttagttatctacgagaatcttcttaagtacgtgaacctcgatgcgtggtcccgcgaattactggatcggtactgtgtagaatacggtgtgggcatcattgggtttttcagagcacatgaacatagcctcttgtctgcccagctgaagggcttccccctcttcttacacagtaacctgggcctccgggactatcaagttaacccgtcagcccctctattacacctcacccgacccagcaggctagaacccggacctctcccgggtgatgattggaccatctttcaatcaaatcacagcacatacgagcccgtgttgctcgctagtttgaggcccgccgaaccagcagtgccgggcccggtgctgcgtcgggcaagactgcctaccgtggttcaggacttgggtttgcacgacggcattcagcgtgtcctttttggccacggcttgtccttctggcttcacaagctgatattcgtcgacgctgtcgcttatctaactgggaaaagactgtgcttagacctagatcggtacattctagtggacattgacgacatatttgtggggaaggagggaacccgcatgaaggttgcagatgtggaggcacttctgactacccaaaacaagctcagaacactcgtgcctaattttacatttaatctcggtttctccgggaaattttatcatacagggaccgaagaagaggacgctggcgacgacatgctcctgaagcacaggaaagagttttggtggtttccgcacatgtggtcccatatgcagcctcatctatttcacaatcgctctgtgctggccgatcagatgaggctgaataagcaattcgctctggaacacgggatacctaccgatttaggttacgccgtcgctccccatcacagtggagtgtatcctatccacacgcaactctatgaggcctggaaaagcgtctgggggatccaggtcacctccaccgaagagtatccgcatctgcggccagccagatatagaaggggctttatccataatggcattatggtcctgcctcgacagacgtgtgggttgttcacacacaccatcttctacaatgaatatcccgggggctcgcgcgaactcgacaggagtatcagagggggcgagctctttctgacggtcttgctgaaccctatcagcatcttcatgacccatctgtctaattacggaaatgaccgactcgggttgtacacatttgaatcactggtcaggtttctgcagtgttggaccagactccggctgcagacacttccccccgtgcccctggcacagaaatatttcgagttatttccccaggagcgatcaccgctatggcagaatccgtgtgacgataaacggcataaggatatttggtctaaggagaagacctgcgaccggctcccaaagttcctgatcgtgggaccccagaagactgggacaaccgctatccacttctttcttagtttgcaccctgccgtaacgagttccttcccatcaccttctactttcgaagagatacagttctttaactctccaaactaccacaaaggaattgattggtatatggatttttttcccgtcccctcaaacgcaagcaccgattttttgttcgagaaaagtgcaacttacttcgactcagaggtagtgcctcgccggggcgcagcgttgctcccgagggccaagatcattaccgttctgactaacccagcagatagggcgtactcttggtaccaacaccaacgggcgcacggtgatcccgtcgccctcaattacaccttctatcaggttattagcgcttcctctcaaacccctctcgcactgaggagcttgcagaaccggtgcctcgtgcccggctattacagtactcaccttcagcgctggcttacctattacccctccggccagctgttgattgtagatgggcaggagctgcgcacaaatccggccgcgtcaatggagtctatccagaaatttctgggtatcacgccctttctgaactacacccgtacactgaggttcgacgacgataaaggtttctggtgtcagggactggaaggtggaaagactcgatgcctgggccgctcaaaaggcagacggtaccccgatatggacactgagtctcgcctcttcctcactgatttcttccgaaatcataacttggaactgtccaaactcctgtccagactgggccagcctgtgcccagttggctgcgtgaggagttacagcattccagcctcggctag

SEQ ID NO: 125918 - DNA, 450 bp, synthetic construct
  misc_feature 1..450: note = Description of Artificial Sequence: Synthetic coding sequence
  source 1..450: mol_type = other DNA
ggcgatcccgtggccttgaattatactttctatcaagtgatcagtgcctccagtcagaccccccttgctctgcgaagcctgcaaaatagatgccttgttcccgggtactattcgacacacctgcaacggtggctgacctattatccgtccggccaactcctgatagtagatggtcaggagcttaggactaaccctgctgcttccatggagtccatacagaaatttttgggaataactcctttcctgaactacacccggaccctgaggtttgacgacgataagggtttctggtgccaaggactggagggcggaaagactcgctgcctgggtagatctaaaggaaggaggtaccccgatatggacaccgaggtgagcaaagctcggggtcgcggcatacccctgcatttccaggatctgatcctatgtcccacctcctatcatttctgctag

SEQ ID NO: 125919 - DNA, 696 bp, synthetic construct
  misc_feature 1..696: note = Description of Artificial Sequence: Synthetic coding sequence
  source 1..696: mol_type = other DNA
atgcgagtgcccgtgttcgaagacatcaaagacgagaccgaagaggaaaaaatcggggaggaagaaaatgaagaggaccaggtcttttataagcccgtcatcgaagatctgtcgatggagctggccagaaagtgcaccgagctaattagtgacatccggtataaggaagagtttaagaaatcaaaagacaagtgtaccttcgtgaccgatagtcctatgctgaatcatgtcaagaacatcggagcctttatctccgaagctaaatataagggaacgatcaaggcagatttgtccaatagtttgtacaaacgtatgcccgccaccattgactcggtgttcgctggagaggtgactcagctgcaaagcgaggttgcatacaaacagaaacacgatgcagccaaggggttttctgactatgctcatatgaaggaaccccctgaagtcaagcacgccatggaggtgaacaagcatcagagtaacatttcctatagaaaagacgtgcaggatacacacacttatagcgcagaactggaccgccccgacataaagatggctacacaaatttccaagattattagcaacgccgaatataaaaagggtcaagggataatgaacaaagagcccgcggtgattgggaggcctgactttgaacacgcagtggaagcctctaaacttagtagtcaggtgagactctag

SEQ ID NO: 125920 - DNA, 3045 bp, synthetic construct
  misc_feature 1..3045: note = Description of Artificial Sequence: Synthetic coding sequence
  source 1..3045: mol_type = other DNA
atgagggtgcccgtgtttgaggacattaaagatgagaccgaagaggagaaaatcggggaggaggagaatgaggaagaccaggtgttttataagcccgttattgaggacctgtcgatggaactggcccggaaatgcaccgaactcatctcggacatacgctataaggaggaatttaagaagagcaaggataagtgcacattcgttactgactctcctatgcttaaccatgtcaaaaacataggcgcttttatctcggaggcaaaatataagggcaccatcaaagccgacctgagtaactctctgtataagaggatgcccgcaacgatcgactctgtatttgccggcgaggtgactcagcttcagtctgaagtggcttacaaacagaaacacgatgccgcgaaaggtttttctgactacgcccacatgaaagagccgccagaggtgaaacatgctatggaggtcaacaagcatcagtcaaatatatcataccgcaaagatgtgcaggacactcatacgtactctgctgagctggatcgacccgatataaagatggctacacagatttctaaaatcatcagtaacgctgagtataaaaagggacagggcatcatgaataaggagcctgcagtgattggacggccggactttgagcatgccgtggaggctagtaagctctcctctcagatcaagtataaggagaagtttgacaatgagatgaaagacaaaaagcatcattataaccctttggagagcgcaagctttcgccagaatcaactggccgctactctggccagcaacgtcaaatacaaaaaggacatccagaatatgcatgacccggtgagcgacctgcctaatcttctgtttctggaccatgtgctaaaggccagcaaaatgctcagtggccgggagtataagaagctgttcgaagaaaacaagggaatgtatcacttcgacgctgatgccgtggagcacctgcaccacaaaggtaacgctgtgctacagtctcaggtgaagtataaagaggagtatgagaagaacaaaggtaaaccaatgttggagttcgttgaaaccccctcttatcaggcctctaaagaggcccagaagatgcaatctgagaaggtatacaaggaagacttcgagaaggagattaagggcaggtcttcccttgatctggacaagacacccgaatttctccatgttaaatacatcacaaacctgctgagagagaaggagtataaaaaagatctagaaaatgaaattaaagggaaaggcatggagctgaatagtgaggtcctagatatccagcgggctaagagagccagtgaaatggcttctgaaaaggagtacaaaaaggatctcgaatctattataaaaggcaaagggatgcaggcaggaactgatacactggagatgcagcacgctaagaaggccgcagagatcgcttcggaaaaggactataagcgggacctggaaaccgaaatcaaaggcaagggaatgcaggtgagcacggataccctggatgtacagcgcgcaaaaaaggcaagcgagatggcatcccaaaagcagtataagaaggacctggagaacgagatcaaggggaaaggcatgcaagtctccatggacatacccgacattcttagagcgaagcgcacatcggagatatactcccagagaaaatacaaagatgaggccgaaaagatgcttagcaattacagtacgattgccgacaccccggaaattcaacgaattaagaccacccagcagaacatcagcgcggtgttctacaagaaggaagtcggtgcaggcaccgccgtcaaagactcaccagagattgaaagagtgaagaaaaaccagcagaacatttcctccgttaagtataaagaagaaatcaagcatgccacagctatcagcgatcctccggagttaaaaagagttaaggagaatcagaaaaacatatctaaccttcagtacaaagagcagaactataaagccacccctgtgtctatgacccctgagatcgagagggtgagacgaaatcaggaacagttgagcgccgtgaagtacaaaggcgaattgcagagagggactgctatttcggatcccccggaacttaagcgcgcaaaagagaaccagaagaacattagcaatgtctactacagaggccaactgggaagggccacaacgctgagcgtgacccctgaaatggaaagagtcaaaaagaatcaggagaacatatcatcagtaaagtacacgcaggaccataaacagatgaagggccgaccatccctaatcctggacacccccgccatgagacacgttaaggaagctcagaaccacattagtatggtgaaatatcatgaggactttgaaaaaactaagggaagaggatttacacccgtggtggacgacccagtgaccgagagggtgcgcaagaacacacaggttgtcagtgatgcagcctataaaggtgtgcacccccatatagtcgagatggaccgtcgaccaggtattatcgtcgacttaaaggtgtggcgaactgatcccggaagtatctttgatctggacccgcttgaagacaatattcagtccagatccctgcacatgcttagcgagaaggccagccattaccgacggcattggagtagaagtcatagctctagcacattcggcaccggactaggggatgaccgctccgagatctctgaaatttacccatccttttcttgctgcagtgaggtgacacgcccaagcgatgagggggcccccgttcttccaggtgcgtaccagcagagccacagccaggggtatggctatatgcatcagacaagtgtgtcctctatgcggtccatgcagcattcacccaaccttcgaacgtaccgagccatgtacgactactccgcgcaggatgaggatgaggtaagctttcgggatggtgactacatcgttaacgttcaaccaatcgacgacggctggatgtacggaacagttcagcgaacaggaagaacaggtatgctgcctgccaattatatagagtttgtgaactag

SEQ ID NO: 125921 - DNA, 711 bp, synthetic construct
  misc_feature 1..711: note = Description of Artificial Sequence: Synthetic coding sequence
  source 1..711: mol_type = other DNA
atgctgcatttttactacgaatggttacattctggcagccgcggtgcagtccctaaaccactgcactaccccaaacaaagttttacaactgtcgctgatacccctgaaaatcttagactgaagcagcagtccgaactccagagccaagtgaagtataaaagggattttgaggagagtaaggggagggggttctcaatcgttactgataccccagaattgcagagactgaaaaggactcaggaacaaatttctaatgtgaagtatcatgaggattttgagaaaaccaagggacgtgggttcacgccagtggttgatgatcctgtgactgaaagagtcagaaagaacacccaagtggtgagtgacgcagcctacaagggggtgcatcctcatatagtcgaaatggatagaaggccgggaatcatcgtggcaccggtgctcccaggcgcttaccagcaaagtcactcccagggttatgggtatatgcaccagacgagcgtgtcttcaatgcgatccatgcagcactcaccgaacctacgtacctacagagcgatgtacgactactccgcccaggacgaggatgaggtatcctttcgggatggcgattacattgtcaatgtgcagcccatcgacgatggatggatgtacgggaccgttcagcggacaggtcgcacaggcatgctccccgccaattacattgaatttgtgaactag

SEQ ID NO: 125922 - DNA, 813 bp, synthetic construct
  misc_feature 1..813: note = Description of Artificial Sequence: Synthetic coding sequence
  source 1..813: mol_type = other DNA
atgaatccacagtgcgctcggtgtggcaaggtggtgtatccgacagagaaggtcaattgcctggacaaatactggcacaagggatgttttcactgtgaagtatgcaaaatggccttaaatatgaacaactacaagggctatgaaaagaagccgtactgcaacgcccactatccgaaacagtctttcaccaccgtggcagacactcccgagaatctcagactcaaacagcagagtgagctgcaaagccaagttaaatataaaagagacttcgaagaatccaaaggccgcgggttttctattgtcactgacacccctgaacttcagcgcctgaagagaacccaagagcaaatttcaaatgtcaaataccatgaagacttcgagaaaaccaaaggacgtgggtttacccctgtggtagacgaccccgttactgaaagagttaggaaaaatactcaagtcgtgtccgacgccgcatacaaaggtgtccacccccatattgttgaaatggaccggcgcccaggcatcatcgtggctcctgtcctgcccggcgcctatcagcaatctcacagtcaaggatacgggtatatgcaccagactagcgtttcaagcatgcggtctatgcagcacagccccaatctgcgaacgtatcgggcgatgtatgactattccgctcaggatgaggatgaggtgagctttcgcgacggcgactacatagtgaatgtgcaacccattgatgatggatggatgtatggaactgtgcagcggaccggtcgcacaggtatgcttcctgcaaactatatcgagtttgtaaactag

SEQ ID NO: 125923 - DNA, 354 bp, synthetic construct
  misc_feature 1..354: note = Description of Artificial Sequence: Synthetic coding sequence
  source 1..354: mol_type = other DNA
atgagaaataactgtacagccagtctcatgaaagtcttttataaacccgtaatcgaagacctgtccatggagctggccagaaagtgcacggaactcatctccgatatacgatacaaggaggagtttaagaaatccaaagacaagtgtaccttcgtcaccgactctccaatgctgaatcacgtcaaaaatatcggtgcctttatttctgaggccaagtataagggcactataaaggcagacctatctaattctctgtacaagcgcatgcctgccacaattgattccgtgttcgcaggagaggtcactcagttacagtcggaggtggcatacaagcaaaaacatgacgcagcgtag

SEQ ID NO: 125924 - DNA, 20010 bp, synthetic construct
  misc_feature 1..20010: note = Description of Artificial Sequence: Synthetic coding sequence
  source 1..20010: mol_type = other DNA
atggccgacgacgaggattacgaggaagtcgtggaatactacactgaagaagtcgtgtacgaagaggtcccgggagagacaattaccaaaatctacgagactactactacccggaccagtgactatgagcagagtgagacaagcaaacccgctctggcgcagcctgctctggcccagccagctagcgccaaacctgtcgagcgcaggaaagtgatacgcaaaaaagtcgacccttcaaagtttatgaccccttatattgctcacagccagaaaatgcaggatctctttagccctaacaagtataaagaaaaatttgagaagactaagggtcaaccctatgcctcaaccactgatacacctgagctgagacggatcaagaaggttcaggaccagttaagcgaggtgaagtacaggatggatggcgacgtcgccaaaacaatttgtcacgtggacgagaaagcaaaggatattgaacacgcgaagaaagtgagccaacaagtgtctaaggtgctgtataaacaaaactgggaggataccaaagataagtacttgcttcctccagacgccccagagctagtgcaggctgttaagaacaccgccatgtttagcaagaagttatatactgaggactgggaagccgacaaaagcctgttctacccgtacaacgactcacccgaactgcgacgggtggcccaggcacaaaaggctcttagcgacgttgcctataagaagggcctggccgaacagcaagcgcagttcacaccactggccgaccccccggacatagaattcgcgaagaaagtcactaaccaggtgagcaaacagaagtataaagaagattacgagaataagatcaagggaaagtggagcgagaccccttgcttcgaggtggcaaatgcaaggatgaatgctgataacatcagtacgcgcaaataccaagaggactttgagaacatgaaggaccagatttattttatgcagacggagaccccagaatataaaatgaacaagaaggctggcgtggcggcctctaaggtgaagtataaggaagactatgagaagaataaggggaaggcagattacaatgtgctccctgcctctgagaatccacagctgcgccagctgaaagcagccggcgatgccctgtcagataagttgtataaggaaaattacgaaaagacgaaagccaaatctattaattactgcgagactcccaaatttaaactggacaccgtgttgcagaacttcagctccgataaaaaatacaaagacagctatttaaaggatatcctcgggcactacgtcggctcctttgaagatccttaccattcccactgcatgaaagtgacagctcagaactcagataagaactacaaggccgaatacgaagaggatcgcgggaagggcttcttcccccagacgataacacaagagtatgaagctataaagaagctcgatcagtgtaaagaccatacttataaggtccaccccgacaaaaccaaatttacgcaggtgactgattcacctgttttgctgcaagctcaggtgaattcgaagcaattgtccgatctgaattacaaggccaagcacgaatccgaaaagttcaagtgccacattccccccgacacccctgccttcattcaacacaaagtgaacgcatacaacctcagcgacaacctgtataagcaggattgggaaaagtcaaaagccaagaagttcgatataaaggtcgacgccatacccctgctcgccgcgaaagctaacacaaagaatacctctgatgtaatgtataagaaggattacgaaaaaaacaagggaaaaatgataggtgtgctgtccatcaatgatgaccctaaaatgctgcacagcctgaaagtagctaagaatcagtctgacaggctgtacaaagagaattacgaaaagactaaggccaaaagtatgaattattgcgaaacccctaaatatcagctggatactcagctcaagaatttttctgaggccagatataaggacttatacgtgaaggatgtgttgggtcactacgtcggttcgatggaagacccctaccatactcattgtatgaaagttgccgcccagaacagtgataagtcttacaaggccgaatatgaagaggacaaaggtaagtgctacttcccccagacaattacccaagagtatgaggcaattaaaaagctggaccagtgcaaagaccacacttacaaggttcaccctgataaaacaaaatttacagcggttaccgattcacccgtgttactccaagcacagctaaatacaaaacagctgagcgacttaaattacaaggccaaacatgagggcgaaaaatttaagtgccatatacctgcagacgccccacagtttatccaacacagggtgaatgcatacaatctgtccgacaatgtgtacaaacaggactgggaaaaatctaaggcgaaaaagttcgatatcaaggtggatgctatcccactgctcgcagcaaaggccaatacaaagaacactagcgacgttatgtacaagaaggactacgaaaaaagcaaaggaaaaatgatcggcgccttgtcaattaacgatgatcctaagatgttacattcactcaaaactgccaagaatcagagcgaccgcgagtatcgcaaggactatgaaaaatccaaaacaatttacactgcaccactggacatgctacaggtcacccaggccaagaaaagtcaggcaattgcaagcgatgtcgactacaaacatatattgcattcttatagctatccgcccgacagtattaatgtggacctggccaagaaggcatatgccctgcagtctgacgttgagtacaaagcggactataacagctggatgaaaggctgtggctgggtgcccttcggaagtctggaaatggagaaggctaagcgcgcttccgacattctgaatgagaaaaaatatagacaacatccagacaccttaaagttcactagcattgaagatgcccctatcactgttcagagcaagattaatcaagcccaaagatcagatattgcctacaaggctaagggggaagagattattcacaagtacaacctgccacccgatcttccacagtttatccaagcaaaggtcaatgcatataatatatctgaaaatatgtataaggcagacctgaaagatttatctaaaaagggttacgacctcaggactgacgcaattccgattagggcagcaaaggctgctcggcaggctgcaagcgacgtacagtataaaaaggattatgagaaagctaaggggaagatggttggattccagtcactacaggatgatcccaaactcgtccattatatgaacgtggctaagatccaaagcgaccgtgagtataagaaagattacgaaaagaccaagtctaaatacaatacaccacacgatatgtttaacgtcgtcgcagcaaaaaaagctcaggacgtagtgagcaacgtcaactataagcattctctgcatcattatacctacttgcctgatgccatggacctggagctgagcaagaatatgatgcagatacagtctgacaacgtgtacaaagaggattataataactggatgaaagggatcggttggattcccattgggtctctggacgttgaaaaggtgaagaaggccggagacgcgctcaatgaaaaaaaataccgacagcatccagatacactcaagttcacttctattgtggattcacccgtgatggtgcaggccaagcagaacacgaaacaggtttccgatattctgtataaggctaagggggaagacgtgaagcacaaatacactatgtccccagacctgccacagtttctgcaagccaaatgtaatgcatacaatatctcagacgtgtgttacaaacgcgactggtacgacctgattgctaagggaaacaacgtacttggtgacgccattccaatcactgccgccaaggcgtctcgaaatatcgccagcgattacaaatataaggaagcctatgaaaagagtaagggcaagcacgttggctttcggagtctacaggatgatccaaagctcgtgcactacatgaatgtggctaaactccagagtgatcgagagtataaaaagaactacgagaatacaaaaacatcctaccatacccctggcgacatggtcagcattacagcggccaagatggctcaagacgtagcaaccaacgtcaattacaagcagcctttgcaccattacacgtaccttccagacgcaatgtccttagaacacactagaaatgtgaaccagatacagagcgacaatgtatataaggacgaatacaactcatttctcaagggcattggatggattccaatagggtccctggaagtggagaaggtaaagaaggcaggtgacgccttgaatgagaggaagtacagacagcacccggatactgtaaaattcaccagtgttccagatagcatggggatggtactggcccagcacaacaccaagcaactttccgacttaaactacaaggtggagggtgaaaaactgaaacataagtatactattgatccggaattgcctcagtttatacaggcaaaagtgaatgcactaaacatgagcgatgcacattataaagcagattggaaaaagaccatagccaaaggctatgatcttaggcccgatgctattcccattgtggccgccaaaagctctaggaacatcgcctcagactgcaagtataaagaggcttacgaaaaggccaagggtaagcaggtcggattcctatctttacaggacgaccccaagctcgtccactatatgaacgtggccaaaatccagtcagatcgtgagtacaaaaagggttacgaggcaagcaagactaaatatcacacgccactagatatggtctccgtcactgctgcaaaaaagtctcaggaagtcgcaacaaacgccaattaccgccagtcataccatcactatactttactgcccgatgccttaaatgtcgaacattcgaggaatgcaatgcagattcagagcgataatttgtacaagtccgactttaccaactggatgaaggggatcggttgggtgccgattgaaagtttagaagtggaaaaggctaagaaggccggggagatcctgtccgaaaagaagtacagacagcaccccgagaagctgaagttcacatacgcaatggacacaatggagcaggctcttaataagtccaataagcttaacatggacaaacgcttgtatacggaaaagtggaataaggataagacgaccatccacgtgatgcccgatacacctgacatccttctatctcgggtcaaccaaatcacaatgtccgataagttgtacaaagccgggtgggaagaggagaaaaagaagggctatgatctgagacctgacgctatcgccatcaaggccgccagggccagtcgcgacatagcttcagattacaaatacaaaaaggcctatgagcaggctaaaggaaagcacattgggtttagaagcctcgaggacgaccccaaattggtgcattttatgcaggtggccaaaatgcagtccgatagagaatacaagaaaggatatgagaagagcaaaacttcgtttcacacacctgtggacatgctgtcggttgtggccgctaaaaagtcccaggaagttgccactaatgctaactatagaaatgttatacatacctataacatgctccccgatgcgatgtccttcgagctcgcaaagaacatgatgcagattcagagcgacaaccagtataaagccgattacgcagatttcatgaaaggtatcggctggttgccactgggttcccttgaagctgaaaagaataagaaagctatggagatcattagcgagaagaagtacagacaacatccggataccttgaagtactcgacgctcatggacagcatgaacatggtgcttgcgcaaaataatgccaagatcatgaatgagcacctgtacaagcaggcgtgggaggccgacaagaccaaagtgcacatcatgccagacataccacagatcattctagctaaagctaatgcgataaacatgtccgataagttatacaagctgagtctggaagaaagcaagaagaagggctacgatctgcggcctgatgccatacccattaaggctgctaaagcttccagagacattgcctccgattataagtacaaatacaattatgaaaagggaaaggggaagatggttggctttcgatcgcttgaagatgatcctaagcttgtccattccatgcaggtggctaagatgcagtcggatcgggaatataagaaaaattacgaaaatacaaagacctcttaccacaccccagctgacatgctgtcagttacagcagcaaaagatgctcaagccaacataactaacacaaactacaagcacctgatccacaaatatattttgttgccagatgctatgaatatcgagctgaccagaaatatgaaccgtattcagagcgacaacgaatataagcaggattacaacgagtggtataaggggttaggatggagcccagccgggtccctggaggtggagaaggcgaagaaggcaactgaatacgcctccgatcagaagtatagacagcacccttcaaatttccagtttaaaaagctgacagactcaatggatatggttctagccaagcagaacgctcacacaatgaataaacacctatatacaatcgactggaacaaggataagacgaaaatccacgtgatgccagatacaccagatatcctgcaggcgaagcaaaaccagacactttacagccaaaagctttacaagttaggatgggaggaagcactgaagaagggatacgaccttcccgtggatgccatttccgttcaactggctaaagccagccgggacatcgccagcgactataagtataagcagggataccggaagcagctgggccaccatgtgggttttcggagcctgcaggatgacccaaagttggtactgagcatgaatgtcgcaaagatgcaatcagagagggagtacaaaaaggactttgagaagtggaaaaccaagttttcttctccagtggacatgcttggcgtcgtgttagctaaaaagtgtcaggagttggtgtctgatgtggattacaaaaattacctgcaccagtggacatgcttaccagaccaaaatgatgtggtccaggccaagaaggtatacgagctgcaatctgaaaatctttacaagtccgacctggagtggcttcgggggattggctggagcccacttggctccctggaggccgagaagaacaagcgcgcctctgagattatttctgaaaaaaaatacaggcaaccacctgacagaaacaaatttacttcaattccagacgccatggacattgttctggctaagaccaatgcaaagaacaggtcggatagactctatcgagaggcctgggacaaggacaagactcagattcacataatgcctgacacacctgacatcgtacttgctaaagccaatcttataaacacctccgacaaactgtaccgcatgggctacgaggaattaaagagaaaaggctacgatctgcctgtggacgctatcccaattaaagccgcaaaagcatccagagaaatcgcgtccgagtacaagtacaaggaaggctttcgcaagcagctcggtcaccatatcggtgcgaggaacatagaagacgacccaaaaatgatgtggtcgatgcacgtggctaagatccagtccgatcgggaatacaagaaagactttgagaagtggaaaactaagttctcttcacctgtggacatgctcggcgtagttctcgcgaagaaatgccagactctcgtgagtgacgttgactacaagaactacctacaccagtggacctgcctcccagaccaaagcgatgtcatccatgcccgacaggcatatgacctgcaatccgataatctgtacaaatctgatcttcagtggctgaaaggaataggctggatgacatcaggctctctggaggatgaaaagaataagagggcaacccagatcctgagcgatcacgtgtatagacagcaccccgatcagttcaaattctcctcactgatggactcgattcccatggtcctcgccaagaacaacgcaattaccatgaaccaccgcctatataccgaggcttgggacaaagacaagaccacggttcatatcatgccagacaccccagaggtgctgctcgcaaagcagaataaagtcaactactctgagaaactctacaagcttggccttgaagaggccaaacgcaaaggctacgatatgagggtggatgctataccaatcaaggcggcaaaggcatctcgggatatagcttctgagttcaagtacaaggaaggctacagaaaacagttaggccatcatatcggagccagagccatccgggatgatcccaagatgatgtggagcatgcatgtcgcaaaaattcagagcgacagggagtacaaaaaggattttgagaagtggaagacaaaattcagcagcccggtggacatgttaggggtcgtgctggcaaaaaaatgccaaacactggtcagcgacgtggactacaagaattatctgcaccagtggacttgtctgcccgaccagagcgacgtgatacatgcacggcaggcgtatgatctacagagtgacaacatgtataaaagcgacctacagtggatgagagggattgggtgggtcagtatcgggtctctggatgtcgagaagtgcaagcgggctaccgagattctgtcagacaaaatttatcggcagcccccagaccggtttaaattcactagcgtgacagacagcttagaacaggtattggccaagaacaatgccatcaccatgaataaacggctgtacaccgaggcctgggacaaagataagacacagatccatattatgcctgacacacctgaaattatgctggcccggcaaaataaaatcaactattcagagaccctttataagctggcaaatgaggaggcgaagaagaagggttacgacctcagatcggatgctataccaatagtggcggcaaaggcgagccgcgacgtcatttcagactataagtataaagacgggtatcggaaacagttaggtcatcacatcggagccagaaacatcgaagacgatcccaaaatgatgtggagcatgcacgtcgcgaaaattcagagtgatagagaatacaaaaaagacttcgagaagtggaaaactaaattctcctcacccgtcgatatgctgggggtcgtattggccaaaaagtgccagacactcgtgtcagatgtcgattacaaaaattacttgcacgagtggacatgcctgccagaccagaatgatgtgatccatgctagacaggcctacgacttacagagtgacaatatctataagtcagatctgcagtggctgcggggaatcggttgggttccaatcggaagcatggatgtcgtcaagtgcaaacgggctgccgagatcctctctgacaatatatatcgacagccacccgataaactgaagtttacatcggtaaccgatagtctcgagcaggtgctcgcaaagaataacgcacttaacatgaacaagagattgtacactgaagcctgggacaaagataaaacccaggttcacattatgccagatacccccgagattatgctggcccgtcagaataagattaattattctgaatccctgtaccgacaggctatggaggaagctaagaaggagggctatgatctgaggtcggatgcaataccgattgtggccgccaaggcctcccgcgacatcgcctccgattacaaatataaggaggcatacagaaaacagctcggtcaccacatcggggcgcgagccgtgcatgatgaccccaaaattatgtggagcctccacatcgcaaaagtccagagtgatagggagtataagaaggatttcgagaagtataagacacgctattcttcccctgtggatatgctcggtatcgtgctggcaaagaagtgtcagaccttagtgtctgacgttgattacaaacatccattgcatgagtggatctgcttgccagatcagaatgatatcattcacgcacggaaagcctacgatctacagtccgataatctttacaagagcgatctggaatggatgaagggaataggatgggtccctatcgacagcctggaggttgttcgagcaaagagagccggcgagcttttgagcgataccatataccggcagcggccagagacgcttaagttcacctccattactgataccccagagcaggtcttagccaagaataacgcactgaacatgaacaaacggctgtacacggaagcctgggacaatgacaaaaagaccatccatgtcatgccagatacgcccgaaattatgctggcgaaactaaaccggattaattatagcgataagctgtacaagctggccctggaagagtctaagaaggaagggtatgacctgcgcttggatgccattcctatccaggcagctaaagcaagcagggatattgcatccgattacaaatacaaggagggctataggaagcagctaggacaccatattggggctcgcaatatcaaggatgatccaaaaatgatgtggagcattcacgttgcaaaaatccagtctgaccgggagtacaagaaggaattcgaaaagtggaagactaagttcagctccccagtcgatatgttgggcgtggtgcttgctaaaaagtgtcagatccttgtcagcgacatcgactataagcatcctctgcacgagtggacctgtctcccggatcaaaacgatgtcattcaggcccgcaaggcctatgatctgcagtctgatgctatatacaagtccgatctcgagtggctcagaggcattgggtgggtaccaattgggtccgtcgaagtcgagaaggtgaagcgagcaggtgaaatattgtccgataggaagtacagacaacccgctgaccaactgaaatttacctgcattactgacacccctgaaatcgtactcgccaaaaacaatgctctgaccatgtctaaacacctgtacaccgaggcgtgggacgcggacaaaacttcgatccacgtgatgcctgacactcccgatatacttctcgctaagagcaactcagcaaatatatctcaaaaactctacaccaaaggttgggacgagagtaagatgaaagattatgatctcagggccgatgccatcagcataaagtctgcaaaagcctctcgagacattgcttctgattataagtacaaagaggcctatgagaagcaaaagggacaccacattggcgcccaatccatagaagatgatcctaagattatgtgcgcaatccacgccggcaaaatacagtctgagcgggagtacaaaaaagaattccaaaaatggaagactaaattctcaagcccagtcgatatgctgtccatcctcctggctaagaagtgccagacactggtgactgatattgactatagaaattacctgcatgaatggacgtgtatgccagatcaaaacgacatcatccaagccaaaaaagcctacgaccttcaatccgacgccctgtataaggctgatctggaatggctgcgcggcattggctggatgccccaggggagcccggaggttttacgggtgaagaacgcacagaatattttctgcgactcagtctatcgcacgcccgttgtgaacctgaagtatacctccatagtcgataccccagaggtggtgcttgcaaagagtaatgccgaaaatatctcaatacctaaatacagagaggtatgggacaaagacaaaacaagcatacacattatgccagatactccagagatcaacctggcccgcgctaatgcactcaatgtttccaacaagctgtatcgcgagggctgggatgagatgaaggcaggctgcgatgtaagactagacgccatcccgatccaggccgccaaggccagccgggagattgctagtgactacaagtacaagcttgaccacgaaaagcagaaagggcactatgttggtaccctcaccgcccgcgatgacaataaaatccggtgggccctcatagcagataagttgcaaaatgagcgagaatatcgccttgactgggctaaatggaaagctaagattcaatctcctgtagacatgctgtctatcctccatagcaagaatagtcaagccctcgtctcagacatggattatagaaactatctccatcaatggacatgtatgccagaccagaatgacgttattcaagccaagaaggcttacgagcttcagtccgacaacgtatataaggccgacctagagtggctccgagggattggttggatgcccaacgattcagtcagcgttaatcacgccaaacatgcggcagatatcttctccgaaaaaaagtatcgtacgaaaatagagactttgaacttcacacccgtggacgaccgcgtcgattatgtgactgccaaacagtccggagagatcctcgacgatatcaagtaccggaaagattggaacgccacaaaatcgaaatacacactgaccgagacacctctgttgcatacagctcaagaggccgcgagaattctggatcagtacctttataaggagggctgggagagacaaaaagctacaggctacatactccctcctgatgcagtgccatttgttcacgctcaccactgcaacgatgttcagtcagaactcaagtataaggctgaacacgtgaagcagaagggtcattatgtaggggtcccaacaatgcgtgatgacccaaaactggtttggtttgagcacgccgggcagatccagaatgagcggttatataaggaagactaccacaaaaccaaggcaaaaatcaacatcccagccgacatggtatcggtcttagctgctaaacagggtcagaccctggtttccgatatagattatagaaattacctccaccagtggatgtgccacccagaccaaaacgacgtgatccaggctcgcaaggcatatgacctacagagcgacaatgtgtatcgagcagatcttgaatggttacgggggattgggtggatccccctggactccgtcgatcacgttagagtcaccaaaaaccaggaaatgatgtcccaaatcaaatacaaaaagaacgctctggagaactacccgaatttcagatccgtggtcgatccaccagaaatcgtattagccaaaatcaattccgtgaatcaatctgacgtgaagtacaaagagacattcaacaaggccaagggcaaatatactttctcacctgatacacctcacatttctcattctaaggacatgggcaaactctacagcactattctttacaaaggtgcttgggaagggacgaaggcctatgggtatacccttgatgagcggtatattcctattgtgggtgctaagcatgccgatcttgttaattccgaactcaaatacaaggagacctatgaaaaacagaaaggccactatctcgctggaaaggtcattggggagtttcctggggttgtgcattgcctagactttcagaaaatgcgatctgccctgaattacaggaaacactatgaagacaccaaggctaacgtgcatattcctaatgacatgatgaaccacgtcttggctaaaagatgtcagtatatactgtctgatcttgaatatcggcattattttcaccagtggacctctctcctggaggagccgaacgtgattcgcgtgcgcaatgcccaggaaattctgtctgataatgtttacaaagatgatctgaattggctcaagggaatcggctgctatgtgtgggatacaccccaaatcctgcatgctaaaaagtcctatgacttacagtctcagcttcagtatactgcagccggtaaggagaacctgcagaattacaacctggtgaccgatacgccattgtacgtgacagccgtgcagagtggcatcaacgcttcagaggtcaagtataaagaaaactatcatcagataaaggacaagtataccacagtacttgaaacagtggattatgaccggactcgcaacttgaagaatctctactcttcaaacctgtacaaggaggcttgggaccgtgtcaaagccacttcctatatcctaccttctagcacactgtccctgacccacgccaagaaccagaagcaccttgcctctcacataaaatacagggaggagtatgaaaagttcaaggccctctatacgttgcctcgctcagtggatgacgacccgaacacggccagatgtctccgggtcgggaaactgaacatagatcggttatacagaagcgtgtatgaaaaaaacaaaatgaagatacatattgtgcctgatatggtggagatggtgactgcaaaggattcacagaagaaggtgtctgagatagactatagactgcggcttcatgaatggatctgtcacccagaccttcaggtgaatgatcacgtacgaaaagtaacagaccaaatatcggacatagtgtataaggacgatctgaactggctgaaggggataggttgctacgtgtgggacacgcccgagatcttgcacgctaaacacgcctatgatctgagagatgacataaagtacaaagcgcacatgctcaaaacacggaatgattataaactcgtgaccgataccccagtatacgtccaagctgtcaaatcgggtaaacaactgtcagatgcagtgtaccactacgactacgtgcactctgtgagggggaaggtggccccgactacaaagacagtggacctcgaccgagcactgcatgcctacaaactgcagtccagtaacctttacaagacatcactcagaacacttcctacaggttatagactccctggagataccccacacttcaagcacatcaaggacacccgttacatgtcctcctactttaagtataaagaggcatatgaacacaccaaggcttatgggtacacccttggcccgaaggacgtgccctttgttcacgtgcggagagtgaacaatgtaacatcggaaagactgtacagagagctgtaccacaaactcaaggacaagattcatactacccctgacacacccgaaattcgacaggtcaaaaaaacccaggaagctgtgtcagagctaatctacaaatcggacttttttaagatgcaagggcacatgatctcattgccgtacacccctcaagttattcactgcaggtatgttggtgatatcacaagcgacatcaagtacaaggaagacctgcaggtcctcaagggctttgggtgcttcctgtatgatacaccagacatggttcggtccagacacctcagaaagctgtggagcaactatctgtacactgacaaagctcggaagatgcgggataagtacaaggtggtcttagacacccccgaatatcggaaagtgcaggagctaaagactcacttgagcgaactggtatatcgggccgcagggaaaaaacaaaaatccatatttaccagcgttcctgatacgccggatctgttgagggcgaagagaggacagaagctgcagagccagtacctgtatgttgaactcgccactaaagaaaggccccaccaccacgcgggtaatcagactacagccctgaagcacgctaaggatgtgaaggatatggtgtcagaaaaaaagtataaaatacagtacgaaaaaatgaaagataaatacacccccgtgcccgatacgcctattctcattcgggccaaacgagcctattggaacgcctcagatctccgatacaaggagacgttccagaagaccaagggaaagtaccacactgtgaaggatgcactggatatcgtgtaccatcgcaaggttaccgatgacatctccaaaatcaagtacaaagaaaactatatgtctcagttgggtatttggaggtcaataccagatcggcccgagcacttccatcacagagctgtgactgatacagtctctgacgtgaagtacaaagaggacctgacttggctgaagggcatcgggtgctacgcctatgacacccccgattttaccctcgccgagaagaacaaaactttatacagtaaatacaagtacaaagaggtgttcgaacgaaccaagtctgactttaagtatgtcgccgacagtcccatcaacagacatttcaagtatgctacacaactgatgaacgagaagaagtaccgagcagattacgagcagcgaaaagacaagtaccaccttgtggtggacgaacctcggcacctgttggccaagactgcgggagatcagatctcccagataaagtacaggaagaattacgaaaagtctaaagacaaatttacttctattgtggatacaccagagcacttaaggaccactaaggttaacaagcagatctccgacatcctttataagctcgaatacaacaaagctaagccaaggggctatactacaatccacgatactcctatgttgctacacgtgagaaaggtcaaagatgaagtgtctgacttaaagtacaaggaggtctaccagcgaaataaatcaaactgtaccattgagccagatgcagtgcacataaaggcagccaaagacgcatacaaagtgaatacaaatctggactacaagaagcagtatgaggccaacaaggctcattggaaatggactcccgatcggcccgattttttgcaagccgctaaatcatcactgcagcaatctgacttcgagtacaaactggaccgggaatttctgaaaggatgcaaactgtccgttacggatgacaagaataccgttttggctttgcgcaatactctgatcgaatctgatctcaagtacaaggagaagcatgtaaaggagagaggaacatgccacgcagtcccagacacaccccagatcctgttagctaagactgttagcaatctggtgtctgagaataagtacaaggaccacgtgaaaaaacatctggcgcaagggagctataccactttacccgagacacgggacactgttcatgtgaaagaggttactaagcatgtgtcagacacgaattataaaaaaaaattcgttaaagagaaaggaaaaagtaattactccataatgctcgagcccccagaggtcaaacacgcaatggaagttgcaaaaaagcagtcagacgtggcttaccggaaggatgccaaggagaacttacattacacaacggtggcagaccgtccagatataaaaaaagctacacaggcggccaagcaggcgtcagaggtggaataccgagctaaacatcggaaggaagggagtcacggtctgagcatgttgggcagaccagacatagagatggcaaagaaagctgcaaaactctcgagtcaggtgaagtatcgcgaaaatttcgacaaagagaaaggcaaaacgccgaagtacaatcctaaagatagccagctgtataaggtaatgaaagatgcaaataacctcgctagtgaggtcaagtataaagctgacctaaagaagctgcataagccagtgacggatatgaaagaatcactcatcatgaaccacgtgctaaacacttctcagctggcttcaagctaccagtataaaaagaaatacgaaaaaagtaaggggcactatcacaccatcccagataatctagaacagttacacttgaaagaggctaccgaactgcagagtatagtgaagtacaaagaaaagtacgaaaaggagaggggaaaacccatgctcgactttgagacccccacttacataacagccaaggaatctcagcagatgcaaagcggtaaggaataccgcaaggattatgaagaaagtattaaaggtagaaacctgactggactggaagtaacacccgctctgctacacgtcaaatatgctactaagatcgctagtgagaaggagtaccgcaaagacctggaggaatcaattaggggaaaaggcttgacagagatggaggatactccagatatgcttcgcgctaaaaacgcaacacagatcctcaatgaaaaggaatacaagcgggatctcgaactcgaggttaaaggtaggggactgaatgcaatggcgaatgagacgcccgacttcatgagagctcgaaatgctacagacattgccagccagatcaaatataagcagtccgctgagatggagaaggcgaactttactagtgttgtcgacacccccgaaatcattcacgcccagcaggtgaagaacctgtccagccaaaagaaatacaaggaggatgcagagaaaagtatgtcttactatgagacagtactggacacccctgagatccagagagtgagagagaatcaaaaaaacttttcgctgctgcagtaccagtgtgacctcaaaaactctaaggggaagattaccgtcgtgcaggatactcccgagattctgcgcgtaaaagaaaaccagaaaaacttcagctcagtgctgtacaaggaagacgtgtccccgggaacagcgattgggaagactccagagatgatgcgcgtgaagcagacgcaagatcacatttcgagcgtaaaatacaaggaggcaataggacagggtactccaatccctgacctcccagaagttaaacgcgtgaaggagacacagaagcacatctcgtctgtgatgtacaaggagaacctgggcacgggaattcctaccacggtgaccccggaaattgagcgggtcaagaggaaccaggagaatttttcatccgtcctttataaagagaacctggggaagggtataccaactcccatcacccccgagatggagcgcgtgaaacggaatcaggagaacttttccagcgtactctataaggagaacatgggaaaagggaccccgttagccgtgactccagaaatggaaagagtgaagcacaatcaagagaacatttcctctgtcttatataaggagaatgtggggaaagctaccgcaacgccagtgacgccagagatgcagcgcgttaaacgcaaccaggagaatattagtagcgtgctgtataaagagaatcttggaaaagcgacacccactccattcactcccgaaatggaacgggtcaagaggaatcaggagaacttcagctctgtgctttataaagagaacatgcgcaaagctactccaacaccagttaccccagaaatggagagggctaagagaaatcaagagaacatctcgagcgtcctgtacagcgactcttttcgaaaacagattcagggcaaggcagcatatgtattggatacacctgaaatgcgtcgggtgagagagactcagcgccacatcagcactgttaaatatcacgaagatttcgagaagcataagggttgctttactcccgtcgtcactgatccgattacggaaagggtaaaaaagaatatgcaggacttcagtgacatcaattaccgggggattcagaggaaagtggtggaaatggagcagaaaaggaacgatcaagatcaagagaccatcaccggtcttagggtgtggcgaaccaaccccggcagcgtcttcgactatgatcccgccgaagacaacattcagtcacggtcgctccacatgataaacgttcaggcgcagcggaggtctagagagcagagccgttccgcctcggccttgtctattagcgggggggaggagaaatcagagcactccgaggctccggaccatcacctgtcgacgtatagtgacggaggcgtattcgccgtcagtacagcttacaagcacgctaaaaccacggagctgcctcagcagaggtcttcatctgttgcaacgcaacaaaccacagtgtccagcatcccatcacatcctagcactgcgggaaagattttccgcgccatgtacgactatatggccgcggatgccgacgaagttagcttcaaagatggagacgccatcatcaatgtccaggcaattgacgaaggttggatgtacggcacagtgcaacgaaccggccgcactggcatgctacctgccaattatgtggaagcgatttag

SEQ ID NO: 125925 - DNA, 1503 bp, synthetic construct
  misc_feature 1..1503: note = Description of Artificial Sequence: Synthetic coding sequence
  source 1..1503: mol_type = other DNA
atggagagggtgaagcgcaatcaggagaactttagctccgtgctttacaaggaaaatttgggcaccggaattcccatccctatcacccccgagatgcagagggttaaacataaccaggaaaatctcagctccgttctatacaaggagaatatgggcaaggggactcccctgcccgtcacccccgagatggagcgggttaagcacaaccaggaaaatatttcctctgtcctctacaaggagaacatggggaagggcacgcctctgcctgtcacaccagagatggaacgagttaagcataatcaggaaaatatcagcagtgttctgtacaaagagaatatgggtaagggtacccctctggcggtgacccccgaaatggagcgagtgaaacataaccaggaaaacatttctagtgtgctgtacaaagagaacgttggcaaggccactgcaacacctgtgactcccgaaatgcagcgggttaaacggaaccaagaaaacatcagctccgttttgtacaaggagaacctcggaaaagccactcctacgccttttacacctgaaatggagagagtaaagagaaaccaagaaaatttctctagcgtcctgtacaaagagaatatgcgcaaggcgactcccactcccgtgacgcctgaaatggagcgagcaaaacgcaaccaggagaacatctcttcagttctctacagcgactcattcaggaaacagatccaagggaaggccgcatatgttttggatacacctgaaatgcggcgcgtccgagaaacacaacgacacatatcaactgtgaagtaccatgaagacttcgagaagcacaaaggatgtttcacccccgtggtcaccgacccaattaccgagagagtgaaaaaaaatatgcaggattttagtgatatcaattatcgagggatacagcgcaaagttgtggaaatggagcagaaaagaaacgatcaggatcaggagactattacaggcctgagagtgtggcgcaccaatcccggcagtgtgtttgactacgaccccgctgaggacaatatacagtcaaggagcctacacatgatcaacgttcaggcccaaagacgcagtcgagagcagagtagatctgccagcgcactctctattagtggtggcgaggagaagtctgagcactctgaggctccggatcaccatttaagcacatactccgatggcggggttttcgcagtttcaacagcgtacaaacacgcgaagactaccgagctcccccagcagcgatcctcctcagttgcaacacagcagactaccgtgtcttcaattccatcccacccaagcaccgcaggaaaaatctttcgcgcaatgtatgattacatggcagcagacgctgatgaagtcagtttcaaagatggcgacgccatcatcaatgttcaagcgatcgatgaaggatggatgtatggcacagtacagcggactgggaggactggcatgttgcccgcaaattacgtggaggcgatctag

SEQ ID NO: 125926 - DNA, 7878 bp, synthetic construct
  misc_feature 1..7878: note = Description of Artificial Sequence: Synthetic coding sequence
  source 1..7878: mol_type = other DNA
atgcccgacactcccgagatcaatctggcacgtgcgaatgcactgaatgtgtccaacaagctgtatcgcgaggggtgggacgaaatgaaggcaggatgtgacgtgaggctagatgccatccctattcaagcagctaaagcctcgcgggagattgcttccgattacaagtacaaactggaccatgagaagcagaaggggcactacgtcggaaccctcacagcccgggatgataataagatcagatgggctttgatcgccgacaaactacaaaatgaaagggagtaccgcctcgattgggcaaaatggaaggcaaagatacagagcccagtggacatgctgtctattctccacagcaagaattcccaggcactggtttcagacatggactaccgtaactaccttcatcagtggacgtgtatgcctgaccagaacgacgtgatccaggcaaagaaggcatatgagctgcagagcgacaacgtatacaaagctgatctggagtggcttcggggcattgggtggatgcctaacgattctgtgagcgtgaaccatgccaagcacgccgctgatatcttttccgagaagaaatatagaaccaagatagagactctaaatttcactccggtggacgaccgggtcgactatgttactgccaaacagtccggggagatcctggacgatatcaagtatcggaaggattggaacgctactaaatccaaatatacattgacagagactcctctcctgcatactgcacaggaggccgcccggatactggaccagtacctgtacaaggaggggtgggagcgacaaaaggctactggctatattctgccccctgatgccgtcccattcgtccatgcacaccactgcaacgatgtgcagtccgagctgaagtataaggcggaacacgtgaagcaaaagggacactacgttggcgttcccaccatgcgtgacgacccaaagctggtgtggtttgagcatgccggccagattcagaatgaaaggctttacaaagaagattaccataagactaaggctaagataaacatcccagctgatatggtctccgttctggcggccaagcagggccagacactcgtttccgatattgattatcggaactaccttcaccaatggatgtgtcatcccgaccagaatgacgtgatccaggctcgcaaagcatatgacctgcagagcgataatgtgtacagagccgacctcgagtggctgcgcggcatcgggtggatccctttagattcagtggaccatgtgcgagtgaccaagaaccaggagatgatgtctcagattaagtacaagaagaacgccctggaaaactaccccaacttccgctccgttgtggatcctcctgagattgtgctggccaaaatcaacagcgtgaatcagagtgacgtaaagtacaaggagacgtttaataaagccaagggaaagtataccttctcacccgatacaccacacattagccattcaaaggacatgggcaaattgtactctaccatactgtataagggggcctgggaaggcaccaaggcttatggatacactctggacgagcgctacatccctatcgtgggtgcaaaacatgccgacctggtcaatagcgagctaaagtacaaggagacgtatgagaagcagaagggtcactacttagctggaaaggtgatcggcgagtttcccggggtggtgcactgcctcgacttccagaagatgcggtccgcacttaattatcgcaagcactacgaggacacaaaggctaatgtgcacatccccaacgacatgatgaatcacgtgctcgccaagaggtgccaatacattctgtcggatctggaatatcgacattactttcaccagtggacctctctcttagaagaaccaaacgtgatacgagtgagaaacgcccaggaaatactaagtgacaacgtgtataaagatgacctcaattggctgaaggggatcggctgttacgtctgggacaccccacagatcctccacgctaaaaagtcctacgacttgcaatcccagttgcagtacaccgctgctggaaaggagaaccttcagaattataacctcgtgacagatacacccttatatgtgactgccgtgcagtccggaataaacgcctctgaagtgaaatacaaagaaaactaccaccagatcaaggataagtacaccactgttctagaaaccgtggattacgacaggacccgcaacctgaagaacctttattcgtcaaatctatataaggaagcatgggaccgagttaaggcaacatcatatattcttccctctagcactttatctctgacgcatgccaaaaaccagaagcacctggccagccacataaagtatcgagaggagtatgagaaattcaaggcactgtacacactcccgaggtccgttgacgacgaccctaatactgcacgctgcctgcgcgttggcaaactgaacattgatcgtctctatcggagcgtatacgagaagaataagatgaaaattcacatcgtgccggacatggttgaaatggtaactgcaaaggactctcagaaaaaggtttcagagatcgactatcgactccgcctgcacgagtggatctgtcatcctgatctgcaggtcaacgatcacgtgagaaaggtcacagatcagatctccgacatcgtttataaggacgacttgaattggctcaagggcatcggttgctacgtttgggacactcccgaaatcttgcatgctaaacatgcatacgatctgagggatgatatcaaatataaggcgcatatgctcaaaacccggaacgactacaagctggtgacagacacacctgtttatgtgcaggccgtgaaaagcggcaaacaactcagcgatgccgtataccactacgattatgtgcatagtgtcagagggaaggtggctccgaccactaaaactgttgatttagatagagctctacatgcctataagcttcagtcgagtaacctgtataagacctctttacgcactttgcctaccggttaccgcctccctggagatacccctcacttcaaacacatcaaagatacacggtatatgtcctcttattttaagtataaagaggcatacgaacacactaaggcttacgggtacactctgggacccaaggacgtccctttcgtccatgttcgtagagttaacaatgttacctctgagcgactctaccgtgagctgtaccataaactgaaagacaagatccatacgacgccagacaccccagagatccgacaggtgaaaaagacacaagaggccgtttctgaactgatatacaaaagcgacttcttcaaaatgcaaggtcacatgatctctcttccctacactccgcaggtaatccattgcaggtacgtcggagatataacgtctgacattaagtacaaggaagatctgcaggtactcaagggctttggttgcttcttatatgatacacccgatatggttaggtcgcggcatctgcgcaagctatggagtaattacttatacacagacaaggcccgcaagatgagagataaatacaaggtcgttctcgatactccagaataccggaaggtgcaagaactgaaaacacacctctcagagcttgtataccgcgctgccgggaagaagcaaaagtcgatcttcacaagcgtgccagacacacccgacctacttagggcaaaaagaggtcagaagttgcagtctcagtacttgtacgtggagctcgcaaccaaagagaggccacatcatcacgctggaaatcaaactactgcattaaagcacgccaaggatgttaaagacatggtgtctgaaaagaagtacaagattcagtacgagaagatgaaagacaagtataccccagtgccagacacccccattctgattcgggcaaaaagggcctactggaatgcatctgacctccgttacaaggagacattccagaaaactaaggggaagtaccataccgtaaaagacgcactggacattgtgtaccacagaaaggtgacggacgacatatcgaaaattaagtataaagagaactacatgagtcagttgggtatttggagatcgatcccagatcgcccagagcatttccaccatcgagcagtgacagacaccgtcagtgacgtaaagtacaaggaagatttgacgtggttgaaggggattggttgttacgcttacgataccccagattttaccctggctgaaaagaataagaccctgtacagtaagtacaaatacaaggaggtgttcgagaggactaaaagtgatttcaaatacgtcgccgactcaccaatcaaccgccacttcaaatatgctacccagctaatgaacgaaaagaaatatagagctgattatgaacaaaggaaagacaaataccatctcgtggtagatgaacccaggcatctgttagccaagacagcgggagatcagatttctcaaatcaagtaccgcaagaattacgagaagtctaaggacaaattcacttccatcgtggacacgccggaacacctgagaaccacaaaggtcaataagcagattagtgatattttgtataaacttgagtacaataaagccaagccgaggggatacaccacaatacatgataccccgatgctcctccatgtgaggaaagtaaaagacgaggttagcgacctcaagtacaaagaggtctaccaacgaaataaatccaattgcaccattgaacctgatgctgtgcacattaaagctgcaaaagacgcttataaagtcaataccaacctcgactataaaaaacaatatgaggccaacaaggctcactggaaatggacgcctgacagacccgactttctgcaggccgccaaatcctctcttcagcagtcagatttcgagtacaagctcgaccgcgagttcctgaaggggtgcaaactgtcggtgacagacgacaagaacacagtcctggctcttcgtaacactctcattgaatcagatctaaagtacaaagaaaaacatgtgaaagagaggggcacatgccacgctgtgccggatactccgcaaatcctgcttgccaagaccgtcagcaaccttgtctccgaaaacaagtataaagatcatgtgaagaaacacctcgcacagggatcctacaccactttgccagaaaccagggacaccgtgcatgtgaaagaagtaactaagcacgtttctgatacaaattacaagaagaagttcgtgaaggaaaaagggaaatctaactactctatcatgttggaaccaccagaggttaaacatgccatggaggtggccaagaagcagtcagatgtcgcctaccgcaaggatgccaaggagaatctccattatactaccgtcgctgaccgtccggatattaagaaagccactcaggccgcaaaacaggccagcgaagtggagtatcgagccaagcatcggaaggaaggcagccacggtctgagtatgcttggaagacccgacatcgagatggcaaagaaagctgctaagctcagctcgcaggttaagtaccgtgaaaacttcgacaaagagaaaggcaagacaccgaagtacaaccctaaggattcccagctttacaaagttatgaaagacgccaacaatctggctagcgaggtgaaatacaaggccgacctgaagaagttgcacaaaccggtgacagatatgaaggagagccttattatgaatcatgtcttgaatacgtctcagctggcctcctcctaccagtacaaaaaaaagtacgaaaaatctaagggccactaccacactattccagacaacctagagcagttacatcttaaggaggctacggagctacaatctattgtgaaatataaggaaaagtatgaaaaggagcgcggcaagccaatgttggactttgagaccccaacatatattacggccaaagagagccagcagatgcagagcggcaaagaatataggaaggactacgaggaaagcatcaaggggcgcaatttgacagggttggaagtcactcctgctctcttgcatgtgaagtacgctaccaagatcgcaagtgagaaagaataccgtaaggacctggaggagtcaatccgaggaaagggcctaaccgagatggaagacacccctgatatgctcagggctaaaaacgccacgcagatattgaacgagaaggaatataagcgtgatttagaattagaggtgaaaggcagaggtctcaacgcaatggccaacgagacaccggatttcatgcgagccaggaacgccactgacattgccagtcaaattaagtataagcaatctgccgagatggagaaggcgaactttacatcggttgtggatacacccgaaatcatccacgcccaacaggtcaagaacctgagctctcagaaaaaatataaggaggatgcagaaaaatctatgtcttactatgaaaccgtgctggacacgcctgaaattcagagggtccgggagaatcagaagaatttctccctgcttcaatatcagtgcgatttgaagaacagtaaaggcaagattacggtggtgcaagacactcccgaaatactacgggtaaaggaaaaccagaaaaacttcagcagtgtgctctataaggaggatgtatctcccgggaccgcgatcggtaaaacgccagaaatgatgcgcgtcaaacagacccaggatcacatctcctccgttaaatacaaagaagccattggccaagggacccctattcctgatttgcccgaggtgaagcgggtaaaggagacccaaaagcacatcagcagcgtgatgtacaaggagaacctgggaaccggaatacctaccaccgtcactcccgaaatagaacgtgtgaagcgcaatcaagagaacttctcctcagtgttatacaaggagaatatgggtaagggtacgccactgcctgtcacccctgaaatggaacgcgtaaagcacaaccaggagaatatctccagcgtgctctataaggaaaacgtggggaaggccacagctacaccagttacacctgagatgcagcgagttaaaagaaaccaggaaaatattagctccgtgctgtacagcgattcatttcgcaagcaaatccaggggaaagccgcgtatgtgcttgatactcctgagatgcggagagtgcgcgagacacaaaggcacatttcgaccgtgaaataccatgaggattttgaaaaacacaaaggctgcttcacccctgtagtcaccgaccccattactgaacgggttaagaaaaatatgcaggatttttccgacattaactaccgtgggattcagaggaaggtcgtcgagatggagcagaaacgcaatgaccaagatcaagagacaatcaccgggctgagggtgtggcgcacaaaccctggttcagtgttcgactatgatcccgccgaagataatatacagtctcgatctctgcacatgatcaacgtgcaagcccagcggcgatccagggagcagtcgcgttcagcaagcgccttgagcatctccggcggcgaagaaaagagtgaacatagcgaggctcctgatcaccatctctccacgtacagcgatggaggagtgttcgcggtgagtacagcctacaagcacgctaagacaacagagttgccacagcagcgctcatcgtccgtcgccactcagcagaccacagtgtcatccattccaagccacccctctaccgccggaaagatctttcgagccatgtacgattacatggccgctgatgcagatgaggtcagtttcaaagatggtgacgccattatcaacgttcaggcgatagacgaaggatggatgtatgggaccgtacaacgaaccggacgcactggcatgctgccagctaactacgttgaggcaatttag

SEQ ID NO: 125927 - DNA, 25578 bp, synthetic construct
  misc_feature 1..25578: note = Description of Artificial Sequence: Synthetic coding sequence
  source 1..25578: mol_type = other DNA
atggcggacgacgaggattacgaggaggttgtggagtactacaccgaggaggtggtgtacgaggaagtgcctggcgagacgataacaaagatttatgaaaccacaaccacacgcacctcagactatgaacagtcagagacatcaaaacctgcgttggcccagcccgctcttgctcagccagccagcgccaaaccggtggagagaagaaaagtgattcggaagaaagtggacccctctaaatttatgacaccctacatcgcgcattcacagaaaatgcaagatctgttctctccgaataaatacaaagaaaagtttgaaaagaccaaaggccaaccctacgcctctactacagatacccccgagctccgccgtattaagaaagtccaagaccagctgtctgaagtgaaatatagaatggacggcgacgtggccaaaactatttgtcacgtggacgagaaagcaaaagacatcgagcatgccaagaaagtttctcagcaggtatcaaaagtactgtataagcaaaactgggaggatacaaaagataagtaccttctgcctcctgacgcgcctgagctggttcaggctgtgaaaaatactgcaatgtttagcaagaaactgtacacagaagactgggaggctgacaagagcttgttttacccttataatgactcccccgagctaaggcgggtagcacaagcccaaaaggctctgtctgatgttgcctataagaagggcctggccgaacagcaggcacagttcaccccacttgcggacccccctgacatcgagttcgcaaaaaaagttacaaatcaagttagtaaacagaaatacaaagaggactatgagaacaaaattaagggcaagtggagcgagaccccctgcttcgaggtggccaacgctagaatgaacgctgataatatctccaccagaaagtaccaggaagattttgaaaatatgaaagatcagatatattttatgcagacggaaactcccgagtacaagatgaataagaaagctggcgtcgccgctagcaaagtgaaatataaggaggattacgagaagaacaagggcaaggctgactacaacgtcctgccagctagcgaaaacccacagctaaggcaactgaaagccgccggagatgcccttagcgataaattatacaaggagaactatgagaagacgaaggccaaatcaattaattactgcgagacacccaagttcaagctcgacactgtgctgcaaaacttttcgagtgacaagaaatataaagactcctatctgaaagatattctggggcactacgtggggtctttcgaggacccatatcattcacattgcatgaaagtgactgctcagaatagcgacaaaaattacaaagctgagtacgaggaggataggggtaaaggattcttccctcaaaccatcactcaggaatacgaggccattaagaagctcgatcagtgcaaggatcatacgtataaagtacaccccgacaagaccaaattcacacaggtgactgattcaccagtgctgctccaagcacaggtcaacagtaaacagctgtccgaccttaactacaaagctaagcatgaatctgagaagttcaagtgtcatatacctccagatacaccggcattcattcagcacaaagtaaacgcctataacttgagtgacaatctatataaacaggactgggaaaaatctaaggccaagaagtttgatattaaggtagatgcaatcccccttcttgctgccaaagccaatacaaaaaacacctccgacgtgatgtataaaaaagattatgagaaaaacaaggggaagatgatcggagtgctgagcatcaacgatgaccctaaaatgctccactctttgaaagtcgccaagaaccaatcggacaggctgtacaaggagaactacgagaaaacgaaagcaaagtctatgaattattgtgagacccccaaataccaactggatacacagctgaagaacttctccgaagctcgctacaaggatttgtacgtaaaagacgttctgggacactacgtcggcagtatggaggatccctatcacacacattgtatgaaggtcgcggctcagaacagtgacaagtcatacaaggcggaatacgaggaggataaaggcaagtgctacttccctcagactattacacaggaatatgaggccattaaaaagctcgaccagtgcaaggaccacacttacaaagttcacccagataaaaccaaatttaccgcagtgactgatagccccgtgctgcttcaggctcaattgaacacgaagcaactgagcgacctgaattataaagcaaaacatgagggtgagaagtttaagtgccacattcccgccgatgccccccagttcattcagcatagagtgaacgcttataatctctcagataatgtgtacaagcaggattgggagaaaagcaaagctaagaagttcgacatcaaagttgatgcaattccactcctggctgcaaaagccaacacaaaaaatacatccgacgtgatgtacaaaaaggattacgagaaatctaagggtaaaatgatcggcgccctctcaattaacgatgaccccaagatgttgcattctctgaaaactgccaagaaccagtcagacagagagtatcggaaagactacgagaagtcaaagaccatttataccgcccccctcgacatgctgcaggtcacacaggctaagaaatcccaggccatcgctagtgatgtggactataaacacattctccacagttactcttatccacccgactcaattaacgtcgatctggcaaaaaaggcctacgctttacaatccgacgtggagtataaggccgactacaactcgtggatgaaagggtgtggatgggtccccttcggttctctggagatggaaaaagcaaagagagcttccgatatcttgaatgagaaaaagtaccgtcagcatccagacaccctcaagttcacatctattgaagacgcccccatcacagtgcagagcaaaatcaaccaggcgcagagatccgacatcgcctataaggccaaaggggaggagatcatccacaaatataacctgccacctgacctgcctcaatttatccaggccaaggtcaatgcctataatatttccgaaaatatgtataaggccgatctcaaagatctctcaaagaaagggtacgacctcaggacggatgctatccccatccgagccgccaaggcagcgaggcaggcagcatctgatgtgcagtataaaaaggactatgagaaggctaagggaaaaatggtgggatttcagtcactgcaggacgatcccaagcttgttcattacatgaacgtggctaagatccagtctgaccgcgagtataagaaggattacgagaagacaaagagcaagtacaatacccctcacgacatgtttaatgtcgtggctgccaagaaggcccaggacgtggtctctaacgtaaattataagcactccctgcaccactacacatacctgccagatgctatggaccttgagctttcaaaaaatatgatgcagatacagtccgacaatgtgtacaaagaggactacaataattggatgaagggaattggatggatcccaattggatcgctggatgtcgagaaggtgaagaaagcgggcgatgctctcaacgaaaagaaatatcgacaacatcccgatacacttaagttcacatcaatcgtggacagccctgtaatggtgcaggctaaacagaacaccaaacaggtgagtgacattttatacaaggccaagggagaagacgtgaagcacaagtatactatgtcccctgacttgccgcaatttcttcaggcaaagtgtaacgcgtacaacatatctgatgtgtgctacaagagggattggtacgacctgattgccaaaggaaacaacgtcttgggagatgccataccaatcacagctgccaaagcctcaaggaatatagcatccgactacaaatacaaggaagcttatgaaaagagtaaaggaaagcacgtgggttttcgctcacttcaggatgaccccaagctggtacattatatgaacgtggccaaattgcagagtgaccgggagtataagaaaaactatgaaaacactaagacatcctaccatacacctggcgacatggtgagcattactgcagctaagatggcccaagatgtggcaactaatgtgaattacaagcagcctctccatcattatacctatcttccagatgcaatgagtttagaacatacccgcaatgttaatcagatccaaagtgacaacgtgtacaaggatgagtacaattccttcctgaagggaattggatggatcccgatcggcagcctggaagtggaaaaagttaagaaagcgggtgatgctctgaatgaacgtaagtaccggcagcatccagataccgtgaaattcacttccgtacctgacagcatgggcatggtcctcgcccagcataatactaagcagctcagcgatctgaattacaaagtggaaggggagaaactcaagcacaaatatacaattgaccccgaactgccccagttcattcaggccaaagtcaatgccctcaacatgtccgacgctcattacaaagcggattggaagaaaactatcgctaaggggtacgatctgaggcctgatgccatccctatagtggccgctaagtccagcaggaatattgcatctgattgtaagtacaaagaggcttacgagaaggctaaaggaaaacaagtaggatttctgtctctacaggacgacccaaaactggtccattacatgaacgttgcgaaaatccagagtgaccgggaatataaaaaggggtacgaggcttctaaaactaaatatcataccccacttgacatggtgagtgtaactgctgctaagaagagccaggaagttgcaacaaatgccaactatcgccagagctatcaccattacacactccttcccgacgccctgaatgttgagcattcaagaaacgccatgcaaattcaatctgacaatctttacaaatccgactttacgaattggatgaaaggaatcggctgggtgcccattgaaagcctggaggtcgagaaagccaaaaaggctggagaaattctgagcgagaagaagtaccgacagcaccctgagaaactgaagtttacatacgccatggataccatggagcaagctttaaacaaatcaaacaagctcaacatggataaacggctttacacggagaagtggaataaggataaaaccactattcatgtgatgcccgacaccccagacatcctgctgtccagggtcaaccagataactatgagtgacaagctttacaaagccggctgggaggaggagaagaagaaaggctacgatttaaggcctgacgccatcgcaataaaagcagcacgcgcctctagagacatcgcctccgactacaagtacaagaaagcctatgagcaggcaaaaggaaagcatatcggctttagatccttggaggacgatccaaaactggtgcacttcatgcaggttgcaaagatgcagtctgacagagaatacaaaaaaggatatgaaaagagcaagactagttttcacacgcccgtcgacatgctgtctgtggtagccgccaaaaagtcccaagaggtggcaacgaacgccaattaccgcaatgttattcatacgtacaatatgctccccgacgccatgagttttgaactcgccaaaaacatgatgcagattcagtcagataaccagtataaagcagactacgcggactttatgaaggggattggatggttaccactcggcagcctggaggcggaaaagaacaaaaaggcaatggagataatctccgagaagaagtatcggcagcaccccgatactctaaaatactcaaccttgatggactctatgaatatggtgctggctcagaacaacgccaaaatcatgaacgagcatctgtacaagcaggcctgggaagctgataaaaccaaagtacacattatgcctgacatccctcagatcatactggccaaagcaaatgccatcaacatgagcgataagctttacaaattatctctcgaagagagcaagaagaagggatatgacttacgccctgacgccatccctatcaaggctgcaaaggcaagcagggacatcgcatctgattacaagtataagtacaattatgaaaaggggaagggtaaaatggtggggtttaggagtctggaagacgatcccaaactggtgcatagcatgcaggtagctaagatgcagagtgaccgcgagtacaagaaaaattatgaaaacaccaagacaagctaccatacccctgccgatatgctcagtgtcaccgctgctaaggacgctcaggcgaatataaccaatacgaattataaacaccttatacacaaatatatcctcttgcctgatgccatgaatattgagctgaccagaaatatgaaccgcatccagtccgacaatgaatacaagcaggactataacgagtggtacaagggtcttggatggtcacctgcgggatccttggaggtggagaaggctaaaaaggccacggagtacgcgagcgatcagaagtacaggcaacacccctcaaatttccagttcaagaaattgacagactcaatggacatggtgctcgcgaagcaaaatgctcacaccatgaacaagcacctctacacgatcgattggaataaagacaaaaccaagatccacgtgatgcctgatacccccgatatcttacaggccaaacagaatcagaccctctatagtcagaaactgtataaactgggctgggaggaagcactcaaaaagggttatgacttacccgtagatgccatttccgtgcaattggccaaggcaagccgcgacatagccagcgactacaagtataaacagggctaccgaaagcagctcggacaccatgtaggttttcgctcactccaggatgatcctaaactcgttctcagcatgaacgttgcaaagatgcaatctgaacgggaatacaagaaggattttgagaaatggaagaccaaattctcaagcccggtcgatatgttgggggtggtcctggcaaagaaatgtcaggaactagtgagtgatgtagattataagaattacctgcatcagtggacgtgcctgcctgaccagaatgatgtggtccaggccaagaaggtgtacgagcttcaaagtgaaaacctgtacaagtccgacttggagtggttgcgaggcatcggttggagccctctgggatccttggaggctgagaaaaataagcgcgcatctgagatcatcagcgagaagaagtaccggcagccaccagacaggaacaaatttacaagtatcccagacgctatggacatagtgcttgccaagacaaacgctaagaataggtcagatcgcctctaccgtgaagcgtgggacaaggataaaacgcaaatccacattatgcccgatactcccgacattgtgcttgccaaggctaaccttatcaacacttctgacaagctctatcggatgggttacgaagagctgaagcggaaaggttatgatctgcctgtagatgcaatcccgattaaagctgcgaaggcgtcccgggagattgcttccgaatacaaatataaggagggtttcagaaaacagctcgggcatcatattggggcaaggaatatcgaggatgatcccaaaatgatgtggtcaatgcacgtcgctaagattcagagcgatagagaatataagaaagacttcgaaaaatggaagaccaagtttagttccccggttgacatgctgggagtggttctggcaaaaaaatgccagacccttgttagcgatgtggactataaaaactatttgcaccagtggacttgcctccccgaccagagtgatgttatccacgcaaggcaggcttacgacttgcagagcgataacctgtataaaagcgacttgcaatggttgaagggcatcggatggatgacctccggatcccttgaagatgaaaagaataagcgggcaacccagatcttgagtgatcatgtctatcgccagcaccctgatcaattcaaattcagttccctcatggacagtatccctatggtattggccaagaacaatgctatcactatgaatcacagattgtacaccgaagcctgggacaaggacaaaactaccgtccatatcatgcccgacacacctgaggtattgttggctaagcagaataaggtcaactattcggagaaattgtataagcttgggttggaagaggcgaagagaaaaggttacgacatgagagttgatgcaatcccgatcaaagccgcaaaagctagccgggacattgcttccgagtttaaatacaaagaaggctaccgaaaacagctcgggcatcacattggcgccagagccattcgggacgaccccaagatgatgtggagcatgcatgtagccaagatccagagtgatcgcgaatataagaaagattttgagaagtggaagacaaagttcagctctcctgttgatatgcttggagtcgtgctggccaagaaatgtcagacgctcgtgtcagacgtggattacaagaactacctgcaccagtggacctgtctgccagatcagtctgatgtcatccatgcgaggcaagcctacgatctgcagtcggacaacatgtacaagagcgacctgcagtggatgcgcgggattggttgggtaagcatcggatctctggacgtcgagaaatgtaagagagctacggagattctgtccgataagatttaccggcagcccccggacaggttcaagttcactagcgtgaccgacagcctggagcaggtgttagccaaaaataatgcaatcacaatgaataagcgactctacaccgaggcatgggacaaggacaaaactcagatccatatcatgcccgataccccagagatcatgctggctagaatgaataaaattaactactcagaatccttatataagctggcgaacgaggaagccaaaaaaaagggctatgaccttaggtcagacgcaattcccattgtcgcggcaaaggcaagccgagacatcataagcgactacaagtataaggatggctattgcaagcaattgggccaccacattggcgcccgtaacattgaggacgaccccaagatgatgtggtccatgcatgttgcaaagattcagagcgatagagagtataaaaaagatttcgagaagtggaagacaaaatttagttcacccgtggacatgttaggagtcgtattggcaaagaaatgtcagaccctggtctctgatgtcgattacaaaaattaccttcacgaatggacttgcctgcctgaccagtcagatgttattcacgcaagacaagcttacgatctgcagtcagacaacatctacaaatctgacctgcaatggctgaggggtataggatgggtgcctatcggtagcatggatgtcgtgaaatgtaaaagggccaccgaaatcctgagtgacaacatctatagacagcctccggataagctcaaattcaccagcgtgaccgacagcctggagcaggttctggctaagaacaatgcattgaatatgaacaaacgtctctatactgaggcatgggacaaagataaaacccaaatacacattatgcctgacacacctgagatcatgctcgcacggcagaacaaaatcaattactcagagacactgtataaactagcgaatgaggaggcaaagaagaagggctacgatctgaggtctgatgccattcccatagtcgccgcaaaggcctctcgcgacgtgatttccgattataagtacaaggacggatacaggaaacagttgggccaccatattggcgcccgcaatatcgaagacgatcctaagatgatgtggtctatgcatgtcgcaaagatacaaagcgatcgggagtataagaaggacttcgagaagtggaagactaagttcagttctcccgtggatatgttgggagtcgtcttggccaaaaaatgccaaacactcgtctcagatgtggactataagaactatctccacgagtggacctgcctgccagatcaaaacgacgtcatacacgcacggcaggcctacgatctacagtctgataacatttacaaatcggatttacagtggcttcggggcatcggctgggtgcccattggaagcatggatgtggtcaaatgcaaacgggccgcggagattttgagcgataacatttacaggcaaccacccgacaagctaaaattcaccagtgtcaccgattcacttgaacaggttcttgctaagaataacgccctcaacatgaataaacgcctgtatactgaggcctgggacaaagataaaacacaagtacacattatgccggatacacccgagattatgcttgcaaggcaaaacaagattaactacagtgagtctctctaccgccaggccatggaggaggctaagaaagagggatatgatctgagatctgatgccatcccaattgttgccgcaaaagctagccgcgacattgcatcggattataagtataaggaagcctaccgcaaacagctgggccaccacattggggccagagccgtgcacgatgatcctaagatcatgtggtccctgcatattgctaaagtgcagtcagacagagaatataagaaggacttcgaaaagtataagacccgttactcctctcctgtcgacatgctggggattgtgttggccaaaaagtgccagacactggttagtgatgtggattataaacaccctctgcacgaatggatttgcctgcccgaccaaaacgacattattcacgctcggaaggcctatgatctccaaagcgacaacctctacaagagtgatctggaatggatgaagggaatcggttgggtgccgattgattctcttgaagtagtaagggccaaaagagcaggtgaactgctgagcgatactatttatcgccagaggcctgagaccttaaagttcacttccatcaccgacaccccagaacaagtgctggccaaaaataacgctctgaacatgaacaaaagattgtacacggaggcctgggataacgacaagaaaaccatccacgtgatgccagatacacccgagattatgctggccaagttaaaccgaataaattactccgataaactgtataaactagctcttgaagaaagcaaaaaagaagggtatgatttacggcttgacgcaattcccattcaggctgcaaaggcctctcgggatattgccagcgactataagtacaaagaagggtacagaaagcaattgggacatcatatcggggcacgcaacattaaagatgatcctaagatgatgtggagtatccacgtagcaaagatacagagcgacagggagtataagaaggagtttgagaagtggaagacaaagttttctagtccagtggacatgctcggtgtcgtactggcaaagaaatgccagatcctcgtgtctgatatcgattacaagcatccgctccacgagtggacgtgcctgcccgatcagaatgatgtgattcaggccagaaaggcgtatgacttacaatctgacgcaatctacaagagcgatttagagtggctgcgagggattggatgggtccctatcggctctgtcgaggtcgagaaggtcaagcgggcaggagagattttatcggaccgcaagtacaggcagcctgcagaccaactcaaattcacttgcatcactgataccccagagattgtgctggctaaaaataatgcgctgaccatgtcaaagcatctatacaccgaagcatgggacgcagataaaacaagtatacatgtgatgcccgataccccggatatcctgttggccaaaagcaattcagccaacatttcccagaaattatacacaaaaggctgggacgaatcaaagatgaaggattatgacctgagggcagacgccatctccattaagagcgctaaagctagcagggacattgcctcagattataagtacaaagaggcctacgagaagcagaaaggccatcacatcggcgcccaatccattgaagatgatccaaagatcatgtgcgctatccacgccggcaagatacagtccgaaagagaatacaaaaaggagtttcagaagtggaagacaaagttttccagccccgtagatatgctgtcaatcctgctggccaaaaaatgtcagaccctggtcactgatattgactatcgcaactatctgcacgaatggacgtgcatgccagaccagaatgacatcatccaggctaagaaagcctacgatctccagtcagactctgtgtacaaggctgacctcgagtggcttcggggaataggctggatgcctgaagggtctgtggaaatgaatcgcgtcaaggtagctcaagacctggttaatgaacgcctgtacagaactcgccctgaggccctctcttttaccagcatcgtggatacgcccgaagtagtcctagccaaggccaattctctccagatcagtgaaaaactgtatcaggaagcgtggaacaaagataagagcaacatcacgatcccgagtgatacgccagaaatgctgcaggcccatatcaacgccctgcagatttcgaacaagttatatcagaaagactggaatgacgctaagcagaaagggtatgacatcagagccgatgccatcgagattaagcatgcgaaggcttcccgagagattgcctcggagtacaagtataaagagggctataggaagcaacttggtcaccacatgggatttagaactctccaggatgatccgaaaagtgtgtgggcaatccatgcagctaaaatacagagcgaccgagagtacaaaaaggcatatgagaaatcaaagggtattcataatacaccactggatatgatgtcaattgtgcaggcgaaaaaatgccaagtcctggttagcgacatcgactatcgcaattacttgcaccaatggacatgtctgccagaccaaaacgacgtgatccaggccaaaaaggcctatgatctccagtctgataatctgtacaagtccgacctggaatggctcaagggaataggatggttgcctgagggctccgtcgaggtgatgcgcgttaagaatgcccagaacctcctgaacgaaagactctaccgcatcaagccagaggcactgaaatttacatccattgtcgacactccagaagtgatccaagccaagatcaatgctgttcaaatctcagaaccactctatagggatgcttgggagaaggaaaaagctaatgtgaacgtacccgccgatacgccgctgatgctgcagagcaagatcaacgcccttcaaatttcaaataagcgatatcagcaagcctgggaggacgtaaagatgaccgggtacgatctgcgggccgacgctatcggcatccagcacgccaaagcatcaagagatatcgcctcagactacctatataagacagcctacgagaaacagaaaggtcattatatcggatgccgctccgcaaaggaagatcccaagctagtctgggcggccaacgtcctaaaaatgcagaacgatagactatacaaaaaggcctacaatgatcacaaggccaaaatttcaattccggtagatatggtgtcaataagtgcagctaaagaaggtcaggccctggccagcgacgtcgactacaggcattacttgcaccactggtcctgcttcccggatcagaacgatgtaatccaggcacgcaaggcctacgatctccagtctgatagcgtgtataaagccgatctggagtggctgagagggatcgggtggatgcctgaagggtctgtggaaatgaacagagtcaaagtcgcacaggatctggttaatgaacggctatatcggacacgacccgaggccctgagcttcacgagtatcgtggacacgcctgaagtcgtgctcgctaaggccaattccctgcagattagcgagaagctctatcaagaagcttggaataaggacaaaagcaatattacaatcccttcagacacaccagagatgctgcaagcccacatcaacgccctccagattagtaataagctctaccagaaggactggaacgataccaaacaaaagggatacgatataagggccgatgctatcgagataaagcacgctaaagctagccgggaaatcgcctcagagtacaagtacaaagaggggtaccggaagcagctcggacaccacatggggttcaggacactccaggacgacccaaagtccgtgtgggccatccacgcggccaagatccaatctgaccgggagtacaaaaaggcttacgagaagtctaagggaatccacaacacacctttggatatgatgagtatcgtacaggcgaagaaatgccaagtactagtctccgacatcgattatcgcaactacctgcaccagtggacctgcctgcccgatcagaatgacgtcattcaggctaagaaggcctacgacctgcagtctgataatctttacaaatccgacctagaatggttgaaaggcattggctggctgcctgagggatcagtggaggtcatgcgtgtcaagaacgcccagaatttgcttaacgagaggttgtatcgcatcaaaccggaggcattaaagtttacttccatcgtggatactccagaggtgattcaggctaagattaatgccgtgcagatcagtgaacctttgtatcggaatgcttgggaaaaggaaaaggcaaatgttaatgtgcctgctgacacaccactgatgctacagagcaaaattaatgccttgcagatcagtaataagaggtaccagcaggcttgggaggacgtgaagatgaccggatacgacctgcgtgcagacgcaattggcatccagcacgcaaaagccagtagagacatcgcaagtgactatttatataagacagcctacgaaaagcagaagggacattacatcgggtgccgcagcgcaaaggaagaccccaaattggtatgggccgccaatgtactgaagatgcagaatgatcggttatataagaaagcatataatgaccataaagcaaagattagcatacccgtcgatatggtgagcatctccgccgctaaggagggtcaggctttggcttctgacgtagattatcgccattacctacaccattggtcctgctttccagatcagaacgacgtgatccaggcccgaaaagcatatgatcttcagtcggattctgtatacaaagccgatttggagtggttgagaggcataggctggatgcccgagggctcggtggaaatgaatcgcgtaaaggtggcgcaagacttggtcaacgagcgcctgtacaggacacgcccggaagcactgtctttcacaagcattgtagacacacccgaggtggtgctggccaaagctaatagtttgcagatttctgagaagttgtaccaggaagcatggaacaaagacaagagcaatatcacaattccctccgatacgccagagatgctgcaggcacacatcaacgccctgcaaatctcgaataagctgtaccagaaagattggaacgacaccaaacagaaaggctacgacattagggcagacgctatcgaaattaaacacgcaaaggcctcacgggaaatcgctagcgagtataagtacaaagaagggtaccgcaaacagctgggccaccatatgggattccgcaccctgcaggatgatcccaagagcgtctgggcaatccatgctgctaaaattcagtccgatcgggagtataaaaaagcttacgaaaaatccaaaggcatacacaatactcccctcgacatgatgagcatcgtacaagccaagaagtgtcaagtgttagttagcgatatagattatcgcaactatctccaccagtggacctgcctgcccgatcagaacgacgtgatccaagccaaaaaagcctatgatttacaaagcgataacctatataagtccgatcttgaatggctgaagggcatcggctggctccctgagggcagcgtcgaggtgatgagggttaaaaacgctcaaaacctgctcaatgagcggctgtacaggattaagcctgaggctttaaaattcacttcaattgtggacacacctgaagtaatacaagctaagatcaacgccgtgcagatcagtgagccgctgtatcgcgatgcctgggaaaaggaaaaggccaacgtgaacgtccccgcagatacgcccctcatgctgcagagtaagattaatgcactgcagatctctaataagagataccagcaggcatgggaagatgtgaaaatgaccggatacgatctgcgggccgacgctattggcatccagcacgcaaaggcctctcgcgacatcgccagcgactacttatataagactgcctacgaaaaacagaaggggcattatatagggtgccgttcggctaaggaggatccgaagctcgtatgggccgcaaatgtgcttaagatgcagaacgatagactctataagaaggcctataacgatcacaaagccaaaatctctatccccgtggacatggtgtccatctccgctgctaaagagggacaggccctggcatctgacgtggattatagacactacctacataggtggagctgtttccctgaccagaacgatgtgatccaagcacggaaggcttacgacttacagtcagacgcactgtataaagccgatcttgagtggttgcgcggaatcggttggatgccgcagggctcccctgaggtccttcgagtgaagaacgcacagaacattttctgtgacagtgtataccgcactcccgtagtgaatctgaagtacaccagcatcgttgacacgccggaggtagtgctggctaaaagtaatgcagagaacatcagcatccctaagtaccgtgaggtatgggacaaggacaagacctcgattcatatcatgcccgatacgccggaaatcaacctcgctcgcgctaacgctctcaacgtcagcaataagctgtaccgggaagggtgggacgagatgaaagcaggatgtgatgtccgcttggatgccatacccatccaggcagctaaagcttcccgtgagatcgcctctgactacaaatataaattggatcacgagaagcagaagggccactacgtgggtaccctgacggccagggacgacaacaagatccgctgggcccttattgccgacaagcttcagaacgagcgtgagtaccggctcgattgggcaaaatggaaagcaaaaattcaaagccctgtcgacatgctgagcatcctgcactctaaaaatagtcaagcactggtcagcgatatggattatcggaattatctgcatcagtggacatgcatgcctgatcaaaatgacgtgatacaggccaagaaggcctacgaactgcaatccgataacgtctacaaggctgacctcgagtggctccgcggaatcgggtggatgcctaatgatagcgtgtccgtgaaccacgctaaacacgccgcagatattttcagtgaaaaaaagtataggacaaagattgagaccctaaactttacacccgtcgatgaccgggtagactacgtgactgccaagcagtccggagaaatcctggatgacataaaatatcggaaagactggaacgcaactaagtctaaatacactctgaccgagacccccctcctccacactgcccaggaggcggcccgaatcctggaccagtatctctataaggaaggctgggaaagacagaaagcgacggggtacatcctgccacctgacgctgtccctttcgtgcacgcccaccactgcaatgacgtccaatctgaattgaaatataaagccgagcacgtgaagcaaaagggccattacgtgggcgtccccacaatgcgggatgatccaaagctcgtatggttcgaacacgcaggccagatacagaatgaacgtctatataaggaagactaccacaagaccaaagcgaaaattaacattccggctgatatggtgtccgtgcttgccgctaaacaggggcaaactctggtttccgacattgattaccgaaactacttgcatcagtggatgtgccacccagatcaaaatgatgtgatccaggcgcggaaggcctatgatctgcagtctgataatgtgtacagagccgatctggagtggctgagggggatcggctggattcccctggattcagtagatcacgtgagagtgacaaaaaaccaagaaatgatgtcacagattaaatacaagaaaaacgctttggaaaattaccccaactttcgctcggtggtggacccgcctgagatagttctggctaagatcaattccgttaaccagagcgatgtcaagtataaggagacatttaacaaggctaagggaaaatataccttctctccagacacaccacacatttctcactcaaaggacatgggcaaactgtatagcactattttgtacaaaggagcctgggaaggcacgaaggcctatggatacaccctggatgaaaggtatatccctatcgtgggggccaaacacgcagatctcgtaaactctgaattaaagtataaagaaacctatgagaaacagaaggggcattacctcgcagggaaagtcatcggcgagtttccgggcgtggttcattgcctggacttccagaaaatgcgaagcgcattgaactaccgcaagcattatgaggacacaaaggctaacgttcatatccccaacgacatgatgaaccatgtcctagcaaaaagatgtcagtacattctaagcgatctggagtataggcactatttccatcagtggaccagcctcctggaagagccgaatgtgattcgagtccggaacgcgcaggaaattctctcagataatgtctataaggacgatctcaactggctaaagggtataggctgctatgtgtgggacaccccgcagatccttcacgctaagaaatcttacgatcttcagtctcagttgcagtacacagctgccggcaaagagaatctgcagaattataatctcgtgacagacactccgctttatgttaccgcagtgcaatccggcattaatgctagcgaggtcaagtacaaggaaaactatcaccagatcaaagataagtacactaccgtgctggaaaccgtcgactacgacaggactcgcaaccttaagaacttgtatagttcaaacctttataaggaggcatgggatcgagtgaaggctactagttatatacttccgtcaagcacgctcagcttaactcacgcaaagaatcagaagcatctggccagccatatcaagtaccgagaagaatatgagaagttcaaggccctgtacacgctacccagatcagtggatgacgatcccaacaccgctagatgtctcagggttgggaagctgaatattgatcggctatataggagcgtatacgaaaagaacaagatgaaaatccacatcgtccccgatatggtcgagatggttacggcaaaagacagccagaaaaaggtatcggagatagactacagactgcggctgcacgagtggatttgtcaccccgacttacaggtcaatgatcatgtgaggaaagtcaccgaccagattagcgatatcgtttataaggatgacttgaactggctcaaaggaatcggttgttatgtgtgggacacaccagagatccttcatgccaagcacgcatacgatctgcgtgacgatattaaatacaaggcacacatgctgaagactcgcaatgactacaaattggtgactgatactccagtctacgttcaggccgtgaagtccggaaaacagctctctgatgccgtgtatcactacgactacgtacactctgtgaggggcaaagtcgcccccaccactaagaccgtcgatctagacagggccctgcacgcgtacaagctgcaatctagcaacctatataaaaccagtctgcgcactcttcccacaggataccgcctccctggagacacgccacattttaaacatattaaggataccaggtatatgtccagttatttcaaatacaaggaggcttacgaacacacaaaggcctatgggtacaccctgggacccaaagacgtaccttttgtgcatgtacgccgtgtcaataatgtgacctccgaaagactgtatcgggagctgtatcacaaactgaaggacaagattcacacaaccccagatactcctgagatccggcaggttaaaaagactcaagaggctgtctccgaattgatttataaatctgattttttcaaaatgcagggccatatgatttctctgccctacacaccacaggtgatccactgtcgatatgtgggagacatcaccagtgatattaaatacaaagaggatttgcaggtcttgaaaggattcgggtgtttcctttacgatacccctgatatggtccgtagccggcacctgcggaaactatggagtaactacctctatacagataaggccagaaagatgcgcgataagtacaaggtggtcttagacacaccagaatacaggaaagtccaagagctgaagacgcatctgtctgagctggtttatcgagctgcgggcaagaagcagaagagcattttcactagcgtgccggataccccagatctgctgcgagcaaagcggggccaaaaactgcaatctcagtacctttacgtggaactcgccacaaaggaacgacctcaccaccatgccggtaaccaaaccactgcactgaagcatgcaaaagatgtgaaggatatggtaagcgagaagaaatacaaaatccaatacgagaaaatgaaagacaagtatacccctgtgccagacacacccattctaattcgcgctaaaagggcctattggaacgccagcgatttacgatataaggaaacatttcagaagaccaaaggcaaataccataccgtgaaggacgccctggatattgtgtaccaccggaaggtgaccgacgatattagcaagatcaaatacaaggagaattacatgagtcaactgggcatctggcgttcaattccagacagaccggaacacttccaccaccgggctgttaccgataccgttagcgatgtcaagtataaagaagatctgacctggctgaaagggatcggttgttacgcttatgacacacccgatttcacccttgctgaaaagaacaaaaccctatacagtaagtacaagtacaaggaggtttttgaacgaacaaaatccgattttaaatatgtagccgactctcccattaatcggcactttaagtatgccacacaactgatgaatgagagaaaatacaaaagctcagctaagatgttccttcagcacggttgtaatgaaattctgaggccagatatgctcaccgccttgtataatagccacatgtggagtcaaattaagtacaggaagaattacgagaaatcaaaagacaagtttactagtatagttgatacacctgagcacttacggactacgaaggtcaataagcagatcagcgacattctatataaactggaatacaataaggccaaacctcgcggctacaccaccatccacgatactcccatgttgctgcatgtgaggaaagtcaaggacgaggtgagcgatttgaaatacaaagaggtgtaccagagaaacaagagcaattgcaccatcgaaccagacgcagtgcacattaaggcagcaaaagacgcatacaaggtcaacactaacctggattataagaaacagtacgaagctaataaagcccactggaagtggactcctgaccgaccggatttccttcaggcggccaaaagttctctccaacagagcgacttcgagtacaaattggacagggaatttctcaaaggctgcaaactgtctgtgactgacgacaagaacactgttctggcactccggaatacactgatcgagtctgatttaaagtacaaagagaagcacgttaaggagagaggcacttgtcatgccgtccctgacactcctcagatccttttggccaaaaccgtttccaacttggtatctgagaataagtacaaggaccacgtcaaaaaacacctcgcccagggttcctacacaacattgcccgagacaagggacactgtccacgtcaaagaagtaacaaagcacgtctccgacactaactataaaaagaagttcgtaaaggaaaaggggaagtccaactattctataatgctagagcctcctgaagtgaagcacgctatggaagtggcaaagaaacagtctgatgtggcttaccgcaaagacgcaaaggagaaccttcattacacgacggtcgccgatcgcccagatattaagaaggccacacaggctgccaaacaggcctccgaggtcgagtacagggcaaagcatagaaaggagggctcccatggcctcagcatgctcggtcgacccgacatagaaatggctaagaaggcggcaaagctgtcgagtcaagtaaaatatcgcgaaaatttcgataaagaaaagggaaaaaccccaaagtataacccaaaagacagccagctctataaagttatgaaagacgctaataacttggcctccgaagtgaaatataaggctgacttaaaaaagctgcataagccagtgaccgacatgaaggagtcactcatcatgaatcacgttctgaacacaagccagttagccagttcatatcagtacaaaaagaaatacgagaaatctaaaggacattatcatactattcccgacaatctagagcagttgcatctgaaggaggcaaccgaactgcagtccattgtaaagtacaaagagaagtacgaaaaggagcgcgggaagcctatgctggactttgagacacccacatacattacggcgaaggagagccaacagatgcagtccggcaaggagtaccggaaggactacgaggagtccatcaaagggaggaaccttacgggcctggaagtaacacctgcactgctgcacgtgaaatatgctaccaaaatcgccagcgaaaaggagtaccgcaaagatttagaggagagtatcagaggtaaaggcttgacagaaatggaagacactccagacatgctgagagccaagaatgctacccagatcttgaacgaaaaggagtataaacgcgatctggagttggaagtaaagggaagggggctgaatgccatggccaatgaaaccccagactttatgagggcgagaaatgccactgatatcgcgagccagattaagtacaaacagtctgccgaaatggagaaagcaaactttacgtctgtggtagacacccccgagatcattcatgcccagcaagttaagaacctgtcttctcagaaaaagtacaaggaggatgctgagaagtctatgtcatactacgagacagtcctggataccccggaaatccagagagtgcgggaaaatcagaaaaacttttccttgttacaatatcagtgcgatttgaagaactccaaaggtaagattacagtcgtccaagacacgccggagatcctgcgggtaaaagagaatcagaaaaatttctcaagcgtgctgtacaaagaggatgtgagccctggaaccgcaatcgggaagactccagagatgatgcgggttaagcagacccaggatcatatttctagcgtgaagtacaaggaggcaatcggtcagggaactccaatccccgatttaccagaagtgaagagggtgaaggagacccagaaacatatcagctccgtgatgtataaggaaaatctgggtactgggatcccaacaacggtcactccagagatcgaacgggtgaaacggaatcaggaaaacttcagttcagtactctacaaagaaaatctagggaagggcataccaactcccatcactcccgagatggaaagggtaaaacggaaccaggagaatttctcaagtattttatacaaagaaaatctttcaaaaggaacaccactgccagtcactcccgagatggaacgcgtcaagctaaaccaggaaaacttctccagtgtgttgtacaaagaaaacgtggggaaaggaatccctatccccatcacaccagaaatggagcgggtgaaacacaatcaagaaaacttttcctcagttctgtataaggagaatctggggacggggataccaatcccgatcacacccgagatgcagcgggtcaaacacaatcaggagaacctatcttctgtgctctataaggagaatatgggaaagggaacccctctgccggtgacgccagagatggaacgcgttaaacacaatcaggaaaacatctcaagcgtgctttataaggagaatatgggaaaaggcacacccctgcccgtgacacccgagatggaacgcgtaaagcataatcaagagaatatctccagcgtgctgtacaaggagaatatgggcaaaggcaccccattagcagtgacacctgaaatggagcgcgtgaaacacaatcaggagaatatctcttctgtgctgtacaaagagaacgtgggaaaggccacagccacccccgtgacccctgagatgcagcgagttaagcgcaaccaggagaacattagttccgtcctgtataaggaaaacctagggaaagccactcccacaccgtttacaccggagatggagcgggtaaaacgtaatcaggagaacttcagttcagtcctgtataaagaaaacatgcgcaaagccacacctacaccggtgactcccgaaatggagcgcgctaagcgaaaccaggaaaacatctcgtccgttctctacagcgattctttcagaaagcagatacaaggtaaggctgcttatgttttggatacacctgagatgaggcgggtgcgggaaacccagcggcacatatcaaccgtgaagtaccacgaggatttcgagaagcataagggctgctttaccccagtcgtaactgatcctatcaccgagcgggtgaaaaagaacatgcaggacttcagcgatatcaattaccgcggcattcagcgaaaagtggtagagatggagcagaagcggaacgatcaggatcaggagaccattactgggctacgtgtgtggaggacgaatcctggctccgtcttcgactacgaccctgcggaggataatattcagtcacggagcctgcacatgattaacgtgcaggcccagcggcgaagtagagaacaaagcaggagcgcttccgctctgagcatcagtggaggggaggagaagagcgaacacagcgaggcacctgatcatcatctgagcacctactctgatggcggagtgtttgccgtgtccactgcgtacaaacacgcaaaaacaaccgagctgcctcagcaacgctccagctcagttgctacccagcagacaacggtatcatcaatacctagtcacccatctacagcaggaaagatttttagagctatgtacgactacatggcggccgacgctgacgaagtgtcctttaaagatggcgatgctatcatcaacgttcaggcgatcgacgagggttggatgtacgggaccgttcagcgaacaggaagaacagggatgctacctgccaattacgttgaagcgatctag

SEQ ID NO: 125928 - DNA, 20010 bp, synthetic construct
  misc_feature 1..20010: note = Description of Artificial Sequence: Synthetic coding sequence
  source 1..20010: mol_type = other DNA
atggccgacgatgaagactacgaggaggtggttgagtactataccgaggaggtggtttatgaagaagtgcccggcgagaccataacgaagatatatgaaaccacgaccactcgaaccagcgactacgaacagtcagaaactagtaagcctgccctagcacagccagctctggcacagcccgcgtccgccaagcctgtagagagacgcaaagtcattcgtaagaaagtcgatccgagtaaattcatgacaccgtacattgcccattcacaaaaaatgcaagatctgttttcaccaaacaaatacaaggaaaaatttgaaaagactaaaggccagccttacgcttccaccacagatacaccagaattgagacgtattaaaaaggtgcaggatcagctgtccgaagttaaatatcgcatggacggagatgtggccaagactatttgtcatgtcgatgaaaaagccaaagacattgaacatgccaagaaagtttcccaacaggtaagtaaggtgctttataaacagaactgggaagatacaaaagacaagtacctgctcccccctgatgcacccgagctggtccaggccgtgaaaaataccgcaatgttcagtaagaagctttatacagaagactgggaggccgacaaatcccttttttatccatataacgatagtccggagctacggagagtggcacaagcccagaaggcgctgagtgatgtcgcgtataaaaaaggcttagcggaacaacaagctcagttcacacctctcgctgaccctccagacatagaatttgccaagaaggttacaaaccaggtttctaagcagaaatacaaagaggactatgagaataagatcaagggcaagtggtctgagactccctgctttgaagtagctaatgccaggatgaatgcagacaacattagcactagaaagtaccaggaagacttcgagaatatgaaagaccagatttacttcatgcagactgaaacaccagaatacaagatgaataagaaggccggcgttgccgccagcaaggtgaagtacaaggaggattatgaaaaaaataaaggaaaggccgactacaacgtgttacccgcaagcgagaatccacagctacgccagctcaaagctgcaggcgatgcactctccgataaactttataaagaaaactacgagaaaaccaaggccaagtctataaactactgcgaaacaccaaaattcaagcttgacacagtgttgcagaatttcagcagtgacaaaaaatataaagatagttacctaaaagatattctgggccattatgtggggtctttcgaagacccctatcacagccattgcatgaaggtcactgcccaaaattctgataagaattataaagcagaatatgaagaggacaggggcaagggcttttttccacagacaattacccaagagtacgaagcgatcaaaaaactggatcagtgtaaggatcacacctataaagtgcatccagataagaccaaatttacccaggtgactgacagccccgtgttgctgcaggcccaagtgaactccaaacaactctctgatctgaattacaaggccaaacacgaatccgaaaagttcaagtgccacatcccaccagacacacccgcattcattcagcacaaggtcaacgcctacaatttgagcgacaatttgtataaacaggactgggagaagagcaaggccaaaaaatttgatatcaaagtcgacgcaatcccacttttggccgccaaggccaacacaaagaacacaagtgatgtcatgtacaagaaagattacgaaaaaaacaagggaaaaatgataggagtgttgtccatcaacgatgatccaaagatgctccattcactcaaagtcgctaaaaatcagagcgacagactgtacaaagagaactacgagaaaactaaggccaaatccatgaactactgtgaaaccccaaagtatcagctggatacacagctgaaaaacttctccgaggctcgatacaaagatctctatgtgaaggatgtgttaggtcattacgtgggctctatggaagatccgtaccacacccattgcatgaaggtggctgcccaaaacagcgacaagtcgtacaaagctgagtacgaggaggacaagggcaagtgttattttccccagacaatcactcaggagtatgaggcaatcaagaagttggaccagtgcaaggaccacacatacaaggttcaccctgacaagaccaaatttactgctgttaccgatagccctgtcctgctccaggcccagctgaataccaagcaattgagcgacctcaactacaaggcgaagcatgaaggcgaaaagtttaagtgtcatatccccgccgatgctccccaattcatccagcatagagttaacgcttataatctcagcgataatgtatacaaacaagactgggagaagagcaaagcaaagaaattcgacataaaggtggatgctatcccattgctggccgctaaagcaaacaccaagaatacaagtgatgtcatgtataaaaaagattacgaaaaaagcaagggcaagatgataggcgccctctctatcaacgacgatcccaagatgctccactctctcaagaccgcaaagaaccagtctgatcgagagtaccgcaaagactacgaaaaaagcaaaaccatttacactgctcccttggatatgctacaggtgacccaagccaaaaagtcacaggccattgcttccgacgtggactacaaacacatcctgcattcttactcctaccctcccgattccattaatgtcgatctggcgaagaaggcttatgctttgcagtctgatgtggaatataaagccgactacaatagttggatgaagggctgtgggtgggtgccttttggttcgctcgagatggagaaagcgaagcgcgcttcggatatcttaaatgagaaaaaatatagacagcaccccgacaccctcaaatttacatccattgaagacgcaccaataactgtgcagagcaagatcaaccaggcccaaagaagcgacatcgcatacaaagcaaagggcgaggagatcatccacaagtacaatttgccgccggatctgcctcaattcatccaagccaaggtgaacgcctacaacatctcggagaacatgtacaaggccgatcttaaagacctctctaagaaagggtatgatctgcggactgacgctatccccattcgagccgcgaaggctgccagacaagccgcgagcgatgtccagtacaagaaggattacgagaaagccaaaggaaaaatggtgggcttccagagccttcaggacgacccaaaactcgtacattacatgaacgttgctaagatccagagtgatagggaatacaagaaagactatgaaaagactaagagcaagtacaacaccccacacgatatgttcaatgttgtggccgctaagaaggcacaggacgtggtgagtaacgttaactacaaacattcccttcatcattacacgtatctgccagatgccatggacctggaactgagtaagaatatgatgcagatacagtcagacaacgtatataaggaggactacaacaattggatgaagggtatcggctggatccctatagggtcactggatgtggaaaaggtgaagaaggcaggagatgcactgaatgagaaaaagtacaggcagcatccagatacattgaagttcacatccatagtggattcacccgttatggtgcaggcgaaacaaaataccaagcaggtttccgacattctgtacaaggcaaagggagaggatgtcaaacacaagtacacgatgtcgccggatctgccacagttcctccaggcaaagtgcaatgcatacaatatctcagacgtttgctacaagagagattggtacgacctcattgccaaagggaacaacgtcctgggtgatgccattcccatcacagccgccaaggccagtcgcaacatcgcttctgactataagtacaaggaagcatatgagaaatcaaaaggaaagcacgtcggatttcgatctctgcaggacgatccaaagctggtgcattatatgaatgtggctaaactacagtcagatagagagtacaaaaaaaattacgagaatacaaagaccagttatcacacccccggggacatggtgtcgatcacagccgctaaaatggcacaagatgtggccactaatgtgaattacaagcagccattacaccactatacttacctgcctgacgccatgagtctggagcacaccagaaacgtcaatcagattcagtcagataatgtttataaggacgagtacaattccttcctgaagggcataggctggatccctataggctccctggaggtcgaaaaggtgaagaaggctggcgacgccctaaacgaaagaaagtacagacagcacccggacaccgtaaaattcacctccgtaccagatagcatgggcatggtgctggcccagcacaatactaagcagttaagtgacctgaactataaagtggaaggagagaagctgaagcacaagtacaccatcgatcctgaactgccacagttcattcaggccaaagtgaacgctctcaatatgtccgatgctcactataaggccgattggaaaaaaaccatcgccaagggctacgatctcagacctgacgctattccgatcgtggccgccaaaagctctcggaacatcgcatccgattgcaaatacaaggaggcatatgagaaggctaagggcaagcaggtgggctttttatcgttgcaggatgacccaaaactggtgcattatatgaacgtcgccaaaattcagagtgacagagagtataagaagggctacgaggcgagtaagaccaagtaccatacaccattggacatggtgtccgtcacggcggctaagaagtcgcaagaggtggccaccaacgctaactacaggcagagctaccatcactatactcttctgcccgacgctctcaacgtcgagcactcaaggaatgcaatgcaaatccagtcagacaatctctataaatctgactttaccaattggatgaaaggaatcggatgggtacccatcgagagcctggaggttgagaaggccaagaaagcaggcgagatcctcagtgaaaaaaagtaccgccagcatcccgaaaagcttaagttcacttacgccatggatacaatggaacaggcacttaacaagtccaataaactcaacatggacaagcggctgtacactgagaaatggaacaaagacaagacaactatacacgtcatgccagacacacctgatatcctccttagccgggtgaaccagattactatgagcgataagctgtataaagccgggtgggaggaagagaagaaaaaggggtatgaccttcgtcccgatgcaattgccatcaaggccgcccgcgcttccagagacattgcatctgactacaaatataaaaaggcatatgagcaagcgaagggcaagcatatcgggttcagatctctagaggacgaccccaaactagtacattttatgcaggttgctaaaatgcagagcgatcgggaatataaaaaaggttacgaaaaatccaaaaccagttttcacacgcccgttgacatgctctctgtcgtcgcagctaaaaaatcacaggaggtcgccaccaatgctaactacaggaatgttatccacacgtacaacatgctgcctgatgcaatgtcatttgagttagccaagaacatgatgcagatccagtctgacaaccagtacaaggcagattacgcagacttcatgaaggggataggctggctgcccctagggagcttggaagccgaaaagaacaaaaaggctatggaaattatttccgaaaagaagtaccgccagcatcctgatacactgaaatattccacactgatggacagcatgaatatggtgctggcacaaaacaacgccaaaattatgaacgagcacctctacaagcaggcctgggaggctgataaaactaaagtccacatcatgccggacatcccccagatcatcctcgcgaaggcgaatgccattaacatgagcgacaaactgtataagctgtctctggaggagagcaaaaagaagggatatgacttgcgcccagatgcgattcctatcaaagcggccaaagcctcacgcgacatcgctagcgattataagtacaagtacaattatgaaaagggaaagggcaaaatggttggcttccgatctctggaagatgatccaaagttggtgcattccatgcaggtcgccaagatgcagtctgatagagaatataagaagaattatgagaataccaagacctcctatcatacccctgcggacatgctttctgtgacagcagccaaagatgcccaggccaacatcaccaatactaactataaacatctaattcataaatacatcctcttgcctgacgcaatgaatattgagctgactcgcaacatgaatcgcatacagagtgacaacgaatataaacaagactataacgagtggtataagggcctgggatggagtccagccggcagtctcgaggttgagaaggccaagaaagcgaccgaatatgctagtgatcagaaatatcgtcagcacccatcaaattttcaatttaaaaagctgaccgattctatggacatggtactcgccaagcagaatgcacacaccatgaacaaacacctgtacacgattgactggaacaaggataaaacaaaaattcacgtgatgccggatacccctgatatccttcaggctaaacagaaccagaccctctatagccaaaagctgtataagctgggctgggaagaggcgttgaagaagggttacgatttacccgtggatgcaatcagcgttcagctggctaaggcgagccgggacattgcttctgactacaaatataagcagggataccgaaaacagctggggcaccacgtaggttttagatctcttcaggacgacccaaaacttgtgctgagcatgaatgtagcaaagatgcagagtgaacgggagtataaaaaggatttcgagaagtggaaaaccaagtttagcagtccggttgacatgctcggcgtggtgctggcaaaaaagtgccaagaactggtgtcggatgtggactacaagaattatttgcaccagtggacctgcctgcctgatcagaatgatgtagtgcaggctaagaaagtctatgagcttcagtccgaaaacctgtacaagtcagacctggaatggttacgcgggatcggatggagtcccctgggcagcttggaagccgaaaagaataagcgcgcatctgagattataagcgagaagaaatataggcaacccccagataggaacaagtttacatccatcccagatgcaatggatatcgtgttggctaagactaatgccaagaatcgctccgaccggctgtatcgggaggcgtgggataaggacaaaacccagatccatataatgccagacacaccagacattgtgttggccaaggctaatctcatcaacacgagcgacaagttataccgaatggggtacgaggagcttaagcgaaagggatacgatctaccagtggatgccatccccatcaaagctgccaaggctagccgcgaaatcgccagcgagtacaaatataaggagggcttcaggaaacagcttggacaccatattggtgcccggaatatagaggacgacccaaagatgatgtggtccatgcatgtagcgaagatccagtctgacagggagtacaagaaagatttcgaaaaatggaagactaaattctcatctcccgtcgacatgcttggcgtcgtgctggcaaagaagtgccagactttggttagtgatgtggactataaaaactacctgcatcaatggacctgcttaccggatcaaagtgacgtgattcatgcccgacaagcgtacgatctgcaaagcgacaacctgtataagtcagatctgcagtggctcaaaggaattgggtggatgacctccggctcattggaggacgaaaagaataagcgtgccacgcagattctcagcgaccacgtgtatagacaacacccagatcagttcaagttttcatctttaatggacagtataccaatggtcctcgcaaagaataacgccatcaccatgaaccatcggctgtacaccgaggcctgggacaaagataagactacagtgcacattatgcccgatacacctgaggtcttgttggccaaacagaacaaagtgaactatagtgagaagctttacaagctcggcctagaggaagctaagcgaaaggggtatgacatgcgagtggacgccatcccgatcaaagcagccaaggcctctagggacatcgccagcgaatttaagtataaggagggctatagaaaacagctcgggcaccatattggcgcacgcgccattagggacgacccgaaaatgatgtggagtatgcacgtggccaaaatccaatctgatagggaatacaagaaggacttcgagaagtggaagaccaagttctcgagccctgtggatatgctcggtgtcgtgctagctaagaagtgccagaccctggtttctgacgtggattataagaactatctacatcagtggacgtgcttacccgatcaatctgatgtcattcacgcacgccaggcatacgatttgcagagtgacaatatgtacaagtcagacctccagtggatgcgtggcatcggatgggtgagtataggcagtcttgatgtggaaaagtgtaaacgggctaccgagatcctgtccgacaaaatttatagacagccacctgaccgtttcaagttcacttctgtgacagatagtttggaacaggtcctggctaaaaataatgcactgaatatgaacaagcgcctctataccgaagcttgggacaaggataaaacgcagatacacatcatgccggacactcccgaaattatgctcgcccgtcaaaacaagatcaactacagtgaaaccctgtacaagctagctaacgaggaagctaagaaaaagggatacgatctaagatcagatgccattcccatcgtggcggccaaggcttcccgcgatgtgattagcgactataagtataaagacggctaccgaaagcaactcggccaccatatcggagcgcgaaacatcgaagatgatcctaaaatgatgtggagtatgcacgtagccaaaatccaatccgatcgggagtacaaaaaggacttcgagaagtggaagactaagttctcctctcctgtggatatgctaggcgtcgtcctcgcaaagaaatgtcaaacattagtttctgacgtggactacaagaattatctgcacgagtggacttgtttgcctgaccagaatgatgtcatccacgcacgtcaagcttacgacctccaatcggataacatctataaaagcgacttgcagtggttaaggggaatagggtgggttcctatcggcagcatggatgtggtgaaatgcaagcgcgccgccgaaatcttgtcagataatatttatcgccagcccccagacaaacttaagttcacaagtgtcacagactcccttgagcaagtgctcgctaagaataacgccctgaacatgaataagaggctgtacacggaggcatgggataaagacaagactcaggtccacattatgcctgatactccagaaataatgttggcgaggcagaacaagattaattactctgagtcgctgtaccggcaggccatggaagaggccaagaaagaagggtacgacctgaggagcgatgctataccaatcgtggcagccaaggctagccgcgacatcgccagcgactacaagtataaggaagcataccgcaagcagctggggcatcacatcggggccagggcggttcacgatgaccctaagattatgtggtcgcttcatatagctaaagttcaaagcgatagggagtataaaaaggacttcgagaagtataaaacacgctatagctccccggtggacatgcttgggattgtgctggcgaaaaaatgccaaaccctcgtctccgatgtggactacaaacatccccttcatgaatggatttgcctccctgaccaaaacgatataattcacgcccggaaggcctatgatcttcagtcagacaacctgtacaagtctgacttggaatggatgaagggcataggttgggtacctatcgactctttggaggttgtcagagccaaacgggccggtgagctactgtcagataccatctatcgccagagacccgaaactcttaaattcacctcaattacggacacccccgagcaggtgctggcaaagaataatgctctgaatatgaataagcggctgtataccgaagcctgggacaacgataagaaaaccattcacgtcatgcccgacactcctgagatcatgctcgcaaagctgaatagaattaattactccgacaagttgtataaactggcacttgaggagtccaaaaaggaaggctatgacttgagactggatgcaattccgattcaggcagctaaagcctcccgggacattgcatcggactataagtacaaagagggttatcggaaacagctcgggcatcatattggagctcgaaacatcaaggatgatcccaaaatgatgtggtccatccacgttgccaagatccaaagtgaccgcgaatacaagaaagaattcgagaagtggaagactaaattcagctcccccgtggatatgttgggagtcgtcctggccaagaaatgccagatcttagttagcgacatagactataagcaccccctgcacgaatggacttgtctgcccgaccaaaacgacgtcatccaggccagaaaggcttatgacctgcaatcagatgccatctataaatccgatctggaatggctcagaggtatcggctgggtgccaattggtagcgtagaagttgagaaggtaaaaagagcaggcgaaattctgtcggataggaagtataggcaacccgcggatcaactcaaattcacgtgcataacagatacacctgagatcgtccttgccaaaaataacgcactgactatgtctaagcacctctacaccgaggcgtgggacgcggacaagacatcaatccacgtaatgccagacacaccagacatcttgctcgcaaagagcaattctgcaaacataagccagaagctgtacacgaagggatgggatgaaagcaagatgaaggactatgacctgcgtgccgatgctattagcatcaaatcagcaaaagccagccgtgatattgccagtgactataagtataaagaggcctacgaaaaacaaaaaggacatcacataggcgctcagtccatcgaagacgatcccaagatcatgtgcgctattcacgctggcaaaattcagagcgaaagagaatataagaaagagtttcagaagtggaagacaaaattctcctcacctgtggacatgctgagtatcctcctagccaagaaatgtcagaccctggtgacggatatagactacagaaactatctccatgagtggacctgcatgccagatcagaacgatatcatccaggcaaagaaagcttatgatcttcagtccgacgctttgtacaaagcggatctggagtggttacgcgggatcgggtggatgccacaagggtctcccgaggtcctgcgcgtcaagaatgcgcaaaacattttttgcgacagtgtatatagaacaccagttgtaaatctgaagtacaccagtatcgttgacacgcctgaggtggtgctggctaagtccaatgccgagaatatctctatcccaaagtaccgcgaagtgtgggacaaggacaaaacctctattcacattatgccagatacaccagaaatcaatctggcgagggccaatgcactcaatgtctccaacaaactttatagggaaggctgggatgaaatgaaggcagggtgcgatgtccgcctggacgccatccccattcaggctgctaaagcctcgcgagagattgcctcggattacaagtacaaacttgaccacgagaagcagaagggccattacgttggtaccctgaccgcccgagacgacaacaagattcggtgggctctgatcgccgacaagctgcaaaatgaacgggagtaccgactggactgggccaagtggaaggccaagatccagtcgcctgtggacatgctctctattctccattcaaagaatagccaggctcttgtgagtgacatggactaccgtaactatctgcaccagtggacatgtatgcccgaccagaacgacgttatccaagctaaaaaagcctacgagcttcagtctgacaatgtgtacaaggctgatctggagtggttgagaggcatcggatggatgccgaacgattccgtcagcgtcaatcatgccaagcacgccgctgatatctttagcgaaaaaaagtataggacaaagatagagacccttaatttcacccccgtcgacgacagagtcgactatgtgaccgctaaacaatctggggaaatcctcgacgatatcaagtatcgcaaagactggaacgcgacgaagtcaaagtatacactgactgaaactccacttctgcatacagctcaggaagcagcaaggattctggaccagtacctttacaaggaggggtgggagaggcagaaggctaccggttatatcctcccaccagatgctgtaccatttgtccatgcacaccactgtaacgacgtgcaatcagagctgaagtacaaagccgagcacgtcaaacagaagggccactatgtgggggtgcccacaatgcgggatgatccaaagctggtgtggtttgagcatgctgggcagatccagaacgagcgcctttacaaggaagactatcataagactaaggccaagatcaacattcccgccgacatggtctcagttcttgctgccaagcagggccagactctggtcagtgacattgattaccggaattacctgcaccaatggatgtgccatcccgatcagaatgatgttatacaggcaaggaaagcctatgacctgcaaagtgacaacgtctaccgagctgacctagaatggctacgtggcatcggttggataccattggattctgtcgatcacgtgcgcgtgacaaaaaaccaggaaatgatgagtcagattaagtataaaaagaacgcccttgaaaattacccaaacttccgatctgtggtggatcccccagagatagtcttggctaagattaactctgtgaaccaaagcgatgtgaaatataaagaaactttcaataaagctaaagggaagtacacattctcaccggacactccacacatttcccatagtaaagatatgggtaagctgtattctaccatcctctacaaaggcgcatgggaaggcacaaaggcttacggttacacgttggacgagagatacatccctatcgtaggcgcaaagcacgctgatctggtcaactccgagctgaagtacaaggagacctatgagaaacagaaaggacattatctggctggcaaggtcataggcgaatttcccggggtcgtccactgtctcgacttccagaaaatgcgcagcgccttaaattataggaagcactatgaggatactaaggccaatgttcatatacccaacgacatgatgaatcacgttttagcgaagcgctgtcagtacatactgtcggacctcgaatacagacattactttcatcaatggacaagccttctggaggagcctaacgtaatccgtgttcggaatgctcaggaaatcctgtccgacaatgtgtataaagatgacttaaactggttgaaggggatcggctgttacgtatgggacacaccacagattctgcacgcgaagaaaagttatgatctccaaagccagctgcagtataccgccgccggcaaagaaaacctgcaaaactacaacctggtgacagatactccgctgtacgtgacagcagttcagtctggtattaacgctagtgaagtaaaatataaagaaaattaccatcagattaaggacaaatatactactgtgttggagacagtcgactacgatcggacacgcaatctgaagaatctttactctagtaatctctacaaggaggcatgggacagagtcaaagctaccagttatatcttaccaagctccacactgagcctcactcacgccaaaaatcaaaagcatttggcctctcacataaagtatcgcgaagagtacgagaaattcaaggcattgtacaccctcccgcggagcgtagatgacgaccccaataccgctcggtgcctgagagttgggaagctgaacatcgaccgactctatagatccgtctacgaaaagaataagatgaagattcatatcgtcccagatatggttgaaatggtcaccgctaaggacagtcagaagaaggtcagcgaaatcgattatcgactgcggcttcacgagtggatctgccatccagacttacaagtgaatgaccacgtgcgcaaagtgactgatcagatctcagatatcgtctacaaggatgacctgaattggctcaagggcattggatgctatgtatgggatacgcccgagattctgcacgcgaaacacgcctacgacctgcgagatgacatcaaatataaggctcacatgcttaagacgagaaacgattacaagttggtcacagacacacccgtgtacgttcaggcggtaaaatccgggaaacagctttcagacgccgtatatcactacgactatgtccactccgtgagagggaaagtagcccccaccactaagaccgtggatcttgatcgagctctgcatgcatataagctgcagagctcaaatttgtataaaacgagtttgcgcacattgccaactggctatagacttccaggagatactccccattttaaacatataaaagacactcgctacatgtcatcatattttaagtacaaggaagcgtacgagcacactaaagcttatggctacactctggggcctaaggacgtgccattcgttcatgtgcgccgagtcaataacgtgacctcggaaaggttgtatagagagctgtaccacaagcttaaagacaaaatccacaccacacctgacaccccggagatccgacaggttaagaaaacacaggaggcggtaagcgaattaatttacaagtctgatttcttcaagatgcagggacacatgatttctctcccttatactccacaagtcatacattgcaggtacgtgggagatattacctctgatatcaagtataaagaagatctccaggtactgaaaggatttggctgttttctgtacgataccccagatatggtcagatccagacacctgaggaaattgtggagcaactacctgtatactgataaagccaggaagatgcgggataagtacaaagtcgtgttggatacaccagagtaccgtaaagtgcaggagttaaaaacccatctcagcgaactcgtttatcgagcagcaggaaagaagcagaaatccattttcactagcgtgcctgatacccccgacctcttacgagccaaacgcgggcaaaagctccagtcccaatatctttacgtcgagctggctacaaaggagaggcctcatcatcacgcaggcaatcaaacgaccgccctgaagcatgcgaaggacgttaaagacatggtgtccgaaaaaaaatacaaaattcagtatgaaaaaatgaaggataagtacacccctgtaccagacaccccaatcctgattcgcgccaagcgcgcatactggaatgcatccgatcttagatataaagaaacctttcagaagacaaagggaaaatatcacacagtgaaagacgcattggacatcgtataccaccgaaaggttaccgatgatattagtaagatcaaatataaggagaattacatgtcccaactgggtatctggcgatctattccagacagaccagagcatttccatcacagggcagttacagacaccgtgagcgatgtaaaatacaaagaggatctgacctggctgaaaggaatcggctgctacgcctatgacactcctgattttactctggctgaaaagaacaaaacactatattctaaatacaaatataaagaagtgttcgagcggaccaagtcagacttcaaatatgttgctgactccccaataaatcggcactttaagtacgcgacacaactgatgaacgagaagaaatacagagctgactacgagcaacgcaaggacaaatatcacttggtggtggacgagccccgtcacttactggccaagacggccggcgatcaaatctctcagatcaagtatcgcaagaattacgagaaatccaaggataagttcaccagcattgtagacacccccgaacaccttcggactacgaaggtaaataagcagattagtgacattctgtacaagctggagtataataaagccaagccccggggctacaccacgatacacgacacaccaatgctcctccatgttaggaaggtaaaggacgaggtgtcagacttgaaatacaaggaggtttatcagaggaacaaaagtaattgcactatagaaccggatgcggtgcatataaaggctgcaaaggatgcctacaaggtcaacacgaacttggattacaaaaagcagtatgaggcaaacaaggcccactggaaatggacccccgaccgtcccgactttctgcaggcagcaaagtccagtctgcagcagtcagattttgagtacaaactcgacagagaattcttgaaaggctgcaaactttctgtgacggatgataagaatacagtcctcgcgttaaggaacactttgatcgagagtgacttaaagtataaggaaaagcacgtaaaagaaagaggcacatgccacgccgtcccagacactccacaaatccttcttgccaagacagtgagtaatctcgtttctgagaataaatacaaggatcatgttaagaagcacctcgcacagggcagctataccactctgccagaaacccgggacactgtacacgtaaaggaagtgaccaaacacgtgtccgacactaattacaaaaagaagttcgttaaagaaaagggtaagtcgaactatagtataatgttggaaccccctgaagtgaaacacgccatggaggtggccaagaagcaaagtgatgtggcctatcggaaggacgcaaaggagaatctgcattacaccaccgtcgcagacagacctgatattaaaaaggctacacaagcagctaagcaagcttccgaagtggagtatcgcgccaaacatcgaaaagaagggtcccatgggctgagtatgctgggcaggcccgatatcgaaatggccaaaaaagctgcgaaacttagcagtcaggttaagtatcgggagaactttgacaaggagaaaggcaagacaccaaaatataaccccaaggactctcaactctacaaagtgatgaaagacgccaacaacctggcaagtgaagtgaagtataaagccgatctgaagaagttgcataagcctgtcacggacatgaaggaatccctcattatgaatcatgttctgaacacctcacagctggcctcaagctatcaatacaagaagaaatacgagaagagtaaaggacactaccacactatccccgacaacctagagcagctccatcttaaggaagctacagagctccagtctatcgtcaagtacaaagagaagtatgagaaagagcgaggaaagccaatgctggacttcgaaacaccaacctacattaccgctaaagaatcgcaacagatgcagagtggaaaagagtacaggaaagattatgaagaatctataaaaggaagaaatttgaccggcctggaggttacgcctgcccttctgcacgtgaagtatgccactaagatcgcatcagaaaaggagtaccgaaaggatcttgaggaaagcattagaggaaagggcctcaccgagatggaagacacaccagacatgttgagggccaagaatgcaacgcagatactgaacgagaaagaatacaaaagagacttggagctggaggttaagggacgaggcctcaacgctatggccaacgagacccctgactttatgagggcgcgaaacgccaccgacattgcctcacagatcaaatacaaacagtccgccgagatggagaaagcgaatttcacctccgtggtggacacgccagagataatccatgctcagcaggtcaagaacctgtcctctcagaaaaaatataaggaagacgcggagaagagcatgtcttactatgaaaccgtgctggatactcctgagatccagagggtccgcgaaaatcaaaagaatttcagtttactccagtaccagtgcgatttaaaaaacagcaaaggaaaaatcactgtggtgcaggacactccagagatcctgcgcgtaaaggaaaatcaaaagaattttagctccgtactgtataaggaggacgtctctccggggacggcaatagggaagacccccgagatgatgcgtgtgaaacaaacccaggatcatatttcaagtgtgaagtataaagaggccatcgggcagggcacacccatacctgacctgcctgaagtgaaaagagtaaaggagactcagaagcacatctcaagtgtgatgtacaaggaaaatctcggtaccggcattcccacaacagttaccccagaaatcgagcgggtgaagcgaaatcaggaaaacttctcctctgtgctttacaaggagaacctgggcaaggggattcccacaccaataacaccagagatggagcgtgttaagcgcaaccaggagaattttagttccgtgctttacaaggaaaacatgggtaagggtactcccctggcagtgacaccagagatggaacgggtgaagcataatcaagaaaatatatcatcagtcctttataaggaaaacgtggggaaggctaccgccaccccagtcacccctgagatgcaacgcgtgaaacgaaatcaggaaaacatatccagtgttctatataaggagaatttgggcaaagccacacctacaccatttaccccagaaatggagagggtcaagaggaatcaagaaaattttagctccgttctttataaagaaaatatgaggaaggcgacccctactcccgttacacctgaaatggaacgcgcaaaacgtaatcaggaaaatatttccagcgtgctatactccgatagtttccggaagcagatccagggaaaggcagcttacgtccttgatactccagaaatgcgccgggtgagggagacacagcggcatatatccacagtgaagtatcatgaagattttgagaagcataagggatgtttcaccccagtggtcaccgaccctatcaccgagcgtgtcaaaaaaaacatgcaggatttttcagatatcaactatcgtgggattcaaagaaaagtggtggagatggaacaaaagcggaacgatcaggaccaggagaccattacaggtctgagagtgtggaggacaaatcccggatctgtctttgactacgatcccgcagaagataatattcagtctcgatctttgcatatgatcaatgtccaagcacagcggcgatcccgtgaacagtccaggagtgcaagcgcgctctctatctccggcggggaagaaaagagtgaacatagcgaggcacctgaccaccacctctccacttacagcgatggaggggtgttcgctgtctctacagcctacaaacatgcaaaaactaccgagctaccacaacaacggtcaagctccgtggccacccaacagacgaccgtgagctctatcccatctcacccctcgactgcagggaaaatattccgcgctatgtacgattacatggccgcagatgccgatgaggtatccttcaaagacggggatgccatcatcaatgtccaggctatagatgaggggtggatgtatggtactgtccaaaggacgggcagaaccggaatgctgcctgctaactacgttgaggctatctag

SEQ ID NO: 125929 - DNA, 25578 bp, synthetic construct
  misc_feature 1..25578: note = Description of Artificial Sequence: Synthetic coding sequence
  source 1..25578: mol_type = other DNA
atggctgatgacgaggattatgaagaggtcgtggagtattatacggaggaggtggtgtatgaggaggtgcccggagagacgattaccaagatttatgagaccacaactacccgcacttctgattatgagcagagtgaaacatccaagcctgcccttgctcaacctgccctagctcaaccggcatccgcaaaacccgtcgagaggcgaaaagtgatcaggaaaaaagttgatcccagcaaatttatgaccccttacatcgcccatagccaaaagatgcaggacctgttctctcctaacaagtacaaagaaaaattcgaaaaaaccaaaggtcagccatatgccagcacaacagatacacccgagcttaggagaatcaaaaaagtccaagaccagctgtcagaagtcaaataccgaatggatggcgacgtggccaagactatctgtcacgtggacgagaaggcaaaagacatcgaacacgccaagaaggtctcccagcaggttagcaaggtgctgtataagcagaattgggaggacacgaaggataaataccttctgccccctgacgcccccgaattagtgcaggctgtgaagaacaccgctatgttctctaagaagttatacaccgaggattgggaagctgataagtcactgttttacccttataacgactcaccggaactgagacgggttgcgcaggcgcagaaggccctcagtgatgttgcttacaagaagggattggccgagcagcaggcacagtttacacccctcgctgatccaccagacattgaatttgcaaaaaaggtcaccaatcaagttagcaagcagaagtataaggaggattacgagaacaagattaagggcaagtggagcgaaacaccatgcttcgaggtggcaaacgcaagaatgaatgccgataatatctcaactagaaaatatcaggaggatttcgaaaacatgaaagatcagatctatttcatgcagactgagacaccagaatacaagatgaataaaaaagccggagttgctgcaagcaaggtgaagtataaggaggattacgaaaagaataaaggcaaagcagactataacgtcttgcctgcttccgagaatccccagctgcgccagcttaaggccgctggagatgctctgtccgataaattatacaaagaaaattatgagaaaacaaaagccaagtcaatcaattactgcgaaacacccaaatttaaacttgatactgtcctgcagaacttcagttctgacaaaaagtacaaagattcctacctgaaagacatcctgggccactacgttggtagctttgaagatccataccatagtcactgtatgaaggtcaccgcacagaacagcgataagaactataaagccgagtatgaagaagatagaggcaaaggatttttcccccagacgatcacacaggagtacgaggctatcaagaagctggaccaatgcaaggaccacacatataaggtccatccggacaagacaaaatttacccaggtgacagattcacccgtgttacttcaggcacaagtcaactccaaacagctgagtgaccttaactataaggcgaagcacgaatcggaaaaatttaagtgccatatacccccggacacaccagccttcatacagcacaaagtgaatgcatataacctgtccgataacctctacaagcaggactgggagaagtccaaggccaagaaattcgatattaaagtggatgcgattccactgcttgctgccaaggccaataccaagaacacatcagatgtgatgtacaagaaagactatgaaaagaacaagggcaagatgattggtgttctttcgattaacgacgaccccaaaatgctgcactcgctgaaagtcgctaagaaccagtcggacagactctacaaagaaaattatgaaaagacgaaggcgaagtcaatgaattactgcgaaacaccaaaatatcaactggacactcagctgaagaatttcagcgaagctcggtataaggacctctacgtgaaagatgtgctgggacactatgtcggaagcatggaggacccctaccatactcactgtatgaaggtggccgcacagaatagcgataaaagctataaggcagaatatgaagaggacaaaggcaagtgctacttccctcaaacgattacacaggagtacgaggccatcaagaagctggaccagtgcaaggaccacacctataaagttcaccccgataaaaccaagttcacggcagtgactgatagccctgtcctgcttcaggcccagctgaacacaaagcagctgtctgatctgaactacaaggcaaagcatgaaggggagaaatttaaatgtcatatcccagcagacgcaccccagtttatccagcatcgcgtcaacgcctacaatctctctgacaacgtctataaacaggattgggagaaatctaaagccaagaaattcgacattaaagttgatgccattcccttactggctgccaaggccaacacaaagaatacttcagacgtgatgtataaaaaggattatgaaaagagtaaggggaagatgattggggctttgagcataaacgatgaccccaaaatgctccacagcttgaaaacagccaaaaaccagagtgatcgggagtatcgcaaggactacgagaaaagcaaaaccatttacaccgctcctcttgacatgctccaagtcacacaggccaaaaaaagccaggctatcgcctcagatgttgactataaacatattttacatagctattcctatccacctgacagcatcaatgttgacctcgccaagaaagcgtacgctctgcagagcgacgtcgaatataaggccgactataatagctggatgaaaggctgcggctgggtcccattcggcagtttggagatggagaaggctaagcgcgccagcgacattctgaacgagaaaaagtacagacagcatccggacactctcaaatttaccagcatcgaagacgcccctataaccgtgcagagtaagataaaccaggcccagaggtcagatatcgcttataaagctaagggcgaggagatcatccataaatataaccttccgcctgatctacctcagttcatccaggctaaggtcaatgcgtacaatatctccgagaatatgtataaggcagacctgaaagacctttccaagaaagggtacgacctcaggacagatgccattccgattcgtgccgccaaggccgcccgacaggccgcctcggacgtgcagtataaaaaagactatgagaaggccaaagggaaaatggtaggcttccagtcattacaggacgaccctaaactcgtccactacatgaatgtggccaagatacagtctgatagagagtataagaaggactacgaaaagacaaaaagcaagtataatacaccccacgacatgtttaacgtggtggccgctaagaaggctcaagatgttgtaagcaacgttaactacaagcattccctccaccactacacttacctgcctgacgcaatggacttggaactcagtaagaatatgatgcagatacagtctgataacgtgtataaggaggattacaataactggatgaagggtataggctggattccaatcggatctctggacgtggaaaaggtcaaaaaagccggcgacgcgctaaacgagaagaaataccgccagcaccctgatacacttaagtttacatcaatagtagactccccagtgatggtgcaagccaagcaaaacaccaaacaagtgtccgacatcctttacaaggccaagggagaagacgtcaaacacaaatatactatgtcccccgacctgccccagtttttacaagcaaaatgcaacgcctacaatatttctgatgtctgctacaagcgagactggtacgatttaattgccaaggggaataacgtactcggcgacgccatacccataacagctgccaaggcctcacggaacattgccagtgattacaagtacaaggaggcttacgagaagagcaagggaaaacacgtgggtttcagaagcctccaagatgaccccaaattagtccattacatgaatgtcgcgaagcttcagtccgaccgggagtacaagaagaattatgaaaatacaaaaacatcatatcacacacccggcgatatggtgtccatcactgcggcaaaaatggcacaggacgtcgctaccaatgtcaactataaacaacctctgcaccactacacttacctgcccgacgccatgtccctggagcatacaagaaacgtcaatcagatccagagtgataatgtttacaaggacgagtacaacagctttctgaaaggtattgggtggatcccgatcggtagtctggaggtggaaaaagtcaagaaggccggcgatgcactcaacgagcgcaaatatcgccagcatccggacaccgtcaagttcacctccgtgcctgattcaatggggatggttctcgcccaacataacacgaaacaactatcggacctaaactacaaagtggaaggtgaaaagctgaagcacaagtacacaattgatcctgaacttcctcaattcatccaggccaaggtcaacgctctgaatatgtcagacgcacactataaagccgactggaaaaagacaattgccaaggggtacgatttacggcctgatgcaatacctatcgtggccgcaaaatctagtcggaacatcgcctctgactgtaagtacaaagaagcatacgagaaagccaaagggaagcaggttggctttttgtctctgcaggacgacccaaagttggtgcattacatgaacgtcgccaaaatccagtccgacagagaatacaaaaagggctatgaggccagtaagacaaaatatcatactccattagacatggtctcggtgaccgctgctaaaaaatcccaagaagtagctacaaatgccaattaccggcagtcttatcaccactacacactcctgcccgacgccctcaatgtagagcactctaggaacgccatgcagattcagtccgataacctctataagtccgattttactaactggatgaagggcattggatgggtccccattgagagcctggaagttgagaaggctaaaaaagcaggcgagatcctgagcgaaaagaaatatcgacaacatccagagaaattgaaatttacttacgcaatggacactatggagcaggctcttaataaatccaataaattgaatatggataaacggctatacacagagaaatggaacaaagacaaaacaacaattcatgtgatgccagatacaccggacatcctgctatctcgagtcaaccagattaccatgagcgacaagctatacaaggcgggatgggaagaggagaaaaagaagggctatgacctccgacccgatgctatagccatcaaggcagcgagggcctcacgggatatcgcgagcgattacaagtacaagaaggcgtacgaacaagccaagggcaaacacattggctttagatctctcgaggacgaccctaagttggtgcacttcatgcaagttgcaaagatgcagtccgaccgcgaatacaagaagggatacgaaaagagcaaaactagctttcataccccggttgatatgttgtcagtagtcgccgccaagaagtctcaggaggttgccacaaatgccaattatcgaaatgtcatccatacctacaacatgttacccgacgcgatgtcctttgaattggcaaaaaacatgatgcagatccagtcagacaatcagtacaaagccgattacgcagatttcatgaaaggaatcggctggctgccgctcggctcactcgaagcagaaaaaaacaaaaaggcgatggaaattattagcgagaagaaatacaggcagcaccctgacactttgaaatattctacattaatggattcgatgaacatggtcctagcccagaacaacgctaaaatcatgaacgaacacctttacaagcaggcctgggaggcagataaaactaaggttcacatcatgcccgacataccccaaatcattctggcgaaagctaacgcaataaacatgtccgataaactgtacaagctgagtctcgaggagagcaagaagaagggctacgacctgcgacctgatgccatccctatcaaagcggctaaggctagtagagacatcgcttccgactataagtacaagtataactatgagaaaggcaaaggcaaaatggtggggttcaggtccctggaagatgacccaaagctggtccattcgatgcaggtcgcaaagatgcaatccgacagagagtataaaaagaattacgaaaacaccaagacttcataccatacaccggctgatatgctaagtgtcacagccgccaaggatgctcaggcaaacatcacgaacacgaattataagcatcttattcacaagtacattttgcttcctgacgcaatgaacattgaactgacgcgcaacatgaatcggattcaatccgacaatgagtataagcaggactacaatgagtggtacaaggggctaggttggagcccagctgggtcactcgaggtcgagaaggcaaaaaaggccactgagtatgcctccgaccagaagtacaggcagcatccttccaacttccagttcaaaaagttaaccgactcaatggatatggtgctggccaagcagaatgcgcacacgatgaataagcatctatacacaatcgactggaacaaagataaaaccaaaatacacgtgatgccagacaccccagacatcttacaggcaaagcagaatcagactctgtacagccagaaactctacaagctggggtgggaggaagccctgaagaaaggctatgatctgcccgtggacgccatcagcgtgcagctcgctaaggctagccgggacatcgctagtgactacaagtacaagcagggataccggaagcagctaggacaccatgtcggattccgaagcctgcaggacgacccaaagctggtgctctcaatgaatgtggccaaaatgcaaagcgaacgggagtacaagaaagacttcgagaagtggaaaactaagttttcaagtcctgtggacatgctgggcgttgtgctggcgaaaaaatgccaggagctggttagcgatgtggactacaaaaattatctgcaccaatggacgtgtctacccgatcaaaacgacgtggtgcaggccaagaaagtgtacgaattgcagagcgagaatctgtataagtccgatctagaatggctcaggggcatagggtggtcacccctcggcagtctggaggccgaaaaaaacaagagagccagtgaaatcatctctgagaagaagtatcgacagcctcccgaccgtaataagttcactagtatcccagatgcaatggatattgtcctcgccaagactaatgcaaagaataggtcggacaggttatacagagaggcctgggacaaagacaagactcagattcacattatgccagatacgcctgacattgtcctggcaaaagcaaacctgattaataccagcgacaagctctatagaatgggctacgaggaactcaaacggaagggttacgacctacccgtggacgctattccgatcaaggcagctaaggcatcccgagaaatagcttcagaatacaagtacaaggaggggttccgcaagcaactggggcatcacattggtgctagaaatattgaggatgacccaaagatgatgtggagtatgcacgttgccaagatccagtcagacagagaatacaaaaaagattttgagaagtggaagacaaagttttcaagtcctgtcgatatgctaggggttgtgctcgccaagaagtgccagactcttgtctccgatgtggattacaagaattacttgcaccagtggacatgtttgccagatcagtctgatgtgatccacgctcggcaagcatacgacctccagagcgacaacctctacaaaagcgatctgcagtggttaaaaggcatcggctggatgacaagcgggagcctcgaggatgagaaaaataaaagggccactcagatactctcagatcatgtctaccggcaacaccctgaccagttcaagttctcctcactgatggattccatccccatggttctggccaagaataatgcaataacgatgaatcaccgcctgtacacagaggcatgggacaaggataagacaactgttcacattatgcctgatacgccagaggtgcttttggccaaacagaacaaagtgaattactctgagaaattatataagttggggctagaggaagctaagcgcaagggctacgatatgagagtggatgcaataccaatcaaggcagccaaagccagcagggatatcgcgtccgagtttaaatataaggaggggtaccggaagcagctgggtcatcatatcggggcacgagcaataagagatgaccctaagatgatgtggtctatgcacgtggccaaaatccaatctgaccgggagtacaaaaaagatttcgagaagtggaagacaaaattctcctcccctgtcgacatgcttggcgtcgtgctggccaaaaagtgccaaaccctggtaagcgatgtcgactacaagaactacctccaccagtggacctgtctacctgatcagagcgacgtgattcacgcccgtcaagcttatgacctacagtccgataatatgtacaagagcgatctgcagtggatgagaggcataggctgggtttcgatcgggtctctcgatgttgagaaatgcaaaagagcaacagaaatattgtcagataaaatatatcggcagcctcccgaccgcttcaagtttactagtgtgaccgatagcctggaacaggtactggccaagaacaacgccataacaatgaacaagcgcctctacactgaagcctgggataaggataagacccagatccacatcatgcccgacaccccggaaatcatgctggcccggatgaataaaatcaattatagcgaatctctgtataagctggcaaatgaggaggctaaaaaaaaaggttatgacctaagaagcgacgctatccctattgtcgctgccaaggcttcacgagatattatttctgattacaaatacaaagatggctattgcaaacagctcggtcaccacattggcgcccgtaacattgaagatgaccccaaaatgatgtggagcatgcacgtggccaagatccaatctgatagagagtacaaaaaggacttcgagaagtggaagacaaaatttagctcacctgttgatatgctgggcgtagtcctcgcaaaaaagtgccaaacactggtgtcagatgttgattacaagaactacttgcacgagtggacatgtcttcccgaccagtccgatgtcatccacgcacggcaagcatacgacctgcagtcggataatatctataagtctgacctgcagtggttgagaggcattggttgggtgccgatcgggtccatggatgtagttaaatgcaaacgcgctacagaaatactgtcagataacatttacagacaacctccagacaagctgaagtttactagcgttaccgatagtctagagcaggtgctggccaagaataacgccctgaatatgaacaagcgtctttacaccgaagcatgggacaaggataaaacccagattcacatcatgcccgacaccccggagataatgcttgcacgtcagaataaaattaactatagtgagactctttataaactcgcgaatgaggaagcaaagaaaaagggttatgatctgcggtctgacgcgatcccaatcgtggcggccaaggcctcccgcgacgtgatttccgattataaatataaggacggatacagaaagcagctcggacaccacataggagcgaggaacattgaagacgatcccaagatgatgtggtccatgcacgttgccaagatccagtcggacagggagtacaaaaaggatttcgagaaatggaagacgaagttttccagcccggtggatatgcttggagtggtcctggccaaaaagtgtcagaccctagtgagtgacgttgactacaaaaactatctccatgaatggacttgtcttcctgaccagaatgacgtcattcatgcacgccaggcctacgacctgcagtccgataacatttacaaatctgacctacagtggctcagagggattggatgggtgcctattggttccatggatgtggtgaaatgtaaaagggcagccgagatcctgagcgataatatctacagacaaccacctgataagcttaagtttacaagcgtgactgacagccttgagcaggtgctagcaaagaacaacgcattaaatatgaacaagcgcctctataccgaggcttgggacaaggacaaaacccaggttcatattatgccagatactccagaaattatgctagccagacagaataaaatcaactacagtgagtctctgtaccgtcaggccatggaggaggctaagaaggagggatatgatctgaggagcgatgcaatacctattgtagcagcaaaggcctcaagagacatcgcgtctgactacaaatataaggaggcttacaggaaacagctggggcaccacatcggagcgcgagccgtgcatgacgatcctaagatcatgtggtccttacatatcgctaaggtccagtcagatcgtgagtataagaaggattttgagaagtacaagacccggtacagcagtccggtcgatatgctcggaatcgtgctcgcaaagaagtgccaaaccctggtctctgatgtagattataaacaccctctgcacgagtggatatgtttgccagaccagaacgatattatccacgcacgaaaggcctatgatctgcagtcggacaacttatacaagagcgacctggagtggatgaagggcatcgggtgggttcctatcgattccctcgaagtggtccgcgctaagagagccggcgagctcctttccgataccatttataggcagcgtcccgaaacattgaagtttaccagtattaccgatactcccgaacaggtgcttgctaaaaacaatgccctgaatatgaataagcggctctacaccgaagcctgggacaatgacaagaagaccattcatgtcatgccagatactccagagatcatgttagcaaaactgaatagaatcaactacagcgacaagctgtacaagttagctctggaagaaagcaaaaaggagggttacgaccttaggctcgatgctatccctattcaggccgcgaaagcctctagggacatagcctctgactacaagtacaaagaaggctaccggaagcaactaggccatcatatcggcgctagaaacattaaggatgatccaaagatgatgtggtcaatccatgtggcgaaaatccaatcagatcgcgagtataagaaagaattcgagaaatggaaaaccaagttctcatctccagtggatatgctgggcgtggtgctggcaaaaaagtgccagattcttgtgtctgatatcgattataagcatcccttgcacgagtggacctgtttgccagatcagaacgatgtaatccaggcccgcaaagcgtacgatcttcagtcagacgcaatttacaagtcagacctcgagtggctgaggggcatcggctgggttcctatcggttctgtcgaggtggagaaggtgaagcgtgcaggcgagatcctctccgatagaaaatatcgtcagccggccgatcagctgaaattcacctgcatcacggacactcccgaaattgtcctcgctaaaaataacgccttgaccatgtccaaacatctctatacagaagcttgggacgctgacaagacatccattcacgtgatgccagacacgcctgacattttgcttgcgaaatctaattctgctaatatcagccagaagttgtataccaaggggtgggatgaatccaaaatgaaggactatgacctaagggccgacgccatttctatcaagtcagccaaggcctcgagggacatcgcatctgattacaaatataaggaagcctacgagaaacagaagggccaccacattggggcccagtccattgaggacgaccctaaaattatgtgtgccattcacgctggcaagatccaaagtgagcgtgagtataagaaagagttccagaagtggaagactaaattctcgagtccagtggacatgctttccatcctcttagcaaaaaaatgccagacactggtaaccgacatcgactacaggaattatcttcacgagtggacatgtatgccggaccagaatgacatcatccaagccaagaaggcttacgatctgcagagtgattcggtgtacaaagccgatttagaatggctccgaggaattggatggatgccagaaggatccgtagaaatgaatcgggtgaaggttgctcaggatttggtgaatgagcgcctgtacaggacccgtccagaagctcttagctttacaagtatagtggacaccccggaggtggtcctggcaaaggcaaactccctgcagatctccgagaagctgtaccaggaagcatggaataaagacaagtccaatattaccatcccgtcagatacccccgagatgctgcaagctcacatcaatgccctgcaaatatccaacaaactttatcagaaagattggaacgacgctaagcagaagggctacgatattagagctgatgctatcgagattaagcatgccaaagcctcaagggagatcgcctcagagtacaagtacaaggaggggtatagaaaacagctagggcatcatatgggctttaggacactgcaggatgacccaaagagcgtgtgggccatccatgcagcaaaaatccagagcgatcgggagtacaagaaggcttacgaaaagtccaagggtatccacaacacccccctggatatgatgagcatcgttcaggcaaagaagtgtcaggtattggtgagcgacattgactaccggaattatctgcatcagtggacctgcttacctgatcaaaacgatgtgattcaggccaaaaaagcctatgacttacagtccgataacctttacaaatccgaccttgagtggctcaagggcattggctggctcccagaaggttccgtcgaagtgatgcgagtcaaaaatgctcaaaacctgctgaacgagagactataccgaattaaacctgaggccctcaaattcacatcgatcgtggacactcctgaagtgattcaggctaagataaatgcagtgcagatctcagaaccactctatagggacgcttgggaaaaggaaaaagccaatgtaaacgtgccagcagacacacctctgatgttgcaatctaagatcaatgccctacaaatatcgaacaaacgctaccagcaggcgtgggaggacgttaagatgaccggctatgatctccgcgcagacgccataggaattcaacacgccaaggcatcccgggatattgcaagcgattatttgtacaagaccgcctacgagaaacagaagggacattatatcggttgtcgaagtgcgaaagaggaccccaaactggtgtgggccgccaacgtgctgaagatgcagaatgaccgactctataagaaagcatacaatgaccacaaggccaagatcagcattcctgttgatatggtaagcatttccgccgccaaggaaggccaggcgctggcgtccgacgtggactatcgccactacttgcaccattggagttgtttccccgaccagaacgacgtgatacaggcaagaaaagcctatgatttgcagtccgactcagtatataaggccgacttggagtggctgcgaggcattggctggatgcctgagggtagcgttgagatgaatcgggtgaaagtagcccaggacctcgttaacgaaaggttgtatcggaccagacccgaggcccttagttttacgtcaatagtggacacccctgaagtcgtactggctaaagccaactctctgcagattagcgaaaaactgtaccaggaggcctggaacaaagacaagagtaacattacaatcccgagcgatacacccgagatgctgcaggctcatattaacgcacttcagatcagtaacaagctctatcagaaggactggaacgacaccaagcagaagggctacgatatcagggctgacgcaatagagattaaacatgcaaaggccagccgtgaaatcgccagcgagtacaaatacaaagagggctaccgcaagcagctggggcaccatatgggtttccggacactgcaggacgaccctaagagtgtatgggccattcacgcagccaaaattcagagtgaccgagagtacaagaaggcttacgagaagtcaaaggggattcataatacaccattggacatgatgagcatcgtgcaggccaagaagtgccaggtgctggtatcggacatcgattaccgcaactacctacaccagtggacctgcctgcctgaccagaatgacgtaatccaagctaaaaaagcttatgacctccagagtgataacttgtacaaaagcgacctcgagtggttgaagggcatcggatggctgcccgagggctctgtggaggtcatgcgcgtcaagaatgcacagaatttgctaaacgagagattgtaccgaatcaaacccgaggccttgaagtttacaagcattgtggatacccccgaggtgatacaggctaaaataaatgctgtgcagatttcagagcccctgtatcgtaatgcttgggaaaaggagaaggccaatgtgaacgtgcccgcagacacacccctaatgttgcaaagcaagatcaacgcattgcaaatcagtaacaagcggtaccaacaagcatgggaggatgtcaagatgacagggtacgacctgcgggcagatgcaataggaattcagcacgcaaaggcctccagggatatcgccagcgactatttatacaaaacagcctacgaaaagcagaaagggcattatattggttgcaggagcgcaaaggaggatccaaaacttgtgtgggccgccaatgttctgaagatgcagaatgaccgtttgtacaagaaagcatataacgaccacaaagccaagatttcaatcccagtcgacatggtgtccatttcagccgccaaggagggccaagccttggcctctgacgtcgattacagacactacctgcaccactggtcctgcttcccagatcagaatgatgtcatacaggcacggaaggcctacgaccttcagtccgactcagtctacaaagccgacctagagtggctcaggggcatagggtggatgccggaagggagtgtggagatgaaccgggtcaaggtggcacaggatctggtgaacgagaggctgtaccgcacccgcccagaggctttaagcttcacctccattgtcgatactcccgaggttgtgcttgccaaagccaactcgctccaaatctcagagaagttgtatcaagaggcttggaataaagacaagtcaaatataaccattccttcggataccccggagatgttgcaggcccacattaacgcgctgcagattagtaacaaactgtaccagaaggactggaacgacacgaagcagaaggggtatgatataagggccgacgccattgagattaaacacgcaaaggcctctcgggagatcgccagcgagtacaaatacaaagaagggtaccgcaagcagcttggacaccacatgggcttccgcacactgcaggatgacccaaagagtgtttgggccatccacgccgctaagattcagagcgaccgagaatataaaaaagcctacgaaaaatccaagggaattcacaatacacctcttgatatgatgagcattgtgcaggccaagaagtgccaagtgttggtgtccgacatagactacaggaactatctacatcagtggacttgtctcccagaccagaatgacgtgatccaggcgaaaaaggcctatgacctccagtcagacaatctgtataaaagtgatttagagtggctgaagggcatcgggtggctgcctgaggggagcgtggaggtgatgcgggtaaagaacgcccagaacttactgaacgagcgcctgtataggatcaaaccggaagcgctcaaattcacgagcattgtggacactcccgaggtgatccaggcgaagatcaatgccgtacaaatcagcgaacccctgtatcgggacgcatgggaaaaggagaaagcaaatgtgaatgttcccgccgacaccccccttatgttacagtccaaaatcaacgcactccagatcagcaacaagaggtaccaacaggcctgggaggatgtgaaaatgacaggatatgacctcagagccgatgcaattgggattcagcacgcgaaagccagtcgcgacattgcctctgactacctctataagacagcatatgaaaaacagaagggccattatattgggtgtcgttccgcgaaagaggaccccaagctggtctgggcagcaaatgtgttgaagatgcagaacgatcgattgtataagaaagcttacaacgatcacaaagccaaaattagcatcccggtggacatggtgagcatctctgcagccaaggagggacaagctttagccagcgatgtggattaccgacactacttgcatcgatggtcttgctttcctgatcagaacgacgtaatccaagccaggaaggcttatgatctgcagtcagacgccctgtataaagccgacttggagtggctcaggggaatcggatggatgcctcaaggctctccggaggtgctgcgggtgaaaaacgctcaaaatatcttctgtgatagtgtgtataggaccccagtcgtgaatctgaagtacacctccatcgttgatactcccgaagtggtcttagctaaaagtaatgcagagaatattagcatcccaaaatacagagaggtgtgggataaagataagacatctatacacattatgccagatactccagaaattaaccttgcccgagccaatgctctcaatgtgagcaacaaactgtacagggaaggctgggacgagatgaaagctgggtgcgatgtgagactggatgcaatccccatccaggcggccaaagcctcgagggaaatcgcctccgattataaatacaaattagaccacgaaaagcagaaggggcactacgtggggactctgaccgccagggatgataacaagatcagatgggccttgatcgcggacaaattacagaatgaacgggaatacaggctagattgggccaaatggaaggcgaaaatccagtctcccgtcgatatgcttagcatcttgcactcaaagaattcacaggccctcgtatccgacatggattaccgcaattaccttcatcagtggacttgcatgcccgatcagaatgatgtcatccaggctaagaaggcatacgaactgcagtctgacaatgtttataaggctgatttggagtggctgcgcggcatcggctggatgcctaatgacagcgtgagcgtgaaccatgccaaacatgcagccgatattttcagcgaaaaaaagtacaggaccaagattgagactcttaactttacaccagtggacgatcgggttgattatgtaacagctaagcaatctggtgaaatcctggatgacattaaataccggaaagattggaatgctactaaatccaagtatacgctcaccgagacccccttattgcacaccgctcaggaggccgcccggatcctggaccaatacctgtacaaggagggttgggaaagacaaaaggccacaggctatatccttccacctgatgcagtcccttttgtccacgcccatcactgcaatgacgtgcagtccgaactgaagtacaaggcggaacacgtgaagcagaaggggcactacgtgggagtaccaactatgagagacgacccaaagttagtgtggttcgaacatgctggccagatacagaacgagcggctgtataaggaggattaccacaagacaaaagccaagataaatatccccgccgatatggtgtccgtgctcgcagcgaaacaaggtcagacattagtgagtgatatagactaccggaattatcttcatcaatggatgtgccaccctgaccagaacgatgtgattcaagcaagaaaggcatacgacctccagagcgataacgtctaccgcgctgatctagaatggctgagaggcatcgggtggattccactggattccgtggaccatgttagggtgactaagaaccaggagatgatgtcccagatcaagtataagaagaatgcattggagaattaccccaactttcgctctgttgtagacccccccgagattgttctggctaaaattaatagcgtcaaccagtcagatgtgaaatacaaagaaaccttcaacaaggcgaagggaaagtacaccttttccccggatacaccccacattagtcattctaaggacatgggaaagctgtatagtaccattctctataagggtgcatgggaaggaaccaaggcttatggttacacattggatgagaggtacatcccaatcgttggcgctaaacacgcagatctggttaatagtgaacttaagtacaaggaaacctatgagaaacagaagggccactacctggcaggcaaggtcattggggaattcccaggcgtcgtgcattgcctggactttcaaaaaatgcgatcggccctgaactaccgtaagcactacgaagataccaaggcaaacgtgcacatccctaatgacatgatgaaccatgtgcttgccaaacgatgtcagtacatcctctcagacctggagtatcggcactacttccatcagtggaccagtctcctggaagagcctaatgtgattagggtacgaaacgcacaggaaatcctaagcgacaacgtgtacaaggatgatttgaactggctgaaagggattggttgttatgtatgggataccccacagattctgcatgctaaaaagtcttacgatcttcagagccaactacagtacaccgcagccggcaaagagaacctccagaactataatctggtgactgacacacccctttacgttacagcggtgcagagcggaattaacgctagtgaggtaaagtataaggagaattaccaccagatcaaagataagtacaccacagttctggaaacggtggactatgaccgaactcggaatctcaaaaatttatattccagcaacctgtacaaggaggcctgggaccgtgtaaaggctacctcttatatcctcccctcctccacgttaagcctgacgcacgctaagaatcagaagcacttggcatctcatattaagtaccgtgaagaatatgaaaagtttaaggctttgtacaccttgcctcggagcgtagacgatgacccaaacaccgcaaggtgtctgagagtgggaaaattgaatatcgaccgactctatcggtccgtatatgagaaaaacaaaatgaaaatccacatcgtccctgatatggtggagatggttaccgccaaggattctcagaagaaggtgtccgagatcgactataggctccggctgcatgagtggatctgtcatccagatctacaagtcaatgaccatgttcgcaaggtcacggatcagattagcgatattgtgtacaaagacgacctgaattggttaaagggaatcgggtgctacgtgtgggatactccagaaattctacatgccaagcacgcctatgatctgcgggatgacatcaagtacaaggcccacatgctgaagacgcgcaatgattacaagctcgtgaccgacacacccgtttacgtgcaggccgtaaagagtggaaaacagcttagcgacgccgtctatcactacgattacgtgcactctgttagaggcaaggtggcacccacgacgaagacagtggatttagacagagctttgcacgcatataaattgcaatcttctaatctttacaaaaccagcctgcggactctgccgacgggatataggcttccaggtgacaccccacattttaagcatatcaaggatacacggtacatgtctagctacttcaagtacaaggaggcttacgagcatactaaggcatacgggtacaccctcgggccaaaggatgtcccttttgtgcatgtgcggcgtgtaaacaatgtaacatccgagcggctgtatcgggagctctatcacaagctaaaggataagatccatacaacccccgacacacccgaaattagacaggttaagaagacccaggaagcagtgtccgaactgatttacaagtcagatttcttcaaaatgcagggccatatgatttcattaccttataccccacaagtgattcattgtagatatgtgggtgacattacctcagacattaaatacaaagaggacctccaggtgttgaaggggttcggatgcttcctttacgatactcccgatatggtgcggtcccggcacctaaggaaactgtggagcaattatctctataccgacaaagcacgaaagatgagggataaatacaaggtagttctggacactccagaatatcgcaaggtccaggagctcaagacccacttaagcgaattagtctatcgagcagcaggcaaaaaacagaaatctattttcacctccgtcccagacacccccgacctcctcagagcaaagagagggcaaaaacttcagtcacagtacctttacgtagagctggctaccaaagaaaggcctcaccatcatgccggaaaccagacgaccgcacttaaacacgccaaggacgttaaagacatggtgagtgagaaaaagtataagattcagtacgaaaagatgaaagataagtacacccccgtgccagatacgcccattttgatacgggccaagcgcgcatattggaacgcgtctgatctccggtacaaggagactttccagaagaccaagggtaaatatcacactgttaaagatgctttggatatcgtttaccatcgcaaggtgactgacgacatctcgaagattaagtacaaggagaattatatgtcgcagctgggaatatggaggagtattcccgacaggccagagcactttcaccaccgagccgtgacagacacagtctctgacgtcaaatataaggaagatcttacttggctgaagggcattgggtgttacgcatacgacactcccgatttcaccctggccgaaaaaaataaaaccttgtattccaaatacaaatataaggaggtctttgagcgcaccaagagcgattttaaatatgtggccgactctcccatcaacaggcactttaagtacgccacacagctcatgaatgagaaaaaatacagggccgattacgagcagaggaaagataaatatcacttggttgttgacgaaccccgtcatctgctcgccaagaccgctggggaccaaatcagtcagataaagtaccgcaagaactacgaaaagtccaaggacaaatttactagcatcgtagacactcccgaacatcttcgaaccacaaaggtcaataaacaaatctccgacatactgtataaactcgagtacaataaggccaaacctagaggatataccacaattcatgatacccccatgttactgcatgtcaggaaagttaaagatgaggttagcgaccttaagtataaggaagtctaccagaggaacaagagcaattgcacgattgaacctgatgctgtccatatcaaggccgccaaagacgcttacaaagtcaacaccaatttggattacaagaagcagtatgaggcgaacaaggcacattggaaatggacacctgacaggcccgactttctccaggccgctaagtcttccctccagcagagcgattttgagtataagctggacagagaatttctgaagggatgcaaactgagtgtaacggacgataaaaacaccgtgttggcccttcgtaatactttgatcgaaagtgatttgaagtataaagaaaaacacgtgaaagagcgcggaacttgccacgctgtgccggacacaccacagatactcttggctaagactgtcagcaatttagtgtcagagaataagtacaaggatcatgtcaaaaagcacctcgcgcaggggagttacaccactctgcctgaaactcgagatacggtccatgtgaaagaagtgaccaagcacgtttcagataccaactataaaaagaagttcgtcaaggagaaaggcaagagtaattattcgattatgctggagcccccggaggtcaagcatgccatggaagtggcaaaaaagcaaagcgacgtcgcttacagaaaggatgcgaaggagaatctgcattataccacggtcgcggaccgccccgacataaaaaaagcaacccaagccgcaaagcaagcttctgaggtcgagtacagagccaaacatcgtaaggaagggtcccacgggcttagcatgctaggccggcccgatatcgagatggcaaaaaaggctgccaagctgagcagccaagtgaagtaccgagagaactttgacaaagagaaaggtaagactcccaaatacaatcctaaagacagtcagctgtacaaggttatgaaggatgccaataacttagcctccgaggtgaagtataaggctgacttgaagaaactccataagcctgtgactgatatgaaagagagtctaattatgaaccacgtgctcaacacaagtcagcttgccagctcataccaatataagaagaagtacgaaaaatccaaagggcactaccacactatacctgataacctggagcaactgcacctcaaagaggctaccgaactgcagtcaattgtcaaatacaaagaaaaatatgaaaaggagcggggtaagccaatgctggactttgaaaccccaacgtacattaccgcaaaagagtcacagcagatgcaatccgggaaagagtaccggaaagattacgaggagtcaatcaaaggcagaaatctgactggcctggaggtgacgcccgctctccttcacgtgaaatacgccactaagattgcgtccgagaaggagtaccgtaaggacctggaggagtctattcgggggaagggactgaccgaaatggaagacaccccggacatgctcagggctaagaacgccactcagattctgaatgagaaggagtacaaacgggacctcgaactggaggtgaagggacgagggttgaatgctatggccaacgaaactccagattttatgcgggcaaggaacgccacggacatagcttcgcagatcaagtacaagcagtctgctgagatggagaaagccaatttcacatctgtcgtcgacacacctgagatcattcatgcacagcaggtgaagaacctgagctctcagaaaaagtataaagaagacgccgaaaaatcaatgtcctattacgagaccgtccttgacactccagaaatccagcgcgtgcgtgagaaccagaaaaacttcagcttgctgcaataccagtgcgacctgaagaacagcaaaggaaaaataacagtggtacaggatacccccgaaattctgagggtgaaggaaaatcagaagaatttcagtagtgtcctgtacaaggaggacgtttctcccggtaccgccattggcaagacaccagagatgatgcgagtcaagcaaacacaggatcacatatctagcgtgaaatacaaggaggcgatcggccagggcactccaattccagatctccccgaggtgaagcgagtgaaggaaacccagaagcatatcagtagcgtgatgtacaaagagaaccttggcacaggcatccccacaactgtgaccccggagatcgagcgggtgaaaagaaaccaagagaacttctcctccgtgttgtataaggagaacctgggcaaaggaatccccacacctattaccccagaaatggagcgagttaaacgaaaccaagagaatttctcctccattctttacaaggaaaaccttagcaaaggaacacccctgcccgtcacccctgaaatggaaagggtaaagctgaatcaggaaaacttctccagtgtgctatacaaagagaacgtcggcaaggggatacctatcccaattactccagaaatggaaagagtgaaacataatcaggagaacttttccagcgtgttatacaaggagaatctaggcactggtatccctattcctatcacgccagaaatgcagagagtaaaacacaatcaggaaaaccttagttctgtgctgtataaagaaaacatgggaaaaggaaccccactgcccgtgacccctgaaatggagcgggtgaaacacaatcaagaaaatataagctccgttttgtataaggagaacatgggtaaaggaacacccctgccagtaactccagagatggaacgcgtgaagcataatcaggagaatatctcgtccgtcctctataaggaaaatatgggaaagggcactccattagctgtcacaccagagatggagcgggtcaagcacaaccaggagaatataagctcagtactgtacaaagaaaatgtgggtaaagctacagctacccctgtaacgcctgagatgcagagggtcaagagaaaccaggagaatatttctagtgtcctatacaaggagaacctgggaaaggccacccctacaccgttcacccctgagatggaaagggttaaacgcaaccaggagaacttcagttcagtcctttacaaggagaatatgaggaaagcaactcccacccccgtcacccccgagatggagcgggctaagagaaatcaagaaaatatctctagcgtactctattctgactcctttaggaagcagatccaggggaaggccgcctatgtgcttgatacccccgaaatgcggagggtccgcgaaacccagagacatatctccacagttaagtatcacgaagatttcgagaagcacaaagggtgtttcactcccgttgtgactgatcctattactgaaagagtgaagaaaaatatgcaggacttcagcgatatcaattacagggggattcagaggaaggtagtcgagatggagcagaagcgcaacgaccaggaccaggagaccatcaccggcctgcgggtctggaggactaatccaggtagtgtgtttgactatgatcctgcagaggataacatccagtctaggtcactgcacatgattaacgtgcaggcgcagagacgcagtcgagaacagagccggagcgcaagcgccctctccatctccgggggagaggaaaagtccgagcactcagaagcccccgaccatcatctgtcaacctattcagacggaggggtttttgctgtgtcaacggcctacaagcatgccaaaacaaccgagttgccgcagcagcggtcatctagcgttgctacgcagcaaaccacagtgtccagcattccatcccacccttctactgccggtaaaatcttccgggctatgtatgattacatggctgccgacgcggatgaggtgagcttcaaggatggcgatgcaataattaatgtccaagcgattgacgaaggttggatgtatggcacagttcagcggacagggaggaccggaatgctgcccgctaactatgtggaagctatctag

SEQ ID NO: 125930 - DNA, 864 bp, synthetic construct
  misc_feature 1..864: note = Description of Artificial Sequence: Synthetic coding sequence
  source 1..864: mol_type = other DNA
atggctgatgacgaggattatgaggaggtagtcgaatactacaccgaggaggtggtgtacgaggaagtgcctggcgaaaccattacaaagatatacgagacaactacaacaaggacctccgactatgagcagtcagaaaccagcaaacccgctctggctcagcccgctttagcacagccagcaagtgcaaaacccgttgagcggaggaaagtgatacggaaaaaagtggacccttcaaaattcatgacaccatacattgcgcatagccaaaaaatgcaagaccttttctccccaaacaaatacaaagagaagtttgaaaaaacaaagggtcagccatatgcttcaaccacagatacacccgaactccggaggattaaaaaagtccaggatcagctatcggaagttaagtatcgcatggatggcgacgtggcaaaaacaatctgtcatgttgacgagaaagcaaaggatattgagcatgccaagaaagtgtcacagcaggtgtctaaggtactgtataaacagaattgggaagataccaaggataagtacctgctgccaccagatgcacctgagctggtgcaggctgtaaagaacactgccatgttcagcaagaaactgtacaccgaggactgggaggctgacaaatcactgttttatccatacaatgactcacctgaactgcgacgtgtcgctcaggcccaaaaggcgctaagtgacgtggcctacaagaagggcttggccgaacagcaggcccagtttacacccttggcggacccccctgatattgaatttgctaagaaggttacaaaccaagttagcaaacaaaaagaaaagaagaggaagaaaaaaaggaaaaaagtgtag

SEQ ID NO: 125931 - DNA, 1317 bp, synthetic construct
  misc_feature 1..1317: note = Description of Artificial Sequence: Synthetic coding sequence
  source 1..1317: mol_type = other DNA
atgatgcgggtcaagcagacacaggaccacatttccagcgtgaaatacaaggaagccatcggtcaagggaccccaatccctgatttgccggaggtaaaaagggtgaaggagactcagaaacatatcagctcggtaatgtataaggagaacttgggcacagggattccgaccactgtgacgcccgagatagaaagggtaaagcgaaaccaggaaaacttctctagtgtcctgtataaagaaaacatgggcaaaggtactcccctcgcagtaactcccgaaatggagagggtcaaacataaccaggagaatatctcatcggtgctttacaaggagaacgtgggaaaggcaactgccactcctgtgacaccagagatgcaacgcgtgaagaggaaccaggagaatatcagttctgtcttatacaaagagaacatgcggaaagccacgccaacccctgtaacccctgaaatggagcgtgccaaaaggaaccaggagaatatatcgtccgtcctttactcagactcatttaggaagcagatccaggggaaggcagcttacgttctcgacactccagaaatgagacgggtgcgtgagactcagcgacacatctcaaccgttaagtatcacgaggatttcgagaagcataaagggtgttttaccccagtggtcacagatccaatcaccgagcgcgtcaaaaaaaacatgcaagactttagtgatatcaattatagaggcatccagagaaaggtggtggagatggagcagaagcggaatgaccaggaccaggagactatcacaggactgcgcgtttggaggacgaaccccggcagcgtttttgactacgaccccgctgaggacaatatacagagtcgctccctgcatatgataaacgtgcaagcgcagagacgctcccgcgaacagtctcgctccgccagcgctctcagcatcagcggtggtgaagagaagagtgaacactccgaggcccctgatcaccatctcagcacatactccgacggcggcgtattcgccgtgtcaaccgcttataagcacgctaagactacagaactgccacaacaacggtcatcatcagtggccacacagcagaccacagtaagcagcatcccctctcaccccagcactgctggcaagatatttagggccatgtacgactacatggcagctgatgctgatgaagtctccttcaaggatggcgatgcaatcattaatgtgcaagccattgacgaagggtggatgtacggaactgttcagcgcactggcaggaccggcatgttgcccgctaactacgtcgaagccatttag

SEQ ID NO: 125932 - DNA, 1014 bp, synthetic construct
  misc_feature 1..1014: note = Description of Artificial Sequence: Synthetic coding sequence
  source 1..1014: mol_type = other DNA
cagaagtacaaagaggattacgaaaacaagataaaggggaaatggtctgagactccttgtttcgaagttgcaaatgctcggatgaacgccgataacataagtacccggaagtatcaggaggacttcgagaacatgaaggatcaaatttacttcatgcagacggagacccccgaatataaaatgaataaaaaggccggggtggctgcgtcaaaagtgaagtataaggaagactacgaaaagaacaaagggaaggctgactataacgtgctacccgccagtgaaaaccctcagctgcgccagctcaaggccgccggggacgcactttccgataaactgtacaaagagaattacgagaagaccaaggccaagagcattaattattgcgagacaccaaaattcaaactcgatactgtgttgcagaacttcagtagtgataaaaagtacaaggactcatatctcaaagacatcctcggacattatgtaggatctttcgaagatccctaccatagtcattgcatgaaagtgactgctcaaaattccgacaaaaactacaaagctgagtacgaagaagacaggggaaaaggtttcttcccccagacaatcacccaagaatatgaagccataaaaaagctggaccaatgcaaagatcatacgtataaagtgcatcccgacaagacaaaattcacccaagtaactgatagccctgtactgctacaggcccaagttaacagcaagcagctgtcagatctgaattataaagccaaacatgaatccgagaagtttaaatgccacataccgcctgacaccccagcgttcatccagcacaaggttaacgcgtataatttgtccgacaatctgtacaaacaagattgggagaaaagtaaggcgaagaaatttgacatcaaagtggacgcaattcctctcttggctgccaaagctaatacaaagaataccagtgatgtgatgtataaaaaagattatgagaagaacaaagtgaaggttcagcaacggtag

SEQ ID NO: 125933 - DNA, 5193 bp, synthetic construct
  misc_feature 1..5193: note = Description of Artificial Sequence: Synthetic coding sequence
  source 1..5193: mol_type = other DNA
atgaacgttcagccctgctctagatgtggctatggagtgtaccctgcagagaagatcagctgtattgaccaaatctggcacaaggcctgctttcactgcgaggtttgcaaaatgatgctatctgtgaataactttgtgtcccaccagaaaaagccctactgccatgcacacaaccccaaaaacaataccttcacaagcgtgtatcacactcccctgaatttgaacgtcagaactttccctgaagctatcagcgggatccatgaccaagaggatggtgagcaatgcaaatcggtgttccactgggacatgaagtctaaggacaaggaaggagccccaaacagacagcccctggctaacgaaagagcgtattggacaggatatggagaaggcaatgcatggtgtcccggcgccctacccgaccctgaaattgtgcgcatggtagaggcccgtaaatccctcggcgaagagtataccgaggactacgagcagccacgcggcaagggcagctttccagctatgatcacgccagcttaccaacgcgccaagaaagcaaatcagttggcctcacaggtcgagtacaagagaggtcacgatgagagaatctctagatttagcacggtggtcgatacgcctgagctgctgcgttcaaaagccggagcccagctgcagtcagacgtgaggtacacagaagactacgaacagcagcgagggaaaggatcattccccgctatgatcacacctgcttatcagatcgccaaaagagcaaacgaactcgcttcggacgttcggtaccaccagcagtaccagaaagagatgcgcgggatggccggaccagccataggggcagagggtattttgacacgggagtgcgcggaccaatatgggcaggggtatcctgaggagtatgaggagcatcgggggaagggttccttccctgcaatgatcacacccgcataccagaatgctaagaaggcgcatgagctggcgagtgacatcaaataccggcaagacttcaacaagatgaaaggggccgcgcattaccatagtttgccggcccaagacaatctcgtgttgaaacaggcacagagcgttaataaactcgttagtgaggtcgagtataagaaggacttagagtcatctagaggccactctattaattactgtgaaaccccgcaatttcgaaacgtatcgaagatcagtaaattcacttctgacaacaagtacaaggaaaactatcagaatcacatgcgcgggcgatatgagggagtcggaatggacaggagaacactgcacgccatgaaggtgggttctctagcctccaacgtagcctataaggctgactataaacatgacatcgtggactataattatcctgcgactttaactccctcctaccagacagcaatgaagctagttccactcaaggatgcaaattacagacaaagtattgacaagcttaagtattcatcagtgactgacactcctcagatcgtccaggcaaaaattaacgctcaacagctcagccacgtcaactaccgagctgactatgagaaaaacaaactcaactatacgttgccacaagacgtcccccagctggtcaaggccaagactaacgctaagctcttcagtgaagttaaatacaaagagggctgggagaagactaaggggaagggatttgaaatgaagctagacgctatgtcattactagccgccaaggcctcaggagagctagcaagcaatattaagtacaaagaggaatacgagaaaacaaaaggcaaggcgatgggcacagcagactctaggctgctccacagcctgcagatcgcgaaaatgagttccgaggtggaatataaaaaaggctttgaagagtccaaaactagatttcatctaccaatggacatggtgaatattcgtcacgccaaaaaagctcagaccctggcctcagacctcgactatcgcaagaaactacatgaatatactgttctccccgaggacatgaagactcagtgggcaaaaaaagcttacggacttcagagtgaacttcaatataaagcagatctggcctggatgaaaggcgtcgggtggttaacagagggatctctaaatttggaacaggccaagaaagctggccaactggtgtccgagaagaactatcgccagagagttgacgagctgaaattcacaagcgtcacagactccagccagatggagcatgccaagaagtcccaggagcttcagagcggcgtggcctataaggctggcaacgaacagagcgtgcatcaatatacaatcagcaaggacgagcccctcttcctgcaggcacgcgccaatgcagccaatctcagcgagaaactgtataagtcctcttgggagaaccagaaagccaagggatttgagttaagactcgatagcctcaccttcttggcagctaaagctaagcgcgatctggcctccgaagtgaaatacaaggaggactacgagaggagtcgaggaaagctgattggcgccaaagacgtgcaaggtgattcacaaatgtctcactcactgcaaatgtccaagctccagagtgagctagagtataagaaaggtttcgaggatactaaaagtcagtgtcacgtttctctggacatggtgcacctcgtgcatgcaagaaaagctcagcaccttgctacagatgtaggctacaaaactgccgagcatcattttaccgccctcccaactgatatgaaggtggaatgggcgaagaaagcctacggactgcaaagcgataatcagtatagagctgatgtgaaatggatgaaaggcatgggatgggtagctactggctcactcaatgtcgaacaggccaagaaggcaggagaattgatctcagagaagaaatatagacaacatcctgacgccctgaaattcacatcaattaaagacacccccgagatggtgcaagctcgaatatcctatacccaggccgtggatagattgtatagggaacaaggcgaaaacatcaagcaccactataccccgactgctgacctcccagaagtgcttctcgctaagttaaatgccatgaacatctcggagacaaggtataaggaaagctggagcaagttaagagacggggggtataagctgcggttagatgcgctgccttttcaggccgcaaaagcttcgggcgagatcatttctgactacaagtacaaggaggcattcgagaagatgaagggccagatgctgggatcccgtagccttgaagacgacatcagtctggcccatagcgtttacgcaactagtctccagtctgacgtcaattacaaaaagggcttcgagcattcaaaggctcagttccatctgcccttggatatggccgctctcgtccacgccaaaaaagcgcagacactagcctcaaaccaggactataagcacccacttccacagtacacctcccttgcggaagatttgcggttatcctgcgccaagaaggctcacaagctgcagtcagagaacctgtacagatccgatcttaattttatgagaggtgtcgcttgcgttattcccgggactcttgagattgagggtcgcaagaaagcctccgagctcattagcgaatccaagtacaggcaacatcctcattctttcaagtacacagccgtgaccgatacacctaacctgctgcatgctaagttctctaaccagattaccaatgagcggttgtacaaagccgcgggagaagatgccaggcatgaatatacaatgacgctcggcctgccggagttcatcagggcaaagaccaatgcagcgaacttgagcgacgcccgatataaggaatcttggaggaatctgcgcgctcagggctacaagctcacgatcgaggccctgccttttcaagcggcccgggcatccggggacattgcttccgatttcctatatcggcacgattttgtgaaggaacgggggaaactgattgggccacagagcgtcagagacgacccacgtatacagcactgtagaaggatggggcaactgcaatcagaacttcaatatcgtcgtggcgccaccagttcccaagctcagtttcacttgcctatggatatggttcacctggtgcatgcaaagaatgcccaagctcttgctagtgatcatgactatcgcacccagtaccacaagttcaccgcgctgcctgaggacctgaagatggcttgggctaaaaaggctcacgcacttcagagtgagcttaggtataaatccgacctaatcggaatgaaaggaattggttggctggcccttcgctcccctcagatggagtccgcaaaaaaggcgggggaactgatttcagaaacgaaatatcgcaagaaacccgatagcattaagttcactacagtggtggactcacccgatctggtccacgccaaaaatagctacatgcactgtaacgagaggatgtatcgctccggagatgctgagagcctgcatcggtataccctcattcccgaccatccagatttcacacgggcccgtttgaatgctctgcatctgtccgacaaggtttaccgcaactcctgggagcagacacgggctggatcctatgacttcaggctcgacgcgatcccattccagacggcacgggcttccagagaaatcgcgtctgatttccgttacaaggaagcgttcctacgggaccgaggacttcagattgggtatagaagtgtcgatgatgatcccagaatgaagcactttctgaacgtgggtagactgcagtctgacaatgagtacaagaaagatttcgcgaaatcccgttcgcagttccacagttcgactgaccagccagggcttcttcaggccaagcgctcacaacagctcgccagtgatgtgcattaccggcagccattaccgcagccgacctgcgatccagagcagctcggcctccgacacgcgcagaaggcacaccagctgcagtccgacgttaaatataagtccgacttaaaccttacgagaggagtgggatggacaccacctgggtcctacaaagtggagatggctagacgtgccgccgagctcgcaaatgcaaggggcctgggcttgcagggcgcttacaggggggccgaagcagtcgaagctggagaccatcagtcgggcgaagtgaacccagatgccaccgagatcctgcatgttaagaagaagaaagccctgctgctgtag

SEQ ID NO: 125934 - DNA, 5088 bp, synthetic construct
  misc_feature 1..5088: note = Description of Artificial Sequence: Synthetic coding sequence
  source 1..5088: mol_type = other DNA
atgaatgtccagccatgttctcggtgcggctatggggtgtacccagctgagaaaatctcttgcatcgatcagatttggcataaggcctgctttcactgtgaagtgtgcaagatgatgctcagtgtaaacaactttgtgtcccaccaaaaaaaaccctactgtcacgcccacaatccaaaaaataacacctttaccagcgtctaccacacgccactgaacctcaacgtgcgaaccttcccagaagcgatttccggaattcatgaccaggaagatggcgaacagtgtaaatctgtgttccactgggatatgaagtccaaggacaaagagggagcacctaatcgacagcctcttgccaacgaacgggcttattggaccggatatggcgaggggaatgcctggtgccccggggcactgcctgatccagagatcgtcaggatggttgaggccaggaagtcactgggtgaagagtacacagaagactatgagcagccacgaggcaagggctcatttcccgccatgattacacctgcgtatcagcgcgctaaaaaggccaatcagctggcttctcaggttgaatataaacggggccatgacgagaggatatcacgcttcagtaccgtggtagacaccccagaactgcttcgctcgaaagcgggcgctcaactccagtcagatgttagatacaccgaagactatgaacaacaacgtggcaaaggcagctttcctgcaatgataacacccgcctatcagattgccaagagagccaacgaactggcttccgacgtcaggtatcaccaacagtaccagaaggagatgcgtgggatggccggccccgcgattggagcagaagggatcctgaccagagagtgtgctgaccaatatgggcaaggttatcccgaggagtacgaggaacataggggaaagggcagctttccagccatgatcacccctgcctaccagaacgccaagaaggcccacgagctggccagcgacatcaaatataggcaggattttaataaaatgaagggggcagcacattaccacagtctgcctgctcaagataacttggtgttgaagcaagctcagtctgttaacaagctggtgtctgaaaataaatacaaggagaattaccagaaccatatgcgcggcaggtacgagggagtgggcatggaccgccgtacccttcatgccatgaaggtcggatccttagcctccaatgtagcctacaaagccgattacaaacacgatattgtcgattataactatccagccactctgaccccttcttatcaaacagccatgaaactcgtgccgctcaaagacgccaattatagacagtctatagacaaattgaaatacagttccgtgactgatactcctcagatcgtgcaagccaaaataaatgctcagcagctgagtcacgttaactatcgggctgattatgagaaaaataaactgaattataccttgccgcaggatgttccgcagctggtcaaggctaaaaccaacgcgaaattgttctccgaggttaaatataaggaggggtgggagaaaaccaaagggaaaggattcgagatgaaactcgacgcgatgtccttgttggctgcgaaggcgagtggggagttggctagcaatatcaaatacaaagaagagtacgaaaaaaccaagggcaaggctatgggtacagcagactcccgattactgcacagtctacaaattgccaaaatgagctccgaggtggaatataaaaaaggcttcgaggaaagcaaaacacggtttcaccttccgatggatatggtgaacattaggcacgcaaaaaaagcccaaactctcgcttccgacttggactaccgaaaaaaactccacgagtacaccgtgttgcccgaagatatgaagacacagtgggctaagaaggcatacggactgcagagtgagctacaatacaaggccgacctggcatggatgaaaggagtcggttggctgacagaaggctccctgaatctggaacaggccaaaaaggctggccagctggtcagcgagaagaactaccgccagcgtgttgacgagcttaaatttacgtccgtgacagactcctctcagatggaacacgcgaaaaaatcacaggaactccagtccggtgttgcctataaggctgggaatgagcagtctgtccaccaatacactatcagtaaggacgagcccttattccttcaggctagagctaatgccgccaatctttccgagaaactctataaatctagctgggagaatcaaaaggccaaaggatttgaactgcggctggattcccttacttttctggccgccaaggctaagagggacctcgcaagtgaggttaagtataaagaggactatgaacggagcagggggaagctcatcggggccaaggacgtccagggagatagccagatgtcacactccctccaaatgtccaagcttcagtctgaattggagtacaagaagggtttcgaagacacgaaatcgcagtgtcatgtgagcctggacatggtccacttagtgcacgctcgcaaggcgcaacatctggcgacagacgtcggatataagaccgcagaacatcacttcacagcccttccaaccgatatgaaggtggagtgggcaaaaaaggcttatggactgcagagtgacaaccagtatcgcgctgatgtgaagtggatgaaggggatgggttgggtcgctacagggagtctcaacgtggaacaggcaaagaaggcaggggagctgatcagtgaaaagaagtacagacaacaccccgatgctctcaaatttactagcatcaaggacacccctgaaatggtccaggccagaattagctacacgcaggcagtggataggctgtacagggaacaaggagaaaacatcaaacatcattacactcctacggccgatctcccagaggtgctgctggcgaagctaaacgcaatgaacatttccgaaactcggtataaggagagttggagtaagcttagagacggcgggtataagctgcgtctggacgcactgccattccaggccgcgaaagccagcggagagattatatctgactataagtacaaggaggctttcgagaagatgaagggacagatgctggggagccgctctctggaggacgacataagtctcgcccacagcgtctatgctaccagtttacagtccgatgttaattacaagaaagggttcgaacactccaaagcccaatttcatctgcccttagatatggcagctctcgtccacgccaaaaaagctcagacacttgcctccaaccaggactataagcatccgctaccccagtacacttcactggctgaagatctgcggctgtcttgtgcaaagaaagcgcataagttgcagtccgagaacctctacaggagcgacctcaattttatgcggggggtggcctgtgttattccgggaactttagagattgagggccgaaagaaagctagcgaactgattagtgagagcaagtaccggcagcatcctcacagcttcaaatacacagcggtgacagatacacccaacctgcttcacgccaaattttctaaccagataacgaacgagagactatacaaagcggctggagaagacgctcgacacgaatatactatgactttgggactgcctgagtttatccgagctaagacaaatgctgctaatctttctgatgctcgttataaggaaagttggcgaaacttgcgcgctcaaggttacaagttgactatcgaagccctgcccttccaggccgcccgcgcatctggagacatagcgagcgactttttgtacaggcatgacttcgtgaaggaacggggtaagttgatcggaccacagagtgttcgcgacgacccacgcatccagcactgtcggcgaatgggccaactgcagagcgagctccagtatcgccgcggagccaccagctcacaggctcagttccatcttcctatggacatggtacacctggtgcacgcgaagaatgcccaggctctggcttccgatcacgactaccgcacccagtatcacaaatttaccgcactcccagaggacttgaagatggcttgggcaaaaaaagcccatgctctacagagcgagttgaggtacaagtccgatttgatcgggatgaaaggtattgggtggctcgcgctacgctctccccaaatggagtccgcaaaaaaagccggcgagttaatttctgagactaagtacaggaaaaaacctgatagtatcaaatttaccacagtggtggacagcccagatttagtacatgcgaaaaactcttatatgcactgcaacgagcggatgtatcgttccggcgatgcagaatcattgcatcgatacaccctgataccagaccatcctgatttcacaagggctagactgaacgcactccatctgtcggacaaagtgtatagaaacagctgggagcaaacacgggccgggtcctatgatttccgtctagatgcaatcccgttccagactgctcgagccagtcgagaaatagccagtgacttcagatataaggaggctttcctgagggatagggggctgcaaattggctatagatccgtggacgacgacccacggatgaagcactttctgaatgtgggtcggctgcaatccgacaatgagtacaagaaagatttcgctaagtctcgcagtcagtttcactcttcgaccgaccagccagggctcctacaggcaaaacgcagccagcagctggcctcagatgtccactaccgccagccactaccccaacccacatgtgatcccgaacagctagggctacgacacgcccagaaggcacaccagttgcaaagtgacgtaaaatacaagagcgatctcaatttaacccgtggagtaggatggacaccgcctggatcctacaaggtggaaatggctagaagggccgctgagttggctaatgcgcggggcttagggctccagggggcatatcgcggcgctgaagccgtggaagcaggggaccaccaaagtggggaggttaatccagacgcaaccgaaatcctgcatgtaaagaagaaaaaggcacttctgttatag

SEQ ID NO: 125935 - DNA, 2559 bp, synthetic construct
  misc_feature 1..2559: note = Description of Artificial Sequence: Synthetic coding sequence
  source 1..2559: mol_type = other DNA
atgcgcggcatggccggtcctgctatcggcgccgaggggatcctgacacgggagtgtgcggatcagtacggacaaggttatccagaggagtacgaggagcaccggggaaagggtagcttcccggctatgattaccccagcctaccagaatgctaaaaaagctcatgagcttgcatcagacataaagtaccgccaggattttaacaaaatgaagggggccgcacactatcactcgctgcctgcgcaggacaaccttgtccttaaacaggcacagagcgtcaacaagctcgttagcgaagtcgagtacaagaaagacttggagtcctcccgcggccactctattaactattgcgagacaccccagttccgcaatgtctccaaaattagtaaattcaccagtgataacaagtacaaagaaaactaccagaatcacatgcgggggaggtatgaaggcgtgggaatggaccggcgcaccttacatgcaatgaaggtgggtagtctggctagtaacgtggcttataaggccgattacaagcatgacatagtcgattataattatccagcaaccctgacaccgtcataccaaactgccatgaagcttgtccctcttaaagatgccaactatagacagagtattgacaagctcaagtattcaagcgtcacagacaccccacaaatcgtgcaggctaaaatcaacgctcaacaactgtctcacgttaactaccgcgcagattacgaaaaaaacaaactgaactacaccttaccgcaggacgtcccccagctcgtgaaagcaaagacaaacgccaagctgttcagtgaagttaagtacaaggaaggctgggagaaaacgaaaggcaaggggtttgaaatgaaactcgatgctatgtcgctcttggccgccaaggcatctggagaattggccagcaacgtgcatctcctgttgagcttaaagattaagtacaaagaagagtacgagaagaccaagggaaaggcaatgggtaccgccgactccaggttgctgcattcccttcaaattgccaagatgtcctcagaggtcgagtacaagaagggatttgaagaatccaagaccaggttccacctccccatggatatgggagtgggatggctcactgaaggctccctgaatctggaacaggctaagaaagcgggtcaactcgtctcagaaaaaaactatagacagcgcgttgatgagctcaaatttacatctgtgacggatagcagtcagatggagcacgccaagaagtcccaggaactgcagtctggagtggcttacaaggctggtaatgagcagtctgtacaccagtacaccatatccaaggatgaacctctcttcctgcaagcacgggcaaacgccgccaacctctcagagttcctgtacaggcacgatttcgttaaggagcgggggaagcttatcggtccgcaaagtgtcagggacgatccccgtatccagcactgcagacggatgggtcaactccaaagtgaacttcagtatcgacgcggcgcgacaagctcccaggctcaatttcatcttcctatggacatggtgcacctggtacacgctaagaacgctcaggcacttgcgtctgatcatgattacaggactcagtaccacaaattcacggcactaccggaggacctgaaaatggcatgggctaaaaaagctcacgcccttcagtccgagctcaggtacaagtccgatctgataggcatgaaaggaatcggctggcttgccctgagatcaccccagatggagagcgctaagaaagcaggcgaactgatttccgagactaaatacaggaaaaaacccgactcaatcaaattcacaacagttgttgactctcccgatttggtgcatgccaagaactcctacatgcactgcaatgagcggatgtaccggtccggtgacgcggagagccttcacagatataccttgatccccgaccatcccgatttcacaagggctcgcctaaatgctcttcatctctccgatttccggtataaggaagcttttcttagagatcgagggttacagattggataccgatccgtggatgatgacccaagaatgaaacatttcctcaatgttggacgacttcagtcagataatgaatacaagaaagattttgccaagagtcgctctcagtttcattcctctaccgaccagccaggactgctgcaggctaaacgctctcagcaactcgcgtccgacgttcactatcgacagcccctgcctcagcctacatgcgacccggaacagctggggttaaggcacgcacagaaggcccatcagcttcaatctgacgtgaagtacaagtccgacctgaacctgactagaggggttgggtggacgccccccggctcatacaaggtggagatggcgaggcgggcagctgagctggccaatgctaggggactcggacttcagggagcttatagaggcgcagaagctgtcgaggcaggagatcaccagagtggagaggtcaatcctgacgcaaccgagatcctgcatgtcaaaaaaaaaaaagccctcctcctgtag

SEQ ID NO: 125936 - DNA, 5217 bp, synthetic construct
  misc_feature 1..5217: note = Description of Artificial Sequence: Synthetic coding sequence
  source 1..5217: mol_type = other DNA
atgaacgtgcagccatgttcaagatgcgggtacggggtttaccccgctgagaagatatcctgcattgaccaaatttggcataaggcctgttttcattgcgaggtgtgcaagatgatgctgtcagtgaacaatttcgtttcacatcagaaaaagccttactgccacgcccacaatcccaaaaacaatacattcactagtgtttaccacacgccactgaatctgaatgtgaggaccttccctgaggctatctccggcatccacgatcaggaggatggagaacaatgcaagagcgtattccattgggatatgaagagcaaagataaggagggggctccaaatcgccagccactggcaaatgaacgcgcgtactggacaggatatggtgaaggcaacgcgtggtgtccaggagccttgcctgaccccgaaatagtgcggatggtggaggccagaaagtccctgggtgaggaatatacagaagactacgaacaaccacgcggcaagggttccttccctgcaatgattacaccagcctaccagagagccaagaaagcaaaccaactggcttctcaggtggagtacaagcgaggccatgatgagcggatctcacgcttctccaccgtggtcgatacccctgagctgttgagatccaaagctggggcacagctacagtctgatgtcaggtacaccgaagattacgagcagcagaggggtaagggctctttccccgctatgattacccctgcttaccagattgccaagcgcgccaacgaactcgcttcagacgtcagataccaccagcaataccagaaagaaatgaggggtatggcgggtcctgccatcggtgcagagggaatacttacaagagaatgtgcagatcagtacggccagggatatccagaggagtacgaggagcatcgcgggaaggggtcttttccggctatgataacccctgcttatcagaatgccaaaaaagctcacgagttagcctcagatatcaagtaccgccaggacttcaacaagatgaaaggagctgcccactatcactccctcccggctcaggacaacttagtcctaaagcaagcccagagcgtcaacaagttagtcagcgaggtggagtataagaaggatctggagtcctcccgcgggcactccataaactattgtgagacgccgcagttccgcaacgtttccaaaatcagcaaattcaccagtgacaataagtataaggaaaattatcagaatcatatgagagggcggtacgagggggtcggaatggacagaaggacattacatgccatgaaagtcggctctcttgcgagcaatgttgcctacaaggctgactataagcacgatattgtcgattataattaccctgccacactcaccccaagctaccagaccgcgatgaagctcgtacccctcaaggacgccaactacaggcagtccatcgacaaactcaagtattcttctgtgacagacaccccacagatagttcaggctaaaatcaacgcccaacagctgtctcacgtaaactatagggcggattacgaaaaaaataaactgaattatacactcccgcaggacgttccacaattagtcaaagctaaaactaacgccaaactgttttctgaggtgaagtataaggaagggtgggagaaaaccaaagggaaaggatttgaaatgaaacttgatgcaatgtcactgcttgctgccaaagcatcaggggagttagcaagtaatgtacacctgcttcttagcttgaagattaagtacaaagaagagtatgagaaaacaaagggaaaagcaatggggacagccgactctaggcttctgcacagcttacagatagccaaaatgagtagtgaggtggagtacaaaaaaggtttcgaagaaagcaaaacacggttccatctgcccatggacatggtcaatattcgccacgcaaagaaggcgcagaccctcgcctctgacctcgactaccggaagaagcttcatgaatacacggtactccctgaggacatgaaaactcagtgggccaagaaagcttacggtctccagtccgaactgcaatataaggctgacctggcttggatgaaaggcgtagggtggctgacagaaggcagcttgaacttggaacaagctaaaaaggctggccagctggtgtctgagaagaactataggcagcgcgtggacgagttgaagttcacgtctgtcaccgactctagccaaatggaacatgcgaaaaagagccaggaactgcagtccggcgtggcctataaagccggaaatgagcagagcgtccatcaatacactatctccaaagatgaacccctgtttcttcaggcacgggcaaatgccgccaatttgtctgagaaactgtacaagtcttcatgggagaatcagaaggcgaaggggttcgagctgagattagactctttgactttcctggccgctaaggctaagagagacttggcctccgaagtgaagtacaaggaagactatgaacgcagtagggggaagctgatcggtgcaaaagacgtgcagggagacagtcaaatgtctcactcccttcagatgagcaaattacaaagcgagttggaatacaagaagggttttgaggataccaaatctcaatgtcacgtgtccctggacatggtgcatctggtgcatgcgaggaaagcccagcacctggccaccgatgtaggttacaaaactgccgagcatcactttacagcactcccaaccgacatgaaggtcgaatgggccaaaaaggcttacggccttcagtcagacaaccagtacagggcagatgtgaaatggatgaaaggaatgggctgggtcgccaccggatctctcaatgtcgagcaagctaagaaagccggcgagttaatcagcgaaaaaaagtatagacagcaccccgatgcactgaagtttacgagtatcaaagatacaccagagatggttcaagcaagaatctcctatactcaagcggtggatcgcttgtacagggagcagggggagaatattaaacaccattacacccccactgccgatttgccagaagtgttactcgcaaaacttaacgctatgaacatttctgaaactcggtacaaagaatcctggagcaagcttcgcgacggcgggtataaactgcgactcgacgccctcccgttccaggccgccaaggcatccggagaaataatatcagattataagtacaaggaagcattcgagaagatgaaaggtcagatgctgggaagcaggtcattggaggacgatatcagtctcgcccactccgtttacgcaactagtctgcagagtgatgtaaattacaagaagggattcgagcactctaaagcccaattccacctgcctcttgacatggccgcattggtgcatgcgaagaaggcacagaccttggcttccaaccaagattataaacacccactcccccaatatacctcattggcagaggacctaaggttgagctgcgccaagaaagcccacaagttacagagcgagaacctgtaccgatctgatcttaacttcatgcgaggagtggcctgcgtcattcccggcaccctggaaatagagggacgcaaaaaagcctctgaactcatttctgagtcaaaatacagacagcacccacacagcttcaagtatactgccgtcactgatacacccaatctcctgcatgccaagttctccaatcagattaccaacgaacgattgtataaagcagctggggaagacgccagacatgagtataccatgactctcggactgcctgaatttatcagggccaagacaaacgcggccaacttgagcgacgctcgttacaaggagagctggcgaaatcttcgagcccaaggatataaactcacaattgaagccctcccctttcaggcagctcgggcgagcggggacattgcctccgactttctgtataggcatgatttcgtaaaggaaagagggaagttgatcgggccacagagcgtgagagatgacccaagaattcaacactgcagacggatgggacagttgcaatccgaattgcaatacaggcggggcgccacatctagccaggcgcagtttcacttgccaatggacatggtccacctggtgcacgctaagaacgctcaggccctagctagcgatcatgattatagaacccagtaccataaattcacagccttgccagaggatctgaaaatggcgtgggcaaagaaagcccatgcactccagtctgaattgaggtataagtccgacctcatcggaatgaaggggattggctggctcgctcttagatccccccagatggagagcgcaaaaaaggccggggaactgattagcgagaccaaatacaggaaaaagcccgatagtatcaagtttacaacggtggtggatagtcccgatttggttcatgcaaagaatagctatatgcattgcaatgagaggatgtaccgcagcggcgacgctgaaagcctacacagatacacgctaatccctgatcacccagacttcactcgtgctaggttaaatgcccttcatttgtccgacaaggtgtatcgaaatagttgggaacaaacgagagccggctcctacgactttcgattagacgccatccccttccagacagccagggcttcaagggaaatagctagcgattttcggtacaaggaagcgtttctcagggatcgcggattacagattggctataggtccgtagatgatgacccacgcatgaagcattttctgaacgtgggccgtctgcagtcagataatgaatacaagaaggacttcgcgaagtccagaagtcaattccatagctccaccgaccagcccggactgctgcaagccaaacgctcacagcagttagcaagtgatgtgcactaccggcagcctttgccacagccgacgtgtgatcctgaacagctaggattgcgacacgctcagaaagcccatcagttgcagtccgacgtgaaatacaagagcgatctgaacctgacacgcggtgtgggctggacgcccccgggcagttacaaagtggaaatggcccgcagagcagccgaactggctaacgctcgaggacttggacttcagggagcctaccgcggggccgaggccgtggaggctggagaccaccaatccggtgaagtgaacccagatgccactgagattctccatgttaagaagaaaaaggcgctgctcctgtag

SEQ ID NO: 125937 - DNA, 5112 bp, synthetic construct
  misc_feature 1..5112: note = Description of Artificial Sequence: Synthetic coding sequence
  source 1..5112: mol_type = other DNA
atgaatgttcagccttgttccaggtgtggctacggcgtgtaccctgccgaaaaaatatcatgcatcgaccagatctggcacaaagcctgttttcactgcgaagtgtgcaagatgatgctatcagtgaacaactttgtaagccaccaaaaaaaaccttactgtcacgcccacaatcccaagaataacacgttcacttccgtctaccacacccctctgaatctaaacgtccgcacctttccagaggccatctcaggcatccacgatcaggaggatggtgaacagtgcaaatccgtctttcattgggacatgaagtcaaaagataaggagggtgcccctaacagacagccacttgctaacgagagagcctattggacaggctacggagagggcaacgcttggtgtcccggcgcactgcccgacccagaaatcgtcaggatggtagaagcgcggaagagcttaggagaggaatatactgaggactatgagcaaccaaggggcaaagggtcttttcctgcgatgattacaccagcttatcagcgggccaagaaggctaatcagctcgccagccaggttgagtataagcgcggtcatgacgagcgtatctcacgcttctcaactgtagtggacacgccagagctgttgcggagcaaggcaggtgcgcagctgcagtctgacgtcagatacacggaagactatgaacagcagagaggaaagggttctttccccgcaatgataacacccgcataccaaatagcaaagcgcgcaaatgaactggcctccgacgtgagataccaccagcagtaccaaaaggaaatgcgcgggatggcgggacccgctattggcgctgaaggaatcctaacaagggagtgcgccgaccagtatggccagggatatccagaggaatatgaggaacaccgcgggaagggttcattcccggcgatgattacccctgcatatcagaacgctaaaaaggcccacgagttggcgagtgacattaagtacagacaggacttcaacaagatgaagggcgcggcacactatcattcattacccgctcaagacaatctcgtgctaaagcaggcgcagagcgtcaacaagctcgtttccgaaaataaatacaaggagaactaccagaaccatatgcggggtcgttatgagggggtcggcatggatcggaggacccttcacgcaatgaaggtgggcagcctggcctccaacgtggcctacaaggcagattataaacatgatattgtcgattacaattacccagctaccctgacacctagttaccagactgcgatgaagctcgtgcccctgaaagacgccaactatcgtcagtcgatcgataaattgaagtattcatccgtgacagataccccacagatagtgcaggccaagataaacgcccagcagctcagccatgtgaattaccgggccgactatgagaagaacaagctgaactatacactgccccaggacgtgcctcaactcgtgaaagctaagactaacgctaaactatttagcgaggtcaaatacaaagaaggatgggagaagacaaagggaaaaggcttcgaaatgaagctggatgctatgagtctgctcgccgccaaagccagcggcgagctggctagtaatgtacacttgttattgtcactcaaaatcaaatataaagaggagtatgaaaagaccaaaggcaaagctatggggacagccgatagtaggctgcttcactctctgcagattgcaaaaatgtcatccgaggtggagtacaagaagggatttgaagaatccaagacaagatttcacctgcctatggatatggtgaatattcgccacgccaaaaaggcacagacgctggcctcagacctggattacagaaagaagctccatgagtatacagtcctgcccgaggatatgaaaacacaatgggcaaagaaggcttatgggttgcaatcagagcttcagtacaaggccgatctggcctggatgaagggggtggggtggctgaccgaagggtcacttaatctggagcaggctaaaaaggccggacagctcgtatccgaaaaaaactaccgccaacgcgtggacgaactgaagtttaccagtgtgactgactcatctcaaatggaacacgcaaagaaatcgcaagagttacagtccggtgtggcctataaagctggaaatgaacaaagtgtacatcagtataccattagcaaagacgagccactgtttctgcaggccagagccaacgctgcgaatctctctgagaaactttacaaatcgagttgggagaatcagaaagccaagggatttgagcttcggctcgactcgctaacttttcttgctgctaaggcaaagcgcgacttggcgtcggaggtgaaatataaggaagattacgaacgctcccggggaaaattgattggcgccaaggacgtgcaaggagactctcaaatgtctcactctctgcagatgtctaagttgcaaagcgagctggagtacaagaaaggctttgaggataccaaatcacagtgtcacgtttctttagacatggtgcatctggtacacgcacggaaggcgcagcaccttgccaccgacgtgggatataagactgccgagcaccatttcaccgctctgccaacagacatgaaggtggagtgggctaaaaaggcatacggcctgcagagcgacaaccagtaccgtgccgatgtgaaatggatgaaaggcatgggatgggttgccaccgggagccttaacgtggagcaagccaaaaaggccggtgagcttatcagcgaaaaaaaataccggcaacaccctgacgcgctgaagttcacaagcatcaaagacactccagagatggtgcaagctagaatctcctatactcaggcggtggaccgtctgtaccgggaacagggtgaaaacatcaagcaccattatactcccaccgccgatctgcccgaggttctcctggccaagctgaacgcaatgaatattagcgaaactaggtataaggaatcatggtccaaactacgagacggcgggtacaagctgaggctcgatgcccttccgtttcaagctgcaaaagcctccggggagattatttcagactacaagtacaaggaggccttcgagaagatgaaaggccaaatgttgggctcacgtagtcttgaggacgatatctccttggcccacagtgtgtacgctacatccctacaatcggatgtgaattacaagaaaggctttgaacattcgaaggcccagttccacttgcccctcgacatggctgcgctcgtccatgccaagaaagcccagactctagcgagcaaccaggactataaacaccctctgccgcagtatacctcactggccgaggacctacggctgtcctgcgctaagaaggcccacaagcttcagagtgagaacctgtaccgtagcgacctgaacttcatgcgaggggtcgcatgcgtcattccggggaccctggagatcgagggaaggaagaaggccagcgagttaatctctgagagcaaatacagacagcatcctcactctttcaagtataccgctgtgaccgacacccctaaccttctgcatgctaagttttcgaatcaaataactaacgaaagattgtataaagccgctggagaggacgccaggcatgaatacaccatgacattagggcttccagagtttattcgcgccaagaccaacgcagcaaacttgagtgatgcgcgatataaagaatcgtggcggaacctacgggctcaggggtataagttaactatcgaggcacttcctttccaggctgcaagggcttcaggagacatagcatctgactttctgtaccgccatgatttcgtgaaagaacgcgggaaactcatagggccccaatcagtgagagatgacccaaggatacagcattgtaggagaatgggccaactgcagtctgagttacagtacagacgtggggccacatcatctcaggcccagttccacctgccgatggacatggttcacctggtccacgcaaagaacgctcaggcgctggcaagcgaccacgactaccggactcagtaccacaagttcactgcactgccggaagatctgaaaatggcatgggccaaaaaagcccacgccttacaaagtgagctgcgttacaaaagcgacctcattggcatgaagggaatcggttggttggccttacgatcgccacagatggagagcgccaagaaggctggggaacttattagcgagactaagtaccgaaagaaaccagatagtataaaatttactaccgtcgtcgactcccccgatttggtgcacgctaaaaattcctatatgcattgtaatgagcggatgtataggtccggagacgcagaaagtctacatcgctacacactgatccccgatcacccagattttactagagcacgacttaatgcccttcatttgagcgataaggtctatcggaactcatgggagcaaacgcgggccgggtcttacgacttccggctggacgcaattccttttcagactgccagagcctcaagggaaatcgcaagcgatttccgctacaaggaagccttcttgagggaccgcggcctgcaaattggataccggagtgttgacgacgacccacggatgaagcacttccttaacgttggacgtctgcagtccgacaatgagtacaagaaagattttgccaagagtcgctctcaattccactcctcaacagaccaacccggtctgcttcaggcaaaaaggagccagcagttggcttcagacgtccactacagacagcccttaccgcagcccacctgtgatccggagcaactaggtctacgccatgcacaaaaggctcaccagttgcagtcagacgtcaagtacaaatcagatttaaatcttactcgaggagtaggatggacaccacccggatcgtataaagttgagatggctagaagggcagccgagttggctaacgcacgcggcctgggactacagggggcctataggggcgccgaagcagtggaagctggcgatcaccagagcggagaagtgaatcccgacgcaactgagatccttcacgtgaaaaaaaagaaggcattactgctgtag

SEQ ID NO: 125938 - DNA, 828 bp, synthetic construct
  misc_feature 1..828: note = Description of Artificial Sequence: Synthetic coding sequence
  source 1..828: mol_type = other DNA
atggcgactgaactagaatacgaaagcgtgttatgcgtcaagcccgacgtgagcgtgtatcgtattcctccacgggcgagcaaccgcggatatcgggcctccgattggaagttagaccagcctgattggacaggaaggctgaggatcacaagcaagggaaaaacagcctatataaaactggaagataaagtgagtggagagttattcgcccaggcgccggtagagcagtaccccggcatcgctgtggaaactgtgaccgattcctctcgttacttcgttattcgcatccaggatggcaccggtaggagcgccttcattggaattgggttcaccgataggggcgatgcctttgactttaatgtgtcactgcaagatcacttcaaatgggtgaagcaggaaagtgagattagtaaagaaagccaggagatggatgccaggcccaagctcgaccttggctttaaagaagggcagacaattaaactgtgcatcggtaacatcaccaataagaaaggcggcgccagcaaaccccgtacggcccgcggaggaggtttgtctttactcccacccccaccgggaggcaaagttaccatccctccccctagttcgtccgttgcgatttccaaccacgtcacaccaccccccatccccaaatcaaatcatggggggagtgacgccgatattctgctggatctggactcccctgcgcctgtgactacccccgctccaacaccagtgtcggtttccaatgacctatggggagacttctctactgcctcttccagtgtgcctaatcaggccccgcagccctccaattgggttcaattctag

SEQ ID NO: 125939 - DNA, 402 bp, synthetic construct
  misc_feature 1..402: note = Description of Artificial Sequence: Synthetic coding sequence
  source 1..402: mol_type = other DNA
atggatgcacgcccaaaacttgatctcggctttaaagaaggacagaccattaagctgtgtatcggcaacattactaacaaaaaagggggggcaagcaagcccaggacggccaggggggggggactctcacttttgcctccgccacccggcggtaaagtcacaatcccacctccttcatcttctgtggcaatcagcaaccatgtgaccccaccacctatccccaaatcgaaccatggggggagcgatgctgatatcctgttggacctggacagccccgcacccgtgaccaccccggccccaacaccagtttccgtttccaatgatctgtggggagatttcagtactgcttccagcagcgtgcctaatcaggcaccccagccatcgaactgggtacagttctag

SEQ ID NO: 125940 - DNA, 828 bp, synthetic construct
  misc_feature 1..828: note = Description of Artificial Sequence: Synthetic coding sequence
  source 1..828: mol_type = other DNA
atggccactgagttggaatacgaatcggtgctctgcgtgaaaccggacgtatctgtgtacaggatcccaccccgggccagtaacagaggataccgggccagtgattggaagctagaccagcccgactggacaggacgcctgcgcattacatccaaaggaaagacggcatacatcaaactcgaggacaaagttagtggggagctgttcgcacaagccccggtggaacagtacccaggtatcgccgtggaaaccgtgacagactctagtcgttactttgttattagaatccaagacggaaccggtagaagtgccttcatcggcatcgggttcacggacaggggcgatgccttcgacttcaacgtatccctgcaagaccactttaaatgggtcaaacaagagtcggaaatttccaaagaatctcaagagatggacgcccgaccgaagctggatctcggctttaaagaagggcaaactattaagctgtgcattggaaatatcactaacaagaaaggaggcgcatctaagcccagaacagcacgtggcggcggcctgtcacttctgccacccccgcccggcgggaaagtgaccatcccacccccatcaagttcggtcgccattagtaatcacgtgactcccccaccaatcccgaagtctaaccatgggggaagcgatgccgacatcttattggacctcgattctccagctccagtgacgactcccgcccctacaccagtgtctgtatccaacgatctttggggagacttcagtactgcttcttcctccgtgcccaatcaggcaccacagccaagtaattgggtgcaattctag

SEQ ID NO: 125941 - DNA, 558 bp, synthetic construct
  misc_feature 1..558: note = Description of Artificial Sequence: Synthetic coding sequence
  source 1..558: mol_type = other DNA
atggaggaatcgggctacgagagcgttctgtgtgttaaaccagacgtccatgtctaccgcatacccccccgggcaaccaacagaggctaccgagctgcagagtggcaactggatcaacccagctggagcgggcgattgagaattacagcgaaagggcagatggcttatattaaactggaggaccgtacttccggtgaactttttgcccaggcccccgttgaccagttccccggcactgccgtagagtccgtcacggacagctctcgctacttcgtgattcgcattgaggacggtaatggtagacgggcattcattggtatcggcttcggggatagaggcgacgcttttgactttaatgttgccctgcaagatcacttcaagtgggtgaagcagcagtgtgagtttgcaaaacaggcacagaatccagaccagggacctaagcttgatttgggctttaaagaaggacaaacaatcaagctgaacattgcagttggtctaggaaacattaataggcgctgttcctgtacattagctaccgcccaatcttgccactgctag

SEQ ID NO: 125942 - DNA, 792 bp, synthetic construct
  misc_feature 1..792: note = Description of Artificial Sequence: Synthetic coding sequence
  source 1..792: mol_type = other DNA
atggaagagtctggttacgagtccgtactctgtgtgaaacccgatgttcacgtgtacagaattccccccagggcaactaacagaggctatcgggcggccgagtggcagctcgatcagccatcctggagcgggcgcctcagaattacagccaagggacaaatggcatacatcaaactggaagataggaccagcggggaactgttcgctcaggctccagttgaccagttcccaggaactgcagtagaatctgtcaccgactcctcgaggtactttgtgatccgaatcgaagatggaaatggccgcagggcattcatcggaattggcttcggagaccgcggtgacgcatttgattttaacgtcgcccttcaggaccactttaagtgggtcaaacagcaatgtgaatttgcaaagcaagcacagaacccagatcaaggtcctaagctcgacctggggttcaaagaggggcagaccattaagctaaacatcgcaaacatgaagaaaaaggagggagccgctggcaatccgagagtcaggccagcctccactgggggcctgtctctgcttcctccaccgcctggtggaaaaacctccaccctgattcctccacctggagaacagcttgcggttggagggtccctggtgcaaccagccgtcgcaccttcctccggaggagcaccagtaccttggccccagcccaacccagctaccgcagacatttggggcgactttaccaaaagcaccggttccaccagcagccagacccaacccggtaccggctgggtgcagttctag

SEQ ID NO: 125943 - DNA, 792 bp, synthetic construct
  misc_feature 1..792: note = Description of Artificial Sequence: Synthetic coding sequence
  source 1..792: mol_type = other DNA
atggaagaatccgggtatgagagcgtcttgtgcgttaagcctgatgtgcacgtgtacaggatccctccccgcgcaaccaatagaggttaccgcgctgcggaatggcagctggatcagccaagttggagcgggagactgcgcataactgccaaaggacagatggcctatatcaaactggaggacaggactagtggcgagctttttgcccaggcgcccgtggatcagtttcccggcacggccgtggaaagtgtgaccgatagctctcgttattttgtgattcggatagaggatggcaatggacgcagggcatttataggcatcggatttggcgaccggggcgatgctttcgatttcaatgtggcgctgcaggatcacttcaaatgggtgaagcagcagtgcgagttcgctaagcaagctcaaaatcccgaccagggcccgaagctggaccttgggttcaaagaggggcagactattaaactgaacatcgctaatatgaaaaagaaggagggcgcagcaggtaacccaagagtgcgtcctgcttctaccggcgggttgtccctgctcccacccccaccaggaggcaagacaagtactctcataccaccacccggagagcaactggccgtggggggaagtctggtgcagcccgcggtggcaccaagtagtggcggcgctccagttccatggcctcagcctaatccagcaacagctgatatttggggcgacttcacaaagagtactgggtcaacttcatcccagactcagcctggaaccgggtgggtgcagttttag

SEQ ID NO: 125944 - DNA, 822 bp, synthetic construct
  misc_feature 1..822: note = Description of Artificial Sequence: Synthetic coding sequence
  source 1..822: mol_type = other DNA
atggaggaaagtggatacgagtctgtgctctgcgttaaacccgatgttcatgtctaccgcatcccccctcgggccacgaacaggggctatagagcggctgagtggcaacttgatcagcctagttggtctggtcggctcagaattactgccaaagggcagatggcatacattaaattagaggacaggaccagcggcgaactgtttgctcaggcccctgtggatcagtttccgggcaccgctgtggagagcgtgacagatagtagtagatacttcgtgattcgaatcgaggacggaaatggtagacgggctttcatcgggatcggtttcggcgacaggggcgatgctttcgatttcaatgtagctctgcaggatcattttaagtgggttaagcagcagtgtgaattcgctaagcaggcccaaaacccggatcaagggcctaagctggatcttggatttaaggaaggccaaacaatcaaacttaacattgcaaatatgaaaaagaaggaaggtgccgccggtaacccccgagtgcggcctgcctctaccggggggctcagcttacttccaccaccaccagggggcaagacatcaactcttataccacctcctggggagcaattagccgttggcggcagtctcgtccaacctgccgtcgcaccatcatccgaccagctgcccgcccgaccaagccaggcacaggccggatctagctcggacctctcaacagtcttcccacacgtcacaagcggaaaggccctgccccacctgggccagcgcaaggaggacgaggccctgctgagctggccggtcttcggtgcctag

SEQ ID NO: 125945 - DNA, 714 bp, synthetic construct
  misc_feature 1..714: note = Description of Artificial Sequence: Synthetic coding sequence
  source 1..714: mol_type = other DNA
atggaagagagcggggcggccgagtggcagctggaccagccgagctggagtggtcgcctgcggatcacagcgaaaggtcagatggcttacatcaagctagaagacaggacctccggagagttgtttgcccaagcgccggttgaccagtttccaggaacagccgtggaaagtgtcacggatagttcaaggtatttcgttatccggatcgaggacgggaacggcagacgagcatttattgggattgggttcggtgaccggggagatgctttcgacttcaatgtggcgttacaggaccattttaaatgggtgaaacagcaatgtgaatttgccaaacaagcgcagaatcctgatcagggaccgaagctggatcttggcttcaaagaaggacaaacaattaagctgaacatagccaacatgaagaaaaaggaaggcgcagcaggaaaccctagggttcgtcccgcttccactgggggcctgtctctgctccctccccctccaggaggcaaaacgtctactctcatacccccgccaggcgaacaactcgcggttggaggatctctcgtccagccagccgtagccccctccagcgggggagccccggtgccctggccacagcccaaccctgccaccgccgacatctggggcgattttaccaaatccaccggtagcacctcatcccagacacagcccggcactgggtgggttcaattctag

SEQ ID NO: 125946 - DNA, 792 bp, synthetic construct
  misc_feature 1..792: note = Description of Artificial Sequence: Synthetic coding sequence
  source 1..792: mol_type = other DNA
atggaagagagcgggtatgagagcgttctgtgcgtgaagcccgatgtgcacgtgtataggattccccctagggccaccaacaggggataccgggcagcggagtggcagctggaccagccctcctggtccggtcgcctccggattactgccaaggggcaaatggcatacatcaaattggaagacagaactagcggggagttatttgcccaggcacctgttgaccagtttccagggacagccgtggaatcagtgactgattcctctcgttatttcgtaatcaggattgaggacggcaatggccgtcgagccttcataggaattggcttcggagacaggggtgatgcctttgatttcaacgtggccttacaagatcatttcaagtgggttaagcagcagtgcgaatttgcgaaacaggcccagaaccctgaccagggacccaagctcgaccttggcttcaaggaagggcaaacgatcaaactgaacattgctaacatgaagaagaaagaaggcgccgccgggaatcctcgggtaagaccagccagtacaggaggcctgtcactgttgccgccccctccaggtggtaaaacctcgactctgattcctccaccgggcgaacagctggcagttggcgggtctctcgtgcagccagcagtggctccatcgtcaggtggagcaccagtcccttggccacaaccaaatccagccacggctgatatctggggggactttacaaagtctaccgggtccacatcctctcagacccagcctggcacagggtgggtgcaattctag

SEQ ID NO: 125947 - DNA, 966 bp, synthetic construct
  misc_feature 1..966: note = Description of Artificial Sequence: Synthetic coding sequence
  source 1..966: mol_type = other DNA
atgagcgagcagtctaaagatctctctgatccaaacttcgccgcagaagcacctaatagtgaggtgcatagtagtcccggcgttagcgagggtgttccaccctctgcgacgttagcagaacctcaaagccccccacttggtcctaccgccgctccccaggctgcgcccccaccccaagcacccaacgacgagggagatcctaaggctcttcagcaggctgccgaggagggacgggcccaccaggcccctagcgccgcacagcccggtcccgccccgcctgcccccgcccaattggttcagaaggcgcatgaacttatgtggtatgttctggtgaaggaccagaaaaagatgatcatatggttccccgacatggtaaaggacgtcattggcagttacaaaaagtggtgtcggtctatcttgcggcggaccagcctcatattggccagagtgtttggactgcacttacgcctaaccagcctgcataccatggaattcgctctggtgaaggccctggagcccgaagaacttgacagagtcgctctgtcaaataggatgccaatgacgggcctgctccttatgattctgtctctgatctacgtcaagggcaggggagctcgggaaagcgccgtatggaatgtacttagaattttgggactacgcccttggaaaaagcactctacattcggagatgtcagaaagctcatcacagaggaattcgtgcaaatgaattacctcaagtatcagcgagttccatacgtcgaaccccctgagtacgaatttttttggggcagtcgagcgtcacgcgagattaccaagatgcagattatggaatttcttgctagggtttttaagaaagacccgcaagcatggcccagtcgttatagagaagcacttgaggaagcaagagccctgcgggaggcaaatcccactgcacactatccccgctccagtgtgagcgaggattag

SEQ ID NO: 125948 - DNA, 915 bp, synthetic construct
  misc_feature 1..915: note = Description of Artificial Sequence: Synthetic coding sequence
  source 1..915: mol_type = other DNA
atgcttcaaaagcctcgcaatcgagggcgtagcggcggccaggcagagcgtgaccgggactggagccattctgggaatcctggggcctccagagccggggaagatgcaagagtcctgcgagacggtttcgctgaggaagcaccttccacgagccggggccctggcgggtcccaaggtagccaggggccgtccccccagggcgctagacgggcccaggccgctcctgccgtgggcccgcgctcacaaaaacagctcgagttaaaagtgtcggagctggtgcagtttctactgattaaggaccagaagaagattcctatcaagcgggccgatattctgaaacatgttatcggggactataaggacatcttccccgatctgtttaaacgggctgcagagcgcttgcagtacgttttcggctacaagctcgtcgagcttgagcctaagtccaatacctatatcctgatcaatactctcgagccagtagaagaagatgcggagatgaggggagatcagggcacacctaccaccggtctgctgatgatcgtgctcggattaatcttcatgaaaggcaatacaatcaaggaaacggaggcatgggatttcctacggcgactcggcgtgtacccaacaaagaaacacttgatttttggggacccaaagaaactcatcacagaagatttcgtccgacagcggtatttggagtaccggcgaattccacacacagacccagtagactatgagtttcagtgggggccaaggaccaatttggaaacatcaaagatgaaagtactaaaatttgtcgcaaaggttcacaatcaagatcctaaggattggcctgctcagtattgtgaggccttggccgatgaggaaaacagggctagaccacaacctagtggcccagccccatccagttag

SEQ ID NO: 125949 - DNA, 666 bp, synthetic construct
  misc_feature 1..666: note = Description of Artificial Sequence: Synthetic coding sequence
  source 1..666: mol_type = other DNA
atggctctcgcacttgccgctctggccgccgtagagccagcctgtggcagcaggtaccagcagctgcagaatgaggaagagtcaggcgagcccgaacaagctgccggcgacgctccacctccctactcgagcataagcgctgagtcagctgcatacttcgactataaggatgaaagcggttttccaaagccacccagctacaatgtcgcaactactctgccttcctacgatgaggccgaaaggactaaagccgaggccaccattccattagtcccaggacgggatgaagattttgttgggcgcgatgatttcgatgacgctgaccagctcagaatcgggaacgatggtatcttcatgctgacattcttcatggcattcctgttcaattggattggattcttcctctccttctgcctgacaacttcagccgccgggcgctacggagccattagtggatttggcctgagtctgatcaagtggatactgatcgtgcgctttagcacgtactttccagggtattttgacggtcaatattggctgtggtgggtctttctggtactgggcttcctgctgttcctgcggggcttcataaattatgcaaaggtgcgtaagatgcccgagacattctccaatttacccaggactcgagtgctgtttatatactag

SEQ ID NO: 125950 - DNA, 462 bp, synthetic construct
  misc_feature 1..462: note = Description of Artificial Sequence: Synthetic coding sequence
  source 1..462: mol_type = other DNA
atggcacttgccctcgccgccctggctgcggttgagccagcttgcggctctcggtatcagcagcttcagaatgaagaagaatcaggtgaacctgagcaagcagccggcgacgcccctcctccttacagctctataagcgcagaatcagctgcctactttgattataaagacgagagcggctttcctaagcccccatcatacaacgttgctactacactgccttcttgcttttatgatataagtcacctcatctttttcatcttctatcttcgcaacatgaagaagaaatacacgaagatggtaaagcttttgcacaagtcggcaccagcccagtccgacagttgtaaatgccccttcatttgttgcgtgtgtataagcaggatcagtataggctccagatcgggataccagtatatcatgcatcgctcagtgggctgtctaaaggccaagcaggagaattag

SEQ ID NO: 125951 - DNA, 3138 bp, synthetic construct
  misc_feature 1..3138: note = Description of Artificial Sequence: Synthetic coding sequence
  source 1..3138: mol_type = other DNA
atgcaccagaaaaccccagagatctattccgtggaactgtctgggactaaagacattgtaaaaacggataaaggggacggaaaggagaaataccgggggcttaagaacaactgcttagagctgaagaagaagaatcataaggaggaatttcaaaaggaattgcacttagatgatcataagctatcaaaccgagaactggaggaaaagtatgggaccgatatcattatgggcctgagcagcacccgggcagcagaattgctggctagggatgggcctaactcactgaccccgcccaagcaaacaccagagatcgtgaaattcctgaagcagatggtggggggatttagcatcctcctgtgggtgggggcctttctgtgttggatcgcctacgggatccagtattccagcgacaaatccgcttccttgaataatgtgtacctgggctgcgtgctcggcttggttgtcatcctgacggggattttcgcctattatcaggaagctaaaagcaccaacatcatgagcagctttaacaagatgataccccaacaggccctggtaatcagggacagtgaaaaaaagaccatcccaagcgagcagctagtggtaggagatatcgtcgaggtgaagggcggtgaccaaatacccgcagacatccgtgttctgtcctcacagggctgtcgggtggataattctagcctgaccggagagagcgagcctcaacctaggtcctctgaattcacacacgaaaaccccctggagacaaagaacatctgtttttatagtaccacctgtctagaagcaagcacctcacctgtgggcactgtgaccgggatggtgatcaatacaggcgatcgcacaattatagggcatattgcctcccttgcatccggggttggaaacgagaagaccccgattgccattgagatagaacacttcgttcatatagttgccggcgtcgccgtctcaatcggcatccttttttttattattgcggtatctctaaagtaccaggtgctggatagtataatattcctcattggaataatcgttgccaacgtgccagagggcctcctggccactgtaactgtgaccttatctctgaccgccaagcggatggctaagaagaactgtttagtgaagaatctggaagctgtggaaaccttaggaagcacctcgatcatttgctcggacaaaacaggcacactgacacagaaccgtatgaccgttgcacacctgtggttcgacaatcagatttttgtggcagatacaagtgaggaccatagcaaccaggtcttcgatcagtccagccgcacctgggctagcttgtcaaaaatcattacgttgtgcaaccgggctgagttcaaaccaggtcaagagaacgtgcctataatgaagaaagcagtaataggagatgcctccgagactgccctcctgaaatttagcgaggtaatactaggagacgtgatggaaattaggaaacggaatcggaaagtagcagagattccctttaattctactaataagtttcagctttcgatccatgaaatggacgaccctcatgggaaaagatttctgatggtgatgaagggggcgcctgaacgaatcctcgaaaagtgttccacgatcatgatcaacggggaggagcaccccctagacaagtccacagcaaagacctttcacactgcctatatggagttgggcgggttgggtgagagggtcttgggcttctgccacctgtaccttccagcagatgagttcccagaaacttactccttcgacattgacgcaatgaatttcccaacttcgaatctatgctttgtcggcctgttaagtatgatcgacccccctaggtcgacggttccagatgccgtcaccaagtgtcggagcgcaggcatcaaagtgatcatggttaccggggaccaccccattacagccaaagctatcgccaaaagcgtcggcatcatttcagcaaacagcgagactgtcgaggatatagcccacaggttgaacattgccgttgaacaggtgaacaaaagagatgccaaggccgcagtcgtgaccggcatggagttgaaagatatgagctctgagcagctggacgaaatactggcgaactatcaggagatcgtgttcgcaaggacctccccccagcaaaagcttatcatcgtggagggatgccagaggcaagatgcagttgtggctgtgacaggcgacggggtcaacgatagccccgcgctgaagaaggcggacattggcattgctatggggatcgccggaagtgatgctgctaaaaacgccgcagatatggtcctgctggacgataacttcgccagtatagtgacaggggtcgaagaaggcagactgatctttgacaaccttaagaaaaccatcgcatattccctgaccaagaacattgctgagttatgccccttcctgatctatattatcgttggtctgccactacccatcgggactattacgatcctttttattgacttgggcacagacatcatccctagtatagccttagcttatgagaaggccgagagtgacatcatgaaccgtaagcccagacataagaacaaagaccgattggtcaaccagccccttgctgtgtactcctaccttcacattggtttaatgcaagccctcggcgcctttctggtgtattttacagtgtacgcacaggaagggtttcttcccagaacactgatcaacctgagagtggagtgggagaaggattacgtgaacgacctcaaggactcttacggccaggaatggactcgataccagagagaatatctggaatggacgggatacacagctttctttgtgggtattctagtgcagcagatcgccgatctgatcatcagaaagacccggcgaaacagtatttttcagcaagggctcttccggaataaagttatatgggtcggaataacgtctcagattattattggactcattctgtcttacgggctgggatccgtgaccgcgctgagcttcactatgcttagagcccagtattggttcgtggccgtgcctcacgccattctgatctgggtgtacgatgaggtacggaagctttttatacggctgtatcccggtagctggtgggataaaaacatgtactactag

SEQ ID NO: 125952 - DNA, 1605 bp, synthetic construct
  misc_feature 1..1605: note = Description of Artificial Sequence: Synthetic coding sequence
  source 1..1605: mol_type = other DNA
atggcacaacttggcaagctgctcaaggagcagaaatacgaccggcagctgcggctttggggagaccatgggcaagaggccctggagtccgcccacgtgtgcctgattaatgccaccgcgaccgggactgagattctaaagaatctggtacttcccggcatcggaagcttcaccattatagatggcaaccaggtcagtggcgaggacgcaggtaataatttcttcttacagcgctcttctataggcaaaaaccgggctgaagctgccatggagtttctccaggagctcaacagcgacgtgtctggctccttcgtggaggaaagccccgaaaatcttttggacaacgaccctagctttttctgtagattcaccgtggttgtcgctactcagctgccggaatccacgagcctccgcttggcagatgtactgtggaactctcagattcccctgctcatctgccggacctacggcctcgtgggttatatgcgcataattatcaaggaacatcctgtgatcgaatcccaccccgacaatgcactcgaagacctcaggttggacaagcctttcccggagctgagagagcactttcaaagctacgatttagatcatatggagaaaaaagaccatagtcacaccccttggattgtgatcattgccaagtatcttgctcaatggtacagcgagacaaacggacgcattcccaagacgtataaagaaaaagaggatttccgggatctgatccgccagggaattctcaagaacgagaacggggcccccgaagatgaagaaaatttcgaagaggctatcaagaacgtaaatactgctctgaacacgacacaaatacccagctcaatagaggacattttcaatgatgacaggtgtatcaatattactaagcaaacgccctcgttttggattcttgcgcgcgcccttaaagaattcgtggcaaaagagggccagggaaatctgcctgttcgaggcactatcccagatatgatcgccgactctgggaaatacataaagctgcagaatgtgtaccgcgagaaagccaagaaagacgcagctgcggtggggaatcacgtggccaagttgctccagtccattgggcaagcccctgaaagtattagtgaaaaagagctgaagttgctatgttctaatagtgccttcctaagggtagtgcggtgtcgatcactggccgaggagtatggcctcgacacaatcaacaaggacgaaatcatcagtagcatggacaaccctgacaacgaaatcgtgctgtatttaatgttacgcgccgtggatcgcttccacaaacagcaggggagatacccaggcgtgagcaattatcaggtggaggaagatattggtaaactgaagagttgcctgacaggcttcctacaggagtacggcctgagtgtaatggtaaaggatgattatgtccacgagttctgtaggtatggggctgctgagccgcacaccattgccgcttttctggggggagcggcagcacaggaagtcatcaaaattatcaccaagcagttcgtgatatttaacaatacatacatatatagcggtatgtcccagacatctgccacatttcagctgtag

SEQ ID NO: 125953 - DNA, 1587 bp, synthetic construct
  misc_feature 1..1587: note = Description of Artificial Sequence: Synthetic coding sequence
  source 1..1587: mol_type = other DNA
atggatgctcagcagactaagacaaatgaagcgcggttgtggggagatcacggtcaggaggccctggagtccgcccacgtgtgtcttatcaatgcaacagccactggaacagaaattcttaagaaccttgtgttacccgggattgggtcctttactatcatcgacgggaatcaagtatctggcgaagatgccggtaataacttctttctgcagagatcatcaatcgggaagaatagagcggaggctgccatggagtttcttcaggaactgaattcagacgtgagcgggtccttcgtcgaggagtcccctgagaacctgttggataatgaccctagtttcttctgtaggtttactgtagtcgtcgccactcagctgcccgaatctacaagtcttcggctcgccgacgttctctggaacagccagattcctttactgatatgtagaacttacgggctggtgggctatatgagaatcattatcaaagagcatcccgtgatcgaaagtcatccagacaatgccttagaggacctgcgattagataagccctttccggaacttcgagaacattttcagagctatgacttggatcacatggagaaaaaagatcacagtcataccccatggattgttatcattgccaagtacctggctcagtggtactccgagactaacggcagaattcctaaaacctataaggagaaagaggattttagggatctcatccggcaggggatcctgaaaaacgaaaacggagcgcccgaagatgaggagaatttcgaagaagcaatcaaaaacgtcaatacagctcttaatacgactcagattccatcttcaatcgaagacatattcaacgatgaccgctgtatcaacatcacaaaacagacccctagtttctggatccttgcccgtgcactaaaggagttcgtcgctaaggaggggcagggcaacttacctgtgagagggactataccagacatgatagcagactctggcaagtatatcaagcttcaaaacgtctaccgggagaaggccaagaaggatgccgccgctgttggaaatcacgtcgcaaagcttctccagagcattggacaggcgccagagtctatatctgagaaggaactaaagctattgtgctcaaactctgccttcttacgagtggtcagatgcagaagcttagccgaggaatacggccttgacaccataaataaggatgagataataagctcaatggataaccctgataatgagatcgttctttacttgatgttacgcgctgtggatcggtttcacaagcagcaggggaggtatcccggtgtgtccaactatcaagtcgaggaggacatcgggaaacttaaaagctgcttgactgggtttttgcaggagtatggactcagcgtgatggttaaggacgactatgttcacgagttctgccgctatggcgcagccgagcctcacacaattgccgcattcctcggtggggccgcggctcaagaagtgattaaaatcatcaccaaacagttcgtgatatttaacaatacctacatatattccggtatgtctcagacctctgctaccttccagctttag

SEQ ID NO: 125954 - DNA, 1338 bp, synthetic construct
  misc_feature 1..1338: note = Description of Artificial Sequence: Synthetic coding sequence
  source 1..1338: mol_type = other DNA
atggagtttcttcaggaacttaatagtgacgttagtggcagttttgtagaagaaagtcccgaaaacctgcttgacaatgatcccagttttttctgcaggtttacggtggttgtggccacccagctccctgaaagcactagtttgaggctggctgacgtgctctggaatagtcaaatcccccttctcatctgcaggacttacggtctggtgggctatatgcgaatcattatcaaggagcaccctgtgatcgaaagccatccggataacgctctggaagatctgcggctggataagcccttccccgaattgagagaacacttccagtcttatgatctcgaccacatggagaaaaaagatcatagccacacaccctggatcgtgatcatcgccaaatacctggcgcaatggtattctgagacaaatggaaggattccaaagacgtataaagagaaagaggactttcgggacttaatccgccaaggtatcctgaagaatgaaaatggggcccctgaggatgaggagaattttgaggaagctatcaaaaacgttaacacagccttgaataccactcagatcccctcttccatagaggacatctttaatgacgaccggtgtattaatatcacaaagcagaccccatctttttggatcttggcaagggctctcaaagaatttgtggccaaggagggccagggcaacctgccagtgcgtgggaccatcccggacatgattgcagatagtggcaagtacatcaaattacagaatgtgtatcgggaaaaagccaagaaggacgctgctgcggtcgggaaccatgtagctaagttgctccagtccattggacaggcgcccgaatctatctctgagaaggagctaaaactcctatgctcaaattccgcgttcctcagagtagtccgctgtcggagtctcgccgaagaatacgggctggatacaatcaacaaagatgagatcattagctctatggataaccctgataacgaaattgttctgtatctgatgctgcgcgcagtggacaggtttcataaacagcaaggcagataccctggagtatccaactatcaggtggaagaagatatagggaagctgaaaagctgtctgaccgggtttctacaggagtatggattaagcgtaatggtaaaggatgattacgtccacgaattctgccgatacggggcggctgagccacatacgatcgccgccttcctcgggggagccgcagcgcaggaagtcatcaagataatcacgaagcagttcgtgatcttcaacaacacttatatttattctgggatgtcccagactagtgcaacctttcaactgtag

SEQ ID NO: 125955 - DNA, 2901 bp, synthetic construct
  misc_feature 1..2901: note = Description of Artificial Sequence: Synthetic coding sequence
  source 1..2901: mol_type = other DNA
atggagccgcaagtgaccctcaatgtgacattcaaaaacgaaattcagtctttcctggtatccgacccagaaaacactacatgggctgatatcgaagctatggtcaaggtctccttcgatctgaacactatccagataaaatatttggacgaagagaatgaggaggttagtatcaacagccagggagaatacgaggaggctctaaaaatggctgtgaagcaaggaaatcaactgcagatgcaggtgcacgagggacaccacgtcgtagatgaggccccccccccagtcgtgggagccaagcgtttggccgctagggcggggaaaaagccactggcccactatagttctcttgtccgggtactgggctctgatatgaagaccccagaagaccccgctgtccagagcttcccactcgttccttgtgataccgaccagccccaggataagcccccggattggttcacaagttacctggagacatttcgcgaacaagtagtgaatgaaacagtagaaaagctcgagcagaaactgcacgaaaaactcgtgctgcaaaaccccagtttaggatcttgtccatccgaggtgtcgatgccaaccagtgaagagaccctgttcttacctgagaatcagttctcttggcacattgcctgcaacaactgtcagcggcgaattgtcggtgtgcgttaccagtgctctctttgccccagttacaatatatgtgaggactgcgaggctggcccctacggtcacgacactaaccatgttttactgaaactgcggaggcccgtggttggatcctcagaaccgttttgccactctaagtactccacaccacgtttacccgctgccttggaacaagtgcggctccagaaacaagttgacaagaactttctgaaggccgagaaacagagacttcgcgccgaaaagaagcaacggaaagcagaggtgaaagagcttaaaaagcagctgaaactgcatcgtaagatccacctttggaatagcatccatgggttgcaatctcccaaaagtccactaggaagacctgaatccctgttacagtcaaatactctgatgctcccactgcagccctgcacgagcgtgatgcctatgctttccgccgccttcgttgacgaaaacctgccagacgggactcacctgcagccgggaaccaagtttatcaaacattggagaatgaaaaataccggaaacgtgaagtggagtgctgacaccaagcttaaatttatgtggggaaatctgactctagcttccactgagaagaaggacgttctcgtcccatgtttaaaggccggccatgtcggagtggtgagtgtggagttcattgctcccgctcttgaaggaacctacacctctcattggcgcctttcccacaaaggacagcagttcggaccacgcgtgtggtgctctatcattgtagatccttttccgtctgaggaaagtcctgataacattgagaaaggaatgatctccagttcgaagacagacgacctgacctgccagcaggaggaaaccttcctcctggccaaagaggagagacagcttggcgaggtgaccgaacagacggaagggaccgccgcctgcatcccacagaaagccaagaacgttgcctccgagagggaactgtacattcccagcgtcgatctccttactgctcaggatctgctgtcttttgaactgttggatatcaatattgtccaagagctggaacgggtgcctcacaacactcctgtggatgtgaccccatgcatgtcgcctttgccacacgactcgcccctcatcgagaaacccgggttgggtcagatcgaggaagaaaatgaaggtgccggatttaaggccctgcctgattctatggtcagcgtcaaacgcaaagcggagaatatcgcctctgtagaagaggccgaggaggacctgtccggcacgcagttcgtatgtgaaactgtgatcagaagtctgactcttgacgccgcccctgatcataatcccccatgccgccagaagtccctccagatgacattcgcactccccgaagggcctctgggcaacgaaaaagaagaaattattcacatagctgaagaggaggccgtcatggaggaagaggaagatgaggaggacgaggaggaagaagacgaattaaaggacgaagtgcagagtcaatcatccgcctccagtgaggactacattatcatcctgcctgaatgttttgacacaagtcggcctctcggagatagcatgtattcaagcgcgttaagtcaacccggcttggagcggggtgctgagggaaagcctggagtagaagcgggccaggaacctgccgaagctggcgaacgccttccaggaggggagaaccaacctcaggaacacagcatttctgacatactaactacatcccagactttagaaaccgtgcctttgattcccgaagttgtagaactgccccctagcttaccccggtcatccccctgtgtgcatcaccacggaagtcctggtgtggacctaccggtgactatccctgaggtctccagcgtcccagatcagatccggggagagccacgcggtagctctgggctggtcaactccagacagaagtcatacgatcacagccgacaccaccacggttctagtatcgctggggggctagttaagggggccctgtctgtagctgccagcgcatataaggctttatttgccggacctccagtgactgctcagccaattattagcgaggatcagacggccgctctgatggcccacttattcgaaatgggcttttgcgatagacagctcaatctgaggttgttaaagaagcataattataacattctgcaagttgtgactgagctgctgcagttgaataataacgattggtactcccagagatattag

SEQ ID NO: 125956 - DNA, 2814 bp, synthetic construct
  misc_feature 1..2814: note = Description of Artificial Sequence: Synthetic coding sequence
  source 1..2814: mol_type = other DNA
atggagccccaagttaccttgaatgttactttcaaaaatgagattcaaagtttccttgttagcgaccctgaaaacactacatgggccgatatcgaagccatggtgaaagtgtcctttgacttgaacactatccagatcaaatacctagatgaggagaatgaggaggttaagattgttctgctaggcgaatacgaagaggccttgaagatggcggtaaagcagggaaaccagctgcagatgcaggtacatgaagggcaccatgttgtcgatgaagccccaccccccgtagtcggagccaagcgcctagcagctagagcaggtaaaaaacccctggcccactactcatcccttgtgcgggtgctgggcagcgacatgaaaacgccggaggaccccgccgtgcaaagctttcctctcgtgccatgcgacactgaccagccacaggataaaccccccgattggtttacctcctatctcgaaactttcagggagcaggtggtcaatgagacggttgaaaagctcgagcagaagctgcacgaaaagctagttttgcagaatccttccttgggatcgtgcccttctgaagtgtccatgccgacctccgaggaaactttgtttcttcccgagaaccaattcagctggcatatcgcttgtaacaactgtcagcgacgaatagtcggcgtgaggtaccagtgttcattatgcccttcctataatatatgtgaagactgcgaagcaggcccgtatggacatgacaccaaccatgttcttctgaagctgagacgcccggtggttggctcaagcgagcctttttgtcatagtaagtattctacccctcgcctgccagccgcattggagcaggtgaggctgcaaaagcaggtggacaaaaacttcctgaaggccgagaagcagcgcctaagagccgagaagaaacagagaaaggcagaggtgaaagaactgaagaaacagctgaagctgcaccgtaaaatccatctatggaatagtatccacggactacagtcgccaaaaagccctctgggaaggccggagtcactgctgcagagcaacactcttatgctccctctccagccttgtacttctgtgatgcccatgctgagcgctgcttttgtagacgagaatctcccagatggaacgcacctacagccaggaacaaagttcataaagcattggagaatgaaaaataccggtaacgttaagtggagtgcagatacaaagttgaaattcatgtggggcaaccttactctggcatccacagaaaagaaggatgtcctcgttccatgtttaaaagccggccacgttggtgtggtgagcgttgagttcatcgcaccagccctggaaggcacctatacatcccactggaggctctctcacaaaggacagcagtttggaccccgagtctggtgttctatcatcgtggatcccttccccagcgaggaatcccccgacaatattgagaaaggaatgatctcatcatctaagaccgatgacctcacttgccagcaagaggagaccttcctgttagccaaagaggagcggcaactaggtgaagtaaccgaacagacagaaggcactgcggcgtgcatcccccaaaaagcgaaaaacgtggcctccgagcgtgagctctacataccctcagtggatctgctgacagcccaggacttgctaagctttgaactgctcgacatcaatatcgtgcaagaacttgaacgtgtcccacacaacacgcccgtcgatgtcaccccctgtatgtcacccttaccacatgactcacccttaatcgagaagccggggcttgggcagattgaagaggaaaacgaaggcgcaggattcaaggccttacctgacagcatggtgtctgtgaagcgcaaggctgagaatattgccagcgtcgaggaagccgaggaagatttatctgggacgcagtttgtgtgcgagactgtgatcagatccttgactctggacgccgcgcctgatcataacccaccttgcagacagaagtccctgcagatgacattcgcccttcccgagggcccactcggcaacgagaaggaggagatcattcacatcgccgaagaagaagctgtcatggaagaggaagaagatgaagaggacgaggaagaagaggatgaacttaaagacgaggtgcaatcccagtccagcgccagtagtgaagactacatcatcatactacccgagtgctttgacaccagccgacccctgggcgatagtatgtattcaagcgcgctgtcacagcctggcttggaacgtggcgcggagggcaagcctggagttgaggccggccaggagccagcagaggccggcgagaggctgcctggaggagaaaatcaaccacaggaacattccatctccgatattcttaccacctcacagactctggagaccgtgccactgattcccgaagtcgtggaattacctccaagtcttcctcgcagcagcccttgtgtacaccaccacggctccccaggtgtcgacttaccagtgactatcccagaagtgtcctccgtgcccgaccagattcgaggtgagccgcgaggtagctccgggctcgtgaactcccgccagaagagctatgaccacagcagacatcaccacggctcttcaattgcagggggcctggtgaagggtgctctgtctgtcgctgcatctgcctacaaggcgctgtttgctggccccccagtgactgcccagggactgtgggggttattgtcttttctccacctagctaaaaagtgcttctttttgaaagctccttcggaagccttcagctggttctag

SEQ ID NO: 125957 - DNA, 2901 bp, synthetic construct
  misc_feature 1..2901: note = Description of Artificial Sequence: Synthetic coding sequence
  source 1..2901: mol_type = other DNA
atggagccccaggtcacccttaatgtcacattcaaaaacgaaatccagagtttcttggtgtccgatccagagaacacaacctgggccgacatcgaggccatggtcaaagtttcatttgatctgaatactattcaaattaaatatttggatgaagaaaatgaggaggtgaagatagtgttgctgggtgaatatgaagaggctctgaagatggccgtcaaacagggcaatcaacttcagatgcaagtgcatgagggacatcacgttgtggacgaagcaccccctcccgtcgtcggcgcaaaacgacttgcagccagggccggcaagaagccgctcgcccactatagctccctggtgcgggtgctgggatcggatatgaagacacccgaagatccggccgtgcagagttttccattggttccatgcgacaccgatcagccacaggataagccccccgattggttcacgtcctatctggagacattccgggaacaggtggtcaatgaaacggttgagaaactggagcagaagctacatgaaaaacttgtgttgcagaatcccagcctgggctcctgtccctctgaagtgtccatgcctacatctgaggaaactctctttttaccagaaaatcagtttagttggcacatcgcctgtaataattgtcagcgtagaatcgtgggcgtgagatatcagtgtagcctgtgtccttcttacaacatctgcgaagactgcgaggctggcccctatgggcacgatacaaaccatgttctgctcaagctgcggaggccagtggtcggttcttctgaaccattttgccatagtaagtatagcaccccacgcctgccagctgctctcgaacaagttcggctacagaagcaggtggacaagaactttttgaaagccgagaaacagcgtttgcgcgcggagaagaaacagcgtaaggcagaagtgaaggagctcaaaaagcagttaaagctgcacaggaaaattcatctgtggaatagcatccacggactccagtctcccaagtctccactgggtcgccctgagtccctgctgcaaagtaatacacttatgttgcccctgcagccctgtacctccgtcatgcctatgctgtccgccgcttttgtggacgaaaatctgcccgacggaactcacttgcagcccggcaccaagtttatcaaacattggcgtatgaagaacactgggaacgtaaaatggagcgcggacaccaaactcaaattcatgtgggggaatctgacattggctagcacagagaaaaaggatgtgttagtgccctgtctgaaagcagggcacgttggggtggtcagtgtggaattcatcgcccccgccttggaaggaacatacacctcccactggcggctttctcacaagggacaacagtttggcccgagggtgtggtgctccattattgtggacccatttccctcggaggaatcgcccgataatatcgagaagggtatgattagttccagcaagactgatgatctcacttgccagcaggaggagacatttttactcgccaaagaagaaaggcagctgggggaggtaactgaacagaccgaaggcacggctgcgtgtattcctcagaaagctaagaatgttgcttctgagcgggagttatacatcccaagcgtagacttgcttacagcccaggatctgttatctttcgagctgctcgacatcaatattgtgcaagagttagagcgggtgcctcacaataccccagtggacgtgaccccgtgtatgtcgccacttccccacgacagccctctgattgaaaaacctggtctgggccaaatcgaagaagagaatgagggggccgggtttaaggcccttcctgactccatggtgtccgttaagcgaaaagcggagaacatagcatccgtggaggaggccgaagaagatctgtcaggtacccagttcgtgtgtgagactgtgatccggtcactgaccctagatgccgcgccagaccacaacccaccctgcaggcagaagtctctgcaaatgactttcgcgctgccggagggccccttgggaaacgaaaaggaagagatcatacacattgccgaggaggaggccgtgatggaggaggaggaggatgaggaagacgaggaggaggaagacgaactgaaggatgaggtgcaaagccagagcagtgccagctctgaggactacatcatcatcctgcctgagtgttttgacacttctcgccccttgggagactccatgtacagctcagcactgtcacagcctggtctggagagaggagctgaggggaaaccaggggtcgaggccggccaggagcccgcggaggcaggggagcggctacctggtggtgagaaccagccgcaggaacactccatttctgacattctaacaacttcccagacgctagagaccgtcccactgatcccagaagtcgtggagctgccacccagtctgccaagatcaagcccctgtgtgcatcaccatggctccccaggggtggatctgccagtcacgatccccgaggtgagctctgtgcctgatcagattaggggcgagcccaggggtagctcaggcctggtgaacagccgacaaaaaagttacgatcacagtcgacaccaccatggatcctcaattgcgggcggcttggtgaaaggggctctgtcggtggccgcctctgcttacaaagctctttttgccggtcctcccgtcactgcccaacccataatcagcgaagatcagacggctgctcttatggcacacctgtttgagatgggattctgcgacaggcagcttaacctgaggctgctgaagaaacacaactataacatcctgcaggttgtcacagagttgctgcaactgaataataacgactggtactcacaacgctactag

SEQ ID NO: 125958 - DNA, 2901 bp, synthetic construct
  misc_feature 1..2901: note = Description of Artificial Sequence: Synthetic coding sequence
  source 1..2901: mol_type = other DNA
atggaaccacaggtgacactaaatgttacattcaagaacgagatccagtcctttctcgtaagcgaccccgagaacactacttgggccgacattgaagccatggtgaaggtaagctttgatttaaacaccatccagatcaaatatctagacgaagaaaacgaggaagtgtccatcaactcacagggcgagtacgaagaggctttgaagatggctgtcaaacagggtaaccagctgcagatgcaggttcacgaaggccatcatgtcgtggacgaggcacctccaccagttgtcggggccaaaaggttggccgctagggcgggaaaaaagcctctggctcactacagctctctggtgagagtcttaggttccgatatgaaaactcccgaagatccagccgtgcaaagcttccctctagtaccatgtgacacagaccagcctcaggacaaacctcccgattggtttacttcttacttggaaacattcagggagcaggtggtaaatgaaaccgtggaaaagctggagcagaagctgcacgagaagctggttttacagaatccatcgctgggaagctgcccctccgaggtcagcatgcctactagcgaggaaactctgttcctcccagagaaccagtttagttggcacattgcctgtaataattgtcaaagaaggattgtgggggtaagatatcagtgtagcctgtgtccgtcctacaacatatgcgaggactgtgaagccggcccatatggtcacgacactaatcatgtgctgttgaagctcagacgtcccgtggtgggatcctctgagcccttctgccattcaaagtattcgactcccaggcttcccgccgccctggagcaggtgcggttgcagaagcaagtcgacaagaattttctcaaggctgaaaagcagcgcctgcgtgcagagaaaaagcagcgaaaagccgaggtcaaggagctcaagaagcaactcaaattacatagaaagattcatttatggaatagcattcatggtctgcaatccccaaaaagccccctgggtagaccagaatcactgctgcagtcaaacaccttaatgctgccgcttcagccctgtactagcgtcatgcctatgctctcagctgcgttcgtggacgagaacctgcctgacggcacgcacttacagccaggtacgaaatttatcaagcactggaggatgaaaaatacaggaaatgtcaagtggtctgctgacacaaaactaaaatttatgtggggaaacttgaccttagcctccaccgagaagaaggatgtgctggtgccttgtttgaaagccggtcacgtgggggttgtcagtgtggaatttatcgcgcccgcactggagggcacttacaccagtcactggagactgtcccacaagggtcagcagttcgggcctagagtctggtgtagcatcatcgtcgatccttttcccagcgaggaaagcccagataacatagagaagggtatgatatcctcaagcaagacggatgacctgacatgtcaacaagaggagaccttcctgcttgccaaggaagaacgtcagttgggggaggtgaccgaacagacagaggggaccgccgcctgtattcctcagaaagccaagaatgtcgccagcgaacgcgaactgtatattcctagtgtggatctgttaaccgctcaggacctgctgagtttcgagctgctggacattaacatagttcaggaactagaacgggtgcctcacaacactcccgtagacgtgaccccctgcatgagtcccctccctcatgacagccccctgatcgagaaacccggcttggggcagattgaggaagaaaatgagggcgcaggcttcaaagcactgccagattctatggtttctgtcaagaggaaagcagagaacatcgcttccgtagaagaggctgaggaggaccttagcggaacccaattcgtatgcgagacagttataagaagtctcaccctggacgccgcccctgaccacaaccccccctgtcgccaaaaaagtttgcaaatgacattcgcactcccagaggggcccctgggtaatgaaaaggaggaaatcatacatattgctgaggaagaggctgtaatggaggaggaagaggacgaggaggacgaagaggaggaggacgagttaaaggacgaagttcagtcacagagcagcgcctccagcgaggattatataatcatactgccagagtgtttcgatacaagtcgccccctcggcgacagtatgtactcaagtgcgctgtctcagcccggcctcgagcgcggggccgaagggaaaccgggggtcgaggccggccaagaacccgccgaggccggggagcgccttcctggaggagaaaatcaaccacaagagcattcaatctctgacatcctgaccacttcgcaaactctggaaacagtgccactgataccagaagtggtggagctgccccctagtttgccccgctcaagcccttgtgtgcaccaccatgggtctcccggggtggatctgccagtgaccattcccgaagtgtcttcagttccagatcagatccgcggtgagccccgtggcagctctggcctggtgaacagccggcagaagagttacgaccacagtcggcatcaccacgggagttccatagccggtgggctcgtgaagggggctctctccgtggccgctagtgcatataaggcactgttcgccggcccccctgttacagcgcagcccatcatatcagaggaccagacggcggctctcatggcccacctctttgaaatggggttctgcgaccgtcagctaaatctacggcttctcaagaagcataattacaacatcctgcaagtggttaccgaactcctgcagctgaataataacgactggtactcccaaaggtattag

SEQ ID NO: 125959 - DNA, 654 bp, synthetic construct
  misc_feature 1..654: note = Description of Artificial Sequence: Synthetic coding sequence
  source 1..654: mol_type = other DNA
atgtatagctccgccttgtcacagcctggactggaaaggggagccgaggggaaacccggagttgaggcagggcaggagcctgctgaggctggagaacgtctgcctggaggtgagaaccagccacaggagcactccatctcagacatcctgaccacatcgcagacattggaaacagtccccttaatccccgaggtagtggaattgcctccatcactgcctagatcgtcgccatgtgtgcaccatcacggctctcctggggtggatctgcctgtgaccatccctgaagtgtcatcagtgcctgaccagattagaggcgagcctagggggtccagcgggcttgtgaattctcgccagaagagttacgaccattctagacaccatcacggaagttcgattgctgggggcctagttaagggcgctctctcagtggccgcttctgcctacaaagccttattcgccgggccgccagttaccgctcagccaataattagcgaggatcagaccgcagcactgatggcacatttgttcgagatgggtttttgtgatagacagctaaacttgagattactgaaaaagcacaactacaacatcctccaggtggtgacggaacttctacagttgaataataacgactggtactctcagaggtattag

SEQ ID NO: 125960 - DNA, 2514 bp, synthetic construct
  misc_feature 1..2514: note = Description of Artificial Sequence: Synthetic coding sequence
  source 1..2514: mol_type = other DNA
atggagccacaggtgacccttaatgtcacctttaagaacgagattcagtccttcctggtctctgaccctgagaacaccacatgggcggacatcgaggcaatggtgtccattaatagtcaaggggaatacgaggaggctctgaaaatggctgtgaagcagggcaatcagcttcagatgcaagtgcatgaagggcatcacgttgtggatgaggcccctccacctgtggttggagccaaacggcttgctgcccgcgccggcaagaagcccctggctcactacagctcactggtgagagtgcttggctcagatatgaagacccccgaggatccggccgtgcagtcctttcccctggttccctgtgacactgaccaaccccaggacaaacccccagactggttcacaagctacctagaaaccttcagagagcaggtggttaacgaaaccgtcgagaaattggagcagaaactacatgaaaagctcgtgctgcaaaacccctcactgggcagctgtcccagtgaggtttcgatgcctacctcagaggaaacattgttcctccccgagaaccaattctcgtggcacatagcttgcaataactgtcagcgaaggatagtgggagtcaggtaccagtgcagcctttgcccttcttacaatatatgcgaagactgcgaggctggaccttacggtcacgataccaatcacgtcctgctaaaactccggcggcctgtggtgggtagtagtgagcccttttgccattcgaagtattccacaccgagactgccagccgccctagaacaggttaggctccagaaacaggtggacaagaactttcttaaagccgagaaacagcgactccgcgcagagaaaaaacagcgcaaagccgaggttaaagagctgaaaaagcagcttaaattacaccgcaaaatccatctgtggaattccatccacggcctccagtctcccaaatccccactcggaagaccagaatctctgcttcagagcaacacactaatgctgccactccaaccatgtacaagcgtaatgcccatgttaagcgcggctttcgtcgacgagaacttgcccgatgggacccatttacagccgggcacaaaattcattaagcactggcggatgaagaatactggaaacgtcaaatggtcagccgacacaaaactaaagttcatgtggggtaatctaacactggcatccacagagaaaaaggacgtgttggttccatgcctcaaggcgggtcacgtgggtgtggtgagtgtcgaattcatcgcgcctgcactcgagggtacctatacaagccattggcgcctttcccacaagggccaacagtttggtcctagggtttggtgttcaatcatcgttgacccattccctagcgaggaaagcccggacaacattgaaaagggcatgatctcttcttccaagaccgatgacttgacctgccagcaggaagagacgttcctgttggcgaaagaggagagacaactgggagaagtaacggagcaaaccgaaggaacagcggcctgtatcccccagaaagcaaaaaatgtcgcaagcgagcgggagctctacattccatcggtagatctcctgactgctcaagaccttttaagttttgaactcttagacatcaatatagtccaggaactagagagggtgcctcacaatactcctgtggatgtgactccgtgcatgtcccccctcccgcatgatagccccctaatagagaagccaggtctgggccagattgaggaagagaatgagggggccggcttcaaagctttgcccgatagtatggtgagcgtcaaacgaaaggccgagaacatcgcaagcgtcgaagaggccgaggaggacctgtctggcacccagtttgtctgcgagactgtcattagatccttaacgctggatgcagcccctgatcacaatcctccctgcagacagaaatcgctccaaatgacctttgctctacctgaggggccactgggaaatgagaaagaggagataatccatattgccgaagaggaggccgttatggaagaagaagaagatgaagaggatgaggaagaggaggatgagctgaaggacgaagtacaaagccaatcttcggcttcctcagaggattatatcatcattctgcctgaatgctttgacactagccgccctctcggtgacagcatgtactcctccgcactgtcccagcccggcttagagcgtggagctgagggcaaacctggcgtggaagcagggcaggaacctgcggaagcgggggaaaggctgccaggtggtgaaaatcaacctcaagagcattcgatctctgacattttaactacttcccagaccctagaaactgtgcctctaatccctgaagtggtggaactacctccatcactccctagaagctccccgtgtgtccaccaccacggatctcccggggtggatcttccagttacaattcccgaagtaagcagcgtccctgaccagataaggggtgctaataacttttag

SEQ ID NO: 125961 - DNA, 2262 bp, synthetic construct
  misc_feature 1..2262: note = Description of Artificial Sequence: Synthetic coding sequence
  source 1..2262: mol_type = other DNA
atgcctatggacctgatactcgtcgtttggttctgtgtctgtaccgcaaggacagtcgttggtttcgggatggaccccgatctccaaatggatatcgtgacagaactggacctggtcaacacgacactgggggtggcccaagtgtccggaatgcacaacgcctctaaagcctttctgtttcaggatatagagagagagatacacgctgcgccgcacgtttccgagaaactgattcagttgtttagaaacaaatcggaattcacaatccttgccacagtccagcagaagccgagtactagcggcgtgatactgagcatcagggagttggaacaccgcatctatgagagggtgattgatcctccagacacgaatctaccaccaggaatcaatctgtggctgggccagaggaaccagaaacacgggctgtttaaagggatcatccaggatggaaagatcatattcatgccaaacgggtacatcacacaatgccctaacctaaatcatacatgtccaacctgttcggactttttaagcttggtgcaggggatcatggacctgcaggagctcctggctaagatgactgccaaattaaattacgctgaaacccgcctatcacagcttgagaattgtcattgcgaaaagacttgccaggtatctgggctgctgtatcgcgatcaggacagctgggtggatggagaccactgccggaactgcacatgcaaatctggcgccgtcgagtgccggcgtatgtcctgtccccccctcaattgctcgcctgatagcctaccggtccacatcgccggacagtgctgtaaagtctgtcgtcccaagtgcatttacggtggcaaagttcttgcagagggacagagaattcttaccaagtcatgtcgcgagtgccggggaggagttctggtgaagatcaccgagatgtgcccacctctaaattgttccgagaaagaccacatcttgcccgagaatcaatgctgccgcgtttgccggggccacaatttttgtgccgagggacctaaatgcggagagaattcagagtgtaagaactggaataccaaggccacctgcgagtgtaagtctgggtacatctccgtgcagggagattcagcctactgcgaagacatcgatgagtgtgcagcgaaaatgcactactgtcatgctaataccgtatgcgttaatttacctggcctctatcgatgcgactgcgttcctggttacatccgagttgacgacttctcttgtaccgagcatgatgaatgcggatccggtcagcacaattgtgatgagaacgcgatttgtacaaacactgtccaaggtcatagttgtacttgcaaaccagggtacgtcggaaatggaaccatctgccgggccttctgcgaggaggggtgccggtatggaggtacctgcgtagcacccaacaagtgcgtgtgtccctccggattcaccggatcacactgcgagaaggatattgatgagtgttctgagggtataattgaatgtcataaccacagtcgttgcgtgaatcttcctggatggtaccattgcgagtgtcgctccggattccatgacgacggtacatattccctgtctggagaaagctgcattgatatagacgagtgtgcattgaggacccacacttgctggaatgacagtgcatgtattaaccttgcggggggtttcgattgcctttgccccagcgggccaagttgttccggcgactgcccccatgagggcgggctgaaacacaacggccaggtgtggacactgaaagaagatcgatgttctgtgtgctcctgtaaggacgggaaaattttttgtagacggaccgcatgcgactgccagaacccctctgccgaccttttttgttgccccgagtgcgatacacgcgtgaccagtcaatgcctggatcagaatgggcacaaactttatcgtagtggagacaactggactcacagttgccagcagtgcaggtgtctggaaggcgaggtggattgttggccactgacatgcccaaacctttcatgcgaatacaccgctatcttggaaggtgaatgttgtccccgctgcgtgagcgatccatgtcttgccgacaacatcacttatgacatcaggaaaacctgcctcgactcgtatggggtatcccggttgtccggaagtgtctggaccatggccggcagcccatgtacgacctgcaaatgcaagaacgggagagtatgttgtagcgtagactttgaatgcctccagaataattag

SEQ ID NO: 125962 - DNA, 2433 bp, synthetic construct
  misc_feature 1..2433: note = Description of Artificial Sequence: Synthetic coding sequence
  source 1..2433: mol_type = other DNA
atgcctatggaccttattctggtcgtgtggttctgcgtctgcaccgcacgcacagtggtggggttcgggatggacccggatctgcagatggacatcgtgactgaactggatcttgttaatacaactctcggagtagctcaagtcagcggcatgcataatgcttccaaggccttcctcttccaggacatcgaacgcgagatccatgccgccccccatgtgtccgaaaagctaattcaactgtttaggaataaatcggagttcaccatcctggcgacagtgcagcaaaaacccagtacatctggggtgatcctgtcgatccgggagctcgaacattcctactttgaactggagtcttcgggcttacgcgacgaaatcagatatcactatatccacaatggaaaacccagaaccgaagcactgccataccgaatggcggacggtcaatggcacaaggtggccctttccgtctccgcgtcccaccttctgctgcatgttgactgtaacagaatctatgagcgggtaatcgaccccccagacaccaacctccccccaggcataaatttgtggctggggcagagaaatcagaaacacggtctattcaagggtataatacaggacggcaagataatctttatgcctaacggatatataactcaatgcccaaatctgaaccacacatgtccaacttgctcagacttcctttcactggtgcagggaatcatggatctgcaggaactattggcgaagatgaccgccaagctcaactatgccgagactcgtctctctcagctcgagaattgccattgcgagaaaacttgccaggtgtctggactcctctatagggatcaggattcttgggtcgatggcgaccactgcaggaattgcacatgtaaatccggggcagttgaatgcagacgtatgagttgccctccgctcaactgttcccctgactctctgcctgtacatatcgctgggcagtgttgtaaagtttgtaggccgaaatgtatctacgggggaaaggtgttggccgaggggcagaggatcttgaccaagagctgtcgggagtgccgaggcggtgtcttagtcaaaatcacagaaatgtgcccacccctgaactgcagcgagaaggaccacatcttacctgaaaatcagtgctgcagggtttgtaggggacataatttttgcgctgaaggtcctaaatgcggggaaaacagtgaatgtaaaaactggaacacgaaggctacatgcgagtgcaagtcaggttacatcagtgtacagggggatagtgcatactgtgaagatatagatgaatgtgctgccaagatgcattactgtcatgctaataccgtgtgcgtcaatctgcccggcctgtaccgttgtgactgtgtgccaggctatatccgcgttgacgatttcagttgcacggagcacgacgagtgcggtagcggccagcataactgtgatgaaaacgcaatctgtaccaatactgtccaaggacacagctgtacatgtaagcccggatacgttggcaatgggactatttgtagagccttctgcgaagagggctgcaggtacggaggaacgtgcgtcgctcccaataaatgcgtgtgtccctcgggattcacaggttcgcattgtgagaaagacatcgacgagtgcagcgagggcattatagagtgccataatcactcccgttgcgttaacctccctggttggtaccactgcgaatgccgctcaggctttcatgacgatgggacatactctctgagcggtgagtcatgcatcgacattgacgaatgcgccctcaggacccatacctgttggaatgacagcgcatgcatcaatctggcgggaggctttgactgtctgtgcccatctggaccgtcttgtagtggtgattgtccccacgagggaggccttaaacataatggccaggtttggactctgaaggaggaccgctgcagcgtctgtagctgcaaagacgggaagatattctgtcgccggaccgcctgcgattgtcaaaatcctagcgcggacttgttttgctgccctgagtgtgatacccgggtgacctcgcagtgtttagatcagaacgggcacaaactatatcgaagcggagacaactggacccattcatgccagcagtgccggtgcctggaaggagaggtcgattgctggcctctgacgtgccctaatctctcgtgcgagtacaccgcaatactggaaggcgagtgctgtccgcgctgcgtgtccgatccttgtttagcagacaacatcacttatgatatccggaaaacttgtctggactcttacggagtttctagactgagcggatccgtgtggacaatggcaggctctccatgtactacctgtaagtgcaaaaatggacgcgtctgttgctctgttgattttgagtgtctgcagaataattag

SEQ ID NO: 125963 - DNA, 2292 bp, synthetic construct
  misc_feature 1..2292: note = Description of Artificial Sequence: Synthetic coding sequence
  source 1..2292: mol_type = other DNA
atgcctatggacctgattctcgttgtttggttttgtgtgtgcaccgctagaactgtagtcggatttgggatggatccggatctccaaatggacatcgtaacggagctggaccttgtcaacacaaccttgggtgttgcccaggtgtctggaatgcataacgcctccaaggcatttctgttccaggatatcgaaagggaaatccacgctgcgccacacgtgagtgaaaagctgatccagctttttcggaataagtccgaattcacaattctagcaacagtacagcagaagccttcaacctccggggtgatcctgtctatcagagaacttgaacacagctacttcgagttggagagcagcggactcagggacgaaatcagataccattacatccataacggtaagccgcggaccgaagctctcccataccgaatggcagacgggcagtggcataaagtggctctctcagtgtcagcgtcgcacctgctacttcacgttgactgtaatcgaatctatgagagagtgatcgacccaccagacacgaacttgccaccaggtataaacttgtggctggggcagcgcaatcagaagcacggcctgtttaagggaattattcaggatgggaagatcatctttatgcctaatggttacattactcagtgccccaacctgaatcatacatgtcccacctgctcagactttttgagtttagtccagggtatcatggacttgcaggaactgttagccaagatgaccgccaaattgaattatgctgaaacacgtctctcacagctggaaaactgccattgcgagaaaacatgccaggtgagcggactactttatcgagaccaggattcctgggtggatggggaccattgtcgtaattgcacctgcaagtctggcgccgttgaatgtcggagaatgagctgccccccgttaaactgctcacccgatagcctcccagttcacattgccggccagtgttgcaaggtgtgcaggcctaagtgcatttatggcggcaaggtgctggctgaaggacagcgaattctcactaaatcctgtagggagtgtcggggcggagttttggtcaagataactgagatgtgccctcctttgaattgcagcgaaaaggaccacatcctgcccgaaaaccagtgttgcagggtgtgtcggggacacaatttttgcgcggagggcccgaagtgtggagaaaatagcgaatgcaagaattggaacacaaaagctacttgtgaatgtaaatccggctacatttcagttcagggggatagcgcgtattgcgaggatatcgacgaatgtgccgcaaagatgcactactgccatgccaacacagtatgcgtcaacctgcccgggctgtataggtgtgattgtgtgccaggatacattcgcgtggatgactttagctgcacagaacacgacgaatgtggtagcggacagcataactgcgacgaaaacgctatttgcaccaatacagtgcagggtcacagttgtacatgcaaaccaggctatgtagggaatgggacaatttgtcgggcattctgcgaggaaggctgtagatacggcggtacttgcgtggcccctaacaaatgcgtttgcccctcaggattcaccgggagtcattgtgagaaggatatagacgaatgcgcactgcggacccacacgtgctggaacgactccgcatgtattaatcttgcgggcggatttgactgcctttgtccttcggggccctcctgcagcggcgattgccctcatgaggggggccttaagcataacggacaggtttggaccttaaaggaggaccggtgttccgtttgcagctgcaaggatggaaaaattttttgtcgccgtacagcctgtgactgtcagaatccctctgccgacctcttctgctgcccagagtgcgacacaagagttacctcccagtgtcttgatcagaacggtcataaactctaccgctctggcgacaattggactcattcttgccagcaatgcaggtgtctggagggggaggtggactgttggccattgacatgccccaatttatcatgtgaatacacagccattctggagggtgaatgctgccctaggtgcgtaagtgatccttgcctcgccgacaacatcacgtacgatatccgcaaaacctgcctcgacagttacggtgtgtcacgcttgagtggaagtgtgtggacaatggccggcagtccctgcacaacatgcaaatgtaaaaatggaagggtgtgctgttctgtggatttcgagtgtctgcaaaataattag

SEQ ID NO: 125964 - DNA, 2520 bp, synthetic construct
  misc_feature 1..2520: note = Description of Artificial Sequence: Synthetic coding sequence
  source 1..2520: mol_type = other DNA
atgtccatcagacgtttgctgatactcattctgaagatcggccggagatggaccgaactaattcgtacaatggagtctagggttctgctccgaactttttgcctgatcttcggcctgggcgccgtttggggactgggggtcgacccctccctgcagatcgacgtcctcacagagctggagcttggagagtctactacgggggtgaggcaagttcccggcctgcataatggcactaaagcattcctattccaggatactccaagaagcataaaagccagcacagcaaccgccgagcagtttttccagaagcttcgcaataaacacgagttcaccatcctcgtgactttgaaacagacacacctgaatagcggggttatacttagcatccatcacttggatcatcgctatctagaactcgaatcctctggacaccggaacgaagtgagactgcactaccggtccggcagtcaccgtccccacacggaagtgtttccatacatcctggccgacgataagtggcataaactgagcctggcaatctccgccagtcacctaatattgcacatcgattgtaacaaaatatacgaaagagtggtggagaaaccatctactgacctgcctctgggaacaacgttttggttagggcagcggaataacgctcatggttattttaaaggcattatgcaggacgtacagttgttggtgatgccccaaggcttcatcgctcaatgtccagacctaaatcgaacctgccctacctgcaacgatttccatggacttgttcagaaaatcatggaacttcaggatatcctcgcaaaaacctcagccaaactgtctcgggccgaacagcggatgaaccggcttgaccagtgctattgtgaacgaacctgcaccatgaaaggtacaacttatcgggaatttgaatcttggatcgacgggtgcaagaactgcacctgtcttaatggaaccattcagtgtgaaacactcatctgcccaaaccctgattgtcctctcaagagcgcgttggcatacgtggacggtaagtgttgcaaggaatgtaaatctatttgtcagttccagggccggacctacttcgaaggggagcgaaacacggtgtattcatcaagtggtgtttgtgtgctgtacgagtgcaaagatcagaccatgaagctggttgaaagcagtggctgtccggccttagactgtccagagagtcatcagatcacactttctcactcttgttgcaaggtgtgcaaaggttatgacttttgtagtgaaagacacaattgcatggagaatagcatctgccggaatctcaacgaccgggccgtgtgtagttgtagagatgggtttcgggcactgcgtgaagacaacgcttactgcgaggatattgatgaatgcgctgaaggaagacactactgccgtgaaaacactatgtgcgtcaacacgccaggcagctttatgtgtatttgcaagactggatacatcaggattgatgattactcctgcactgaacacgatgaatgcattactaatcagcataactgtgacgagaacgctctctgcttcaacactgtgggaggccacaactgtgtgtgtaaacctggatatacaggaaacggcacgacctgtaaagcgttctgtaaagacggatgccggaacgggggcgcatgcatcgctgccaatgtgtgtgcctgtcctcagggctttacagggcccagctgtgaaaccgatatcgacgaatgctccgacggatttgtacagtgtgacagtagagccaactgtattaatctgccaggctggtatcattgtgagtgccgcgatggctaccacgataatggcatgttttctcccagcggagagtcttgtgaggatatcgacgaatgcgggactgggcgtcatagttgcgctaatgataccatttgtttcaaccttgacggcggatatgattgccgatgccctcacggtaagaattgtaccggggattgcatccacgatggaaaggtcaagcataacggtcagatttgggttctggagaacgatagatgttcagtgtgttcatgccagaacggctttgtgatgtgccgccgcatggtctgcgactgtgaaaacccaaccgtagacctcttttgctgtcccgagtgtgatcccaggctgtcgagccaatgtctgcaccagaatggagaaactctgtacaacagcggagacacctgggttcagaactgccagcagtgtagatgcctccaaggtgaagtagactgttggccactcccctgccctgatgtagaatgcgagttctctattctgcctgagaatgaatgttgtccgcggtgcgtgaccgacccatgtcaagccgacacaatccgcaatgacattactaaaacttgcctcgacgagatgaacgttgtccggttcactggatcatcttggattaagcacgggacagaatgcacactgtgccaatgcaagaacggtcacatctgttgtagcgtagaccctcagtgccttcaggaattgtag

SEQ ID NO: 125965 - DNA, 2448 bp, synthetic construct
  misc_feature 1..2448: note = Description of Artificial Sequence: Synthetic coding sequence
  source 1..2448: mol_type = other DNA
atggaaactgggttgggcgcacccctgttcaaggcgtggctgttaatttcagtctggggcctgggggttgatccctctctgcaaatcgacgtgctcacagaattagaattgggagaaagcaccacaggcgtccgccaggttccggggttacacaacggaacgaaggcatttctgttccaggacacccctcgcagcataaaggcttcgaccgccactgccgaacagttttttcagaaattgagaaacaaacacgagtttaccatactggtcacattgaagcagacgcatctgaactcaggcgtgattctctcaatacaccatcttgatcaccggtatctggaactggaatctagcggacatcggaatgaggtgcggcttcattatcggtccggatcccaccgaccgcacactgaagtgttcccctacatcctcgccgatgacaagtggcacaagttatccctcgcgatctctgccagccaccttattttgcacatcgactgcaacaaaatctatgaacgagttgtggagaagccaagcactgatttgcctctcggcactaccttttggctggggcagagaaataacgcacacggatatttcaaaggtatcatgcaggatgtgcaattgctggttatgccgcagggctttattgcacagtgtcctgacctgaaccgaacttgtccaacttgcaatgacttccacgggctagttcagaaaatcatggagctgcaggatatactggcgaaaacttctgctaaacttagcagggccgaacagaggatgaaccgcctcgaccagtgctattgtgaacgcacctgcaccatgaaagggactacgtacagagaatttgagtcttggattgacggctgcaaaaattgtacttgcctgaatggaaccatccagtgcgagacattgatttgccctaacccagattgtccactaaaatctgcactggcttacgtggacggaaagtgttgcaaggagtgcaaatccatctgtcagttccagggccgtacatatttcgaaggtgagagaaacacggtgtattctagctcaggggtgtgcgtgctgtatgagtgcaaggatcagaccatgaaactagttgagagctccgggtgtcccgcactcgactgtcccgagagtcatcagatcacactatctcatagttgctgtaaagtgtgcaaggggtacgatttttgttctgaacgccataactgcatggagaattcgatttgcagaaatctgaatgatcgggctgtgtgcagctgtagagatggctttagagccctgagagaagataacgcatattgcgaggacattgatgaatgcgccgaaggccggcattactgccgtgagaacactatgtgtgtgaatactccgggtagtttcatgtgcatttgcaagaccgggtacattcgcatagatgattattcctgcaccgagcatgatgagtgtatcaccaaccagcacaattgcgacgaaaatgctctttgttttaacaccgtcggtgggcataactgtgtatgcaagcctggctacaccggaaacggtactacttgtaaggctttttgtaaggacgggtgccggaacggcggggcctgcatagccgctaatgtatgcgcatgtccacagggattcaccgggccttcctgcgagaccgatatcgatgagtgttccgatgggttcgtgcaatgcgattccagggctaattgtataaatttgccaggctggtatcactgcgagtgcagggacggttaccacgataacggaatgtttagccctagcggcgaaagttgtgaggatatcgatgagtgcggaacaggaaggcactcctgcgccaatgacacaatatgtttcaatcttgacggagggtacgattgcagatgtccacacggtaagaattgcaccggagactgtattcacgacggcaaggtgaagcacaacggccagatctgggtcctggagaacgatcggtgcagcgtttgtagctgccagaatgggttcgtaatgtgtcgcagaatggtatgtgactgtgagaacccgaccgttgatctgttttgttgccctgaatgtgaccctagactgagctcccagtgccttcaccagaatggcgagactttgtacaatagcggcgacacctgggtgcagaactgccagcaatgcaggtgtctgcaaggtgaggtggactgttggccgctgccgtgccccgacgttgaatgtgaattctctattctgccagaaaacgagtgctgtcccaggtgtgtaactgatccctgtcaggctgacactattcggaacgacattactaaaacatgcctggacgagatgaatgtggtgagattcacaggaagctcctggatcaaacacggtactgaatgtaccctgtgccaatgcaagaacggtcatatttgttgttctgtcgatccacagtgtcttcaggagctctag

SEQ ID NO: 125966 - DNA, 2451 bp, synthetic construct
  misc_feature 1..2451: note = Description of Artificial Sequence: Synthetic coding sequence
  source 1..2451: mol_type = other DNA
atggaatcgcgcgtactacttcgcaccttctgtttgatcttcggattaggagctgtatggggcctgggcgtggatcctagcttacaaatcgatgtgttgaccgaacttgagttgggcgagtcaaccaccggtgttcggcaggtgcctggtttgcacaacggcacaaaagcattcctctttcaggatacgcctcggtccatcaaagcttctactgccaccgccgagcagtttttccaaaaactcagaaataagcacgaatttacaatcctagtcacactcaaacagacccaccttaattcaggcgtgatcttgagcatccatcacctggatcataggtacctggaacttgaatcttccgggcaccggaacgaggtcagactgcattacagaagcggctcccatcgcccacacaccgaagtgtttccctacatcttggctgatgataaatggcataaactgagcctcgccatttccgctagccatttaattctacacattgactgcaacaagatatacgaaagagtggtggagaagcctagtacagacctcccccttgggactacattctggctggggcaaaggaacaatgcacacggctacttcaagggcattatgcaggacgtgcagctacttgtgatgccccaggggttcatcgcgcagtgtccggacttaaatcgcacttgccctacctgtaacgacttccatggcctcgtgcaaaagatcatggagctgcaggacatcctggctaagacctcagccaagctttctagagcagaacaacggatgaataggctggaccagtgttactgcgaacgaacatgcacaatgaagggtacaacatatagagagtttgaatcttggatcgatgggtgtaagaattgtacatgcctcaacgggaccattcaatgcgagacactgatttgtccaaatccggattgtcccctcaagtccgccttggcctatgtggacggtaaatgttgcaaggaatgtaagtctatttgccaatttcagggaaggacctactttgagggcgagcggaacactgtatatagtagcagcggcgtgtgtgtgctctacgaatgcaaggaccaaactatgaagttagttgagtcctctggatgtcctgcattggactgccccgaatctcaccagatcaccctgtcgcactcatgttgcaaggtttgcaaggggtacgacttctgctccgaacgacataactgcatggagaacagcatctgtagaaacctgaatgaccgagccgtttgtagctgtagggatggattcagggctctgagggaggataacgcttactgtgaagatatcgatgaatgtgcagaaggacgtcactactgtcgcgagaacaccatgtgcgtcaatacccctggcagcttcatgtgcatctgcaaaacaggatacattaggattgacgattactcctgtacagaacacgacgagtgtatcactaaccaacacaattgcgacgaaaacgctctctgttttaacacagtggggggccacaactgtgtatgtaagccaggctacactggtaacggcacgacgtgcaaggccttttgtaaagacggatgtcggaacgggggcgcatgcattgcagccaatgtttgcgcttgtcctcagggctttaccggtccatcttgcgaaacagacatcgatgagtgctcagacggatttgtacagtgcgattccagggctaactgtattaacctgcctggctggtatcattgtgaatgccgtgatgggtaccacgataacgggatgttcagcccaagcggcgagagctgtgaggatatcgacgagtgcggtaccgggcgtcatagctgtgccaacgacacaatctgcttcaacctggacggcggatacgattgtcgttgcccacatggcaagaactgcacaggagactgcatccacgacggcaaggtgaagcacaacgggcagatatgggttttggagaatgaccgctgctccgtatgctcttgtcagaacggcttcgttatgtgtcgccggatggtttgcgactgtgaaaatccaactgtggatcttttttgttgtcccgagtgtgacccaaggttaagctcccaatgtctccatcagaatggagagacgttatacaactccggcgatacttgggtgcaaaactgtcagcagtgtagatgtctgcagggcgaagttgactgctggcctctcccatgtcctgatgtggaatgcgagttttcaatcctgcccgagaacgagtgttgccctaggtgtgtgaccgacccctgccaggctgataccattcgcaacgatataaccaagacatgtctcgacgagatgaatgtcgtgagatttaccggaagttcatggataaagcatgggactgagtgcaccttatgtcagtgtaagaacgggcacatctgctgctcagtggacccccaatgtctccaagagttatag

SEQ ID NO: 125967 - DNA, 2601 bp, synthetic construct
  misc_feature 1..2601: note = Description of Artificial Sequence: Synthetic coding sequence
  source 1..2601: mol_type = other DNA
atggggttccctcctttactcaagggacaggcttctgcaacgcgatcttcactggccagttgcagttgggtggttttctttctgtcatgcctatcacggcacgccccagaaatagagggcggtcggagatggaccgagttgatacggaccatggaaagtagggtcctgctgcgtacattttgcctcatatttgggctaggcgctgtgtgggggttgggtgtcgaccccagtttgcagattgacgtcctgacggagctcgaactcggggagtccaccacaggcgttcgacaggttccaggattgcataatggaactaaggcctttctttttcaggataccccccggtcgataaaggcatcaactgcaaccgctgagcaatttttccagaagttaaggaacaagcacgagtttaccattctcgttaccttgaaacagacacaccttaactccggggtgattttgagtattcaccatctagaccaccgatatctagagctcgaatcaagcgggcatcgcaacgaagtaagactacactacagatccggctcccaccgccctcacaccgaagttttcccttacatcctcgccgacgataagtggcataaactctctctggctatttccgcctcccacttgatcttacatattgactgcaacaagatttacgaaagggtggtggagaaaccgtcgaccgacctgccactggggactactttctggctcggtcagagaaacaatgcccatggttattttaaagggatcatgcaggatgtgcagttgctcgttatgccccagggcttcattgcccagtgcccggatctcaaccggacttgccctacctgtaatgacttccacggccttgtgcagaagattatggagctgcaagacatcctcgcaaaaaccagcgccaagctgtcccgtgctgaacagaggatgaataggttggatcagtgctactgcgaacgaacatgtaccatgaagggcaccacgtatcgggagttcgaaagctggatcgacgggtgcaagaattgtacatgtctgaatggtacaatccagtgtgagaccctgatatgccctaaccccgactgccctctgaagtccgcgcttgcatatgtagatgggaaatgttgcaaggaatgcaaaagcatctgtcaatttcagggacggacttacttcgaaggcgagagaaacaccgtttactctagctccggggtgtgtgtgctctatgagtgcaaagatcagaccatgaaactcgtcgaaagcagcggctgcccagctttggattgccctgaaagccaccagattactctcagccactcatgttgtaaagtttgcaaaggctatgacttttgctctgagcggcataattgtatggagaacagcatttgccggaatcttaacgaccgtgcagtgtgcagctgcagggatgggttcagggcattgcgcgaagataacgcttactgcgaggatatcgatgagtgtgctgagggtcggcactattgcagagagaacactatgtgcgttaacaccccaggatcatttatgtgtatctgcaagacaggttatattcgcattgatgactacagctgcacggaacatgatgaatgcataaccaatcagcacaattgtgatgaaaacgccctctgcttcaataccgtcggtggtcacaactgtgtgtgtaaacctggatacacgggcaacggcacaacctgtaaggctttctgtaaggacggatgccgtaacggcggagcatgcattgctgccaacgtatgtgcctgcccacaggggttcaccggtcctagctgcgaaaccgatatcgatgagtgttcggacggatttgtgcaatgtgacagcagagcaaattgtattaacctgcccgggtggtatcactgcgagtgcagagacggataccacgataacggcatgttctcgccgagtggagagtcttgcgaagacatcgatgagtgcggaacaggtcgccactcttgcgcaaacgataccatttgttttaatctggatggaggctatgattgccgatgtccacacggaaaaaactgtaccggggattgcattcacgatgggaaggtcaaacataatggtcagatatgggttttggagaatgataggtgttcggtatgtagctgccagaatggatttgtgatgtgccgaagaatggtttgcgattgtgaaaacccgactgtggatttattctgctgtcccgagtgtgaccccaggctcagcagccagtgcctgcaccaaaatggcgagaccctctacaactccggggacacctgggttcagaactgtcagcaatgtaggtgcctgcagggggaggtggattgttggcccctcccatgtcccgatgtggagtgcgaatttagcatcctgcccgagaatgaatgttgcccccgctgcgtgactgacccttgtcaagcggacacaatccgcaatgatataaccaagacctgtttggacgagatgaacgtggtacgctttaccggctctagttggattaaacacggtacggagtgtacactttgtcagtgtaagaacgggcacatttgctgttccgttgaccctcagtgtctacaggagctttag

SEQ ID NO: 125968 - DNA, 2451 bp, synthetic construct
  misc_feature 1..2451: note = Description of Artificial Sequence: Synthetic coding sequence
  source 1..2451: mol_type = other DNA
atggagtcaagggtactcttaaggacattctgcttaatattcggactgggggcggtctggggcctcggtgtcgatccaagcctgcagatcgatgttctcacagagctggagctgggcgagtctacaacaggcgtgagacaagtccctggtttacataatgggactaaagcatttctcttccaagatacgcctcggtccattaaggcatcaacagctacagctgaacagttctttcagaagttgcggaacaaacacgaatttactattttggtcactctgaagcagacccatctcaatagcggagtcattctgagcatacaccatctggaccataggtacttggagctcgaatcgtccggccacaggaatgaggttcggctgcattacaggtccgggagccataggcctcatacggaggtcttcccctacatcctggctgacgataagtggcacaagttaagtctggctatttcagcaagtcacctcattctccatattgattgtaataagatctatgagcgagtggttgaaaagccctctaccgacctgccattaggtacaacattctggctgggtcagagaaacaacgctcacggttattttaagggaataatgcaagacgtgcaactgctggtaatgcctcagggctttatcgcacagtgtcctgacttaaatcgtacttgccccacctgcaacgatttccacggactcgtgcaaaagattatggagctgcaggatatactggccaagacaagcgccaagctctcaagagcggaacagagaatgaatcgactggatcaatgttactgtgagagaacatgcactatgaagggcaccacctatcgtgaatttgagtcatggatcgacggctgcaaaaattgtacctgcctcaacggaactatacagtgcgagacattgatatgtcctaatcccgactgccctctgaaatcagctcttgcttatgtggatggtaagtgctgcaaagagtgcaagagtatttgtcagttccaggggcgaacctacttcgagggcgaaagaaacacagtgtactctagctctggcgtatgtgtgctgtatgaatgcaaagaccagaccatgaagctggttgaatccagtggctgccccgcccttgactgtccagaaagccaccagattactttgagccattcctgctgcaaggtctgcaagggctatgacttctgttcagagcgtcataactgcatggaaaattcaatctgtagaaacctgaacgatcgggctgtgtgcagctgcagggatggttttcgcgctctacgggaagacaacgcgtattgcgaagatatcgatgagtgtgccgaaggccgccactattgtagagagaatactatgtgcgtgaatacaccgggaagtttcatgtgcatatgcaaaactggatatatccgaatcgatgattactcttgtacagaacacgatgagtgcataaccaatcagcataattgcgacgagaacgccctctgtttcaacaccgtgggtgggcacaactgtgtgtgcaagcccgggtacacaggcaatgggacaacatgcaaagctttctgcaaggatggttgccggaacggaggagcttgcatagcagccaatgtctgtgcgtgccctcaggggtttactggaccatcctgtgagacagatatcgatgaatgctccgacggctttgtacaatgcgactctcgggcaaattgcattaatctcccaggatggtatcattgcgagtgcagagacggttatcatgacaacggcatgttttcaccttcaggagagtcatgtgaagacattgatgagtgcggcacagggcgccactcttgtgctaacgacactatctgcttcaatctggatggcggttatgattgccgctgcccacacggcaaaaattgtacgggagattgtatccatgatggaaaggtgaaacataacggtcagatttgggtcctcgagaacgatagatgttcagtctgctcttgccagaatggatttgtgatgtgtaggagaatggtatgtgattgcgagaatccgacagtcgacctgttctgctgtcctgagtgcgacccccggctgagctcacagtgtttacaccagaatggcgagactctgtataatagtggggacacgtgggtccagaattgtcaacaatgccgctgtctccaaggtgaggtggactgttggccccttccatgccctgacgtggagtgcgagtttagtatcctgcccgagaacgaatgttgcccccgttgtgtgacggatccctgtcaggccgatacaattaggaacgacataacaaaaacctgcctggacgagatgaatgtggtaagatttacagggagtagctggatcaagcatggaactgaatgtactctgtgtcagtgcaagaacgggcacatatgctgtagcgtcgaccctcaatgtttgcaagagctctag

SEQ ID NO: 125969 - DNA, 1734 bp, synthetic construct
  misc_feature 1..1734: note = Description of Artificial Sequence: Synthetic coding sequence
  source 1..1734: mol_type = other DNA
atggaaacaggactgggcgctccgttgtttaaggcatggttacttatctctgtgtgggggctgggagtggacccttcactccagattgatgtcctcactgagctggaactaggtgagtccacaactggggtgaggcaggtgcccggactacataacgggactaaagccttcttgtttcaggatacacctagatcgattaaagcctcaaccgccactgctgagcagtttttccaaaaactgcgaaacaagcacgagttcacaatcctggtgacgctaaagcaaacccacctgaacagtggcgtcatcctgagcattcaccacctggaccaccggtacctggaactggagtcctcaggacatcgcaatgaagtgcgcctccactatcggagcgggtcccaccgcccacacactgaggttttcccatatatcctggcagatgataagtggcataagctatcactggctatctccgcctcccacctcatactccatatcgactgtaataaaatttacgagagagtggtcgaaaagcctagtactgatctccctttgggcacaaccttttggttggggcagcgcaacaatgcccacgggtacttcaaagggattatgcaggatgtacagctgctggttatgccccaaggcttcattgcccaatgccccgatcttaaccggacatgcccaacctgtaacgattttcacgggctggtacagaagatcatggagctgcaagacatcctagccaaaacctcagcgaagctgagtagggcggaacagagaatgaacagactggaccagtgctactgtgagcgtacctgcacaatgaaaggcactacgtatagagagttcgagtcatggatagatgggtgtaagaactgcacgtgcctgaatggcacaattcaatgtgaaacactgatctgccctaatccagattgccctctgaaatcggcactggcctacgtggatgggaagtgttgcaaggaatgcaagagtatctgtcagtttcaaggcaggacttatttcgaaggggagcggaacacggtgtattccagtagtggggtctgcgtactatatgagtgcaaggaccagactatgaagctggtagagtcttcgggctgccccgccctcgattgccccgagtcccatcaaatcacactctcacactcatgttgcaaggtgtgcaaagggtatgatttttgtagcgagcgtcacaactgcatggagaatagtatttgtcgaaacctcaacgatcgagccgtctgcagctgccgggatggattccgtgctctcagggaggacaatgcctattgtgaggatattgacgagtgtgcagaaggcagacactattgccgggagaacacaatgtgtgtcaacacccctgggagcttcatgtgtatctgtaaaaccgggtacattcggatcgatgactacagttgcacagaacatgatgagtgtatcactaaccagcataattgcgatgaaaatgccctgtgtttcaataccgtggggggccataattgcgtctgtaagcctggatacacggggaatggcaccacttgcaaagccttttgtaaggacggctgccgtaacggcggcgcctgcatcgcagcaaacgtctgcgcctgcccccagggctttaccggtcccagctgcgaaacagatatcgacgaatgttctgacgggttcgttcaatgcgattctcgagccaactgtatttgtctcgtgccactgtag

SEQ ID NO: 125970 - DNA, 333 bp, synthetic construct
  misc_feature 1..333: note = Description of Artificial Sequence: Synthetic coding sequence
  source 1..333: mol_type = other DNA
atggaaacaggcctaggagcccctctgttcaaggcatggctacttattagcgtttgggggctgggcgtggatccctcgctgcagattgatgtcctgacggaactggaacttggagagtcaactaccggcgtaaggcaagtgccaggcctgcataatggtactaaagcattcctttttcaggataccccaaggagcattaaggcttccaccgcgacagcggagcaattctttcagaaactccgtaataagcacgaatttaccatcctggtcacgttgaaacagacccatttgaattccggagttattctgtcaatccatcacctagaccactag

SEQ ID NO: 125971 - DNA, 2448 bp, synthetic construct
  misc_feature 1..2448: note = Description of Artificial Sequence: Synthetic coding sequence
  source 1..2448: mol_type = other DNA
atggaaactggactgggcgcgcctctatttaaagcatggttacttatctccgtgtggggcctcggtgtggatccatccctgcaaatcgatgttctgaccgagctggaactgggggagtccaccaccggcgttagacaggtgcctggacttcataatggaaccaaggcgtttctgttccaggatactccacgatccataaaggcgagcactgcaactgcggaacagttcttccagaagctacggaataagcatgagtttacaatcctggtgacactgaaacagactcatttgaatagtggagttatactgtccatccaccacttagaccaccggtatctggagctagagagcagtggacacagaaacgaggtaaggttgcactatcggtcaggttctcatcggccccacaccgaagtgtttccctatattttggccgacgacaagtggcataaattgtcccttgcaatctcagcttcacaccttattctccatattgactgtaataaaatatatgaaagagtagtggagaagccttctactgacttgcccctaggaacgaccttttggcttggccagagaaataatgcgcatggctatttcaagggaattatgcaggatgtgcagctgctggtcatgcctcaagggttcatagcacagtgcccagatctgaaccgtacatgtcctacctgcaatgacttccacggactcgtgcagaagatcatggagctgcaggatatactggctaaaacttctgctaagctgagtcgagccgagcagcggatgaatcgcctcgatcagtgctactgcgaacgcacctgtacaatgaaaggcactacttatagagaatttgaatcctggatcgatggatgcaaaaactgtacttgcctgaatggcacaattcaatgtgaaactctgatttgcccaaatccggattgccctctgaagtctgcactggcttatgttgatggtaaatgctgtaaggagtgtaagtctatttgtcagttccagggtcgcacatacttcgagggggagagaaatactgtttatagcagcagcggagtctgcgtgctttacgaatgcaaagatcagacaatgaaactcgttgaatcaagtggttgcccagccctggattgtcccgagtcccaccagatcacactcagtcatagttgctgtaaggtttgtaaaggatatgacttctgctcagagcggcacaattgcatggaaaactccatctgccggaacctcaacgacagagccgtatgtagctgcagagacggttttagagcgcttcgggaagataacgcatattgtgaagacattgatgagtgcgctgaaggacgacactattgcagggagaataccatgtgcgttaacacacccgggtcatttatgtgcatctgcaagaccggatatattcggatcgacgactacagctgcacagagcacgatgagtgtatcactaatcagcataactgcgatgaaaacgctctgtgctttaataccgtcgggggccacaactgtgtttgcaagcccggatacaccggaaatggaactacttgtaaggcgttttgcaaggatggatgtagaaacggcggtgcttgcatcgcggcaaacgtgtgtgcctgccctcaggggttcacaggaccttcctgtgagaccgacatagacgagtgttctgatggctttgtgcaatgtgactctcgcgctaactgtataaaccttccgggctggtaccactgcgaatgtagagatggttatcacgacaacgggatgtttagcccatcaggtgagtcgtgtgaagacattgatgagtgcggcacgggccgacatagttgtgccaatgatacgatctgctttaacctcgatgggggatatgattgtcggtgtccacacggcaaaaattgcaccggcgattgtatacatgatggaaaggttaaacataacggtcagatttgggtgctggagaacgatcggtgttccgtgtgttcctgtcagaacgggttcgtgatgtgccgacggatggtttgcgactgcgagaatccgactgtcgacctgttttgttgtcccgaatgcgacccgagactgtcatctcagtgcctgcatcagaatggagagacgctgtacaactctggcgatacctgggtgcagaattgtcaacagtgcaggtgtcttcaaggggaggtcgactgttggccactcccatgtcccgacgtggagtgcgaatttagcatcctgccggagaacgagtgctgccccaggtgcgtcaccgacccttgccaggccgatacaatacgcaacgacattaccaaaacctgtcttgatgagatgaacgtggtccggttcactgggtctagctggatcaaacatggcacggagtgcacgctgtgtcagtgtaagaatggtcatatctgttgctctgtcgatccgcaatgtttacaggaactgtag

SEQ ID NO: 125972 - DNA, 69 bp, synthetic construct
  misc_feature 1..69: note = Description of Artificial Sequence: Synthetic coding sequence
  source 1..69: mol_type = other DNA
atggaaagccgggtgctcttaagaacattttgtctcatctttggcctaggagcggtctggggcctctag

SEQ ID NO: 125973 - DNA, 966 bp, synthetic construct
  misc_feature 1..966: note = Description of Artificial Sequence: Synthetic coding sequence
  source 1..966: mol_type = other DNA
atggaaagccgcgtgctccttcgcaccttctgcctcatcttcgggcttggggcggtgtggggtctaggcgttgatccctcacttcagatcgacgtcttaacagagctggagctgggtgaaagcactaccggcgtccggcaagtgccgggcctgcataacgggacgaaagcttttttgttccaggatactccccggtctatcaaagcatctactgcaacggcagagcagttcttccagaaactcagaaacaaacatgagttcaccatacttgtgaccctgaagcagacacacctgaactccggcgtgatactatcaattcaccacttagaccaccgctacctggaactcgagagttctgggcatcgtaacgaggtccgactgcattatcggagcggtagccaccgaccgcatactgaagtctttccttacatcttagctgacgacaagtggcacaaactgagtctggccattagtgcatcccatctgatcctgcacattgattgtaataagatttacgagcgggttgtggagaaaccttctactgacctgccactgggcaccacattctggctgggacagagaaataatgcccacgggtactttaagggcattatgcaagatgttcagctgctcgtcatgccccaaggattcattgcccagtgtcccgacctgaatcggacctgtccgacgtgcaacgactttcacggcctcgttcaaaaaatcatggaattacaggacatcctggccaaaacgagcgccaagttgagcagggccgaacagcgcatgaatcggctggaccagtgctactgtgagaggacctgtacgatgaagggcactacctatagagagttcgaaagttggattgacggatgtaagaactgcacatgtctgaatggaacaatacagtgcgagacgctgatctgccctaatcccgattgcccattaaagtcagctctcgcttactag

SEQ ID NO: 125974 - DNA, 4386 bp, synthetic construct
  misc_feature 1..4386: note = Description of Artificial Sequence: Synthetic coding sequence
  source 1..4386: mol_type = other DNA
atggccgccgagaggggtgcaagacgattactcagtaccccatcgttctggttgtactgcctcttgctgctcggccggagggcccccggagcagcggcagccaggagcggctcagccccccagtcgccaggtgcctcaatcagaacgtttacacccttctattttttagtggaacccgtagacactctctcagtgaggggaagctcagtgatcctcaactgctctgcctacagcgaaccaagcccaaaaatcgagtggaagaaagacgggaccttcctgaatttagtgtccgatgatagacggcagctgctgcctgatggatcactttttatttcaaatgtggtccattctaagcataacaagcctgacgaaggatactatcagtgtgttgcaaccgtcgaaagcctcgggaccataataagccgaacggccaaacttatagtggccggcttaccacggtttacgtctcagccagaaccctcttctgtatatgccggcaataatgcaatcctgaattgcgaagtcaacgctgatctcgtaccttttgttcggtgggagcagaaccggcagccattgctgctggatgatagggtgataaagctcccaagtggcatgttagtgatttcaaatgctaccgagggcgatggggggctgtaccgttgtgtggtggagtctggaggtcctcccaaatactcagacgaggtcgagctgaaggtgcttccagacccagaggtgattagcgatctggtctttctgaagcaaccttcacccctagtaagggtaatcgggcaggacgtagtcctgccatgcgtggcctctgggttaccaacacctacgatcaagtggatgaagaatgaagaggcactggacaccgaatccagtgaaaggctggtgctcttggcgggcgggtccctggagatttctgatgtgaccgaagatgacgccgggacatacttctgtatagcagacaatgggaacgagaccattgaagctcaggcagaattgactgtgcaggcacagcctgagtttcttaaacagcccactaatatttatgcccacgaatctatggacattgttttcgagtgtgaggtgacaggtaaacccacacctacagtcaaatgggtcaagaatggcgatatggtgatacccagcgactacttcaaaatcgtcaaggagcataatcttcaggtgctggggttagtaaagagtgacgaaggcttttaccagtgtatcgccgagaacgacgtcgggaacgctcaggccggagcacagcttatcatcctcgagcacgcacccgcaaccactgggcccctgccatctgcccctagggacgtggtggcttcacttgtgtcaacgcgcttcatcaaactaacctggcgcacccccgcgagcgatccacacggcgacaacttgacctatagcgtgttttacaccaaggagggcatcgcccgcgaaagggtcgagaacaccagccaccctggtgaaatgcaagtcactatccagaacctcatgccagctaccgtgtacatttttcgggtgatggcgcagaataaacacggcagcggcgagtcaagcgccccccttagggtcgaaacacaaccagaagtccaactgcctggtcctgctcctaacctgcgtgcgtacgccgcttctccgacctccatcactgtgacctgggagacccccgtctctggaaacggagaaattcaaaactataagctgtactacatggaaaagggtacagacaaggaacaggatgtggacgttagtagtcattcctacaccattaatggtttgaagaagtacaccgaatacagctttcgcgtcgttgcctataataaacatggaccaggagtatccacccctgacgttgcagtgagaaccctctctgacgtccccagcgctgctccacagaacctttcactcgaggtgagaaactcaaaatcaattatgatccactggcagccccctgctcctgccacgcagaacggacaaatcacaggttataagatcaggtataggaaagctagtaggaagtccgatgtgacagaaacgttagtatcggggacacagttgtctcagctcattgaaggcctggaccgtggcactgagtataatttccgtgtcgccgctctgaccattaatgggacaggaccggctactgattggttgtctgcagagacctttgaatcagacctcgatgaaacacgcgtgccagaagtgcccagctccctccacgtgagacccttggtcacgtccatcgtggtatcttggacaccaccagagaatcagaacatcgtcgtgcggggttacgcaattggctatggaatcggatccccccatgctcaaacaataaaggtggactacaaacaacggtactacactatcgaaaatctcgatccctctagccattacgtgatcacccttaaggcatttaacaacgtgggggagggaatacctttgtacgaaagcgccgtaactagacctcacacagacacctctgaggtggatctcttcgttatcaacgcgccctacacaccagtgccagacccgactccaatgatgccgcctgtcggagtccaggcaagtatcctgtcccacgataccatccgcatcacttgggcagacaactctctgcccaaacatcagaagatcaccgattcccgctattatactgtgcgctggaaaacaaatattcccgctaacaccaagtataaaaacgcaaatgcaaccacactgagttaccttgtcaccgggttgaagcccaacacgttgtacgagttttccgtgatggttacaaaggggagacgcagctccacttggagcatgactgcccatggtacaacattcgagttagtgcccacttcccccccaaaagatgtcactgttgtgtccaaagaaggcaaacctaaaaccatcatagtgaactggcaaccacccagtgaagcaaacggcaagatcacaggctacataatatactattctactgacgttaacgctgaaatccacgactgggtgattgagccagtggtcggaaatcgcctgactcaccagattcaggagctaacattagataccccctattatttcaagattcaggcacggaacagtaaaggcatgggaccgatgtctgaggccgttcagtttcggaccccgaaggctgattcctccgacaaaatgcccaacgaccaggcatccggcagcggcggaaaagggagccggttaccagatctgggctcggattataagccacctatgagtgggtccaacagtcctcacggatcccccaccagcccgctcgattcaaatatgctgcttgtcatcatagtgtccgtcggcgtgataaccattgtggttgtagtgattatcgccgtgttctgtaccaggagaaccacctcccatcagaagaaaaagagagccgcatgcaagtccgtcaacgggtcccataaatataagggcaattccaaggacgttaaacccccagacttgtggattcaccatgaaaggttggagttgaaacctattgacaaatcgccggatccaaatccaatcatgacagacacaccgatcccacgcaatagccaggacatcacccctgtggacaactccatggatagcaacatccatcaacgtcgaaactcttatcggggccacgagtctgaagattcaatgtcaaccctggctggcaggcggggaatgcgaccgaaaatgatgatgccatttgactctcaaccgccgcagcccgttatctctgcccaccccatccatagcctggataacccccatcatcacttccactccagctccttggcctcccccgctagatctcatttgtaccaccccggctcaccttggccaatcgggacaagcatgtctctcagcgaccgggcaaactcgactgaatccgtgagaaatacaccaagcacagacacaatgccagcctcttcgtcgcagacctgctgtacagaccatcaagaccccgagggtgcaacaagctcttcttacttagcgagctcccaggaggaggatagcggtcagtccctgccgaccgctcatgtgaggccaagccatccgctaaaatcgtttgctgtccccgcaattccccccccagggcctccgacatatgatcctgccctaccatcaacaccacttctctcccagcaggcactgaaccaccacatacactccgtaaaaaccgcttctatagggaccctcggcagatcccggccccctatgccggttgtggtcccttctgctcctgaggtccaggagacaaccagaatgctcgaagactccgagagctcctacgagcctgacgagctgaccaaagaaatggcccacttggagggtctgatgaaggatctgaacgcaattactacggcatag

SEQ ID NO: 125975 - DNA, 4386 bp, synthetic construct
  misc_feature 1..4386: note = Description of Artificial Sequence: Synthetic coding sequence
  source 1..4386: mol_type = other DNA
atggcagccgagaggggtgcccgccgtttgttgagtactccttccttctggttgtactgtctgcttttgttaggcaggagggcacctggggccgccgccgcaaggtccggcagcgctccacagagtcctggggctagcatcaggacctttacacccttttactttctggtggagcctgtcgatacactgtctgtgagaggtagtagtgtgattctaaactgcagtgcttactccgaaccatcccccaaaatcgaatggaagaaggatggaactttccttaacctcgtgtccgacgacaggcggcagctgctccccgacgggtctttgttcatcagcaatgtggtacatagtaaacataataaaccagatgaaggctattaccagtgtgtggcgaccgtcgaatccctcggaacaattatttccaggaccgctaaactcatcgtcgctggcctgcccaggtttaccagccagccagaaccttcctccgtgtacgcaggaaacaacgccatccttaattgcgaggtgaatgccgatcttgtccctttcgtgagatgggaacaaaatcgacaacctcttctgctggacgaccgcgttattaagctgccttcgggaatgctggtgatttccaatgccacagagggagacggcgggttgtataggtgtgtcgtggagtcgggcggtcccccaaagtattctgatgaggtggaactgaaggtgctgcctgacccggaggtgatatccgacttggtttttttgaagcagccttctccccttgtgcgtgtgataggccaagacgtggtacttccttgcgttgcatcggggctaccaaccccgacaatcaaatggatgaaaaacgaggaggccctcgatactgagagtagcgaaaggcttgtgcttctggccggtggttcacttgagatctctgacgtgactgaggacgacgccgggacttacttttgcatcgccgacaatggtaacgaaaccattgaggcacaggctgagcttactgtgcaggctcagcccgaattcttaaagcaacctacgaacatttatgcacacgagtccatggatatcgtgttcgaatgtgaagtcacgggtaagccaacaccgaccgttaaatgggttaagaatggagacatggtgatcccatccgattactttaaaattgtcaaggaacataacttacaggtcctggggctggtcaagtctgacgagggcttttatcagtgcatcgctgagaacgatgtcggaaatgctcaagccggcgcgcaactgataatcctggagcacgctccagcaacaacaggaccgctgccttccgctccgcgtgacgtagtggcctccctcgtgtcgacccgatttatcaagcttacttggcggactccagctagcgacccacacggggataatctgacatatagcgtcttttataccaaggaaggaatcgctcgcgaaagggtggagaatacctctcaccccggcgagatgcaggtgaccatccaaaatttaatgccggcaaccgtgtatattttccgcgtgatggctcaaaacaagcacggatccggcgagtcatcagcgccactgcgggtggaaactcagccagaggtgcagttacctggccccgctcccaacctgagagcctacgcggcatctcccaccagtatcacagtcacatgggagacgccagtatctggcaatggagaaatccagaactataagctgtattacatggagaaaggcaccgataaggagcaggatgtggatgtctcctcacatagttatacaatcaacggcttgaagaagtataccgaatacagtttccgggtagtggcctataacaaacatggccctggagtgtctactcccgacgttgctgtccgtaccctcagtgatgtaccctcagccgctccccagaacctttctctggaggtccgcaactctaagtccataatgatccactggcagccaccagcgcctgccacacagaatggccaaataactggctataaaattcgttaccgcaaagcttcaaggaaatccgatgtaaccgagacactcgtgtcagggactcagctgtctcagctgattgagggactagaccggggtactgaatataacttccgagtcgcagcgctcacaatcaatggcactgggccggctaccgattggttgtcagccgaaacgttcgaatccgatttggatgagactcgagtccccgaggtgcctagcagcctgcacgtgcgtcctctcgttacctcaattgtagtgtcttggactccacccgaaaaccagaacatcgtggtccgcgggtatgcaattggctatggaataggatccccccacgctcagaccataaaggttgactacaaacagcggtattatactatcgaaaacttggacccctcatcccactacgttatcactctgaaggccttcaacaacgtgggggagggcattcccctctacgagagcgcagtaacacggccgcacaccgacacatctgaagtggatctcttcgtaattaatgcaccatacacacctgtacctgaccccacccccatgatgcctcctgttggcgtgcaagcctcaatcctttctcatgacaccatcagaatcacatgggcggacaacagcctccccaagcatcaaaagatcactgactctaggtactataccgtgagatggaagactaatatccctgcaaacactaaatataaaaatgccaatgcgacaactctctcatatctggtgacaggtctcaagccaaataccctctacgaattctctgtgatggtgaccaaaggtagaaggtcgtccacgtggtctatgacagcccatggcacaacattcgagctggtgcccactagccctcctaaagacgttacagtggtctccaaggagggtaagcccaagactatcattgtgaattggcagcctcccagtgaagcaaacgggaaaattacgggctacataatctattattcaactgacgtgaatgccgagatccatgattgggttatcgagcccgtggtgggaaaccgcctgactcaccagatccaggagttaaccctggataccccgtactatttcaaaatccaggcaaggaacagcaaaggcatggggccaatgagcgaggccgtccagttcaggactcctaaagccgattccagcgacaagatgcctaacgaccaggcctctggtagtggaggcaaggggtcacggcttccagacctcggctccgattataaaccccctatgtccggcagtaacagtccccatggaagtccgacctccccgcttgatagcaacatgctgttagtgattatcgtgtctgtgggtgtaataaccatcgttgtggttgtgatcatagcggtattttgcactcggagaaccacaagtcatcagaaaaaaaaaagagcagcttgtaagagtgtcaacggctctcacaaatacaaggggaactctaaagacgtcaaaccccctgacttatggatacaccacgagaggctggagctgaaaccgatcgataagtccccagaccctaacccaattatgactgacacacccatccctcgcaattcacaagatatcacacccgttgacaactctatggatagcaacatccatcagcggcggaacagctatcgtgggcatgagagcgaggactctatgagtacactagcaggcagacgtgggatgcgccccaagatgatgatgccgtttgattcccagcccccacaaccagtcatctcggcccacccaatccacagcctagacaatccacatcatcacttccacagcagcagtttagcatcgcctgcccggagccatctgtatcaccctgggtccccctggccaatcggcacttcgatgagcttaagcgatcgcgccaacagcaccgagtccgtcaggaataccccctccacagataccatgcccgctagcagcagtcagacttgctgtacagaccaccaggaccctgaaggggcaacttcgtctagctaccttgccagctcccaagaggaggacagcgggcagtccctgccaaccgcacatgtgcgcccctctcatccactcaaatcatttgctgtccctgccattccccctccgggaccccctacctatgacccagcgctacccagcacccctctgttgtcccagcaggcccttaaccatcacattcactctgtgaagaccgcctccatcggcacactcgggcgatctcgacctccaatgcctgtcgtggttccctcagccccagaagtccaggagactaccagaatgctagaggactctgagtccagttatgagccagatgagctgactaaagagatggcacaccttgaaggactgatgaaagacctgaatgctattactaccgcttag

SEQ ID NO: 125976 - DNA, 3519 bp, synthetic construct
  misc_feature 1..3519: note = Description of Artificial Sequence: Synthetic coding sequence
  source 1..3519: mol_type = other DNA
atgaagaatgaagaagccctcgatactgagtccagtgagagactggttctgcttgccggcggttccctggagatttcagatgtcactgaggacgatgccggcacctatttctgtatcgctgataatggtaacgaaacgatcgaggcacaggccgaactgaccgtgcaggctcagcccgagttcctcaaacagccgactaatatatacgctcatgagagtatggacatagtgttcgagtgtgaagttacgggaaaacctacacctacagtgaagtgggtcaagaacggggacatggtgattccatcagactacttcaagattgttaaggagcacaacttgcaggtgcttggtctggtcaagagtgatgaaggcttttaccagtgcatagccgaaaatgacgtgggaaacgctcaagcaggggcacagcttatcattctggaacatgatgtggctattcccacgctcccgcccacaagcctgacatccgccacaacggaccatctggcccctgctacgactggacctttgccctccgctcctagagacgtggtcgctagcctggtgtccacacggttcatcaagctgacatggcggaccccggctagcgatccgcacggagataatctgacctacagcgtgttttatactaaggagggcattgcccgtgagcgtgtggagaatacctcccatccaggggaaatgcaagtaactatccagaacctgatgcccgctacggtgtatatcttccgcgttatggcccaaaacaagcacgggagcggcgagagcagcgctccactgcgggttgagactcaaccagaagttcagttgccgggccccgcaccaaatctgcgcgcttacgctgcctcgccgacatcaattaccgtcacatgggagactccagtgtccggaaacggtgagattcagaattataagctgtactacatggaaaaaggcaccgataaggaacaagacgtggacgtctcttcccatagttataccattaatgggcttaagaagtatacagaatatagcttcagggttgtcgcatacaacaagcatggccctggcgtaagtacaccagatgtggcagtgcgcacgttaagcgacgttccatcagcagccccgcagaatttatccttggaagttcgcaacagcaagagtatcatgatccactggcagccacctgctcccgctacgcaaaacggccaaataacaggctacaagattagatataggaaggctagccgaaagagtgacgtaaccgaaaccctggtctctgggactcagctgtcacagctgatcgaaggcttggacagagggactgagtacaatttccgcgtcgccgctctgaccattaacggaaccgggcccgctactgactggctcagcgccgagacctttgagagcgatctggatgagacccgcgtgcctgaggtgccatcatcattgcacgtccggcctctagtgactagcattgtagtttcttggacacctccagaaaatcagaatattgtagtacgtggatacgcgatcggttacggtattggaagcccccatgcacaaaccattaaggtcgattacaaacagcgatactataccatcgagaacttggatcccagtagccattacgtgattaccctgaaagcattcaacaatgtgggagaaggtatccccctgtacgaatctgctgtcactcgcccacacacagtgccagatcccactcctatgatgccacctgtgggggtgcaagcctccattttatcacacgacactatacggattacctgggcggataacagcctgcctaaacatcagaaaattacagactcccggtactacacagtaaggtggaaaaccaatatccccgccaatactaagtacaagaatgcaaatgccacaaccctcagttacctggtgaccgggttgaagccaaataccttgtatgaatttagcgtaatggtgacaaaggggcgccgtagctctacatggtcaatgacagcacatggcacaacattcgaattagtgcctacgtccccccccaaggacgtaactgtggtgtccaaggagggcaaacccaagactattatcgtaaattggcagccgcctagcgaggccaatgggaaaatcactggctacatcatttattatagcactgatgtcaatgctgaaatccacgattgggttattgagcccgtcgtgggcaatcggttgacacaccagatccaggagctgactctggatacaccttattacttcaagatacaggcccggaacagtaaaggcatgggccccatgagtgaagctgtgcaatttcgcacccctaaggcctctggcagcggcggtaaaggcagccgtctacccgaccttggcagcgactataaacccccgatgtctggttcaaactccccgcacggatcacccacatcccctttagatagcaacatgttactggtgattatcgtgtccgtcggggtgattacaatcgtggtggtagttataatcgccgtcttttgcacgcgccgtactacaagccatcagaaaaagaaaagagctgcttgcaagagtgtgaacggttctcacaagtacaagggtaattccaaggatgtgaagccacccgacctgtggatccaccatgagagactcgaattgaaaccaatcgataaaagccctgaccctaatcctatcatgactgacaccccaatccccagaaattcccaggacataacacccgttgacaatagtatggacagcaacatccaccagcgccgtaattcatacagagggcatgaaagcgaggacagcatgagcaccctcgccgggcggcgtggtatgaggccgaagatgatgatgccatttgattcacagccaccacagccggtgatcagcgcgcatcccattcactcgctggacaacccccatcaccattttcactctagcagcctggccagtcccgccaggtctcacctctaccatcccggctccccatggccaattggtacttcaatgtccctgagcgaccgagctaactctaccgagagtgtgcgcaacacacctagcaccgacacaatgcctgcctcctcatcccaaacgtgttgtacagatcaccaggatcccgaaggggcaacatcttcaagctacctggcgtcctcccaggaggaggacagcggtcagtctcttcctaccgcacatgtccgccccagccatcccctcaagtcattcgccgtgcctgccatcccacctccaggacctcccacttacgaccctgcgctgccttctacccccctactcagccagcaggcactcaatcaccacattcacagcgtcaaaaccgcctccatcgggacactgggtagatcgaggccacctatgcctgtggtggtgccctcagctccagaggtacaggagaccactcgaatgctagaggactctgagtccagctatgaacccgatgagctgactaaagaaatggctcacttagagggattaatgaaggacctaaatgccattacaaccgcctag

SEQ ID NO: 125977 - DNA, 4353 bp, synthetic construct
  misc_feature 1..4353: note = Description of Artificial Sequence: Synthetic coding sequence
  source 1..4353: mol_type = other DNA
atggccgccgaacggggagccaggcggttactgtccacacctagcttttggctgtactgtttgctgctgctgggccgccgcgccccgggagccgccgccgccagaagcggctccgcaccccagtctcctggggctagcattcgaactttcacacctttttacttcctggtcgagcccgtagacaccttatccgtccggggttccagcgtcattctgaactgcagcgcttatagcgaaccctccccaaagatcgaatggaagaaggacgggacattcctgaatctggtgtcagatgatcgaagacaactgcttcctgacggcagcctgttcatttctaatgtggtgcactccaaacataacaaacccgatgaaggatactatcagtgcgtggcgaccgtggaaagccttggtaccatcatttcacgcaccgccaagctgatcgttgcgggcttgccaaggttcacctcccagcctgaaccttcgtccgtgtatgccgggaacaatgccatcctgaattgtgaggtaaacgcagacctcgttccattcgtccgctgggaacagaatagacaacccctcctgctggacgaccgcgttatcaagttaccttctggcatgttggttatctcaaatgccaccgaaggcgatgggggtttgtatcgctgtgtagtggaatctggaggacccccaaaatactccgatgaagtggagctgaaagttctgcccgacccagaagtgattagtgacctcgtcttcctgaaacaaccaagtcctctagtccgtgtgatagggcaggatgttgtgctcccttgtgtggcttccggcctgcccacacccactatcaaatggatgaaaaacgaggaagcgcttgataccgagagttccgagcggctggtactactggccggcggaagcttggaaatctccgatgtgacggaggatgacgcggggacttacttttgtatcgccgataacggcaatgagacaatagaggcacaggccgaactgactgtgcaggcacaacccgagttcctgaaacagcccaccaacatatatgcacatgaatccatggatatcgtgttcgagtgtgaagttaccggcaagccgacccccaccgttaagtgggtcaagaatggggacatggttatcccaagtgattactttaagatcgtcaaggaacataatttgcaagtgctgggcctcgtgaagagtgatgaaggcttttatcagtgcatcgcagagaacgacgtggggaacgcacaggctggggcccagctcatcatcctcgagcatgccccggcgactacaggcccgctgccgagcgcccccagagacgtcgtggcctcattggttagcacgcgcttcatcaagctgacatggagaacacctgcctcggacccccacggagataatctgacatacagcgtgttctatacaaaggaaggtatcgcaagggaaagggtggagaatacttcacacccaggtgagatgcaagtaacaattcagaacctgatgcctgcgacggtatatattttccgggtgatggcccagaataagcatggctccggagagagttcggcccccctcagagttgaaacacagccggaagtgcagcttcctggtccggctcctaacctgcgagcgtacgccgctagtcccacaagtataaccgttacctgggaaaccccagtgtccgggaatggggaaatccaaaactataaactctactatatggagaagggcaccgataaggaacaagacgtagacgtgagctctcattcctatacgatcaacgggctaaagaagtacactgaatattctttccgcgtggttgcctacaataagcacggccctggtgtctcaacacccgatgtggcggtgcggactctgtccgatgtgccgtctgcagccccgcaaaacttaagcttggaggtgcggaactctaaatctatcatgatccattggcagccacccgcacccgccacccaaaatgggcagattacagggtataagatccggtataggaaagcaagccgcaagtccgacgtgactgaaacactggtgtctggaacccagcttagtcagctaattgagggactcgacagggggacagaatacaacttcagggtggcggcactcacaattaacggaaccggaccagccacagattggctatcagccgagaccttcgagtcagaccttgatgagacacgcgtacctgaggtgcccagtagcctgcacgtgcgacccctggttaccagtattgtggttagctggactccacctgagaatcagaatattgtcgtgcggggatatgcaatcggatatggtatcggatcaccccatgcacagactatcaaagtggattataagcagcgttattataccatcgaaaacctcgatccaagttcccattatgtgattacactgaaggctttcaacaacgtaggggagggtatccctctatatgaaagcgctgtaaccagaccacatacggatacttctgaagttgacttattcgtgattaatgcaccatataccccagttcccgatcccacgcccatgatgcctcccgtcggggttcaggcctctatcctttcccatgataccattcgcattacatgggccgacaattcactacctaagcaccagaaaattaccgattctcgttactacacggtaaggtggaagacgaacatcccagcaaacacgaaatataagaacgctaatgctactacgctctcatacctcgtcactggtcttaagccaaataccttgtatgaattctcagtgatggttactaaggggcggcgatcttctacatggtccatgaccgcccacggaacaacattcgagttggtacccacgagcccccccaaagacgtaacagttgtgagcaaagagggtaagcccaaaactatcattgtcaactggcagccaccttccgaagcaaacggtaaaatcacaggctacatcatctactattctaccgacgtcaatgcggagatacatgattgggtcattgagcctgtggttggcaatcgcctgacccatcagatccaagaacttaccctcgatacaccctactattttaaaatccaggcccgaaattctaagggtatggggcccatgagtgaggcagtacagtttagaacgccaaaggccagcgggagtggaggaaagggctcccgcttgcctgacctgggtagcgactacaagcctcctatgagtggatccaattctccccacggctcacctacctcgccccttgattctaacatgctgttggtgattattgtgtcagtgggagtgattaccattgtagttgtggtcattatcgcagtgttctgtacacggagaaccaccagccaccagaagaagaaaagggccgcatgtaaatccgtgaacggtagtcataaatacaaggggaacagcaaggatgtcaagccccccgacctgtggatacaccacgaaagattggagctgaagcccatcgataagtccccggatcccaacccaattatgaccgataccccgattcccagaaacagccaagatattacccctgtggataacagtatggattcaaacatccatcagaggcgaaactcctatagaggacacgagagcgaggacagcatgagcaccctggctggccgtcgggggatgaggcctaagatgatgatgccctttgacagccagcctcctcagcccgtgatatcagcccatcctatacactccctagacaatccacaccaccacttccattcttcctccctggccagcccagctagatcgcacctctaccaccctggtagcccttggcctatcgggacgagcatgtcactgtcagaccgagccaattccaccgaatctgttcgcaatacgccaagcacagacactatgcccgcaagctcttctcaaacatgctgtacggatcatcaagatcccgaaggcgccacttcatcctcctatctggcgtccagccaggaggaagactccggccagagtctgcccacagctcatgtgagaccgtcacacccgttaaagtcattcgcagtcccagcaatcccacctcctggcccccctacgtatgacccagcccttccatctacaccccttttaagtcagcaggcgctgaaccaccatatccactccgtaaagacagcttccatcggcacactcggaagaagccgtcctcctatgccagtagttgtgccttctgcccccgaagtacaagaaactacccgcatgctcgaagacagtgagagtagctatgagccagatgagctgaccaaggagatggcccacttggaaggactcatgaaagacttaaacgccattaccacagcctag

SEQ ID NO: 125978 - DNA, 4227 bp, synthetic construct
  misc_feature 1..4227: note = Description of Artificial Sequence: Synthetic coding sequence
  source 1..4227: mol_type = other DNA
atggcggctgagagaggggcccgtcgtctgttatccacgccctctttttggctgtattgcctgttgttactgggccgtagggccccaggcgctgccgcggcaagaagcgggtctgctcctcagtcccccggtgcctccattcgtacctttaccccattttatttcctggtcgagcctgttgacaccctcagcgtcagaggctcaagcgtgatcctgaattgtagcgcctactccgagccctctcccaaaatcgagtggaagaaagacggcacttttctcaatttggtgagcgacgaccggcggcagctcctacctgatgggtctttgttcatctccaatgtcgtgcattccaagcacaacaaacctgacgaagggtactatcagtgcgtggctaccgttgagagtttaggtacgattattagtagaaccgcaaagctgatagtcgccgggttgccacggttcacaagtcagccggaaccctcgagcgtgtacgctgggaacaatgccatcttgaactgtgaagtaaacgccgatttggttccttttgtgcggtgggaacaaaataggcaaccgctcctgctggatgaccgcgtgattaaactgccgagtggaatgctggttattagtaacgcaacagagggtgacggcggtttgtatcgttgtgtagtcgaatccggtgggcccccaaaatattcagatgaggtcgagttgaaggtcctgcccgaccccgaggtgatctcagacctggtcttcctgaagcaacctagccctttggtgcgcgttatcggacaggatgtggtgctcccctgtgttgcttccggtcttccaactcctacgatcaaatggatgaagaacgaagaagcgctcgacactgaaagctccgaacgcctggtattactcgccggcgggtccttagagatctctgatgtgacagaagatgatgctggtacttacttttgcatagccgataacggcaatgagacaatcgaagcccaggcagagctgaccgtccaggcccagcctgagttcctcaagcagccaaccaacatctacgcgcacgaatctatggatatagtttttgaatgtgaggttacaggcaagcccactcccactgttaagtgggtgaaaaatggggatatggtaattccctccgattatttcaagatcgtgaaggagcacaacttacaagtgctgggtttggttaagagcgacgaaggtttttatcagtgcatagcggagaacgacgtcggtaatgcccaggccggcgctcagctcattatcctggagcatgctccagctaccacgggccccttgcctagcgcaccccgggatgtggttgcatccctcgtcagcacccgctttattaagttgacttggcgcactccagcttctgatcctcacggcgataacctcacttactccgtcttctatacaaaggagggaattgcccgcgaacgggtcgaaaatacttcccatcccggcgaaatgcaagtgacaattcagaacctgatgcccgcaactgtctacatttttcgggtaatggcccagaataagcacggatccggcgagtcaagcgctcccttacgagtggagacccagccggaggtgcagctgcccggccccgccccgaatctccgcgcttatgctgccagccctacttctattacggttacctgggagactccagtttcaggaaacggcgagattcagaattataaactctactacatggagaaaggaacagataaggagcaggatgtcgacgtcagctcccactcctacaccattaacgggttaaagaaatacacagaatatagctttagagtggtcgcctacaacaagcacggtccaggagtgagtacaccagatgtggcagtgaggaccctatctgatgtgccttcagccgccccacagaacctgtcattggaggtgagaaacagcaaaagtattatgattcactggcagccccccgcccccgccactcagaacggccagatcaccggctataagatacgatacaggaaagcctccaggaagtcagacgtaacagagacattggttagtggtacgcagctgagtcaactaatcgaaggattagatagggggacggagtacaatttccgggttgctgccctgacgataaatggaacagggcctgcaactgactggctctctgccgagacattcgagtcagatctggacgagactcgagtccctgaagtaccctctagccttcacgtgcgccccttggtcactagcatcgttgtatcctggacaccacccgaaaaccagaacatcgtcgttcgcggttatgccatcggttacggaattggctccccccacgctcagacaatcaaggtcgactacaaacagcgctactacacaatcgaaaatctggacccttcctcccattacgtgattactctgaaggcatttaacaatgttggcgaaggaatccccctctacgaatccgctgtaactcggccgcatactgacacaagtgaggtcgatctgtttgtgataaacgccccatatacaccggtccctgaccctacaccgatgatgcctcctgtgggtgtgcaggcttccatcttgagccacgacaccatcaggataacctgggcagataattctttgcctaagcaccagaaaattacagattcccgctactacaccgtgcgttggaagacaaatattcccgcaaatactaagtataaaaatgccaatgcgactactctgtcttacctcgtgacagggttgaaaccaaatacactatacgagttctctgtgatggtgacaaaaggaagaaggagttctacatggtctatgactgcccatggcacaacatttgaactcgtgcccactagtcccccaaaggacgtaactgtggtcagcaaggagggcaaaccaaaaacaatcatcgtcaactggcagccaccatctgaagcaaacggaaaaatcaccggctacatcatctattactccacagacgtgaacgcggagattcacgattgggttatcgaaccagtagtcggaaatagacttactcaccagatacaagaattaacgctcgataccccatattacttcaagatccaggccagaaacagcaagggcatgggccccatgtcagaggctgtacagttccgcacccccaaagccgacagcagcgataagatgccaaacgatcaggcctccgggtctggcggtaagggtagcaggctgccagatctgggctcagactacaagcctcccatgtccgggagcaactccccccatggaagccctacttctccacttgattccaatatgttgctagtaattattgtgtctgtgggcgtgattacaattgtggttgtggttattattgctgtgttctgtacgcggcggacaacatcccatcaaaagaagaaacgggccgcctgtaaatcggtgaacggttctcacaaatacaagggtaacagtaaggacgtaaagccacccgatctgtggatccaccatgaaagactggagcttaagccgatcgacaaatcacccgacccgaatcccattatgaccgatacacccataccccggaatagtcaggatattactcccgttgataactcaatggacagcaacattcaccagcgccgcaattcttacaggggacacgagagtgaggacagcatgagtaccctcgctggaaggcgtgggatgaggccgaaaatgatgatgccttttgacagccaaccaccacagcaaagcgtgaggaacacgcctagcaccgacacaatgcccgccagctctagccagacctgttgcacggatcatcaggatcctgagggcgcgactagctctagctaccttgcatcaagtcaggaagaagacagcggtcaatctctcccaactgcacacgttcgacctagccacccgcttaagagcttcgcggtccccgcaatacctcctccaggtcctccgacatatgacccagccctcccatccactcccctcctgagtcagcaagcgctaaaccatcatatacacagcgtgaagaccgcttccataggcaccctgggtagatccagacccccaatgccagtggttgtcccctctgccccggaggtccaggagaccacccggatgctggaggattcagagtcctcttatgagcccgacgagttgacaaaggagatggctcacctggagggtttgatgaaggatctgaatgccatcacaaccgcatag

SEQ ID NO: 125979 - DNA, 1074 bp, synthetic construct
  misc_feature 1..1074: note = Description of Artificial Sequence: Synthetic coding sequence
  source 1..1074: mol_type = other DNA
atgcagtccgttcagtccacatccttctgcctcagaaaacagtgtctgtgtcttacctttctgctcctccacttactcggccaggtggcagccacgcaaagatgtcccccacagtgtcctggtagatgcccggccacccctcccacctgcgcacccggtgtgcgagcagtcttagacggttgcagctgttgtcttgtttgtgcacgtcagcgtggcgaaagctgcagtgaccttgaaccctgcgatgagagttctgggctgtactgtgaccgcagtgccgacccctcaaaccagacaggcatttgtactgccgtggagggtgacaattgcgtatttgatggggtgatttacaggtcaggggagaagtttcagccctcttgtaagttccagtgcacatgcagagatggacagataggatgtgttcctcgatgtcaattagatgtcctgctgcccgaacccaattgtccagccccccggaaggtggaagttccaggggagtgttgtgagaaatggatttgcggtcccgacgaggaggactccctgggcgggttaacattggctgcctatcgcccggaggcgacattgggcgtggaggtgagtgactcctccgttaactgtattgaacaaacgaccgaatggaccgcctgcagcaagagttgtgggatggggttttccactcgcgtgacaaaccgcaaccgtcagtgtgagatgctgaagcagaccagactgtgtatggtcagaccttgcgaacaggagcccgaacagcctacagataagaaaggcaaaaagtgtctaaggaccaagaagagcctaaaggccattcatctgcagttcaaaaactgtacatctcttcatacctataaacctcgcttttgcggcgtctgctccgacggtaggtgttgtactccgcacaacactaaaaccatccaggccgaattccagtgctcccctgggcagatcgtgaagaaacctgttatggtgatcggcacttgcacatgtcatactaattgtccaaagaataatgaggctttcctgcaagagttggagcttaagacaacccgaggcaagatgtag

SEQ ID NO: 125980 - DNA, 2202 bp, synthetic construct
  misc_feature 1..2202: note = Description of Artificial Sequence: Synthetic coding sequence
  source 1..2202: mol_type = other DNA
atgcttgccagacgccagagagaccccctccaggcactcagaagacgaaaccaggagctgaagcagcaggtggatagcctgctgagcgagtcccaattgaaggaggctctagaaccaaataagagacagcatatttaccagcggtgcatccagctgaagcaagcaatagacgaaaataaaaatgcccttcagaaactgagtaaagcggacgaatcggcgcctgttgcaaactataaccaaagaaaggaggaagaacatacactgctggataaactcacccaacagctccagggccttgctgtgacaatatcaagggagaatatcactgaggttggagctcccacagaagaagaggaagaatcagagagtgaagattctgaggatagcgggggagaagaggaggatgctgaggaggaagaagaagagaaggaggaaaatgaaagtcataagtggtctaccggggaggagtacatagctgttggggacttcactgcccagcaggtgggtgacctgacttttaagaaaggggagatcctgctcgtgatagaaaaaaaaccggacgggtggtggatagctaaagacgctaaagggaatgaagggctggtgccaagaacttatctggagccctacagtgaggaagaagagggccaagaatccagtgaagagggctctgaggaggacgtcgaggctgtggacgagactgcagacggggcggaggtcaaacagcgcaccgatccacattggtctgctgtgcaaaaagcaatcagcgaagctggtatattttgtctggtgaaccacgtcagtttctgttatctgatcgtgctgatgcgcaacagaatggagaccgtggaagacaccaatggctctgaaaccgggttccgcgcttggaatgtccaaagccgcggaagaattttccttgtgtccaaacccgtactacaacagatcaacacagtcgatgtactgaccactatgggtgccattcctgcgggttttcgcccaagcactttgtcacagctgctggaagaggggaatcagtttcgggcgaattattttctgcagccagaactgatgccaagtcagctcgcctttcgggacctgatgtgggacgcaaccgaaggaaccattagatcccgcccctctcgtatctctctaattttaactttgtggagttgcaagatgattccactccccggaatgtccatccaggtcctgtcccgacacgttcgcctgtgcctttttgatggcaacaaagtcctctccaatattcacactgtgcgagccacatggcaaccgaagaagcccaaaacttggactttttctccccaggtgacccgtattctgccctgtctgttggacggcgattgctttatccggtccaattccgcaagccctgacctcgggatattattcgagctcggaatttcatatataaggaactcaaccggcgaacggggagagctgtcctgcggctgggtgttcttgaagctatttgacgcaagtggtgtgccaattcccgccaagacttatgagttattcttaaacgggggaaccccttacgaaaaagggattgaggtagatcccagcatctcaagaagggcgcacggcagcgtcttttatcagatcatgactatgcgcaggcaaccacagttactagtaaaactgagatccctcaacaggcggtccagaaatgtgctgtcacttcttccagagaccctcatcggaaacatgtgtagcatccacttacttatcttttacagacagatcctaggagacgtccttctgaaggacagaatgagcctccagagcactgacctgattagccatcccatgctcgcaaccttccccatgcttctggaacagccagacgtcatggacgccttgcggtcctcatgggccgggaaagagagcacgctgaagagatcagagaaacgggacaaggagttcttgaaaagcactttcctcttggtttatcacgactgtgtgctgcccctcctacactctacgagactgccaccattcaggtgggccgaggaagaaaccgaaactgcgcggtggaaagtcattacagatttcttgaagcaaaaccaggagaaccaaggcgccctccaggccctgctgtctcccgatggcgtccatgagccttttgacctcagtgagcagacgtacgatttcctaggcgagatgcggaagaacgccgtctag

SEQ ID NO: 125981 - DNA, 1845 bp, synthetic construct
  misc_feature 1..1845: note = Description of Artificial Sequence: Synthetic coding sequence
  source 1..1845: mol_type = other DNA
atgctggcacggagacagagggatcctctccaagcacttcggagaaggaaccaggagcttaagcagcaggtggacagcctactaagtgaatcacagctcaaggaggccctggagcctaacaaacgacagcatatctatcagcgtgtaggggctcccactgaggaagaggaggaatctgagagtgaggactctgaggacagcggcggggaggaggaggacgcggaagaggaggaggaagaaaaagaggagaatgagtcccataagtggtcaaccggggaagagtatatcgccgtgggggacttcaccgcacaacaagtcggagatttaacattcaagaaaggggaaatactgctcgtgatcgagaaaaagccagacggttggtggattgccaaggatgctaagggaaacgaaggtctggtgccccggacctaccttgaaccctacagcgaggaggaggagggccaggagtcaagtgaggaaggctccgaagaggacgtcgaggccgtggacgagactgctgatggagcagaggtaaagcagcgtaccgatccgcactggagcgccgtccagaaggccataagcgagattaacaccgttgacgtccttacaactatgggggcaatccccgccggttttcgcccatcgactttatcacagttactcgaggaaggcaaccaatttcgcgcaaattacttcctgcagcctgagttgatgccatcccagctcgccttcagagatctcatgtgggatgccactgaaggaaccatccggtctcgaccaagtcgaatatccctcatcctgactctctggagctgcaagatgattcctctgcccggaatgtccatccaagttctcagccggcatgtgcgtctctgtctgttcgacggaaataaagttctgtctaacattcacacggtcagagccacgtggcaacctaagaagcccaagacctggacgttttcacctcaggtgactcgcatattaccgtgcctgctggatggagactgctttatccgatctaacagtgcaagcccggatctgggaatcctctttgagctgggaatttcctacatccgcaactcaaccggcgagcgcggcgagctatcctgcggctgggtattcctgaagctcttcgatgccagcggggtacctatccctgccaaaacatatgagttgtttttgaatggggggaccccgtatgagaaaggcatcgaggttgaccccagcatttccaggcgggctcatgggagcgtgttctatcaaatcatgaccatgcgcagacagcctcagctgttggtgaagttacgcagcctcaaccggcgcagccgcaacgtgttgagcctgctgccggagaccctcattggcaatatgtgcagcattcatctcctgatcttctatcgccagattctgggcgatgtgctccttaaagaccgcatgagcctgcagtctacagaccttatctctcatcctatgctggcaaccttcccaatgctgctggaacagcccgatgtgatggatgcgctgagatcctcttgggctggcaaagagtcgaccttaaaaagaagcgagaaacgcgacaaagagtttctgaagtctacatttctgctggtgtatcacgattgtgttcttcccctgctgcacagcactagactgccgccattccggtgggcagaagaggagacagagaccgcgcgttggaaggtaataaccgactttctgaaacagaaccaagaaaatcagggcgcattacaggccttattgagccccgatggggtgcacgagcctttcgacctgtctgaacaaacctacgatttccttggcgagatgcgcaagaatgcggtctag

SEQ ID NO: 125982 - DNA, 2199 bp, synthetic construct
  misc_feature 1..2199: note = Description of Artificial Sequence: Synthetic coding sequence
  source 1..2199: mol_type = other DNA
atgctggctcggcggcagcgcgacccacttcaggctctgcgccgcagaaaccaagagctgaagcagcaggttgatagtttgctcagcgaatcccagcttaaggaggccctcgagcccaataagagacaacacatttaccaaaggtgcatccaattaaaacaggcgatcgacgagaataagaatgccctgcagaaattatctaaggccgacgagtcggcgccggtggctaactacaatcaacggaaggaagaggagcacaccctgcttgataaactgacacaacagctccaaggcttggccgtgacgatcagtcgcgagaacatcactgaggtaggcgctccaacggaagaggaagaagaatctgagtctgaagacagtgaagattcagggggcgaagaggaagacgccgaagaggaagaagaggagaaagaggagaatgaaagccacaagtggagcactggggaggagtatatcgccgtcggagatttcaccgctcagcaggtaggggaccttacctttaagaagggcgagatcctgttagtcatagagaaaaaaccagatggctggtggatcgccaaggatgccaaagggaatgagggcctggtccctcgcacataccttgaaccgtactctgaagaagaagaaggacaggaaagttctgaggaaggatctgaggaggacgtggaggcggtggacgagactgctgacggcgctgaggtcaagcagagaactgatccacattggagcgctgtccagaaggctatcagtgaagctggtattttctgcttagtgaaccatgtcagcttctgctatcttatcgtactcatgcgcaataggatggagactgtcgaagacacgaacgggtccgagactggatttcgagcttggaacgtccagtcacgcggtagaatcttcctggttagtaagcccgtgttgcagataaataccgtggatgttttgacaactatgggtgctatcccggcagggttcagaccatctacactttcccagctcttggaagaaggcaaccagttcagagccaattacttcctgcagcccgaactgatgccttcacagttagcttttagagatttaatgtgggatgctactgaaggaacgatcagatcccgcccctcccggatttctctgattttgaccctgtggagctgcaagatgatccccctccccgggatgtctatccaagtcttatctcgccatgtgaggctgtgcctatttgatgggaacaaggtgctgagtaatatacacacagttagagcaacttggcaacccaagaagccaaaaacttggacctttagtccccaggtgacacgcattctgccgtgcctacttgacggagactgttttatccgcagcaattctgcctcccccgatctgggaatcttgtttgaactgggaattagctacatcagaaatagcaccggagagcggggagaattatcctgcggatgggtattcctgaagctgtttgatgcgagtggcgtgccgattccagccaagacatatgagctgtttcttaatggggggaccccttacgagaaaggcattgaagtagaccctagcatctccaggcgcgcccatggatcagtcttctaccagatcatgaccatgagacgccaaccccagctcctagtgaagctgcgctctcttaataggaggagccgcaatgtactgagtcttctgccagagacgctcatcgggaacatgtgtagtatccatctacttatattctaccgacaaattttgggagatgttctcctcaaggataggatgtctctccagtcaactgacctgatttcacatcccatgcttgcgacttttccaatgcttttagagcagccagacgtaatggacgcccttcgcagctcttgggcgggtaaggagtctactctcaaaaggagcgagaaacgcgataaagagttcctcaagagcacatttctgctggtgtaccacgattgtgtgcttcctctcttgcacagcactagactgccaccgttcaggtgggccgaggaagaaactgaaacagctcgctggaaggttatcaccgacttccttaagcagaatcaggaaaaccagggcgccctgcaggcactgctgtcccccgacggagtgcatgaacccttcgatctgtccgaacaaacttacgatttcctgggggaaatgagaaagaacgcggtgtag

SEQ ID NO: 125983 - DNA, 2034 bp, synthetic construct
  misc_feature 1..2034: note = Description of Artificial Sequence: Synthetic coding sequence
  source 1..2034: mol_type = other DNA
atgctcgcccgaaggcagagagatcctctgcaggctctgcggcgtcggaaccaagaactgaagcagcaggtggattctttgctctcggagagtcaactgaaggaagcccttgaacccaataagcggcagcacatctaccaacggtgcatccagctaaagcaggcaatcgacgagaacaagaatgctctgcaaaaactgagcaaggctgacgaaagtgcacctgtggccaattataaccagagaaaagaggaggaacacaccttattggacaagttgacacagcagctgcaaggactggctgtgaccatcagtagagaaaatataaccgaagtgggggcccctaccgaagaggaggaggaaagtgaaagcgaagatagtgaagactctgggggggaagaggaagacgcagaggaagaggaggaggaaaaagaggagaacgaaagccataaatggtccactggtgaggaatatatcgccgtgggggatttcaccgcgcagcaagtgggggatctgaccttcaaaaagggcgaaattctgcttgtgattgaaaaaaaaccagatggctggtggatcgccaaggacgcaaaaggtaacgaagggttagtaccacgcacctatttggaaccttactcagaggaggaggaaggacaggaaagctccgaagaggggtcagaagaggacgtagaagcggttgatgaaaccgcagatggcgccgaggtgaaacagagaacagatccccattggagcgccgtgcaaaaggctatatctgaacaaatcaatacagtagacgtcctaactaccatgggcgcaattcctgcgggattcaggccatcaactctcagtcaactactagaggaaggtaatcagttccgcgccaattatttcctccaaccagaactcatgccgagccagctagcctttagagacttgatgtgggatgcaactgagggcaccattcggtcgcggccatcccggatcagcctcattctgacgctatggagctgcaaaatgatcccactacctgggatgtccattcaagtactatcgcggcacgtgaggctgtgcctgtttgatggtaacaaagtattaagtaatattcacacagtgagggctacgtggcagccaaaaaagcctaagacttggaccttctcccctcaggtgacccgtatattaccttgcctccttgacggcgattgctttatcaggagtaactcagccagccctgacctgggcatactgtttgaacttggcatttcgtatatccggaactctacaggcgaacggggtgagctcagttgcggctgggtgttcttaaagttatttgacgccagcggggtcccaatcccagctaaaacctatgagctgttcttgaatggcggcaccccatatgagaaggggatcgaggtcgatccctctatctcacggcgagcccacggttccgttttctaccagataatgacaatgaggcggcagccgcagttgctcgtcaagctgaggtccctcaatcggcgctcacggaacgtcctgagtttactccctgagactctgataggcaatatgtgttctatacatctgctgatcttctacagacagattctgggtgacgtgcttctcaaagaccgcatgtctcttcagtccaccgacttaatttcccatccaatgctggccactttccccatgctgttggagcagccagatgttatggatgccttacgctcaagttgggccggcaaagagtcgactctgaaaaggtcggagaaacgggataaagagttcttaaagagtacatttttgctggtctaccacgattgcgttttgccactgttgcacagcactagattaccaccattccggtgggctgaggaagaaactgaaactgctcgttggaaagtgatcaccgatttcctaaagcagaatcaggaaaatcagggagcactccaagctcttctgagccctgatggagtgcacgagccttttgatctcagcgagcagacatacgatttcttgggagagatgcgcaagaacgccgtgtag

SEQ ID NO: 125984 - DNA, 2115 bp, synthetic construct
  misc_feature 1..2115: note = Description of Artificial Sequence: Synthetic coding sequence
  source 1..2115: mol_type = other DNA
atgggtacagcatcctcccttgtgtcccctgctggcggggaggtgattgaagacacttacggtgcaggaggtggggaggcatgcgaaatcccagtagaagtgaagcccaaagcacgcttacttagaaactccttccgcaggggagcaggagctgcggccggtgccgggcctggctctctgccgcggggggtcggcgctggtggcctgttaggagcatcattcaagtcgactggttcctcagtccctgagctggaatacgccgccgccgaatacgaacgcttacgcaaagaatacgaaatcttccgagtgtccaaaaatcaagaacttctttccatggggcgtcgagaagctaagctcgataccgaaaataagagactccgcgccgaactgcaggcccttcagaaaacatatcagaagattctgagagaaaaggaatctgccttagaggcaaagtatcaagcgatggaacgtgctgcaaccttcgagcatgatagagataaagtgaaacgccagtttaaaatcttcagggaaacaaaggagaacgagattcaggatctgctgcgagccaaacgagagctggagagtaagctgcagcgtctgcaggcgcaggggatccaagtgttcgaccctggggagtcagatagtgacgataattgtaccgacgtaactgcagccgggacccagtgcgagtattggaccgggggagcattaggttctgagccctctattggttctatgatccagctccagcagagctttcggggaccagaattcgcccatagcagtattgatgtggaaggtccatttgcaaacgtgaaccgcgacgactgggacatcgctgtggctagtcttctccaggtgacccccctcttttctcacagtctttggagcaatactgtgagatgctatctcatatatactgatgagacgcaacccgagatggacctgttcctaaaggattactctccgaagctgaagaggatgtgcgaaaccatggggtacttcttccacgcggtttacttcccaatcgatgttgagaaccaatacctgaccgtgagaaagtgggaaatagagaagtcttccctcgtaatcctctttatacatctgactctcccatccctacttctggaagactgcgaggaagctttcctcaagaaccccgaaggtaaaccccgtctgatcttccacaggctcgaggatggcaaagtgtccagtgatagcgtgcaacagctcatagaccaagtgtccaacttaaataagacttcaaaggccaagattattgaccactcgggtgaccctgccgaaggtgtctacaaaacctatatttgtgtggaaaaaatcataaaacaggatatcttgggattcgagaacacagatctggagacaaaagatttaggttcagaagatagcatcccggaggaggacgatttcggggatgtgctttgggatatacacgacgaacaggagcagatggaaacgttccaacaagcctctaacagtgcacacgaactcgggtttgagaagtattatcagagactgaatgacttagtggccgcccccgcacctatcccaccgctgctagtgtcaggtggcccaggaagcggaaagagcctgctgctgagcaagtggatacagctccaacaaaagaacagcccaaatacccttattctcagtcacttcgtcggccgtccgatgagcacgagctccgagtcttcactcattataaaacggctgaccctgaaattaatgcagcactcttggtcagttagcgccctgacattggatcccgcaaaactgttggaggagttccccagatggctagagaagttgagtgcccggcaccagggaagtatcatcatcgtgatagacagtatcgatcaggtgcaacaagtcgaaaagcatatgaaatggctcattgaccctctgccagtgaacgtgagggtcattgtctcagttaatgtggagacctgtccccctgcctggcgactgtggccaactctgcatttggatcctcttagcccaaaagatgctaagtccatcatcattgccgaatgccactcagtggatataaagctgagcaaggaacagtgctgggaaagcaggcagttccggtag

SEQ ID NO: 125985 - DNA, 3993 bp, synthetic construct
  misc_feature 1..3993: note = Description of Artificial Sequence: Synthetic coding sequence
  source 1..3993: mol_type = other DNA
atggggacagcgagttcgctggtgtcacccgcgggtggggaagtgatcgaggacacatacggagctggtggtggcgaggcttgtgaaattcctgtggaagtcaagccaaaagcacggcttctgagaaactcattcaggagaggtgctggcgccgctgccggggcaggtccaggaagcttacccaggggagtgggcgcgggcggcctcctgggagcctccttcaaatcaaccggctcatccgtcccagagctggaatacgccgcggcagagtacgaacgcctgcgcaaggagtacgagatatttcgggtctccaagaatcaggagctgctgtctatgggcagacgggaggccaagttagacacagaaaataaaaggttaagagccgagctgcaggccttgcaaaagacatatcagaagattctgcgagaaaaggagagtgccctggaagccaaataccaggcgatggagagggccgccacgttcgaacatgaccgcgacaaagtcaagcgccagtttaagatctttcgtgaaaccaaggagaatgagatacaggacctgttgcgagcgaagagagaactggagtctaaactccagcgactacaggcccaggggatccaagtgttcgatccaggggagtctgattccgacgacaattgtactgacgttacagctgccggaactcaatgtgaatactggacaggaggtgctttgggctccgagccttctatcggtagcatgattcagcttcaacagtcattcagaggacccgagtttgcccacagcagtatcgacgtggaaggcccatttgccaatgtgaaccgagatgattgggatatcgccgtagccagtctcctgcaggtgaccccattatttagtcactcactgtggtccaacaccgtacgctgttatctgatctacacggatgagacacaaccagagatggatttgttcctgaaggactattctcccaaattaaagcgcatgtgcgagactatggggtacttctttcacgctgtctatttcccaatcgatgtcgaaaaccagtatttgactgtgaggaagtgggaaatagaaaaaagttccctcgtgatcctctttatccatcttaccctccccagcctactgcttgaagactgtgaggaagcatttttgaagaaccccgagggaaagccacgactgatttttcaccggctggaggatggcaaggtgtcatccgactccgtgcagcaactgatcgatcaggtttctaacttaaacaagactagcaaggccaagattattgatcattctggagacccggctgagggtgtctacaagacttacatatgtgttgaaaagattatcaagcaggacatcttgggctttgaaaacaccgatctcgaaactaaggaccttggaagtgaggacagtattcctgaggaggatgacttcggagatgtcctgtgggacattcacgatgaacaagagcagatggaaacatttcagcaggcttcgaattctgcccatgaacttgggttcgaaaagtactatcagaggctgaacgacttagtagccgcccctgctccgatcccccctctactggtttccggcggtccagggtctgggaagtctctgctgctgtccaaatggattcagctgcagcaaaagaacagtcctaacacactgatactgagccactttgtgggaagaccgatgtcaactagtagcgagtcctctcttattatcaaaagacttacactgaagctaatgcaacacagctggtccgtgtcggcactcaccttagaccccgcgaaactgctggaggagtttccacgctggcttgagaagttatctgccaggcaccaggggtcaatcatcatagtaattgactctatcgaccaggtgcagcaggtcgagaaacacatgaagtggctgattgacccactgcctgtcaacgtgagggtcatcgtctccgttaacgtggagacatgccccccagcatggcgcctgtggcccactctgcatctagaccctctctccccaaaggacgcaaagtccattattattgcggagtgtcattccgtcgacatcaagctgagcaaagagcaggaaaagaaactggagcgccattgtcgctctgccacaacatgtaacgctctgtacgtgaccttgtttggcaaaatgatcgcccgcgcggggcgtgctggcaacctagataagatcctgcatcaatgtttccagtgtcaggacactctttcactctaccgacttgtgttgcatagcatacgcgaatccatggcgaatgacgttgacaaagagctcatgaaacagatactgtgtctcgtgaatgtctctcataatggggtcagcgagtctgagctgatggagttgtatccggaaatgagctggaccttcctcacatccctcatacattctctctataagatgtgtctcctcacatatggatgcggcctcctgcggtttcagcacctgcaggcatgggagacagtccggttggaatacctcgagggcccaactgtaactagcagctaccggcagaaattaatcaattacttcacactacagcttagccaagaccgagtgacctggaggtcagccgacgaactcccatggctgttccagcaacagggatccaaacagaaactgcacgactgccttttgaatctcttcgtgtctcaaaacctttacaagagaggacactttgcagagcttctctcgtactggcagtttgtgggcaaggataaatctgccatggccactgagtacttcgattctcttaaacagtacgaaaagaattgcgaaggagaagataatatgtcttgcttagctgatctatatgagacgctcggtaggtttttgaaggatctaggactgctctcccaggctatagttccccttcaacgatctttggaaattagggagacagctctggaccccgaccatcctcgggtggcccagtctctgcatcagctggcctcagtgtatgttcagtggaagaagttcggtaacgcagagcaactgtataaacaggccctggagatcagcgagaacgcttacggggccgatcatccctacaccgcccgagagctggaagccctagccaccctctaccagaaacaaaacaagtatgagcaggccgaacatttccggaagaaatcattcaagattcaccaaaaggccataaaaaaaaagggcaatctctacggattcgccctgttgcggcggagagctctgcaactcgaggaacttactctcggcaaggacactcccgataacgctcgcacactaaacgagctcggggtgctgtactatctccaaaataacctggagaccgccgaccagtttctgaagcgttctctggaaatgcgggagagagtacttggaccagatcatccagattgcgctcagtcattaaataatctcgccgccctttgtaacgagaagaaacaatatgacaaggccgaggaactttacgagcgagctcttgacatccgaaggagagcgctcgctcctgatcacccttccctggcatacaccgtcaaacacttggccatcctgtacaagaaaatgggcaagctggataaggccgtgcccctttatgagttggctgtggaaattaggcagaaatcattcggtcctaagcacccatctgtggcaaccgcactggtgaaccttgccgtgctctactcacagatgaagaagcatgtggaggcactgcctctgtatgagagggccctcaaaatctacgaagatagtttgggccgcatgcatccgagggtgggtgaaaccctcaaaaacctggccgtgctgagttacgaaggaggtgacttcgaaaaggccgctgaactgtacaaacgggccatggagatcaaagaggccgagacttctctgcttggaggaaaggccccatcaagacactcgagcagtggcgacacctttagtctaaagaccgcgcatagcccaaatgtgtttctccaacagggacagaggtag

SEQ ID NO: 125986 - DNA, 720 bp, synthetic construct
  misc_feature 1..720: note = Description of Artificial Sequence: Synthetic coding sequence
  source 1..720: mol_type = other DNA
atggggactgctagcagcctcgttagtccagctggaggcgaggtgatcgaggacacctacggggcaggaggcggcgaggcttgcgaaattccagtagaggtcaagcccaaggctagacttctgcggaactcgttcaggagaggagccggtgcagctgcgggtgctgggcctggctcattgcctcggggcgtaggcgctggggggctgctgggtgcatcttttaagtcaaccggctcctctgtgccagaactagaatatgcagctgccgagtacgaacggctccggaaggagtacgagatcttccgagtgtcaaaaaaccaggagcttttaagcatggggaggcgtgaagccaagcttgacacagagaacaagagattacgcgccgagctccaggccttgcagaagacttaccagaagatcctgcgcgagaaggagtcagcgctcgaggccaaataccaggccatggagcgggctgccacttttgaacacgatagagacaaggtcaagcgccagttcaagatatttcgagagacgaaggaaaacgagatccaagatttgttgagagcaaagcgcgagctggagagcaaactccagaggctgcaggcccaaggcattcaggtgtttgaccccggtgaatcagactccgacgacaattgtacagacgtaactgtgagtctggaaagcgatcagcaccccgggatttttatagcaaatttctag

SEQ ID NO: 125987 - DNA, 453 bp, synthetic construct
  misc_feature 1..453: note = Description of Artificial Sequence: Synthetic coding sequence
  source 1..453: mol_type = other DNA
atgggcacagcctctagcctggtgagcccagcgggtggcgaggtgattgaagacacctatggcgcgggaggtggcgaggcatgcgagataccagtcgaggtcaagcctaaggccaggctcttgcggaactccttccggcgcggcgccggtgccgcagccggagcagggccgggctctctgccccgcggcgtcggagcaggggggttgttgggcgcctcctttaaaagtactggaagtagtgtgccggaattagagtacgctgccgcggaatatgagaggctgagaaaggagtatgaaatcttccgggtgtcaaagaatcaggaactgctctctatgggtaggagagaagccaaactggacactgagaacaaacgtctgagggccgaactgcaaggcctggcagctgtggccaggtccagactcacagccacctggaacagctgggcccagtag

SEQ ID NO: 125988 - DNA, 1914 bp, synthetic construct
  misc_feature 1..1914: note = Description of Artificial Sequence: Synthetic coding sequence
  source 1..1914: mol_type = other DNA
ataattgctaatgccgggcgcgccggtaacctcgacaaaatcctccaccaatgctttcagtgtcaagacacactgagcctctatcgcctggtactgcacagcatccgagagtctatggccaatgatgtggataaagaattgatgaagcaaatcctctgtctggtgaacgtcagccacaatggagtgtcagaatccgagctaatggagttgtaccccgaaatgagctggaccttccttacaagtttaatacattctctctacaaaatgtgccttctcacatacggatgcggactcttgaggttccagcacctccaggcctgggagaccgtgagactggaatacctggaggggccaaccgtgacctcaagctaccgccagaagttgataaattattttaccctgcagctctcacaggatcgagtcacatggagatccgctgatgagttaccatggctgttccagcagcaagggtctaaacaaaaactgcacgactgcctgctgaacttgtttgtgtcccagaatctttacaagagaggacacttcgccgagctattgagctactggcagttcgttggcaaggacaagtctgccatggccaccgaatatttcgacagcctcaaacaatacgaaaagaactgcgaaggggaggacaacatgagctgcttagcggacctgtacgagactctgggccgctttctcaaagacctgggccttctgagtcaggcgatagtgcctctgcaacgatccctcgagatccgagagacagccttggaccccgaccatccacgggtagcccagagcttgcaccagttagcttccgtgtacgtgcaatggaaaaaattcggaaatgctgagcagttgtacaagcaggccctggaaatctctgaaaacgcttacggagcagaccatccgtacacggcgcgggaactggaagccttagccaccttgtatcagaaacaaaataagtacgaacaggcagaacactttagaaagaaatctttcaagatccaccaaaaggcaataaagaagaaggggaatttatacgggtttgcccttttaagacgccgcgccctacaattagaagagctcactctgggtaaagatacgcccgataacgcacgcaccctgaatgagctaggagtgctgtattacctgcagaacaacttggaaactgccgaccaattcttaaaacgaagtctcgaaatgcgtgaaagagtgctgggccctgaccaccctgattgcgcgcagagcttaaacaacctggctgctttatgcaacgaaaagaaacaatatgacaaggccgaggaattgtatgagagagcattggacataagacgtagggcactggctcccgatcaccccagcctcgcttatacagtcaagcatctggccatactgtacaaaaagatggggaaactggacaaggctgtgccgctgtacgaactcgccgttgaaattcgacaaaagtcgttcggcccaaaacaccctagcgtcgccacggccttggtaaatttggctgtattatactcgcagatgaaaaagcacgtggaagcgcttcctctgtatgaaagggcattaaaaatttacgaggactccctgggtagaatgcacccacgggtgggggagaccctgaaaaacttagcagtgctgtcctatgaaggcggtgattttgagaaagctgcagaactttataaacgggctatggagataaaagaagctgaaacaagcctgctgggaggcaaagccccaagtcggcacagctcaagtggagacacattcagcctaaaaacagcacattcccctaatgtgttcctgcagcagggccagaggaaggtccagagcaacctactctcaccagaggggctctctaacatctgcgcccaggagaaaactacaagattcaccagcagctag

SEQ ID NO: 125989 - DNA, 1236 bp, synthetic construct
  misc_feature 1..1236: note = Description of Artificial Sequence: Synthetic coding sequence
  source 1..1236: mol_type = other DNA
atgtcctgtcttgccgatctttacgagactctgggccgcttcctaaaggatctgggcctcctttctcaggccatcgtccctctgcagcgctctctcgagattcgtgagaccgctctcgaccccgatcatcctcgggtggctcaatcgttgcaccagctggcttctgtgtacgtgcaatggaagaagttcgggaatgccgagcagctgtataagcaggcactcgagatttcagaaaatgcatatggagcagatcacccatacacagcccgtgagctcgaggccctggctaccctttaccagaaacagaacaaatacgagcaagccgaacacttcaggaaaaagtcatttaagatccaccagaaggccatcaagaaaaagggtaatctgtacggattcgcgttgctgcggagaagggccctccagctagaagagctgactcttgggaaggacacaccagataacgctcgcacgctaaacgagctgggcgtgctgtactatttgcaaaataacctggagactgcagaccagttcctcaaacggtcacttgaaatgagagagcgtgtgctggggcccgaccaccctgattgtgctcagtctcttaataatttggcagcactctgcaatgaaaaaaaacagtacgacaaagctgaagaactctacgaaagagcattggacatcagacgccgggccctcgccccagatcacccctctttagcttataccgtgaagcatttggctatcctgtacaagaagatggggaaactggataaggccgtacctttatatgagttggccgtggagattcgacaaaagagtttcgggcccaaacacccctccgtggcaactgctctcgttaacctggcggtgttgtatagccaaatgaagaagcacgtggaagctctgcccctgtacgaacgggctttgaagatatacgaggatagcttgggccgtatgcacccgcgcgtaggcgaaacccttaagaatctcgctgtgctgtcgtacgaagggggcgactttgagaaggccgcagaactatacaaacgcgctatggagattaaggaggctgagaccagtctcctgggaggcaaagcgccctcacgccactcatcaagcggcgatacgttctctctgaagaccgctcacagccctaacgttttcctgcaacagggtcagcgcgcgggtaagagtaatccgacgttctacttacaaaagggatttcagacttacgttctatag

SEQ ID NO: 125990 - DNA, 4281 bp, synthetic construct
  misc_feature 1..4281: note = Description of Artificial Sequence: Synthetic coding sequence
  source 1..4281: mol_type = other DNA
atgaacgactggcatcgtatcttcacacagaacgtcctcgtgccgccccatccacaacgagcacgacagccctggaaagaatcaacagcctttcaatgcgttctgaagtggctggacggacccgtcatccgacagggcgtgctcgaggtgttgtccgaagttgaatgtcaccttcgcgtgtcctttttcgatgtgacataccgccacttttttggacgtacctggaagaccactgtcaagccaactaagcgacctccatcaagaattgtgtttaatgagccactctatttccacactagtctgaatcacccacacatagtcgccgtggtcgaggtagtggcggagggaaagaaaagggacgggtccctgcaaactcttagctgtggctttggaatactgaggattttttcaaatcagcccgattctccgatttctgcttcccaagataagagactgcggttgtaccacgggacgcccagggccctcctgcatccactactgcaggaccccgctgaacaaaatcgacatatgacattgatcgaaaactgttcactgcagtatacgttgaagccgcacccagccctcgagcctgcgtttcatctgctgccagagaaccttcttgtgagtggacttcaacaaatccctggacttcttcccgcacatggagaatcgggtgatgcactcagaaaaccgcgacttcagaaacctatcaccggccacctggatgatctcttctttaccctgtatccgagcctggagaaatttgaggaggagttacttgaactccacgtccaagatcattttcaagaggggtgtgggcccctggatggtggcgcgctggagattctggagcgaagacttcgggtgggtgtccacaatgggctgggatttgtgcagcgaccccaggttgtcgtcctggtcccagagatggatgtcgcactcacacgttccgcttccttctcaaggaaggtggtgtctagtagcaagacgagcagcggcagccaggcattggtactgcgttcccggctccgattacccgagatggtgggacaccctgcctttgccgtcatcttccagctggagtacgtgttctctagtcctgcaggagtggatggcaatgccgccagcgttacctccctgagcaacctggcgtgcatgcacatggttaggtgggccgtctggaacccactgctggaggctgatagcggcagagtgactcttccactgcagggtggaatccagccaaatccatcccattgccttgtgtataaagtacccagcgccagcatgtcaagcgaagaggtcaagcaggtcgaatctggcacgttgaggttccagttctccctgggtagcgaggagcatctggatgcccccaccgagcctgtgtctggccccaaggtcgagagaaggccctcacgcaaacctccaaccagtccttcttctcccccggcccccgtccctcgcgttctagctgccccacagaactcaccagttggcccagggttgtccattagtcagttggctgcatcgccccgctctcccacccagcactgcctggccaggcctactagccagctaccacacggaagccaggcttcccccgcacaggcccaggagtttccgctcgaagctggtatctcccacctggaagccgacctctctcaaacatctctggtgcttgagacctcaattgccgaacagctgcaagagctgccgtttaccccccttcacgctccaatcgtggtcgggacccagactaggtcgtctgcaggacagccaagcagagcctccatggtcctccttcaatcaagcgggtttccagagatcctcgatgccaataaacagcccgctgaagctgtttccgcaacagagccagtaacctttaatccccaaaaagaggagagtgactgtctgcaatcaaatgaaatggttctgcagttcttggcgttttcgagagtggcacaggactgccggggaacgtcctggcccaaaactgtgtactttacttttcagttttacaggttccccccggcgacaaccccaagactacagttggtgcaattggatgaggccggtcagccatctagcggagcgctgactcatatcctagtgcctgtaagccgtgatggcaccttcgatgccggcagcccaggttttcagctccggtacatggttggaccgggtttcttgaaacccggcgagaggaggtgctttgcgcgatacctagccgtgcagactctgcagattgatgtctgggatggcgactctctgcttctgatagggtcagccgccgttcagatgaaacacctgctccgccagggacgccccgcagtgcaagcctcccacgagcttgaggtggttgccactgaatacgagcaggataatatggtggtcagtggggatatgctcggctttggacgcgtgaaaccaatcggtgtccactcagtggtcaaaggacgtctgcatttgacactcgccaatgtagggcatccctgcgagcagaaagtacgagggtgctccactctgcccccaagtcggtccagagtcatctccaacgatggagcctcacgcttctctggtggatctctgctgactactgggtcttcaagaagaaaacacgtggtgcaagcgcagaaactcgctgatgttgacagtgaactcgccgcaatgctattgacccacgctcgacagggcaaggggccacaggacgtgtcacgagaatccgatgcaaccaggcggagaaaactggaaaggatgcggtctgtcagactccaggaggccggcggtgacttggggaggcgaggcacttccgtgctcgctcagcagagcgtaaggactcagcatctgcgcgatctgcaggtcatcgctgcttacagagagcgaacgaaagcagaaagcattgccagtctcctgtcgctggctataaccaccgagcacaccctgcatgccacactaggagtggccgaatttttcgaatttgtcctgaaaaacccacataatacccagcacaccgtgacagttgaaatagataaccctgaactgagtgtgattgtggacagtcaggagtggagggattttaagggcgcagccggcctccacacccctgttgaagaggatatgttccatctgcgaggctctctcgcaccccagttgtatcttagacctcacgagacagcacatgtgccgttcaaattccagagcttcagtgctggccagctagcgatggtgcaggcctctcctggactgagtaatgaaaaaggaatggacgcagttagcccatggaagtcatcagccgtgcctacaaagcatgctaaagttctctttcgcgcatccggagggaagcctatagcagtgctgtgtctaacagtagaacttcagccgcacgtggtggatcaggtctttagattctaccaccctgagctttcattcctgaagaaagcaatacgtttaccgccatggcacacatttcctggggcccccgttggaatgctgggcgaagatccaccagtgcacgtccgctgcagtgatcccaacgtcatatgtgagacccaaaacgtgggtccaggcgagccacgagacatcttcttgaaggtggcctctggaccctcccctgaaatcaaagacttcttcgttatcatatattccgatcgctggctcgcaactccaacacagacttggcaggtgtatcttcatagcttacagcgggtggacgtgtcctgcgtggcaggccagctgactagattatccctggtgttacggggtacacaaacagtgcgaaaagtgcgggcattcactagccatcctcaggaactgaagaccgatccaaaaggcgtatttgtattaccacctaggggagtccaggatttgcacgtcggtgtgcgaccccttcgggcgggctcacgatttgttcatctgaatcttgttgacgtagattgtcaccagctggttgcgtcgtggctggtgtgcttatgttgtaggcaaccgctgatctcaaaggcttttgaaataatgctcgccgccggggagggcaaaggtgtgaacaaaaggattacttatacaaacccttacccgtcacgacggacatttcacctccactccgatcatccagagcttctgcgtttcagagaagatagtttccaagtcggcggcggggagacctatacaatcggtttgcaattcgctccttcacagcgcgtgggcgaggaagagattctaatctacatcaacgatcatgaagataagaacgaagaggcattttgtgtcaaggtcatatatcagtag

SEQ ID NO: 125991 - DNA, 546 bp, synthetic construct
  misc_feature 1..546: note = Description of Artificial Sequence: Synthetic coding sequence
  source 1..546: mol_type = other DNA
atggtgctacttcaatcttcaggctttccagagatactggatgccaataagcagcctgcggaagctgtttccgctaccgaaccggtaacatttaatcctcagaaggaggagtccgactgtttgcagtctaatgaaatggtcttgcagttcctggccttctcaagggtcgcccaggattgcaggggcacatcgtggcccaagaccgtttatttcacctttcagttctaccggttccccccggccaccacaccccggctccagctcgtacagctcgatgaggctggccagccgtcgtcaggcgctctgacccacatactcgttccggtgtcacgtgatggcaccttcgatgcaggctcaccgggttttcagctaaggtacatggtcggcccaggctttctgaagcctggggagcgccgctgctttgctcgatacttagctgtgcagaccctgcagatcgacgtgtgggatggcgatagtctgcttctgatcggatcagcagccgttcagatgaaggaaacctcccatattttctccgtttcacaatag

SEQ ID NO: 125992 - DNA, 3606 bp, synthetic construct
  misc_feature 1..3606: note = Description of Artificial Sequence: Synthetic coding sequence
  source 1..3606: mol_type = other DNA
atggcactgggcacaaccctgcgcgcaagcctgttattactgggtttgttaacggagggcctcgcccagcttgctatccccgcctcggtgccacggggattctgggcactgccagagaacctgaccgtggtggaaggcgcgagcgttgagttgcggtgcggggtgtctacccccggatctgccgttcagtgggccaaggacggtctgctgctcggaccggatccgcgcataccaggattcccccgctaccggctcgaaggcgacccagctcgaggagagtttcatctccacatcgaagcatgtgatttgagcgatgacgctgaatatgagtgtcaggtggggcggagcgagatgggccccgagctggtcagtcctagggtcattctgtccattctggtaccacccaagctactgctgttgacgcccgaggcagggaccatggtgacctgggtggcagggcaggaatatgttgtgaattgcgtgtccggagatgctaagccagcccccgacatcacaattctgctgtccggtcaaaccatttcagacatctcagccaatgtgaatgaaggtagtcagcagaagctgttcactgtcgaagctaccgctcgagtgacccctcggagctcggataatagacagctgctggtttgcgaagcatcaagccctgccttggaggcacctatcaaagcttcgttcaccgttaatgtattgttcccaccggggcccccagtgattgagtggccagggctggatgagggacacgttcgcgccggccagtctctagaattgccttgtgtggcacggggcggcaatccacttgctacactccagtggttgaaaaacggacagccggtgtccaccgcgtggggcacagagcacacccaggccgtggctcgatcagtgctcgtgatgacggttagaccagaggatcatggggcccaactgtcttgtgaagcacacaactcagtgtctgccgggacccaggagcatggaattactttacaggtaacttttcctccctcggctatcattatcctgggctcggcgagccagacagagaacaagaacgtaacactgagctgcgtgtcaaagtccagtagaccaagggtgctgctgaggtggtggctgggttggcgccagctgctgccaatggaggagactgtgatggatgggctccacggcggccatatttcgatgagtaatttaacattccttgcacgacgggaagataatggactgacactaacttgcgaagcgttctcggaggccttcacaaaagaaacatttaagaagagcctcatcctgaacgtgaaatacccggcacaaaaactctggatcgagggaccaccagaagggcaaaaactccgagctggaaccagagtcaggttagtttgtttggcaattgggggcaatcccgaaccctctctgatgtggtacaaagactcacggactgttaccgagtccagacttccgcaggaaagccgaagagttcacctgggtagtgtggagaagtctgggagcacctttagtcgagagctggtgctggttacagggcctagtgacaaccaagctaagtttacctgtaaagctggtcagctgtctgcgtcgacccagctcgccgtgcagttccccccaactaacgtcacaattttggcaaacgccagcgcattgaggccaggcgacgccctgaatctgacgtgtgttagcgtgtctagtaacccgcccgtgaacctctcctgggataaagagggcgagagactggagggggttgcagccccacccaggagggccccctttaagggtagcgctgccgcccggtctgtccttctgcaggtatcctcacgagatcatgggcagagagttacatgccgggcacattctgcagaattgagagagacagtcagctctttttatcgcctcaacgtgctgtaccggccggagtttctgggtgaacaggtcctggtggtgacagcagttgaacagggcgaggctcttctccccgttagtgtctccgccaaccctgcccccgaggcattcaactggacatttcgaggctacagactgagccccgctggcgggccacggcatcgtattctgtcgtcaggagcattgcatctatggaacgttacacgcgctgatgacggcctgtatcagttacattgtcagaactcagagggaacagctgaggcaaggctaagactcgacgtgcattatgcgccaacgattcgcgcacttcaggatcccactgaggtcaacgtaggcgggtctgtggatattgtatgtaccgtggacgcgaaccccattttacccggaatgtttaactgggagcgcctcggcgaggacgaagaggatcaatcattggacgatatggagaagatttcccgggggcccactgggaggttgcgaattcatcatgcgaaactcgcgcaggctggcgcttatcagtgcattgtggataatggtgttgcccctcctgctagacggctcttgcgccttgtggttcgctttgcaccccaggtcgaacatccaacccccctcactaaagtggccgcagcaggcgatagcacaagcagcgccactctccattgtcgcgcccgaggcgtgcctaatatcgtgttcacatggacaaagaatggcgtgcctctcgaccttcaggatccgcgctacactgagcatacttatcatcaaggaggggtgcactcctctttactgactattgcaaacgtctcagccgcccaggactacgccctttttacttgcactgcgacgaatgcactagggagtgatcaaacgaatattcaactggtttcaatctcaagaccggaccccccatctggacttaaggtggtatctcttacgccacactcggtgggactcgagtggaaacccggtttcgatggcggcctgcctcagaggttctgtatccgctacgaggcgctcggtactccagggttccattatgtcgacgtggtgcctcctcaggctacaacctttaccctgaccggcctgcagccaagcactaggtaccgcgtgtggctgctggcgtccaatgcactgggtgacagcggtcttgctgataagggcacacagttaccaattactacccccgggctccaccaaccctctggagaaccagaagaccagcttcctacagagcccccctcaggcattagtgagaaaaccgaggccggaagtgaggaggatcgcgttaggaacgaatacgaggagtcccaatggacaggggagagggacacccagagcagtaccgtctctacaacagaggccgagccttattacaggagtttgagagacttcagtccacagctcccgcccacgcaggaggaggtttcttattcccgagggttcacgggagaggacgaagacatggccttcccaggccatctatacgacgaggttgaacgcacgtaccctccttccggcgcctgggggcctttgtatgacgaagtccagatgggcccctgggacctgcattggccggaagatacttatcaggaccccagggggatttacgatcaagtcgcgggcgacttagatacactagaacctgacagcctgccttttgaattgcggggccatctggtgtag

SEQ ID NO: 125993 - DNA, 3726 bp, synthetic construct
  misc_feature 1..3726: note = Description of Artificial Sequence: Synthetic coding sequence
  source 1..3726: mol_type = other DNA
atggcactcgggacgactttgagggccagtctgctgctcttgggactacttaccgagggactggcgcagctggcaatacctgcttccgtgcctcggggattctgggccctacccgaaaatctgactgtagtcgagggcgcctctgtggagcttcgttgtggggtgtctacaccaggatccgccgtccagtgggcgaaagatggcttattgctgggtcccgaccccagaatacccgggttcccaaggtatagactcgaaggggatcctgcacgcggtgagtttcaccttcacatagaggcctgtgatttatccgatgatgcagagtacgaatgtcaggtcggccggagtgaaatgggccctgaacttgttagcccaagggtgatcttatcgattctggttcctcccaaactgctgttacttactccggaggccgggacgatggtgacttgggtggctgggcaagagtatgtggtgaactgtgtgagcggagacgctaagcccgcacccgatattaccatcctcctcagcggccagaccatctcagacatcagcgccaatgtgaacgaaggaagccagcagaagttattcactgttgaggcgacagccagagtcacaccacgttccagtgacaataggcagctcctggtgtgcgaagcttctagtccggcccttgaggctcccattaaggccagttttaccgtcaatgtgctttttccgcctggaccgccagttatcgaatggccagggctggacgagggacacgtgagggccggccagtcgctggagctcccttgtgtagcacgtgggggaaatcccctggccacactccaatggcttaagaatggacagccagtgtccactgcgtggggcactgagcacacccaagccgtcgcgcgctccgtactcgtcatgacagtgagaccggaagatcatggggcacagctttcttgcgaagcccacaactccgtgagcgcagggacacaagagcacggcatcacccttcaggtcacttttccaccaagcgccataattatactcggcagcgcctctcagacggagaacaagaatgtaacactgagttgtgtttcaaaatcatctcggccacgggtgttgcttagatggtggctgggatggcggcaattgcttcccatggaggagactgtgatggatggactacacggagggcacataagcatgtcaaacttaacctttctggcccgtagagaggataacggccttacccttacatgtgaggccttctccgaggcgttcaccaaagagacctttaagaagtccctgatcctgaacgtgaaataccccgcgcaaaagctttggatcgaaggaccccctgaggggcagaaattaagagcaggaaccagagttcgtttggtgtgcttggcaattggcggcaacccagagccatcattaatgtggtataaggactctcgcaccgttactgagagcagacttccacaagagtcaagaagggttcatctcggatcagtggaaaagtccggtagtaccttttcacgtgagcttgtcctcgtcaccggccctagcgataatcaggccaaattcacctgtaaagctggtcagctgtccgctagcactcagctggctgtacagttcccccccacaaatgtgaccattcttgccaacgccagcgcgcttcggcctggagacgccctgaaccttacatgtgtgtcggtttcctctaatccccctgtgaacctttcctgggacaaggagggtgagcgcctcgaaggagtcgctgctcccccaaggagagctccatttaaagggtcagcagcagcacgaagcgtcctgttacaggtgtcgagtcgggatcacgggcagagggtgacatgtcgcgctcactctgccgaattgagagagaccgtgtcatcattttaccgactgaatgtcctttatcggcccgagttcttgggagagcaagtacttgtcgtgacggccgttgaacaaggggaggcactgctgccagtcagcgtgtcagcgaacccggccccagaagcttttaactggactttcagaggttatcgactgtcccccgctggagggcctaggcacaggattctgtcatcaggtgccctgcatctctggaacgtgacgagagctgatgacggcttgtaccagttacattgccagaacagtgagggcactgctgaagctaggttacgcctcgatgtgcattatgcccccaccatccgggcactccaagatcccaccgaagtaaatgtggggggctctgtggacatcgtttgcaccgtagacgctaaccccatactgcccgggatgttcaactgggagcgcctcggggaagatgaggaagaccagagtttagacgatatggaaaagatttctagagggcccacaggtaggttgaggattcaccacgcgaaactggctcaggccggcgcctaccagtgtatcgtggataacggtgtggcaccgcccgcacgcagactcctgcgcctggtggtaagattcgctcctcaagttgagcatcctactcccctcaccaaggtcgccgctgcaggggattccacgtcatctgcaactttgcattgtcgagctcgaggtgtccccaatatcgtattcacctggaccaagaatggcgtgccgctggacctgcaggacccacggtacacagagcatacgtatcatcagggcggggtgcactcgtctttacttactattgccaacgtaagtgcggcccaggattacgcgttattcacatgtaccgctaccaacgcgctcggctccgaccagaccaatattcagcttgtgtccatttcccgccccgatcctccatccgggctgaaggtggtgtctctcaccccccatagtgtgggcctggaatggaaacccggctttgacggggggctaccccagagattctgcatccgttacgaagcgctgggaactccagggtttcactatgtggatgtggtcccaccccaggccaccacttttaccctcaccggcctgcagccatctaccaggtatagggtgtggctcctggccagtaatgcgctcggcgactctggcctggcagacaagggtactcagctgccgatcactactcctggacttcaccaaccttctggagaaccagaagatcagcttccgaccgaacctccaagcgggccctccggcctgccactccttcccgttctcttcgcgttaggcggactgctgctcttatctaatgcatcctgtgtggggggtgtgctctggcagagaaggctaagaaggcttgctgaagggatttctgagaaaacggaggcaggaagcgaggaggatagagtgcgaaatgaatacgaagagtcccagtggacaggcgaaagagatactcaatctagtaccgtgtctaccactgaagcagagccttactatagatcccttcgcgatttctcaccacagttacctccaacgcaggaggaggttagctactctcgcggctttacgggtgaggatgaggatatggctttccccgggcatctttacgacgaggtggagagaacttatccgcctagcggcgcttggggaccgttgtacgatgaggtccagatgggtccttgggatctccactggccagaagatacatatcaggatcccagaggaatttatgaccaggtggctggagatctggacactttggaacctgattcgctgcccttcgagctgaggggtcaccttgtctag

SEQ ID NO: 125994 - DNA, 1152 bp, synthetic construct
  misc_feature 1..1152: note = Description of Artificial Sequence: Synthetic coding sequence
  source 1..1152: mol_type = other DNA
atggagcgccgggcccgctcgtcatcccgggaatctcgcgggaggggaggacgaacaccccacaaagagaataaaagggccaaagctgagagatccggaggtggacgaggcaggcaggaagccgggcccgaaccttcaggttcaggtagagccggcacacccggcgaacctcgcgcaccggctgcaacagtggtggatgtggatgaggtccggggatctggagaggagggaacagaagtcgtggctctgctggagtccgagaggcccgaagaaggaaccaagtcctcaggtctgggggcttgcgagtggctgctcgtgctcattagccttctcttcattatcatgacattccccttctcaatctggttttgtgtaaaggtggttcaagagtatgaaagggtgatcatattcaggctgggtcacctgctccctggacgcgctaaagggcctggcctattttttttcttaccatgtttagatacataccacaaggtagatctgcgcctgcaaacgctggagatcccctttcacgaaatcgtgaccaaggacatgtttattatggaaattgacgcaatttgttactacagaatggaaaatgcaagcctgctgctgagctccttggctcacgtgagtaaagctgtccagttcctagtccagactactatgaagcggctactcgctcacagatccttaacagaaatactgctcgagcgcaaatcaatagctcaggatgccaaagtggccttggacagtgtgacatgcatctgggggattaaggtggagcgcattgagataaaggacgtccgtctgcccgcgggcctccagcactcattggcagtcgaggccgaggctcagaggcaagccaaggtaaggatgattgcagccgaagcagagaaagcagccagcgaatctctgaggatggccgctgaaattctctcaggtactcccgcagccgtgcaacttcgctacctgcatacactgcagagcctatcaacagaaaagccatcaactgtggtcttgcctctccccttcgacttactgaattgcctttcgagcccctccaacaggactcagggcagtctgccattcccctcccccagtaagccggtggagccccttaatccgaagaagaaagatagccccatgctgtag

SEQ ID NO: 125995 - DNA, 948 bp, synthetic construct
  misc_feature 1..948: note = Description of Artificial Sequence: Synthetic coding sequence
  source 1..948: mol_type = other DNA
atggagcgccgggcccggtctagtagcagggagagtcgcgggagaggcggtcgcacacctcataaagagaacaaacgcgcaaaggccgagcggagtgggggaggcagaggacgccaggaggctggccctgaacctagtggcagcgggagggctggcacacccggagagcctcgggcccccgcggccaccgttgttgatgttgacgaagttcgagggtccggcgaagagggtaccgaagttgtagctttgttggagtctgaacgcccagaagaggggacaaaatcaagtggcctaggcgcatgcgagtggctcctcgttctgatcagtctgttgttcattatcatgaccttccccttcagtatctggttttgcgtgaaggtggtgcaagaatacgagcgagtgattatttttagactgggacatctgcttcctggaagggcaaagggtccaggcctcttcttcttcctgccatgcttagacacataccataaagtggatctcaggctgcagaccctggagattccattccatgaggtggcactggattccgtgacttgcatctgggggattaaagtggagagaatcgagatcaaggatgttcgtctccctgccggacttcagcacagcttggcagtggaagccgaggctcagcgccaggccaaagttcgtatgatcgctgctgaggccgagaaggctgccagcgagtccctgcgtatggcagccgagatcctgtccggcactccagctgctgtgcagctgcggtacctccatacattgcaatcgttgtctacagagaagcctagcactgttgtgctccccttacctttcgatctcctaaactgtctcagctcacccagcaaccgaacccaaggtagcctgcctttcccttcccctagtaagcccgtggaaccactgaaccccaaaaaaaaggacagcccaatgctgtag

SEQ ID NO: 125996 - DNA, 1284 bp, synthetic construct
  misc_feature 1..1284: note = Description of Artificial Sequence: Synthetic coding sequence
  source 1..1284: mol_type = other DNA
atgggagccggggctaccggccgagcgatggacgggccccgactactcctgctcctcttactgggggtgagcttaggaggagccaaggaggcctgccccaccggcctctacacccacagtggagagtgttgcaaagcctgtaacctcggggagggtgtggcacagccctgtggcgccaatcagaccgtttgcgagccttgccttgactccgtcactttcagcgacgtagtgtccgctactgagccatgcaagccgtgtactgaatgtgtgggcctacagtcaatgagcgcaccttgtgttgaggccgatgacgcagtctgtcgctgcgcctatggctattaccaggatgaaacaactggacgatgcgaagcgtgccgcgtgtgcgaggccggatcagggctcgtgttttcatgccaggacaaacaaaatacagtctgcgaggagtgtcctgacgggacgtacagcgatgaggccaatcatgtggacccttgcctgccatgcacagtctgcgaagacacggagcgccaattgagagagtgtaccaggtgggccgacgctgagtgtgaggaaattccggggcgctggatcaccaggtctaccccaccagaaggcagcgattcgacagctccgtctactcaggagcccgaggccccgcccgaacaggatcttattgccagcacagtcgccggggtggtgacaaccgtgatgggcagcagccagcccgtggttaccagaggcaccacagataatctgattccagtgtattgctcgattctggctgcggtggttgtagggttagtggcctatatcgcctttaagcgctggaatagttgtaagcagaacaaacagggtgccaacagccgtcctgtcaatcagacacctcctcctgagggcgaaaagctgcacagcgactcaggcatcagcgtggattctcagtccctacatgaccaacagcctcacacacagaccgcctcaggccaggctctcaaaggagatggtggcctgtattcttctctcccaccagctaagagagaggaggtggagaaactgctgaacggatcagcgggagacacctggcgccatctcgctggtgaattggggtaccagcccgagcatatcgacagtttcacacacgaggcatgcccagtgcgagctctcctggcttcctgggccacgcaggattcagctaccctggatgccctgttggcagccttgaggagaattcagagagccgacttagttgagagcttgtgttccgaatcaactgcgacaagtcccgtatag

SEQ ID NO: 125997 - DNA, 1002 bp, synthetic construct
  misc_feature 1..1002: note = Description of Artificial Sequence: Synthetic coding sequence
  source 1..1002: mol_type = other DNA
atgtccgcaccctgcgtcgaggcagatgacgctgtttgcaggtgtgcatacggatattaccaggacgagactaccggacgctgcgaggcttgccgagtctgcgaggcagggtcaggcctggtgttctcatgccaagataaacagaacaccgtatgcgaagagtgtcctgatggcacctattctgatgaggccaatcatgtcgacccgtgcttgccgtgcaccgtttgtgaagacaccgaaaggcagttgcgagagtgcacgagatgggccgacgccgaatgcgaagaaatacccggcagatggatcaccaggagcacacctcccgaaggatcagactcaacagctccttcaacccaggaacctgaggccccacctgaacaggacctaatcgcttcaacagtggcgggagtggtgacgactgtgatgggctcctcacagccggtggtcaccaggggaacaaccgacaacctgatcccagtctattgctcaatcttggctgcggtggtcgtaggtctggtagcctatattgctttcaaaagatggaattcgtgtaagcagaacaaacagggggccaactccaggcccgtcaatcagacccctcccccagaaggagagaaattgcactctgacagcggaatctccgtggacagtcaatctctgcacgaccagcaacctcatacccaaacagccagcggccaggccctcaagggtgatgggggcctgtacagttccctgccgcctgccaaacgagaagaagtagagaagttgctgaatggatctgccggtgacacctggagacatcttgccggagagcttggctatcagccagaacatatcgacagtttcactcatgaagcgtgtcccgtccgtgcgctgctggcttcatgggccacacaggatagcgcgaccctggatgccctacttgccgctctgagaagaatccagcgagctgatttggtggagagtctttgttccgaatcaactgccacgagccccgtatag

SEQ ID NO: 125998 - DNA, 336 bp, synthetic construct
  misc_feature 1..336: note = Description of Artificial Sequence: Synthetic coding sequence
  source 1..336: mol_type = other DNA
atggccaacatacaccaggagaacgaggaaatggagcaaccgatgcaaaatggtgaggaggatcgcccgttgggaggaggcgaaggccatcagccggccggaaaccgtaggggacaggcgcgacgcctggcacccaattttaggtgggcgatacctaaccgccagattaacgatggcatggggggggacggggatgacatggaaattttcatggaggagatgagggagatcaggcgtaagttgagggaactccaattgaggaattgtctgcggatccttatgggcgaactgtcaaaccatcacgaccatcacgacgaattctgcctcatgccttag

SEQ ID NO: 125999 - DNA, 306 bp, synthetic construct
  misc_feature 1..306: note = Description of Artificial Sequence: Synthetic coding sequence
  source 1..306: mol_type = other DNA
atggaacagccaatgcagaacggggaggaagaccggccgctagggggaggcgaggggcaccagccagcagggaatcgcaggggacaggcacggcgcctggcacccaattttcgctgggctatcccaaaccgtcaaatcaatgacgggatgggcggagatggcgacgatatggagatcttcatggaggagatgcgtgaaattaggcgcaagcttcgcgagctgcagctacggaactgcttgagaatcctaatgggcgaactgtcgaatcatcacgatcatcacgatgagttctgcctgatgccttag

SEQ ID NO: 126000 - DNA, 306 bp, synthetic construct
  misc_feature 1..306: note = Description of Artificial Sequence: Synthetic coding sequence
  source 1..306: mol_type = other DNA
atggagcaacccatgcagaatggtgaggaggatcggcctctgggcggcggtgaagggcaccagccagcgggtaataggagagggcaggcaaggaggttggcccctaattttaggtgggctatcccaaacagacagatcaatgatggaatgggaggcgatggagatgacatggaaatcttcatggaagaaatgcgcgaaattcggaggaagttgcgagaactccagcttcgtaactgtctgcggatcctcatgggagaattatctaaccaccatgatcaccacgacgagttctgtcttatgccctag

SEQ ID NO: 126001 - DNA, 336 bp, synthetic construct
  misc_feature 1..336: note = Description of Artificial Sequence: Synthetic coding sequence
  source 1..336: mol_type = other DNA
atggccaacattcaccaggaaaatgaggagatggagcagcctatgcagaatggggaagaggacaggccccttgggggtggcgaagggcaccaacccgccggcaatcgaagggggcaggcccgtaggttggcccctaattttagatgggcaatccccaaccgccagataaacgatggaatggggggagacggagatgatatggagatctttatggaggagatgcgagaaatccgaaggaagctccgtgagctgcagctgagaaattgcttgagaatacttatgggtgaactgagcaatcatcatgaccaccacgacgaattctgcctgatgccttag

SEQ ID NO: 126002 - DNA, 336 bp, synthetic construct
  misc_feature 1..336: note = Description of Artificial Sequence: Synthetic coding sequence
  source 1..336: mol_type = other DNA
atggcaaacattcaccaagaaaatgaagaaatggaacaacctatgcagaacggagaggaagatcgtcctctgggcgggggtgaaggccatcagcctgctggcaatcggcgggggcaagcgagaagacttgctccaaacttccgctgggcaatccccaaccgtcagatcaacgacggtatgggtggcgacggggatgacatggaaatcttcatggaagaaatgcgcgaaattcgccggaagttgagagaactgcagctgagaaactgtttacgcatcttgatgggtgaattgtcgaaccatcacgaccatcacgacgaattttgcttaatgccctag

SEQ ID NO: 126003 - DNA, 402 bp, synthetic construct
  misc_feature 1..402: note = Description of Artificial Sequence: Synthetic coding sequence
  source 1..402: mol_type = other DNA
atgatgctcaattcggacacaatggaactcgacttgcctccaactcactcggagaccgaatctggcttctctgactgtggtgggggggccggacctgatggcgccggccctggcgggcccggaggcgggcaggcccggggtcctgaaccgggcgagccagggagaaaggacctgcagcacttgtcccgcgaggagcggagaaggagaagaagggctaccgctaagtaccgcacggcccacgccactagggaacggattcgtgttgaggctttcaatttagccttcgccgagcttaggaagctactgcctacattgcctcctgataagaaactgagcaagatcgagattctgcgactggctatctgctatatttcataccttaatcatgtgcttgatgtttag

SEQ ID NO: 126004 - DNA, 408 bp, synthetic construct
  misc_feature 1..408: note = Description of Artificial Sequence: Synthetic coding sequence
  source 1..408: mol_type = other DNA
atgatgctgtcccccgatcaggccgcggacagcgatcatccaagtagcgcgcactccgacccagagagcctcggaggcaccgacactaaagtgttggggtccgtgtccgacctggagccagtcgaagaagcagagggcgacggtaaaggcgggagccgtgcagccctctacccacatccacaacagcttagtcgcgaggagaaacggaggcgtagaagagctaccgctaaatatagaagcgcccatgcgacacgcgagaggatcagagtggaggcattcaatctcgccttcgcggaactgaggaagctgcttcctaccttaccgccggataagaagctctcgaaaatagagatcctgagactggccatttgttacattagttacctcaaccatgtcctggacgtttag

SEQ ID NO: 126005 - DNA, 408 bp, synthetic construct
  misc_feature 1..408: note = Description of Artificial Sequence: Synthetic coding sequence
  source 1..408: mol_type = other DNA
atgatgttatctcctgaccaggctgctgactcagatcaccccagttctgcacactcggatcccgagagcctggggggtacagataccaaagtcctgggttcagtgtccgatctggagcccgtcgaggaggctgagggagacggtaaaggaggctcgagagctgctttatacccacaccctcagcagctcagtcgcgaagagaagcggcgtaggcgcagagctacggccaagtaccgttcagcccacgccacccgggagcgaattcgggttgaggctttcaatcttgcatttgccgagttacgcaagctgctccccacactaccaccggataaaaagttgtccaagatcgaaatcttgagattggccatatgttacatttcttacctcaaccacgtactggacgtatag

SEQ ID NO: 126006 - DNA, 324 bp, synthetic construct
  misc_feature 1..324: note = Description of Artificial Sequence: Synthetic coding sequence
  source 1..324: mol_type = other DNA
atgatgttgtccccggatcaggccgcagattcagatcacccgtcctcggctcacagtgaccctgaatccctgggggggacagatactaaggtcctagggagcgtcagcgatctggagcctgtggaagaagcagagggggacggcaaaggcggatcccgagccgccctctatccacatccccagcagctttcgagagaggaaaaacggcggagacgccgggccacagcgaagtatagaagtgcccatgctacgcgcgaaagaatccgggtcgaagcgtttaatcttgcatttgcagaactgcggaagttactacctacgctgtag

SEQ ID NO: 126007 - DNA, 1125 bp, synthetic construct
  misc_feature 1..1125: note = Description of Artificial Sequence: Synthetic coding sequence
  source 1..1125: mol_type = other DNA
atgggcctgccccggggctccttcttctggttgctcttactgctgaccgccgcttgttcgggactgctgtttgcgctgtattttagcgccgtccagagataccccggacccgctgcaggggcaagagacactacatctttcgaggccttcttccagtctaaggcctctaacagctggaccggaaagggccaagcttgccgccatcttttgcacttagcaattcagcgacaccctcactttcgtggcctattcaatctgagtattcccgtacttctgtggggagatctgtttacacctgcactctgggatcggttaagtcaacataaggctccctacggatggcgtgggctatcccatcaggtgatcgcctccacattgtcactgctgaatggctctgaatcagcaaaactgttcgcccccccccgcgacaccccacccaaatgcattagatgtgccgtggtcggcaatggcggtatcctgaacggcagtcgccagggaccgaacattgacgcgcacgactatgtgttcaggctgaatggagcagtaatcaaaggatttgaacgggatgtaggaacgaaaacctccttttatggctttaccgtgaacactatgaagaattccttagtcagttattggaatctagggtttacttcggttccccagggtcaggacctccaatacattttcatcccatctgacattcgtgactatgtaatgctgagatctgcaatcctgggcgtgccagtgccagagggtctggataagggggataggccccatgcctattttggaccagaggcctccgcctccaaatttaaacttctccaccccgattttatctcctatttaactgaaaggttcttaaaatctaagctcataaacacacatttcggtgatctgtatatgccttccaccggcgctcttatgctgctgaccgccctgcacacttgcgaccaagtcagcgcttacgggtttattacgtcaaattactggaaattctcagaccattatttcgaaagaaaaatgaagccccttattttctacgcgaatcatgatctctccctcgaggctgccctttggagagatctccataaggcagggatcctgcagctctatcagcgctag

SEQ ID NO: 126008 - DNA, 2235 bp, synthetic construct
  misc_feature 1..2235: note = Description of Artificial Sequence: Synthetic coding sequence
  source 1..2235: mol_type = other DNA
atggccgggagatcaatgcaagccgcccggtgtccaaccgacgaactcagtcttaccaactgcgccgtcgtcaacgagaaagactttcaatcaggtcagcatgtgatcgtcaggacttcccctaatcatcgatatacctttactctgaaaacccaccccagcgtggttccaggctcaatcgctttcagtctgcctcagcgaaaatgggccggactttccatcggacaggagatagaagtaagtctgtacacattcgacaaggctaaacagtgcatcggcactatgaccatcgagatcgattttctacagaaaaagagcatcgattctaacccctacgatacggacaaaatggccgcagagttcatacagcaatttaacaaccaggctttctccgtaggacagcagcttgtatttagcttcaacgagaagctcttcgggctcctcgttaaagacatagaagccatggacccgtccattctgaaaggtgaaccagctaccggcaagcgccagaagatagaggtcgggttagtggtcggaaattcacaagttgcctttgaaaaagcggaaaacagttcattgaaccttatcggcaaggctaaaacgaaggaaaatagacaatctataatcaatcccgactggaatttcgaaaagatgggaatcgggggtttggataaggaattctcagacatcttccgcagagcattcgcatcacgggtgtttcctcccgaaattgtggagcagatgggttgcaagcatgtgaaaggaattctgctgtacggcccacccggctgcggcaagaccctcctggctcgccaaatcggcaagatgctaaatgctagggaacccaaggtggtcaacggacctgagattctgaataagtacgtgggagagagcgaagctaacatcagaaagctgtttgccgacgcagaagaagagcaaagacggctcggtgcaaactctggcttgcacattattatctttgatgagattgacgcaatatgcaaacagagggggtccatggctggcagtactggtgtacacgacaccgttgtgaaccagcttctctccaagatagacggcgtcgagcaactaaacaatattctcgtcatcggcatgacgaatcgacctgacctcattgatgaagccctgctgcgtccagggaggctagaggtgaagatggaaatcggcctccctgacgagaaagggcggctgcaaattctgcacattcacaccgcgcggatgaggggacaccaattgctgtctgccgacgtcgatattaaggagctcgcagtcgagacgaagaattttagtggcgctgaattggaggggctggtccgcgctgcccaaagtaccgcaatgaatcgccacataaaagcctctaccaaagtggaggtcgacatggaaaaggcagaatctctccaagtcactagaggtgacttcctggcatccctcgagaatgatattaaacccgcttttggcactaatcaggaagactatgcctcttatatcatgaacggcatcatcaagtggggggatccggtcacccgcgtgctggatgacggtgagctgctagtccagcagacaaagaatagtgaccgtacgccgctcgtttcagtgctgctggaaggacctccccactctggcaagaccgctttggctgcgaagattgccgaggagtccaattttccttttatcaaaatttgcagccccgacaagatgatcggtttttccgagaccgccaagtgtcaagccatgaagaaaatcttcgacgatgcctacaagagccagttgagttgtgtggtggtggatgacatcgaaagactgttggattatgtccctataggtccgaggttcagcaatctggtgttgcaagccctgctcgtgctgctcaagaaggctccgcctcagggacgcaagctcctgattatagggaccaccagcagaaaagacgtccttcaggagatggagatgctgaatgctttctcaacaaccattcacgttcccaacatcgccacgggcgagcagctcctcgaagcactcgaactcttgggcaattttaaggacaaagagagaactaccattgcccaacaggttaaaggcaaaaaagtctggatcggcatcaagaaactgctgatgctcatcgaaatgtctttacagatggaccccgagtatcgggtgaggaaattcctagccctgctgcgagaagagggtgcctccccattagacttcgattag

SEQ ID NO: 126009 - DNA, 888 bp, synthetic construct
  misc_feature 1..888: note = Description of Artificial Sequence: Synthetic coding sequence
  source 1..888: mol_type = other DNA
atggacaattcaggaaaggaagctgaggccatggcactgttggccgaggctgagagaaaggtgaaaaattctcagagctttttcagtgggctgttcggagggagcagcaaaatagaggaagcttgcgagatatatgcccgggccgcgaacatgtttaaaatggccaagaattggagcgctgcaggtaacgcattctgccaggcagctcagttgcacctacaattacaatcaaaacacgacgctgccacctgtttcgtcgatgccggcaacgctttcaagaaagctgatccgcaggaggccatcaactgtctgatgcgggcaatcgagatctacactgacatgggacggttcaccatcgccgcaaaacaccacatatccattgccgaaatatacgaaacagagctggttgacattgagaaagccatcgcgcactacgaacagagtgcagattattacaagggcgaagagagcaattcatccgccaataagtgtctcctcaaggtcgccggctacgctgccctgctagagcagtaccagaaagcaattgatatctacgaacaggtgggtacgaacgcgatggactctccgctgttaaaatatagtgctaaggactatttctttaaggctgccctctgccacttctgtatcgatatgctcaacgctaagttggctgtccagaaatacgaagagctctttcctgcgttttctgatagtagggagtgtaaactgatgaaaaaacttctggaggcccacgaggagcagaatgtggacagttacacagagtcagtgaaggaatacgactccatatcccgcctagatcaatggttaaccacaatgctccttcgcatcaagaagaccatccagggagatgaggaagatctgagatag

SEQ ID NO: 126010 - DNA, 897 bp, synthetic construct
  misc_feature 1..897: note = Description of Artificial Sequence: Synthetic coding sequence
  source 1..897: mol_type = other DNA
atggacaacgctggcaaggaaagagaagccgtgcagctcatggctgaagctgaaaaacgtgtgaaagcctcacattcctttctccgaggactgtttggtggcaataccaggattgaagaggcatgtgaaatgtatacccgagccgctaacatgtttaagatggctaagaactggtccgctgcaggcaacgcattttgccaagctgccaagttacacatgcagctccagtctaaacacgacagtgctacctctttcgttgacgccggaaacgcatataagaaggctgaccctcaggaggccatcaactgccttaatgccgccatcgatatttatactgacatgggtcgcttcacaatagccgctaaacaccacattaccatcgctgagatctacgaaacggagctagtcgatatcgagaaggcgatcgcgcattacgagcaaagcgctgactactataagggcgaagagtctaactcttccgctaataagtgcctcctgaaggtcgccgcctacgccgctcagctggagcaataccagaaggccatcgaaatatacgagcaagttggtgcaaataccatggataatccacttctgaagtactccgcaaaggattatttctttaaagccgctctttgtcacttcattgtggacgagttaaacgcaaagcttgcactggaaaagtacgaggaaatgttccccgcctttacagactctcgagagtgtaaactcttgaaaaaattgctagaagctcatgaagagcagaattctgaggcgtacacagaagccgtgaaggagttcgatagtattagtcgcctagaccaatggctcactacaatgcttctgcgtattaagaagtcaatacagggcgacggtgagggcgatggtgatctaaagtag

SEQ ID NO: 126011 - DNA, 615 bp, synthetic construct
  misc_feature 1..615: note = Description of Artificial Sequence: Synthetic coding sequence
  source 1..615: mol_type = other DNA
atgacgctcctccccgccctctggatgctggaaatgctaaccaagagacaaataccaaagggtcgcttcaccattgctgccaagcaccatatcaccattgcagagatctacgagactgagctggtggacattgagaaagcgatcgcccactacgagcagtctgctgactactacaagggagaggagagcaacagctccgccaataaatgtcttctgaaggtggctgcctatgccgctcagcttgaacagtatcaaaaagcaatagagatctacgaacaggttggggccaacacgatggataatcccctgttgaaatattcagccaaagactacttctttaaggctgccttatgccacttcatagtggatgagttgaacgctaaactcgcgctggagaagtacgaggagatgttccctgctttcacagactcaagggagtgtaagctgctgaaaaaactacttgaggcccatgaagagcagaacagcgaggcatacaccgaagctgttaaggaattcgattcgataagtcggttagaccagtggctgactaccatgctactgcggattaaaaagagtatccagggtgacggggagggggacggcgacctgaaatag

SEQ ID NO: 126012 - DNA, 768 bp, synthetic construct
  misc_feature 1..768: note = Description of Artificial Sequence: Synthetic coding sequence
  source 1..768: mol_type = other DNA
atgtacactcgggctgcgaatatgttcaaaatggcaaagaattggagcgcagctggcaacgccttttgccaggctgcaaagcttcatatgcaactgcagtctaagcacgacagtgctacctccttcgtcgatgcgggtaacgcgtacaaaaaggccgatcctcaagaggcgatcaactgtctgaacgccgctattgacatttacaccgacatgggcaggttcaccattgctgctaaacaccatattactattgcggagatatatgaaacggaactagtggatatagagaaagccattgcacactacgagcagagcgctgactactacaaaggagaggagtctaacagcagtgcgaacaagtgcctccttaaagtcgccgcatacgccgctcagctggagcagtatcagaaggctattgaaatctacgagcaggttggagcaaacactatggacaacccactgctgaaatattcagccaaggactatttttttaaagcagccctgtgtcacttcattgtcgacgagctgaatgccaaactcgcccttgagaagtatgaagagatgttccctgctttcaccgattcaagagaatgcaaattgcttaagaagctgctggaagctcacgaagagcagaactctgaggcctataccgaagccgtcaaggaattcgatagtatctcacgattagatcagtggctgactacgatgctcctgcgtattaagaagtcaatccagggggacggggagggcgatggggatttgaagtag

SEQ ID NO: 126013 - DNA, 780 bp, synthetic construct
  misc_feature 1..780: note = Description of Artificial Sequence: Synthetic coding sequence
  source 1..780: mol_type = other DNA
atggataacgccggaaaggaacgcgaagccgtacagctgatggctgaagccgaaaaacgagtcaaggcatctcacagcttcttacgcggtttgttcgggggcaacacacgcattgaggaggcctgtgagatgtacaccagagctgctaacatgtttaaaatggctaagaactggagtgaggccataaactgtctgaacgcagccatagacatctacacagacatgggcaggttcaccattgccgcgaaacatcatataaccatagcagaaatttacgagacggaattagttgacattgagaaggcaattgcccattacgagcagagtgctgactactacaaaggagaagagtctaattcctcagctaacaagtgtctgctgaaggtggcggcctacgccgcacagctcgagcaatatcagaaggcaattgagatctacgagcaggtgggcgctaacaccatggacaaccccttgctgaaatatagcgccaaggactattttttcaaggcagctctgtgccactttatcgtggatgaactgaacgcaaagctcgcactcgaaaagtatgaggagatgtttccagctttcaccgacagtagagagtgtaagctgctgaaaaaactgctcgaagcccacgaggaacagaactctgaagcatataccgaagccgtgaaggagttcgactctatcagcagattggaccagtggctcactactatgcttctgaggatcaaaaagagcatccaaggggatggcgaaggcgatggggacctgaagtag

SEQ ID NO: 126014 - DNA, 1887 bp, synthetic construct
  misc_feature 1..1887: note = Description of Artificial Sequence: Synthetic coding sequence
  source 1..1887: mol_type = other DNA
atggggtcctgcgcgcgtctcctgttgctctggggttgtactgtcgttgccgccgggctctccggcgtggccggagtttcaagcaggtgtgaaaaagcttgcaatcctcggatggggaacttagcgcttggcaggaagctttgggctgatacgacgtgtgggcagaacgccactgagctttattgtttttatagcgaaaacaccgatttgacctgcaggcagcctaaatgtgataagtgtaatgcggcatacccacaccttgcccacctgccttcagccatggctgattcttcctttcgatttccaagaacctggtggcaaagcgcagaggatgttcacagagaaaagatccagctggacctagaggccgaattttactttactcatctgatagtcatgtttaaatctccacggcccgctgctatggttttagaccggagtcaggacttcgggaagacatggaagccatacaaatacttcgcaacaaattgctctgcaacgtttggattagaggacgacgttgtgaagaaaggtgcgatctgcacttctaagtactcttcgccattcccttgcaccggaggggaggtcatcttcaaggccctgagcccaccgtacgatacagagaatccctactccgcaaaggttcaggaacagctgaaaattacaaacttgagggtgcagctactgaagcgacagagctgcccgtgccagagaaacgacctgaatgaggaaccacagcacttcactcactacgccatctacgatttcattgtgaaagggagctgcttctgtaacggccatgccgaccagtgtattccagtgcacggattcagacccgtgaaggctcctggaacgtttcatatggtacacggaaagtgtatgtgcaaacataataccgctggaagccactgtcagcattgcgctcccctttacaacgaccgcccatgggaggcagcagacggcaaaacaggggcaccgaacgagtgtcgcacatgcaagtgtaacggccacgcggacacgtgccacttcgacgtgaatgtctgggaggcgtctggtaacaggagcggaggagtgtgcgatgattgtcagcataacacagagggacagtattgtcagcggtgcaagcccggcttttatcgcgacctacggaggcccttcagtgcccctgatgcttgcaagccttgctcttgccaccccgtcggatctgccgtccttccagcaaactcagtgacattctgtgacccttcgaatggagattgtccgtgcaaacccggagtcgcggggcggcgatgcgaccgctgcatggtaggttattggggcttcggagactatggttgccggccctgcgactgcgcaggcagctgcgaccctattaccggcgactgcatctcctcccataccgacatcgactggtatcatgaagtgccagactttaggcctgtgcacaataaaagcgaacccgcatgggagtgggaagatgctcagggcttttctgcattacttcatagcggcaagtgcgagtgcaaggagcagaccctgggtaatgcaaaagctttctgtggtatgaaatatagctacgtcctcaagattaaaatactgtcggcccacgacaagggcacccacgtggaggtgaacgtaaagattaaaaaagttctgaagagtacgaagttgaaaatcttccgggggaagcgaactctgtatcctgagtcctggactgaccggggttgcacttgtcccatactgaaccctgggctggaatacctggtggccggtcacgaagacatccgcacagggaaattaattgtgaatatgaaatctttcgtccagcattggaagcctagcctaggtagaaaagtgatggatattctcaaacgagagtgcaaatag

SEQ ID NO: 126015 - DNA, 1776 bp, synthetic construct
  misc_feature 1..1776: note = Description of Artificial Sequence: Synthetic coding sequence
  source 1..1776: mol_type = other DNA
atgggtaacctggccttgggccgaaagctgtgggccgatacaacgtgtggacagaatgcaacagagctttattgtttctattctgagaataccgatctgacttgcagacaaccgaagtgcgacaaatgtaacgcggcctaccctcaccttgctcacctgcctagcgcgatggcagatagctcttttcgctttcccaggacttggtggcagtccgccgaagatgtacatcgggagaaaattcaattagatcttgaggcagagttctattttacccacctgatcgtgatgttcaagtctccgcgcccagcggctatggttctggacaggagtcaggattttggtaagacctggaaaccatacaaatactttgccaccaactgttctgcaacttttggattagaggacgacgtcgtaaagaagggtgcaatatgtacctccaagtacagttccccatttccctgcaccgggggtgaagtgatctttaaggccttgtcacctccttatgatacagagaacccatactctgcaaaagtgcaggagcagttaaagattactaatctgagagttcagctcctaaagaggcagtcatgcccttgtcagcggaacgatcttaatgaggaacctcagcattttactcattacgcaatctacgattttattgtcaaagggagttgtttctgcaacggacacgcagatcagtgcattcctgtgcatgggttccgccctgtgaaggcccctggcacctttcatatggtgcacggcaaatgtatgtgcaagcataacacagctggttcccattgtcagcactgcgctccgttatacaatgatcgaccatgggaggcagcggacggtaagaccggcgctccgaacgagtgccgcacctgcaaatgcaatgggcacgccgacacatgtcatttcgatgtcaacgtctgggaggcgagcggcaaccgttcgggaggggtttgtgacgactgccagcacaatacagaggggcagtattgccagcgctgtaagccaggcttctatagggatctccggcgccctttctctgctccagacgcatgcaagccatgtagttgccacccagtgggtagcgcggtgctgcctgcaaactctgtcactttctgtgacccttcaaatggcgattgcccatgcaagcctggggtcgcaggaagacggtgcgacagatgtatggtcggatattggggcttcggagattacgggtgtcggccttgtgattgtgcagggtcttgcgatcccatcacgggggattgtatctcttcccatacagatattgactggtatcatgaggtacccgattttagacctgtgcacaacaaatccgagccggcgtgggaatgggaagatgcacaaggcttttctgcactgctgcactccgggaagtgtgagtgcaaagaacagactctcggtaatgcaaaagcattctgtggaatgaagtactcttatgtgctcaagataaaaatccttagcgcccacgacaagggaacccatgtcgaagtgaatgtcaaaataaaaaaggtgcttaagtcgaccaagctcaagatttttcggggaaagaggactctgtaccccgagtcttggaccgataggggatgtacctgcccaatcctgaatcctggccttgagtatctcgtggcaggtcatgaagacatccggaccggcaagttgatcgtgaatatgaagtcctttgtacaacactggaaaccaagcttgggccgtaaggtgatggatatcttgaagcgcgagtgcaagtag

SEQ ID NO: 126016 - DNA, 1818 bp, synthetic construct
  misc_feature 1..1818: note = Description of Artificial Sequence: Synthetic coding sequence
  source 1..1818: mol_type = other DNA
atgggatcctgcgctaggctgctgctgctgtggggctgcacagttgtcgcagctggcctgagcggagtggccggggtgagctccaggtgtgaaaaggcctgcaaccctagaatgggcaacctcgctctcggcaggaagctgtgggccgacacaacttgcgggcagaatgctacagagctctactgcttctattcagaaaacacagatcttacatgcaggcagccgaaatgcgataaatgcaacgcggcctacccccacttggcacacttaccatctgctatggctgattcatcgtttagattcccacggacatggtggcagtccgcggaagatgtgcatagagagaaaatccagctggatcttgaggccgaattttactttacccatctgatcgtcatgttcaaaagtcccagacctgcagctatggtgctggatagaagccaggacttcggtaagacttggaagccctataagtacttcgcaacaaactgttccgctacctttggattggaagacgacgttgtcaagaaaggagcgatctgcacatctaaatacagttccccttttccgtgtactggaggcgaggtgatctttaaagcgctgtctcctccgtatgataccgaaaatccatacagcgctaaggtgcaggagcagctgaagatcactaatctgcgggtccaactcctgaaacggcagtcatgcccctgtcagcggaacgatctgaatgaagaacctcaacactttactcactacgctatttatgacttcatcgtgaagggatcttgcttctgcaatggtcatgctgatcaatgtatccccgtccacgggtttcgtcccgtgaaagcccccgggaccttccacatggtgcatggcaaatgcatgtgcaagcacaatacggctggatctcactgtcagcattgtgcaccactgtacaatgatagaccctgggaggccgctgatggtaaaacaggggcccctaacgagtgccgcacatgcaaatgcaatgggcacgcggatacttgtcacttcgatgtcaatgtctgggaagcatccggcaatcgatcgggcggcgtttgtgatgattgtcagcacaataccgagggccagtactgccagagatgtaaacctgggttctatcgggacctccggcgcccgttctcggcccccgatgcttgtaagccctgttcgtgccaccccgtcgggagtgctgtactccctgcaaacagtgtgacattctgcgatccgagcaacggcgactgcccctgcaagcccggggtagcaggccggcgctgtgatcgctgtatggttggttattgggggttcggggactatggatgccggccctgtgattgtgcagggtcctgtgatcctataacaggtgactgcattagctctcatacagacatcgactggtatcatgaggtacccgattttcgtcctgtccataacaaaagcgaacccgcgtgggaatgggaggatgcccagggcttttccgctctgctgcattccgttttaaagatcaagatcctgtcagcacacgataaggggacgcacgtggaggtgaacgtgaagatcaaaaaagttcttaaatccactaagctgaaaatcttccgcgggaaaagaactctgtaccccgaatcatggacagatcggggctgcacatgtccaattctgaacccaggactggaatatctggtcgccgggcacgaggacattcgcaccggcaagcttattgtgaacatgaagtcatttgtgcaacattggaaaccctccctcggaagaaaagtgatggacatcctgaagcgcgagtgcaaatag

SEQ ID NO: 126017 - DNA, 1095 bp, synthetic construct
  misc_feature 1..1095: note = Description of Artificial Sequence: Synthetic coding sequence
  source 1..1095: mol_type = other DNA
atgtatttgtcccgatttttaagcattcacgctctttgggttaccgtgagttcagttatgcagccttaccccttggtgtggggtcactacgatttatgtaaaacccagatttataccgaggagggcaaggtgtgggactacatggcgtgccaaccagagagcacggacatgactaaatatctgaaggtgaaattagatccccccgatataacatgtggtgacccaccggagactttttgcgccatgggaaacccctatatgtgcaataatgaatgcgacgcttcaacgcccgagttagctcatccccccgaactcatgtttgactttgaaggcagacatccaagcactttttggcagagtgcgacatggaaagaataccccaaacccctgcaagtgaacataacgctgtcctggagcaagaccatcgagttgacagacaatattgtgatcacatttgagtccggacgtccagaccaaatgattctcgagaaatctttggattacggcaggacatggcagccttaccagtattatgccacggactgtctggatgccttccacatggaccccaagtcagtgaaagatctaagccaacacacagtcctggagattatttgtaccgaggagtacagcaccgggtataccaccaacagtaaaatcatacacttcgaaatcaaggaccgctttgcttttttcgctggccctagactgcgtaacatggcctctctatacggtcaactagataccaccaaaaagctacgggatttcttcacagtgacggacttacggatcaggttactccgccctgcagtgggggaaattttcgtcgacgagttgcatctggccagatacttctacgctatctccgatataaaggtccgtggacgctgtaagtgcaatctgcacgcaaccgtatgtgtgtatgacaacagtaagctgacttgcgaatgtgagcacaatacgacaggtcccgactgcgggaaatgcaaaaaaaattaccagggacggccctggagcccaggatcatatctcccgatacccaagggaactgctaatacctgcataccatcgatctcctcaattggctctaaatag

SEQ ID NO: 126018 - DNA, 1518 bp, synthetic construct
  misc_feature 1..1518: note = Description of Artificial Sequence: Synthetic coding sequence
  source 1..1518: mol_type = other DNA
atgtatctttcgcgattcctctccatccacgcactctgggtgacggtaagtagcgtgatgcagccctacccccttgtttggggtcactacgatttgtgtaagactcagatctataccgaggagggcaaggtgtgggactatatggcctgccagcctgagtccacggacatgacgaagtatttgaaagttaagttggacccacccgacattacatgcggtgaccctccagagacattttgtgcaatgggaaacccttatatgtgtaataacgaatgtgacgctagcactcctgagctggcccaccctcctgagctgatgtttgatttcgaaggaaggcatccatcaactttttggcagtccgcgacatggaaggaatatccaaaaccattgcaggtcaacatcactttgagctggtcgaagacaattgaacttaccgacaatattgtgatcacatttgaaagtggtcggcccgaccaaatgattcttgagaaatccctcgactacggacgaacctggcagccttaccagtactacgccaccgactgtctggacgctttccacatggatccaaagtccgtgaaggacctgtcccagcacaccgtgcttgagatcatatgcacagaagagtatagcacaggatatacaacaaattcaaaaataattcatttcgagattaaggaccgcttcgctttctttgctggccctagactgcgaaatatggcatcgctttatggacagctggatactaccaaaaagctgagagatttctttacagtgactgacttacgcattagactgctacgtccagcggtgggggagatttttgttgacgaattgcacctggcccgctacttctacgccattagtgatattaaggtgagaggtcgctgcaagtgcaacctccacgctaccgtgtgcgtgtacgacaattcaaagctcacttgtgaatgtgaacacaataccactggccctgactgcggcaagtgcaagaaaaattaccaaggtcggccctggagtcccgggtcctacctcccgataccgaaggggacagctaacacatgcatcccttctattagctctatcgggaaccctcccaagttcaatagaatttggcctaacattagcagcctggaggtttctaatcctaaacaggagtgttactgcaaccctttaggctccatccacgatcgctgtaatggctctggtttttgtgagtgcaagaccggtactacaggccctaagtgcgatgagtgcctgcccgggaattcgtggcactatggctgccagcccaatgtctgcgacaatgaactgctgcactgccaaaacggaggcacatgccacaacaatgttcggtgtctgtgtcctgccgcctacaccggtatactgtgcgagaagctacggtgtgaggaggccggcagctgcgggtcagactcaggtcagggagcccccccgcacggaagcccagcgttgctattactcactaccctgcttgggaccgcttccccgctcgtgttttag

SEQ ID NO: 126019 - DNA, 861 bp, synthetic construct
  misc_feature 1..861: note = Description of Artificial Sequence: Synthetic coding sequence
  source 1..861: mol_type = other DNA
atggcctccttgtacggacagcttgacactactaagaaattgagggacttttttacggtgaccgatctgcgaatacgactcctgcggcctgcagtcggcgaaatcttcgtggacgagctgcacctggctcgctatttctacgctatcagcgatatcaaggtcagggggaggtgcaaatgtaacttgcatgccaccgtgtgcgtgtatgacaactcaaagcttacttgcgagtgtgaacataatactacagggcccgactgtgggaaatgtaagaagaattaccagggccgcccttggtctcctgggagctacctccccatccctaaaggtacggccaatacttgcattccaagcattagcagcataggtaaccctcccaagtttaaccggatatggccaaacataagcagcctggaagtttcaaatccaaaacaggtggctcccaagctggccctctccactgtcagttctgtgcaagtagcaaatcacaagcgggaatgttattgtaacccgctgggcagtatccatgaccggtgcaacgggagcggattctgcgagtgtaagaccggtacgaccggccccaaatgcgacgaatgtctacccggcaacagttggcattatgggtgccagcctaatgtgtgtgacaacgagttgctgcactgccagaatggcgggacctgccacaacaatgtcaggtgtttatgtcctgcagcttatacaggaatcctctgcgagaaactcagatgcgaggaagccggcagttgtgggtccgacagcggacagggggctcccccacacggcagcccagcattgctgttactgacaactctgcttggaaccgcttccccactagtgttttag

SEQ ID NO: 126020 - DNA, 1029 bp, synthetic construct
  misc_feature 1..1029: note = Description of Artificial Sequence: Synthetic coding sequence
  source 1..1029: mol_type = other DNA
atggcgtctctctatggccagttagatacgacgaaaaaacttcgggacttctttaccgtgaccgacctccgcattcgcttgctccgcccagcagtcggggaaatttttgtcgatgagttacatctggcacggtatttctatgccatctccgacattaaggtgaggggacgctgtaaatgtaacttgcacgccaccgtttgcgtgtatgacaacagtaaactgacttgtgaatgtgaacacaacactacgggccccgattgcggtaaatgcaagaagaactaccagggtcgaccctggtcccccggctcttatttgcctatcccaaagggcacggcaaatacctgcatccccagcatctccagcatcgggaatccacctaaatttaacagaatctggcccaatatctcctcactggaagtcagcaatcctaaacaggtagcccctaagctggcacttagcaccgtctcttcggtgcaggttgcgaatcataaacgggactgtgaatgttttggacattctaaccgatgctcctacattgacttactcaatactgtcatatgcgtttcctgcaaacacaacaccagagggcagcactgcgaactgtgtcggttagggtacttcagaaacgcaagcgcccagctggatgacgaaaacgtgtgcatcgagtgttactgtaatcctttaggcagcatccacgaccgctgcaacggatccggattctgtgaatgcaaaaccggcaccactggtccgaaatgcgatgagtgtctgcctggcaatagttggcactatggctgtcagcctaatgtgtgcgacaatgaactgctgcactgtcaaaacggcggtacttgccacaacaatgttcggtgcctctgtcctgccgcttacactgggatcctgtgtgagaagctgcgttgtgaggaagccggctcgtgtggaagtgacagtggacagggggctccgccccacggcagtccagctctcctgttgcttaccacgctgttaggcacagcctcccccctggtcttttag

SEQ ID NO: 126021 - DNA, 1485 bp, synthetic construct
  misc_feature 1..1485: note = Description of Artificial Sequence: Synthetic coding sequence
  source 1..1485: mol_type = other DNA
atgtacctgagccgatttctctctatccatgccttatgggtcacggtaagcagcgtgatgcagccataccccctggtttggggtcactatgatctctgtaagactcagatctatactgaggaagggaaggtatgggattacatggcttgccaaccagagagcactgacatgactaaatacttgaaggtgaaactagacccgccggacattacatgcggagatccacctgagactttctgtgctatgggcaatccatatatgtgcaataacgaatgcgatgcgtccacgccggaactggcccatcctccggaacttatgttcgactttgagggccgacacccttccacgttctggcagtctgccacttggaaggagtatccaaaacccctgcaggtcaacatcaccttgtcgtggtctaaaactattgagctgactgacaatattgtgattacattcgagtctgggagacccgaccagatgatcttagagaaatctctggactacgggcgcacctggcagccctatcaatattacgcaaccgattgtctggacgcttttcatatggaccctaagtccgtgaaggatttgtcacagcataccgtgctggaaataatttgcacagaggaatattccaccggctatacgaccaactcaaagattatccacttcgagattaaggacaggttcgccttcttcgccggcccacgactccgcaatatggccagtctctatggacaactggataccacgaagaagctgcgtgatttcttcacggttaccgatctaaggatcagattgctacgaccagcggtcggcgagatatttgttgatgaattacacctggctagatacttctacgccataagcgatatcaaggtgcgagggcgttgtaaatgcaaccttcacgccactgtgtgcgtgtacgacaacagtaagttgacctgtgagtgtgagcacaacaccacgggcccagactgcgggaagtgcaaaaagaactatcagggccgtccctggagcccaggcagttacctgcccatccctaaagggacagctaatacatgcatcccatccatctcaagcattgggaactgtgagtgttttgggcattcaaataggtgctcttatatcgacctacttaatacagtcatctgtgtcagctgcaaacataacacacgcggccaacattgtgaactgtgccggttaggatactttaggaatgccagcgcccagctggatgatgaaaacgtgtgcatagccaacgtgtgtgacaacgagctgttacattgtcagaacggcggcacctgccacaacaatgtgcggtgtctgtgccccgcggcttacaccgggatcctctgcgaaaagctgagatgtgaggaggccgggagctgcgggtccgattcaggccagggcgccccccctcatgggagtcctgccctcttgctgctgacaactttgttaggcaccgccagcccattggtgttctag

SEQ ID NO: 126022 - DNA, 1443 bp, synthetic construct
  misc_feature 1..1443: note = Description of Artificial Sequence: Synthetic coding sequence
  source 1..1443: mol_type = other DNA
atgtacctctcgcgcttcctcagcatccatgcactttgggttaccgtgtcttcagtcatgcagccatacccactggtgtggggacactacgatctgtgcaagacacagatctataccgaagagggaaaagtctgggattacatggcctgccagcccgagagtacggacatgactaagtatctcaaggtgaagctggacccacccgatattacatgcggtgatccccctgagacattctgcgctatggggaacccatacatgtgcaataacgaatgtgatgctagcacgccagagctagcccatcccccagagctgatgtttgactttgaggggcggcacccatctacgttctggcagagcgctacttggaaagaataccccaaacctctccaggtgaatataactctctcttggtcaaagactatcgagctaacggacaacattgtcatcaccttcgagagcgggagacctgaccagatgatcttagaaaagtccctggactacggacgaacatggcagccttaccaatactatgcgactgactgtctggatgctttccacatggatccaaagtccgtgaaagacctgagccagcacacagtacttgagatcatctgtactgaagagtatagtaccgggtacactaccaatagcaagatcatccatttcgagatcaaggataggttcgccttcttcgctggaccaaggttacgcaacatggcttctctctatggtcagcttgatactactaagaagctcagggacttttttactgtgaccgacctcagaataaggctccttagacctgcagtcggtgagatatttgttgatgaacttcatctcgcccgctatttctatgccatctcagacattaaggtacgcggcagatgcaagtgcaacctgcacgccacagtgtgcgtctacgacaactctaagcttacttgtgagtgtgagcataatacaacgggacccgattgcggcaaatgtaagaagaactatcaagggcgaccatggtccccaggatcttatctccccattcccaaggggaccgctaacacctgcattccttccatttcttccataggaaacccacccaagtttaacagaatctggcctaacatatcctctttggaagtatctaatccaaaacaggtggcccctaaacttgccctcagcaccgtatcttccgtgcaagttgcaaatcacaagagggccaacgtctgcgacaacgaattgctccactgccagaacggcggtacgtgtcataacaatgtcaggtgcctctgtcctgccgcatacacaggaatcctgtgcgagaagttgcgatgcgaggaggcaggaagctgcggcagtgactctggtcagggggctcccccacacggtagcccggcgttgcttctgctgaccaccctgcttggcaccgccagccccctcgtcttttag

SEQ ID NO: 126023 - DNA, 1383 bp, synthetic construct
  misc_feature 1..1383: note = Description of Artificial Sequence: Synthetic coding sequence
  source 1..1383: mol_type = other DNA
atgtacctttccagatttttaagtattcacgctctgtgggtcacggtaagttctgtgatgcagccttatccgctggtatggggccattacgatttgtgcaaaacccagatttacaccgaagagggcaaagtctgggactacatggcctgccagccagaatccaccgatatgacgaagtacctgaaggtgaagctcgaccctcctgatattacctgtggcgatccgccggaaaccttttgcgccatgggcaacccctacatgtgcaacaatgaatgcgatgcatccacccctgagctggcccaccctccggaactaatgttcgacttcgagggcagacacccctccacattctggcagtccgcaacttggaaggagtatccaaaacccctccaagttaacatcaccctgtcgtggtccaaaacgatcgaactcacggacaatatcgtgattacgtttgaatccgggaggcctgatcagatgatcctcgaaaagtcactggactacgggcgcacatggcaaccttaccagtactacgctaccgactgcttagatgccttccacatggacccgaagtccgttaaggatctgagccagcatacggttctcgagattatctgcaccgaggaatactctactggatacaccactaacagtaagattatccactttgaaattaaagatagatttgctttctttgctggaccgcgacttaggaatatggcctctctatatggccaactcgataccacgaaaaagcttcgcgacttctttacggtgaccgacctgcggatccgcctcctccggcctgcggtcggggaaatatttgtggatgagctgcacttagccagatatttttatgcaataagcgatataaaggtacgcggccgctgtaagtgtaacctccacgctactgtctgtgtgtacgataatagcaaactgacatgtgagtgcgaacataatactaccggaccagattgcggcaaatgtaagaagaactatcaggggagaccgtggtctcctggttcgtacttaccgatcccgaaggggactgcaaacacttgtataccatccatcagttcaattggaaatcccccaaaatttaatcggatttggcctaacattagtagcttagaggtcagtaatccaaagcaagcgaacgtttgtgacaacgagctactgcattgtcaaaacgggggcacctgtcacaataacgtgagatgtctttgccccgccgcctacacagggatactttgcgagaaactacggtgtgaagaggccggcagctgcgggtctgattcaggccaaggggcccccccccacggttcaccagcattgctgctgctgacgactctgctcgggacagcgtcaccgctggtgttttag

SEQ ID NO: 126024 - DNA, 1620 bp, synthetic construct
  misc_feature 1..1620: note = Description of Artificial Sequence: Synthetic coding sequence
  source 1..1620: mol_type = other DNA
atgtatttatcacggtttttgtccattcatgctctctgggtgactgtgtcaagcgtgatgcagccttacccgttagtgtggggacactatgatctgtgtaaaacacagatctatacagaagaggggaaagtctgggattatatggcgtgccagccagagtcaacagatatgacaaagtacctgaaagttaaactggatccccctgacattacatgcggcgaccctcccgaaacattctgcgctatgggaaatccatacatgtgtaataatgagtgtgacgcatcaacccccgaattagcacatcccccggagctgatgttcgacttcgaagggcggcatccatcaacattttggcagagtgccacttggaaggagtatcccaagccgctgcaggtgaacataacgctttcatggtccaagaccattgagttgaccgacaacatcgtgatcacgtttgagtcggggaggcccgaccagatgattcttgaaaagtcccttgattacggccgtacttggcagccttaccagtattacgccactgattgtctggacgccttccacatggaccccaaaagtgtcaaggacctcagtcagcataccgtactggaaattatctgtacggaagagtacagcacaggatataccaccaattcaaaaatcatacactttgagatcaaggataggttcgcctttttcgccgggccacgacttcgcaatatggcttccctgtatggccagttggacactacaaagaagctccgagacttcttcaccgttaccgacctcaggatcagacttctacggcctgcagtcggtgagattttcgttgatgaactgcacctggctagatacttctacgcgatctccgacattaaggttaggggaagatgtaaatgtaacttacacgcaactgtatgcgtgtacgacaactccaaacttacctgtgagtgtgagcacaacacaaccggccctgattgcggcaaatgtaaaaagaattaccagggccggccctggtcaccaggcagctatcttccaatcccgaaaggcactgccaatacctgcatcccaagtatttcaagtatcggcaactgtgaatgctttggacactctaacaggtgcagttacatcgatcttctgaacaccgtgatctgtgtctcatgcaaacacaatactcgaggtcagcattgcgagctgtgcaggctggggtatttccgtaacgcatccgcgcagctggacgacgaaaacgtgtgtatcgaatgttattgtaacccgctcggatcaatccatgatcgctgcaatggtagcggtttctgtgaatgtaagaccggaacaacgggacctaagtgcgatgaatgtctccccggcaatagttggcactacggctgtcaaccaaacgtgtgcgataatgaactcctccactgtcagaacggtggcacctgtcataataatgtaaggtgcctgtgtccggctgcctatacagggatactgtgtgaaaaacttcggtgcgaagaggctgggagttgcggtagtgactctggccaaggggctccaccacacgggtctcccgccctgctgctcctgactacccttctcggcaccgcgtctcccctggtgttctag

SEQ ID NO: 126025 - DNA, 1383 bp, synthetic construct
  misc_feature 1..1383: note = Description of Artificial Sequence: Synthetic coding sequence
  source 1..1383: mol_type = other DNA
atgtacttgtctcgctttctgagtatacacgccctctgggtgaccgtgtcctccgtcatgcagccctaccctctagtatggggtcactatgacttgtgcaagactcaaatttacacagaggaaggaaaggtatgggactacatggcctgccaacctgagtctacggacatgaccaaatacctgaaagtgaaattggatccccctgacattacatgtggagatccacccgagactttttgcgctatggggaacccttatatgtgtaataacgagtgcgacgcatctacccccgagctggcgcatccaccagagcttatgtttgatttcgagggacggcaccctagtacgttctggcagtccgccacctggaaagaatacccaaagcccctccaggtaaatatcaccctctcctggagtaaaaccattgagctgactgacaacattgtgatcacattcgagtcaggacgacccgatcagatgatcttagagaagtcactggactacggccgcacctggcagccataccagtactacgcaactgactgcctcgacgccttccatatggacccaaagagcgttaaggacctgtctcagcacaccgtgttggaaatcatatgtaccgaagaatacagcaccggatacactacaaattccaaaatcatccactttgaaatcaaggacagatttgccttcttcgctggaccacggctaagaaacatggccagcctttacggccagctggacacgactaaaaaactccgcgatttcttcacagtcaccgatttgcgaatccgacttctgcgccctgccgtcggagagatcttcgtggacgaactccacctggctcgctatttttatgcaatctccgatatcaaggtgagggggaggtgcaaatgcaatctgcatgccaccgtgtgcgtgtacgacaacagcaagctgacctgcgagtgtgaacataacaccacggggcctgattgcggcaaatgtaagaagaattatcagggaagaccatggtctcccggtagttacctaccaattcccaaagggacagctaatacatgtgatccctacttaacatcttgtggggatcccccaaaattcaaccgcatttggcccaacatctctagtttggaggtgtcaaaccccaagcaggccaatgtctgtgacaatgagctcctgcactgccagaacggagggacatgccataataatgttagatgtctctgccccgcggcttacactggcatcctgtgcgagaaactccgttgcgaggaagcaggctcgtgtggctccgattcgggtcaaggagctcctccacacggaagtcccgcattgctgttactcacaaccttattaggtacagctagtcccctggttttttag

SEQ ID NO: 126026 - DNA, 1443 bp, synthetic construct
  misc_feature 1..1443: note = Description of Artificial Sequence: Synthetic coding sequence
  source 1..1443: mol_type = other DNA
atgtacctgtctcggtttttgtcaattcacgccttgtgggtgaccgtaagtagcgtgatgcagccgtacccgttggtatggggacattacgacctttgtaagacacaaatctacacagaagagggtaaggtctgggattatatggcctgtcagccggagagtacggatatgaccaagtatttgaaggtcaagctcgacccccctgatattacttgcggagacccccccgaaacgttttgtgcgatggggaacccttacatgtgcaataatgaatgcgacgctagcacccctgagctcgcgcatccccctgaacttatgtttgattttgaaggacggcacccctccactttttggcagtctgcaacttggaaagagtacccaaaacctcttcaagttaatattactctcagttggtctaaaactatcgaactcacagataacattgtgataacctttgagtcaggcagacctgatcagatgatcttagagaagagcctggattatggacgcacctggcagccataccagtactacgccaccgattgcctggacgcattccacatggaccccaagtctgttaaggacctgtcccagcacacagtcctggagattatctgcactgaagaatattcaaccggatacacaactaattcaaagatcatccattttgagattaaagatcgctttgcattttttgcaggacctcgcttgcggaacatggcctcattatacgggcagctggataccacgaaaaaacttcgcgattttttcacagtgacagatctacgaatcagattactacgaccagcagtgggagaaatctttgtggatgagctccatctcgcgaggtacttctatgcgatcagcgacatcaaggtcaggggcaggtgcaagtgcaatttacatgctaccgtctgcgtgtacgacaactcgaaactgacctgcgaatgcgagcacaatactactgggcccgattgtggaaagtgtaagaagaactaccagggcaggccatggtcccctggatcttatttacctatccctaaggggaccgccaacacctgcatcccctccattagttctattggtaatccgccgaagttcaatcggatctggccaaacatttcaagcttagaggtgtctaatccaaaacaggtggctcccaaacttgcattgtccacagtttcaagcgtccaggtggctaatcacaagagagctaatgtgtgtgacaatgagctgctgcattgtcagaacggtgggacatgtcataacaatgttagatgcctgtgccctgctgcgtatactggcatcctctgtgagaaactgagatgtgaggaggccggaagttgcggttcagacagtggccaaggtgcgccaccccacggaagcccagccttgcttctgttaactacattactagggaccgcatcccccttagtgttctag

SEQ ID NO: 126027 - DNA, 1485 bp, synthetic construct
  misc_feature 1..1485: note = Description of Artificial Sequence: Synthetic coding sequence
  source 1..1485: mol_type = other DNA
atgtacttaagcaggtttctgtccattcatgccctgtgggtcactgtgtcctctgtgatgcagccttacccactggtctggggccattacgatctgtgcaaaactcagatttatacagaggaaggcaaggtgtgggattatatggcctgtcagcctgagagcactgatatgacaaagtacctgaaggtcaaactggatccaccagatattacctgtggagatcccccagagaccttctgtgctatgggcaatccatacatgtgtaacaacgaatgcgacgcttctacccccgagcttgctcaccctcctgaactgatgttcgattttgagggacgccatcccagcacattctggcagagcgccacttggaaggaataccccaagcctttgcaagttaacatcacgttgagttggtctaagaccatagagctcacagataacatcgtgatcaccttcgagtccggtagacccgaccagatgatcctcgaaaagtccctggactatggaaggacatggcagccttaccaatattatgctacagactgccttgacgcatttcatatggaccccaagtccgttaaggatctgagtcagcacactgtgctcgagataatctgtacggaggaatactccacgggatacactaccaactctaaaatcatccacttcgaaatcaaggaccggtttgctttctttgcagggccacgcctgcggaacatggcttccctctatggacagttagacacaacaaagaagctgcgcgatttctttacagtgacagatttgcggattcgcctgttgcgaccggccgtcggagaaatttttgtggatgaactgcacctggcccggtatttctatgctatttccgacatcaaagttagaggccggtgtaagtgcaacctacatgctacagtatgcgtttacgacaattcaaagctcacatgcgaatgcgaacataacaccaccggccctgactgtgggaagtgtaagaagaattaccagggacgaccgtggtccccaggatcctatctgcctatcccgaagggcactgctaatacgtgtgacccgtatttaactagctgtggagattgtgagtgcttcggacattccaacaggtgttcctacatcgacctcctgaacacggtaatctgtgtgtcctgcaaacataatacacggggacagcattgtgaactctgccggctcggatatttccggaacgccagcgcccagctggatgatgagaatgtttgcattgccaatgtgtgcgataatgaactcctgcactgccagaacgggggtacatgtcataacaacgtccgatgcctatgccccgcagcgtacaccgggatactgtgcgagaagctacgctgtgaggaagctggctcctgcggcagcgacagcggccaaggcgcaccgccacacggatcccccgccctgctcctgctgacaactcttctgggaacggcgagcccgttagtgttctag

SEQ ID NO: 126028 - DNA, 1620 bp, synthetic construct
  misc_feature 1..1620: note = Description of Artificial Sequence: Synthetic coding sequence
  source 1..1620: mol_type = other DNA
atgtacctgtcgcggtttctgagcatacatgctctgtgggtcacagtgagctctgtgatgcagccatatccactggtgtggggacattatgatctgtgtaaaacacagatttatacagaggaaggtaaggtttgggactatatggcgtgccaacctgagagtacggacatgaccaagtatctgaaagtgaagctcgatccgccagatatcacatgcggagaccccccggagaccttttgtgccatgggcaacccttatatgtgcaataacgaatgtgacgcaagcactccggagctggctcaccctcccgaactgatgtttgatttcgagggacgccacccatccactttctggcagtcagccacgtggaaagagtacccgaaacccttgcaggtaaatattaccttaagctggtccaaaacgatcgagctgaccgataatattgtcatcacttttgagagcggacgccctgaccagatgattctggaaaaatccttagattacgggcgaacatggcagccctaccagtattatgccacggactgcttagatgcatttcacatggaccctaagagtgtcaaagatctgagccagcacaccgtgctggaaataatctgtaccgaggaatatagtactggatatacaactaattccaagatcatccactttgaaatcaaggatcgattcgctttttttgcaggccctcgcctgcgcaacatggcctctctatacggccagctcgatacgacaaagaaactcagagatttctttacggtgacagacttgcggattcgcttgcttcggccagccgtgggcgagattttcgtggacgaattgcatcttgctagatacttctacgctatctctgatataaaagtgagaggccgctgtaaatgcaaccttcatgcgacagtttgcgtgtatgataactcaaaacttacatgtgagtgcgagcataacaccactgggcctgactgtggcaagtgtaagaagaactatcagggacgaccttggagccccggatcatacctgccaattcccaaaggaaccgctaatacctgtattccatctatctctagcatcgggaattgcgaatgctttggacattccaatcgctgtagttacatcgacttgttgaacaccgttatctgtgtaagctgcaagcataatacacgtggccaacactgcgagttatgcagactggggtacttccgaaatgcttcagcccagctcgatgatgagaacgtctgtatcgaatgttattgtaacccactggggtccattcacgacaggtgtaacggttcagggttttgtgagtgtaagacgggaactacagggcctaagtgcgatgaatgtttaccaggcaactcctggcactacggatgtcaaccgaatgtatgcgataacgaattactgcattgccagaatgggggcacgtgccataataacgtgcgatgcctctgccccgccgcgtacaccgggatcctctgtgaaaaacttaggtgcgaagaggcaggtagctgcggtagcgactcaggccaaggcgccccaccacacgggtcacccgcgctgctgctgctcaccacactgttagggaccgcatctcccctggttttctag

SEQ ID NO: 126029 - DNA, 1317 bp, synthetic construct
  misc_feature 1..1317: note = Description of Artificial Sequence: Synthetic coding sequence
  source 1..1317: mol_type = other DNA
atgtatctctcgaggtttctgagcatccatgcactgtgggttaccgtgtcctccgtaatgcaaccttatcccctggtttggggccactatgacctgtgcaagactcaaatctacactgaagagggcaaagtttgggattacatggcttgccagcccgagtccactgatatgaccaaatacttaaaggtgaaacttgaccccccggatatcacctgtggagaccctcccgaaaccttctgtgctatgggtaatccttacatgtgcaacaatgaatgtgacgcttctactccggaactggcacatccccccgaattgatgtttgatttcgaaggacggcatccgagtaccttttggcagtctgctacttggaaagaatatccgaaacccttgcaagtaaacataacactcagttggtccaagaccatcgaactgaccgataacattgtcattacatttgagtcagggcgcccggaccagatgattctggagaagagtctggattacgggagaacctggcaaccataccagtactacgctacagactgtctcgacgccttccatatggatcctaaatcagtgaaggacttaagtcagcacaccgttctcgagatcatatgcacagaggaatattccacgggttatacaacaaactccaagataatccattttgaaatcaaggacagatttgccttcttcgctgggccgaggctgaggaatatggcctctttgtatggccagctcgacactactaagaaattgagagacttttttaccgtgaccgacctgaggattcggctgctccggcccgccgtcggcgagatctttgtcgatgagctgcacttggccagatacttctacgccatctctgatattaaagtgagaggtcgctgcaagtgcaatctgcatgctacggtgtgcgtgtacgataatagcaaacttacctgtgaatgcgaacacaacacaacagggcctgattgcggaaagtgcaaaaaaaactaccaaggacgcccctggtcaccgggcagttacttaccaattcctaagggcactgcgaacacatgtataccatccatcagtagtataggaaccaacgtgtgcgacaatgaattactgcactgtcaaaatggtggtacatgccataataacgtgcggtgtctttgccctgcagcctatacaggcatcttatgtgaaaagctgagatgcgaggaagcgggatcctgcggctcagatagcggtcagggagccccaccacacggatcccctgccctgcttctattaacgacattactgggaacggcgagccctcttgtgttttag

SEQ ID NO: 126030 - DNA, 1095 bp, synthetic construct
  misc_feature 1..1095: note = Description of Artificial Sequence: Synthetic coding sequence
  source 1..1095: mol_type = other DNA
atgtacctgtcacgctttctgtcaatccatgccttgtgggttaccgtcagctctgtgatgcaaccctaccccctggtgtggggccattacgatctgtgcaagacacagatatacactgaggagggcaaggtgtgggactatatggcatgccagcctgagtctaccgatatgaccaagtacttaaaggtgaagctggaccctcccgatattacatgcggcgacccgcctgaaacattctgcgctatggggaatccatacatgtgtaataacgaatgcgatgctagcactcccgaactggcgcacccacctgagctgatgttcgactttgaaggtagacacccctccaccttttggcagtcagccacttggaaagagtaccccaagccactgcaggttaacatcactctatcctggagcaagactatcgagttaactgataacatagtcatcacattcgaaagtggcaggccagaccagatgatcctggagaagagcctagactacggaagaacctggcagccataccagtactatgccactgattgcctggatgcttttcacatggatccaaaatccgtgaaagatctctcacagcacactgtcttggagattatatgcacagaggagtattcaaccggttatactacaaattccaaaattatccactttgaaataaaagaccggttcgcattctttgccgggccacggctgagaaacatggcctccctgtatggccaacttgacacaacgaagaagctgcgcgatttctttacagtcaccgaccttaggattcgtctccttcggcccgccgtcggggagatcttcgtggacgaactccatctcgcccgatatttttacgcaattagcgacattaaggttcgcggccgatgtaaatgcaaccttcacgccacagtatgcgtttacgataacagtaagcttacatgcgaatgcgagcacaacactacaggcccagactgcgggaagtgcaaaaagaactaccaaggtagaccatggtccccagggtcttaccttccgattcctaaagggactgccaacacttgcattcctagcatctccagcatcgggtccaaatag

SEQ ID NO: 126031 - DNA, 1317 bp, synthetic construct
  misc_feature 1..1317: note = Description of Artificial Sequence: Synthetic coding sequence
  source 1..1317: mol_type = other DNA
atgtacctgtcacgcttcttgtccattcatgccctatgggtgaccgtctccagcgtgatgcagccttaccccctggtttggggccattacgatctgtgtaagactcagatttacactgaggagggcaaagtttgggactacatggcctgccaaccagagagcacagacatgactaaatacttgaaggttaagctcgaccctcccgacataacgtgcggcgatccccccgagaccttctgcgccatgggcaacccttatatgtgtaacaacgagtgtgacgcaagcacccccgagctggcccacccacctgaactgatgttcgacttcgaaggaaggcacccaagcactttttggcagagcgcgacgtggaaagaatatcccaaacccctgcaggtcaacataactctgagctggagtaagacaatagaattaaccgacaacatcgtgatcaccttcgagagcggccgcccagatcagatgattctagagaaatccctggactatggtcgtacatggcagccctatcagtattacgctaccgactgcttggacgcattccacatggatcccaaatccgtgaaagacctcagccagcacacagtcttggaaatcatctgcaccgaggagtatagtacggggtatacaactaatagcaagatcatccacttcgaaatcaaggatagattcgcattctttgccgggccgaggctgaggaatatggcaagcctctacggacagctggataccaccaaaaaactcagagatttcttcaccgtgaccgatctccgcatccgtttactcagacccgccgtcggagaaattttcgtggacgaattacatttagcacgatacttctacgctatcagtgatattaaagttagaggtcgctgtaagtgtaatctccatgccactgtgtgtgtgtatgacaattctaaattgacctgcgaatgcgaacataatacaacaggtccagattgcgggaagtgcaaaaagaactaccaaggccggccgtggtctccgggatcatacttgcccatccccaaaggaactgccaatacttacttgcctagcatgtactcagtcgcagccaacgtgtgtgacaatgaactcctgcattgccagaacggcggtacttgtcacaacaacgtgaggtgcttgtgcccagcagcctacaccgggatcttgtgcgagaagcttcgctgtgaagaggcaggttcatgtggcagcgattcaggtcagggcgctccacctcatggatcccctgcccttctcctcctgactactctgcttggtacagcttctcctctggtcttctag

SEQ ID NO: 126032 - DNA, 1620 bp, synthetic construct
  misc_feature 1..1620: note = Description of Artificial Sequence: Synthetic coding sequence
  source 1..1620: mol_type = other DNA
atgtacctcagcaggttcttgtcaattcacgctttgtgggtgaccgttagctcagtgatgcagccttatcccctcgtatgggggcattacgacttatgcaagacacagatctatacagaagagggaaaagtctgggattatatggcatgtcagcccgagtctaccgacatgacaaagtacctgaaggtgaaattggatccgcccgacataacctgcggagacccaccggagactttctgcgctatgggtaacccctatatgtgtaataacgagtgcgatgcctcaaccccagaactggcccaccctccagagctgatgtttgactttgaggggcgacacccctccacattctggcaatctgctacatggaaggaataccccaaaccccttcaggtgaacataacactttcgtggtctaagactatcgaactgacagacaacatagtcatcactttcgaaagcggtaggcctgatcagatgatcttggagaaatcactcgattatgggcgtacttggcagccgtatcagtactacgccacagactgcctcgacgccttccatatggatcccaagagcgtgaaggaccttagccagcacaccgtgttggaaattatctgtactgaagaatactctacgggttatacgaccaatagtaagattatccatttcgaaataaaagataggtttgcctttttcgccggcccaaggctgagaaatatggcatctctctacggccagctggatactaccaagaagctaagagatttttttacagtcacggatcttaggatccgtctgcttcgaccagcagtcggtgagatctttgtcgacgaattacatctggcacggtacttctacgctatatccgatatcaaagtcaggggacgatgtaaatgcaacctacatgccaccgtgtgcgtatacgacaactctaaacttacctgcgaatgtgagcataataccacagggcccgactgtggaaagtgtaagaagaactatcagggaagaccttggagtccaggttcgtatttacccatcccgaaggggaccgctaacacctgcgatccttacctgacttcctgtggcgactgtgagtgcttcgggcactcaaacaggtgctcctatatcgacctcctcaacaccgtgatttgcgtgagttgcaagcataatacccgcggacagcattgcgagctttgcagactgggctactttcgcaatgcttctgcacaattagacgacgagaacgtatgtatcgagtgttattgcaatcctcttggctcaatccacgatcgctgtaacggatccggattttgcgagtgcaagacaggcactaccggcccaaaatgtgatgagtgcttacccggcaatagctggcactatggatgtcagcctaatgtgtgtgacaatgaactgctccactgccaaaacggcggtacctgccataacaacgttcgctgtctgtgcccggccgcctatacaggaatactttgtgaaaagctcagatgcgaagaggcgggcagctgtgggagtgattctggccagggcgctccacctcatggcagcccagctcttttgttgctgacaacgctgttaggtaccgcttctcccttagtattctag

SEQ ID NO: 126033 - DNA, 519 bp, synthetic construct
  misc_feature 1..519: note = Description of Artificial Sequence: Synthetic coding sequence
  source 1..519: mol_type = other DNA
atggttgggcccgctcctcggaggcgcctgcgccccctggccgctctggctctcgtgttggccttagcaccaggcctgcctaccgcgagagccggccagacacctaggcccgcagaaagaggaccgccggtgcgcctattcacagaggaggagttggccaggtacggtggcgaggaagaagaccagcctatctatcttgccgtgaaaggagtggtcttcgatgtcacgtctggtaaggaattctatggccggggtgccccctacaatgcccttacaggcaaggactcaacgagaggcgtggctaaaatgtcgttagaccctgctgacttaacacacgacacgacaggcctgaccgccaaggaacttgaggctctggacgaagtattcaccaaggtctacaaagctaagtacccgatcgttggctatactgcgcgcagaatcctaaatgaggacggcagtcccaacctggactttaagcccgaagatcagccacatttcgacattaaggacgaattttag

SEQ ID NO: 126034 - DNA, 2088 bp, synthetic construct
  misc_feature 1..2088: note = Description of Artificial Sequence: Synthetic coding sequence
  source 1..2088: mol_type = other DNA
atgagcttacttctgagcttttacttactggggctcctcgtatcctccggccaggaccggttcgctatgttagctaataacaatctccaaatattaaacatcaataagagcgatgaaggcatatatcgctgcgagggccgagtggaggctcgaggagaaatcgatttccgcgacatcatcgtgatcgttaacgttccacccgcgatctctatgcctcagaagtcatttaacgcaactgcagagagaggtgaagaaatgactttcagctgtcgtgcttccggcagcccagagcctgctatatcttggtttcgaaatggtaaactcattgaagaaaatgaaaagtacatcttgaagggctccaatactgaactgacagtgaggaatattattaattccgacggcggcccttacgtgtgccgggccaccaacaaagccggagaagacgaaaagcaggcgtttcttcaggtgttcgtgcagccacacatcatccagctgaagaatgagaccacatatgaaaacggccaggtgacacttgtctgcgacgcagagggggagcctattccagagattacgtggaaaagggcagtcgatggcttcacctttaccgaaggtgataagtcgctcgacggccggatagaggtgaagggccagcatggcagttcctccttacatatcaaggatgtgaagctcagcgattccgggcggtacgattgcgaagccgcatccagaataggcggtcaccagaagagcatgtatttagacatcgaatacgcaccaaagttcatctccaatcaaaccatctattacagctgggagggaaaccctataaatatcagttgcgacgtcaagtctaaccccccagcatctattcattggagaagagacaagttggtcctccccgcaaaaaacaccacaaatctcaaaacatactctaccggcaggaagatgatcctggagatagctcccacatccgacaacgatttcgggcgctacaattgcacagcaaccaaccacattggaactcggtttcaagagtacattctggctctcgctgacgttcctagcagcccttatggagttaaaattatcgagctttcccagaccacagctaaggtgagttttaacaagccagattcacatggtggcgtgcccattcaccattaccaggtcgatgtcaaagaagtggcctctgaaatctggaagatcgttaggagccacggagtgcagactatggttgtgctgaataatttggagccaaatactacttacgaaataagggtcgcagcagtgaatgggaaaggacagggcgattactcgaagattgaaatatttcagaccctgccagttcgggagccctccccccccagtatacacggccagcccagcagcgggaagtcattcaagttatccatcactaaacaagacgatggtggagcacctatcctggagtacatcgtgaaatatcgttctaaagataaggaagaccagtggctggagaagaaggtccaggggaacaaggatcatataattctcgagcacctccagtggactatgggctacgaagtccaaataactgctgcaaatagactcggctactccgagcctacggtatatgagttcagcatgccccctaagcccaatatcattaaagacacgctgttcaacgggcttggcctgggcgctgttattggcctcggcgtagccgctctactgctgattctggtagtgacagacgttagttgtttcttcataaggcagtgcggactgctcatgtgcatcactaggaggatgtgcggcaaaaagtctgggtctagcggcaagtccaaagagctggaagaagggaaagctgcgtatctcaaggacggcagcaaagaacccatcgtggaaatgagaacggaggacgagagggtgaccaaccacgaagatggaagtccagttaacgagcccaacgagaccactcctttgactgaaccagagaagcttcctttgaaagaggaggacgggaaggaagctttgaacccggaaacaatcgaaattaaggtcagcaatgacattatccagagcaaagaggatgatagtaaggcctag

SEQ ID NO: 126035 - DNA, 2514 bp, synthetic construct
  misc_feature 1..2514: note = Description of Artificial Sequence: Synthetic coding sequence
  source 1..2514: mol_type = other DNA
atgagtttgctactctcattttatttgctggggctgctcgtgtcttctggccaggctttgctgcaagtgaccatctcccttagcaaggtggagctgagcgttggtgaaagcaagttctttacctgcacagcaatcggtgagccagaatctattgactggtataacccccaaggggagaagatcatatcaacccagcgagtcgtcgtgcagaaagaaggagttagatcaaggttgaccatttataacgctaatatagaggacgctgggatctatcgctgccaggcaaccgacgctaaaggacagactcaagaggcaaccgttgtgttggaaatttaccagaagctcacattccgggaggtggtgtcacctcaggaatttaagcagggagaggacgctgaggtagtctgtagagtgtccagtagtccagcgcctgccgtgagttggttgtaccataatgaagaggtcacgacaatttccgataatagatttgccatgctggcaaacaacaacttgcaaattcttaatattaacaagtcggacgaagggatctacagatgtgagggtcgggtggaagccagaggagaaatcgatttcagggatattatcgtgattgtcaatgtgccacccgcaatttcaatgccccagaagagcttcaacgcaactgcggagagaggggaagagatgactttctcctgccgagccagtggttcaccggaacctgcgattagttggttccggaacggcaagctcatcgaagagaatgagaagtacatcctcaaggggtccaacaccgagctgacagtcaggaatataatcaattcagatgggggcccctatgtctgtagggccaccaacaaggcaggcgaagatgaaaagcaggcgttccttcaagtgtttgtccagccgcacattatccagctgaaaaacgagacaacttacgaaaatgggcaagtgacgttggtctgtgacgctgaaggcgagccaatccctgagatcacttggaaaagagcggtggacgggtttacattcaccgaaggcgataagtcactggacggccgcattgaggttaaaggacagcacggctctagctcgctgcacataaaagacgtgaaactgtccgattcaggacgctacgattgcgaggcagcctcaagaatagggggacaccagaagtctatgtatctggacattgagtacgccccaaaattcattagcaaccaaactatttactacagctgggagggtaatcctatcaacatctcctgcgacgtgaagtctaatccccctgcctcgattcattggcgccgagataagctggtgcttcccgccaagaataccacaaatcttaaaacttattccaccggccggaaaatgatcctcgagatcgctccgacatcagacaacgacttcggtcggtataactgtactgctactaatcatattgggactcggttccaggagtatatactcgcgctcgctgatgtacctagcagcccttatggggtgaagatcatcgagctctcccagactacagcgaaggtttctttcaataaacctgactcccatggcggggttcccatccatcactatcaggtggatgttaaggaggtggcttccgaaatctggaaaatcgttcgaagtcatggtgtgcagaccatggttgttctgaacaatctggaacccaacacaacatacgagatccgagtcgcagccgtgaatggcaaagggcagggggattattccaagatcgaaatttttcagacattacccgttcgcgagccttctcctcccagtatacatggccagccctcaagtgggaaaagctttaaactctcaattactaagcaggatgacggaggggctccgattttagaatacatcgtgaaatacagaagcaaggacaaggaagatcaatggcttgaaaagaaggtgcagggcaataaagaccatatcattttggagcacctgcaatggaccatggggtatgaagttcaaattactgctgccaatcgcctgggctactccgaaccaactgtctacgaattcagtatgcctccaaagcctaatatcatcaaggacactctttttaacggactgggtctgggagctgttattggattgggcgtggccgcactgcttttgatcctggtggtgacagatgtgagctgtttcttcattagacagtgcggactcctgatgtgcatcacccgccggatgtgcggcaaaaaaagcggctctagtggaaaatccaaggaactcgaagaaggcaaagccgcttacttgaaggatgggtctaaagaacccattgtagaaatgcgcacagaagacgagcgggttaccaaccacgaggacggtagccccgtgaacgaacctaatgaaaccactcctctcaccgagcccgaaaaacttccactgaaggaggaagatggcaaagaggcactcaacccagagactattgaaatcaaggtctcaaatgatatcatccaatcaaaagaggacgactcaaaagcctag

SEQ ID NO: 126036 - DNA, 1275 bp, synthetic construct
  misc_feature 1..1275: note = Description of Artificial Sequence: Synthetic coding sequence
  source 1..1275: mol_type = other DNA
atggtccggagcgacagtggtggacaagtctatctcgattatcacaataggcaggggttgtttgtcgattggaaatacaacgaagctctgtaccttgaagagggacagcctgagacctattacaggacggccctgctgcaggtaactatcagcctctccaaggtcgaactttccgtgggagaatccaagttcttcacatgtaccgcgataggggagccagagagcatcgattggtataacccccaaggtgaaaaaatcatttcaacacagcgagtggtggtgcagaaagagggtgttcgaagtcgactgaccatatataacgcaaatatcgaggacgcaggaatataccgctgtcaggctaccgacgcgaagggccagacccaggaggccaccgtggtactggaaatttaccagaagctaacgtttcgcgaggtagtgagtccccaagagtttaaacagggcgaggatgccgaggttgtctgtagagtctccagctcacctgccccagccgtgtcatggctctaccacaacgaggaagtcactaccatctctgacaatagattcgctatgctcgcgaataacaaccttcagattctaaacattaacaaatcagacgagggcatttaccgctgcgagggacgggtagaagcacgcggcgagattgatttccgggatattattgtgattgtcaacgtccccccagctattagcatgccccaaaaatctttcaacgccacagccgagcggggcgaagagatgacattcagctgccgagccagcggctctcccgagccagcgatctcttggttcaggaatgggaagctcattgaggaaaatgagaagtatatcctgaagggtagcaatactgagctaaccgtacgcaacatcattaactcggatgggggcccgtatgtgtgtcgcgccaccaataaagctggcgaagacgagaaacaggcgttccttcaggttttcgtccagccccatatcattcaactaaagaacgagactacctacgagaatggacaggtgacactggtgtgcgatgctgagggtgaacccatccctgagatcacttggaagcgggccgtggacgggttcacttttacagagggcgataagtcccttgacggtagaatcgaagtgaagggccagcatgggtcttccagcctgcatatcaaagatgtgaagctgagcgacagcggccgctatgattgtgaggcagccagtagaataggaggtcatcagaagtcaatgtacctcgatatagaaagctag

SEQ ID NO: 126037 - DNA, 1983 bp, synthetic construct
  misc_feature 1..1983: note = Description of Artificial Sequence: Synthetic coding sequence
  source 1..1983: mol_type = other DNA
atgcaggaaaatctgaggttcgccagcagcggcgacgatataaagatctgggacgccagttctatgactctggtggataaatttaatccccatactagtccgcatggcataagctccatctgctggtcctcgaataataatttccttgtaacagcttctagcagcggggacaagatcgtggtgtcaagttgtaaatgcaaaccagttcccctcctggagctggcagagggacaaaaacagacctgcgtgaatctgaattctaccagtatgtatttggtgtccggcggacttaacaatactgttaatatctgggatctgaagtctaaacgcgtacatcggtccctcaaggaccacaaggaccaggtgacctgcgtcacttataattggaacgattgttacattgcctccggttcattatccggggaaatcatcctgcattcagtaaccacaaacctgagttcgacaccttttggccacggctctaatcagagcgtccggcacctgaaatattctctgttcaagaagtcccttctgggaagcgttagcgacaacgggatcgtgaccctctgggacgttaactctcagagtccctatcataactttgactccgtgcacaaggctcctgcgtccggaatttgcttcagcccagtgaatgagctcttattcgtgaccatcggcctcgacaaacgcattatactgtacgacacatcttctaagaagttagtgaagacgctggtggctgatacaccccttacagcagtggatttcatgccagacggagcaacactggctatagggtcgagtcgagggaagatttaccaatatgacctgcgaatgctgaagtctccagtcaagaccatctcagcacacaaaactagtgtgcagtgcatcgcattccagtatagcaccgtgctgaccaaatcctcacttaataagggctgtagcaacaaacctacaaccgtgaacaagcgaagcgtgaacgttaacgcagcgagcggcggtgttcagaactccgggatcgtgcgcgaagcacccgctaccagcatcgctacagtgctgccccagccgatgacctctgcgatggggaaagggactgtggcagttcaggagaaggctgggcttcctcgcagcattaacaccgataccctctctaaggagaccgactctggaaagaatcaagacttcagcagctttgatgatacggggaagtcttccctcggtgatatgttttcacctataagagatgatgccgtggtcaacaaggggagcgatgaatcgatcggaaaaggcgatgggttcgatttcctcccacaactgaattcggtgtttcccccgagaaagaaccctgtgacaagctcgacatcggttttacattcaagtccacttaacgttttcatggggagtcccggaaaagaggaaaacgagaaccgtgacctgactgccgagtccaaaaagatatatatgggaaagcaagagtcaaaagactcgttcaagcagttggctaagctcgtgactagtggcgccgagagtggaaatctcaataccagcccctcatctaaccagaccagaaactccgagaagttcgagaagccagagaatgagattgaggctcagctgatttgcgagccacctataaacgggtccagtactccgaatcccaaaatcgcctctagcgtaacagccggggttgcttcttctttaagcgagaaaattgcggattcaatcggtaataaccgccagaacgcccccctaacctccatacagatcaggtttatccagaatatgatacaggagactctcgacgattttagagaagcatgtcaccgcgatatcgtgaatctccaggtggaaatgattaagcaatttcatatgcagttgaatgagatgcactcacttctcgagagatacagcgtgaatgagggtctggtcgccgagatcgaaaggttgcgcgaggagaataagaggctccgggcgcacttttag

SEQ ID NO: 126038 - DNA, 1716 bp, synthetic construct
  misc_feature 1..1716: note = Description of Artificial Sequence: Synthetic coding sequence
  source 1..1716: mol_type = other DNA
atgtatcttgtgtcaggaggactgaataatactgtgaatatctgggatctgaaaagcaaacgagtccatagaagccttaaggatcataaagatcaggtgacatgcgtaacatacaactggaatgattgctacatcgcctccggatctctatctggcgagatcatcctgcattcagttactaccaacctgagttcaaccccttttggccatggctctaatcaatccgttagacaccttaaatactctttattcaaaaagtccttgctgggaagcgtgtctgacaacggcatagtcacactgtgggacgtgaattcacagtccccctaccacaactttgatagcgtccacaaagcccctgcaagcggcatctgttttagtcctgttaatgagctgctgtttgtgaccattggcctggacaaacgcattattctgtacgacacttcctctaagaaacttgtcaaaacgctggtggctgacacaccattgacggctgtggatttcatgccggacggagctacgcttgcaatcggttcatctcgaggaaagatttaccagtacgatctacgtatgctgaagagtcctgttaagacaatttcggcacataagaccagcgtgcagtgtattgcgttccagtactctacagtccttactaagagcagcctgaataaaggctgcagcaataaacccaccactgttaataagcgatctgtaaacgtcaatgcagccagtggaggggttcagaacagcggcatcgtgcgcgaggcccccgccacaagtattgctactgtactgcctcagccaatgacatcagccatgggaaaaggaacagtggcagtgcaagagaaagctggactcccaaggtcaatcaacaccgacaccctctccaaagagactgactcaggcaaaaaccaggacttcagttcttttgatgacaccggaaaatcctccctaggtgacatgttcagcccaatcagggacgacgccgtcgtcaacaagggttcagatgagagcattggaaagggcgacggatttgatttcctcccccagcttaactccgtgtttccccccaggaagaaccctgtgacatcctccaccagcgttctgcattcctcccctctgaatgtctttatggggtccccgggaaaagaggagaatgagaatagggatttgaccgctgagtccaaaaaaatttatatgggaaagcaggaatcaaaggatagcttcaagcagctcgccaagctcgtgactagtggtgcagaatcggggaaccttaatacgtcaccctcctcaaaccagactcggaattccgaaaagtttgaaaagcctgaaaacgaaatagaggcccaacttatctgcgagcctcctattaatggcagcagcacgcccaatcccaaaatcgcaagtagcgtgacggccggagtcgcgtcatctctgagtgagaaaattgccgactcaatcggaaacaatagacagaacgcaccgctgacatcaattcagataagatttatacagaatatgatacaagagacactggatgatttccgggaggcatgccaccgcgacatcgtgaatctgcaggtggagatgattaagcaattccatatgcagttgaatgagatgcattcacttttagaacggtattccgtgaacgagggcctggtggccgagatagagcgcctaagagaggagaataaacggctgcgggcccacttctag

SEQ ID NO: 126039 - DNA, 1983 bp, synthetic construct
  misc_feature 1..1983: note = Description of Artificial Sequence: Synthetic coding sequence
  source 1..1983: mol_type = other DNA
atgcaagagaacctccgcttcgcaagttctggagacgacatcaagatctgggacgcttcatctatgactctcgtagataaattcaatccccatactagcccccatggtatttcttccatttgctggtcctcaaacaataatttcctcgtgacggcaagttctagcggggataagatcgtcgtgagctcctgtaagtgtaagccagtgcccctgctggagctggctgaaggccagaaacaaacgtgcgtgaatctgaacagtacctctatgtacctagtaagcgggggcctaaataatacagtgaacatctgggacctcaagagtaagagggtccaccggtcactgaaggaccataaagaccaggtgacgtgcgtgacctacaattggaatgactgctatatagcctccggctcccttagtggggagattattttacacagcgttactactaacctatcatcaaccccatttggccatggttctaatcaatcagtccggcatttgaaatatagcctgttcaagaaatcactcctgggttcggtgtccgacaacggtatcgttaccctgtgggatgtcaatagccagagcccgtaccacaacttcgattctgttcacaaggcaccagctagtgggatatgcttctccccggtgaatgagctactttttgtcactatcgggttagacaaacgcataattctgtatgacacatcatcaaaaaaacttgtcaagacactggtcgccgatacgccccttactgccgtcgacttcatgcctgacggggcaactttggccatcggcagcagccggggaaagatctaccaatacgatctgagaatgctgaaatccccagtcaaaacaataagcgctcataaaacgtccgtccagtgtatcgcatttcagtactcaaccgtgctgacaaagagctccctgaataagggatgctccaacaaacctaccaccgtgaataaaaggagcgttaacgtgaacgccgctagcggaggagttcagaattctgggattgtgagagaggctcctgcaacaagcatcgcaacggtgctaccacagcccatgactagcgcgatgggcaagggcacagtcgccgtgcaggaaaaagccgggctgcctaggtcgataaatacagatactctcagtaaggaaacagatagtggtaagaatcaggatttctcgagttttgacgacactgggaaatcatccctgggtgacatgttctcacctatcagagacgacgcagtggttaacaaggggagcgacgagtctattgggaaaggagacgggtttgacttcctcccgcaactcaactctgtctttcctcctaggaagaaccccgttacaagttccacctctgtgcttcatagtagcccactgaatgtgttcatgggtagtcctggcaaggaagaaaacgaaaatcgcgatctcaccgccgagagcaagaagatttacatggggaagcaggagagtaaggattctttcaaacagctggccaagctcgtgacctcgggcgccgaatctggcaatctgaacacaagccccagctctaaccaaacacggaattccgaaaagttcgaaaagcccgaaaacgagatagaggctcagttgatatgcgaaccgcccatcaacggttcttccactcccaatcctaaaatcgcttcatctgtaaccgctggggtggcgagtagtttatccgaaaagatcgccgacagtataggaaataataggcaaaacgccccgcttactagcatacagatcagattcattcagaacatgattcaggagaccttggatgactttcgtgaggcttgtcaccgagatatcgtgaatctccaggttgaaatgatcaagcagttccacatgcaactgaacgaaatgcactctctcttggaacgctattcggtaaacgaaggcctggttgccgagattgaaaggcttagggaagagaataaacgcctgcgcgctcacttttag

SEQ ID NO: 126040 - DNA, 1716 bp, synthetic construct
  misc_feature 1..1716: note = Description of Artificial Sequence: Synthetic coding sequence
  source 1..1716: mol_type = other DNA
atgtatttagtttccggcggacttaacaacacagtgaatatctgggatctgaagtccaaaagagtgcatcggagtttaaaagatcacaaggatcaggttacttgcgtaacctacaactggaatgattgttacattgctagcgggtctctgtctggagagattatcctgcatagtgtaacgacgaacctcagtagtacgcccttcggacacgggtctaaccagagtgtgcgtcatcttaaatattcactgtttaaaaaatcccttctgggtagcgtgagcgacaacggaatcgttaccctgtgggacgttaactctcaatctccttatcataacttcgattcggttcacaaagctcccgcctctggcatctgctttagtccagtaaacgagcttctctttgtgaccatcggactcgacaagcgcattattctttatgacacatcctcaaagaagttagttaaaacactggtcgccgatactccattgacggctgtagattttatgcccgatggagcgacactggctattggctcttcaagggggaagatttaccagtatgacctgcggatgctaaagagcccagtgaaaaccatttccgctcacaagacaagcgtccaatgcatcgcatttcagtactctactgtgctgacaaagagctctctgaataaagggtgcagcaacaagcctacaacagttaacaaaaggagcgtgaatgtgaatgcagcaagtggaggcgtgcaaaactccggaatagttagagaggcacccgccacaagtattgccacagtgcttccgcaacctatgacctcagccatgggtaaaggcactgtcgccgtccaggaaaaagctggactgccaagaagcatcaacaccgacacactgtcaaaggagaccgactctggaaaaaatcaggacttttcatcattcgatgataccggaaaatcaagcctgggggacatgttttcccccatcagggacgatgcagtcgttaataagggaagcgacgagtccattggtaagggcgatggcttcgactttcttccacagctgaatagcgtgtttcctccgcgtaagaatccagtgacttcttcaaccagcgtgttgcatagctcaccactgaacgtgttcatggggtctcccgggaaagaggaaaacgagaatagagatcttaccgcggagtccaaaaagatctatatgggcaaacaggaatcaaaggactccttcaaacagttggccaaattagtgaccagcggcgcggaatccggcaacctcaatacttctcctagctcaaaccagacgcgaaattcagaaaaatttgagaaaccagagaatgagatagaggcacagctgatttgcgagcccccgattaacgggagttctacccccaacccgaagattgccagttcggtcacggccggggtcgctagtagtttgagtgagaaaatcgccgattcgatcgggaataatcgccagaacgcccccctaacctcaattcagatccgctttatacaaaatatgatccaggaaaccctggacgacttcagggaagcgtgccatagggacatcgttaacctgcaggtagagatgattaagcagttccatatgcaactgaatgagatgcactccctgttggagcgctacagcgtcaacgaagggctagtggctgaaatagaaagactgagggaagaaaacaaaaggctccgcgctcacttctag

SEQ ID NO: 126041 - DNA, 483 bp, synthetic construct
  misc_feature 1..483: note = Description of Artificial Sequence: Synthetic coding sequence
  source 1..483: mol_type = other DNA
atgtatttagtcagtggtggccttaataacacagtgaacatctgggatttgaagtcgaagcgcgttcaccggagcctgaaggatcacaaggaccaggtgacatgcgtgacttataattggaacgattgctacatcgcctcagggtcgctgtccggggaaatcatcctgcatagcgttaccactaatctatcctcaactccttttggccacggttcaaaccagagtgtgaggcacctaaagtattctctctttaaaaagagcctcttagggtcagtgagcgataacggtattgtgactctttgggatgttaacagtcagagcccctatcataactttgactctgttcacaaagcacccgcgagcggaatctgtttcagtcccgtcaacgagttgctgttcgttaccatcggactggacaaacgcataatactgtatgatacctcaagcaaaaagctggtcaaaacactcgtggccgacacgtag

SEQ ID NO: 126042 - DNA, 504 bp, synthetic construct
  misc_feature 1..504: note = Description of Artificial Sequence: Synthetic coding sequence
  source 1..504: mol_type = other DNA
atgcacttcacgggggctgtcatgcaggagaatctccggttcgcatctagcggagatgacattaagatctgggacgccagtagcatgaccttggtggacaaatttaacccacatacatccccacacggcattagcagtatatgctggtcctcgaacaacaacttcctggtgaccgcgagctcctccggcgacaagattgtggtctcatcttgcaagtgcaagccagtaccactcctggagttggccgagggtcaaaagcagacatgcgttaatctgaattctacgtcaatgtacctcgtgtccggcgggctgaacaataccgtgaacatctgggatctcaagtccaaacgagttcataggtcattgaaagaccacaaggatcaggtgacgtgcgttacctacaactggaacgactgctatattgcctctggatccttgtccggagagataatcctgcatagcgtgaccactaatctgtcatccaccccttttgggcatggctag

SEQ ID NO: 126043 - DNA, 306 bp, synthetic construct
  misc_feature 1..306: note = Description of Artificial Sequence: Synthetic coding sequence
  source 1..306: mol_type = other DNA
atgcaggagaacctcaggttcgcttcctccggcgatgacatcaagatctgggatgcaagctctatgacactagtcgataagttcaatccacacacctccccacacggaatcagttccatatgttggtcttctaataataatttcctggttacagcctcgtcaagtggagacaaaatcgtggtttccagctgtaagtgcaagcccgtcccccttttggagctcgcagaaggacaaaaacagacttgtgtgaatttaaatagcacatccatgtacctggtttctggagggctgaacaataccgtgtag

SEQ ID NO: 126044 - DNA, 498 bp, synthetic construct
  misc_feature 1..498: note = Description of Artificial Sequence: Synthetic coding sequence
  source 1..498: mol_type = other DNA
atgcaagaaaatctgcggttcgccagtagtggagatgacatcaaaatctgggatgcgtcttctatgacccttgtggataaatttaaccctcatactagcccccatgggatctcctctatctgctggtcatccaacaacaactttctcgtaactgcctcatctagcggagataaaatcgtcgtttcgtcctgcaagtgtaagcccgttccactgctggagttggccgaggggcagaagcagacttgcgtgaaccttaactccacatccatgtatctagtgagcggcggcttaaacaacaccgtgaacatatgggacctgaaatccaagagagtacacaggtcactcaaggatcacaaagaccaggtgacatgtgtgacttacaactggaacgactgttatatcgcatcaggctccttgagcggagagatcattctgcattcagtgaccaccaacctgagctcaacaccctttggacacgggagcaaccaaagtgtctag

SEQ ID NO: 126045 - DNA, 2004 bp, synthetic construct
  misc_feature 1..2004: note = Description of Artificial Sequence: Synthetic coding sequence
  source 1..2004: mol_type = other DNA
atgcattttacaggagccgttatgcaggagaatctgagatttgcgtcctccggggacgacatcaagatttgggacgccagctcaatgaccttagtggacaagtttaacccacatacctctccccatggcattagctctatctgctggtccagtaataacaactttttggtgactgctagctctagcggcgataagattgtagtctccagctgtaagtgcaaacccgtgcccctcctagagctggctgagggccagaagcagacttgcgtcaacctaaactcgacatctatgtatctcgtgtctggaggactaaataacaccgtgaatatttgggacttaaagagtaagcgggtccaccggtctttgaaggaccataaagaccaggtcacctgcgtgacatacaactggaacgattgctacattgcctcaggatcactaagcggtgaaataatcctgcattccgttaccactaatctctcttccacgcctttcggacatggcagcaaccaatccgtgcgccaccttaaatactctctgtttaagaaatccctgctcggctcggtgagtgacaacggtatcgtgaccctttgggacgtcaatagtcaaagcccctatcataacttcgactccgttcacaaagcacccgccagtggcatctgtttcagtccagtgaacgagctgctgtttgttactataggactggataaacgcataattctgtatgacactagcagcaagaagttagttaaaacattggtcgccgacactccactcaccgctgtggactttatgcccgatggcgccactttggcaattggctcttcgagaggtaagatctatcagtatgatctccgtatgcttaagtctccagtcaagacaatcagtgctcacaaaacctcagtccaatgcatagcctttcagtatagtacagtgttaaccaagagctctctgaacaagggatgctcaaataaacctaccactgtcaataaaaggtcagtcaacgtcaacgctgcctctggcggcgtgcagaatagtggcatagtgagggaagccccggcaacctccattgctaccgtgctcccccagcctatgacgagcgcgatgggcaaaggaacagtagccgtccaagaaaaggccggcctgccccggtcgatcaatacagatacactgtccaaagagaccgacagcggaaagaaccaggacttttcttccttcgacgatacaggcaagagctctctgggagacatgttttctccaattcgggacgatgctgtagtaaacaagggtagtgacgagagtatcggaaagggcgatggttttgactttctgccccagctaaatagcgttttcccacctaggaagaaccctgtgacatctagtacctccgtgctgcacagtagccccttgaatgtgttcatgggctcccccggtaaggaggaaaatgaaaatcgggatctgacagcggagagtaagaaaatttatatggggaaacaggagagcaaggactcctttaaacaacttgccaagctggtcacctcaggggctgagtcgggaaacttaaataccagcccttcttccaaccaaactcgcaacagcgagaagttcgaaaagccagaaaacgagatcgaggcccagcttatctgcgagcccccgatcaatgggagtagtacaccgaaccctaaaatcgcaagcagcgtgaccgcaggagtggctagctcactgtctgagaaaattgccgatagcattggcaacaaccggcagaatgcaccccttacatcaatacaaatccggtttatacaaaatatgatccaggagacccttgacgactttcgagaagcatgccaccgggacattgtgaatctgcaagtagagatgattaagcaattccatatgcagctgaatgagatgcacagtctgttagaacggtacagcgtaaacgagggccttgtagccgagattgaaagattgcgagaagagaataagagactgcgcgcccacttctag

SEQ ID NO: 126046 - DNA, 3744 bp, synthetic construct
  misc_feature 1..3744: note = Description of Artificial Sequence: Synthetic coding sequence
  source 1..3744: mol_type = other DNA
atggcacagtctttacgactgcattttgccgccagaaggtctaatacttatcccctgtcggaaacttccggggacgatctagattctcatgtgcacatgtgtttcaagagacctacccggatatccacaagcaacgtcgtacagatgaaactgacccctaggcagactgcactggcgcccctaattaaggaaaacgtacagagccaggaacgctctagcgtgcctagctcagagaatgtcaataagaaaagcagctgtctgcagatctctcttcaacccacccgttatagtggctacctgcaatcctccaacgtgctggctgatagtgatgatgcgagcttcacatgtattttgaaggatggcatatatagctccgccgtcgtcgataacgagttgaatgcggtcaacgatggacatctcgtgtcgtctcccgccatctgctcagggagcttgagtaatttttccacatctgacaacggatcctacagcagcaatggttctgatttcggatcatgcgcttcaattacctctgggggcagctatacaaattcagtgatttccgactcctcatcttatactttcccacccagtgatgatacattcctgggcggcaatctgccttcggactcgacctctaatcggtctgtgcccaacagaaatactaccccctgtgagattttttcgaggtctactagcacagacccattcgtccaagatgatctggaacacgggctcgagattatgaagctccctgtaagtcggaacaccaagattcccttgaagcgttactcatccttggtcatttttcccaggtccccatcgactacacggcccacgagtcccacctccctctgtacccttctgtctaaaggtagctatcaaaccagccaccaattcattatctctccatcagaaatcgcccacaacgaagatggaacctccgctaaaggcttcctgagcacggctgttaacggtctgagactgtcgaaaactatctgcacccccggcgaggtgcgggatatccgtccattacatcgaaaaggtagtctccaaaagaaaatcgtgttgtctaataataccccacggcaaactgtctgcgagaagtcttctgagggctattcctgcgttagcgtgcatttcacccagagaaaagccgcaacactagattgcgagactactaacggtgattgcaaacctgagatgagcgaaatcaagctaaatagcgacagtgagtacattaaactgatgcaccgcacaagtgcctgtctgccaagttcacagaacgtcgattgccagatcaacatcaatggcgagctcgaaagaccacacagccagatgaataaaaaccatggcatcctgcggcggtctattagtctgggcggagcctaccctaatatctcctgcttaagctctctgaaacacaattgcagtaagggcggcccatctcaactgctcatcaagtttgcctccggaaacgagggaaaagtggataatcttagcagagattccaaccgggattgcacgaacgagctgtcaaattcctgcaaacccggatgggttgtcttggatcagccagatgctgcctgtcaccttcagcagcagcaggaacccagtccactgccccccgggtgggaagagcggcaggatattctgggcagaacatactacgtcaaccacgagagtagaagaactcagtggaaacgacccacaccccaagataacctgactgatgccgagaatggcaatattcagctgcaggcgcagagagccttcactaccagacgtcagataagtgaagagacagagtcagtggacaatcgcgagagtagcgaaaactgggaaatcattcgagaggatgaggctacaatgtactcaaaccaggccttccccagtccaccgccatctagtaatctggatgtccccactcatctcgccgaagaactgaatgcaaggttgactatcttcggcaattctgctgtgtctcagcccgcatcgagttctaatcattcaagccgtaggggatctcttcaagcgtatacgtttgaagaacagcccaccctgcctgtgctgttgcctactagttccggtttgcccccaggctgggaagaaaaacaagacgaaagggggaggtcatattatgtggaccacaatagcagaacgaccacctggacgaagcctaccgttcaggcgaccgttgagactagtcagttaacaagcagccagagctccgctggtccccaatctcaggcctctaccagtgactcaggacagcaagtcacacaacccagtgagattgaacagggtttcctgcccaagggctgggaagtgcgccacgcccctaacgggcgacctttcttcatcgatcacaacacaaagacaacgacgtgggaggacccacggctgaagatcccagcgcatttgagaggtaagacctcgctcgacacatctaacgatctggggcctctacctccaggctgggaagagcggacccacaccgatggccggatcttttatatcaatcataacatcaaacggactcagtgggaagatccccgtctagagaatgttgcaattactgggcctgctgtgccatattccagggattataagaggaaatatgaattcttcaggcggaaattgaaaaagcagaacgatatcccaaataagttcgagatgaaacttcgcagagcgaccgtgctcgaagactcctataggagaatcatgggggtcaagcgggccgacttcctgaaagcacgactgtggattgagtttgatggtgaaaagggccttgattacgggggcgtcgctagggagtggtttttcctgatctcaaaagaaatgtttaatccctattacggcttgttcgaatactctgctaccgacaattacactcttcagatcaacccgaacagcgggttatgcaacgaagatcacctatcctattttaaattcatcggaagggtcgcggggatggctgtgtaccacgggaagctcttggacggcttctttatcagaccgttctacaagatgatgcttcataagccaattacgcttcacgatatggagtcagtcgatagtgaatattacaattctctcaggtggatactggagaatgatcctaccgaactcgaccttcggttcatcatagacgaagaactgttcggccagacccaccaacacgagctaaaaaacggcggctcagagatagtggtcaccaataaaaataaaaaagagtatatatatctggtcatccaatggagatttgtgaatcgaatacagaagcagatggcagcttttaaggaggggttttttgagcttataccacaggacttgattaaaatcttcgatgagaatgagctcgaactgcttatgtgcggacttggagacgtggatgtcaacgactggagggagcacaccaagtacaagaatggctattccgcaaaccatcaggtcatccagtggttctggaaggcagtgctgatgatggatagcgagaaaagaatccggctgctgcagttcgtgaccggaacaagccgcgtgcctatgaacgggtttgctgaactgtacgggtccaatggaccgcaaagctttaccgtggaacaatggggcacacccgagaagctgccgcgagcgcatacctgctttaaccggcttgatctgcctccttacgagtcctttgaagaattgtgggacaaacttcaaatggccatcgagaatactcagggcttcgacggggtggactag

SEQ ID NO: 126047 - DNA, 2703 bp, synthetic construct
  misc_feature 1..2703: note = Description of Artificial Sequence: Synthetic coding sequence
  source 1..2703: mol_type = other DNA
atggctacttgcgccgtcgaggtgttcggtctcctcgaagacgaggaaaattcccgcattgtgagagtcagagttattgccggcatcggcctcgccaaaaaagacattctcggtgcctcagatccttacgtcagagttactctgtacgacccgatgaacggcgtgctgacttcagtgcagacgaagaccataaaaaagtccctgaatccaaagtggaacgaagagatcctgttcagagtgcaccctcaacagcacaggctactgttcgaggtcttcgatgagaaccgactgacacgggatgacttcttaggtcaggtggacgtgcccctatacccgctgcccactgagaacccgcggctcgaacgtccttacacttttaaagactttgtacttcatccacgtagccacaaaagccgggtgaaaggataccttagactgaaaatgacgtatcttcctaagacctctggcagcgaagacgacaatgcggaacaagcagaggaactggagccaggatgggtcgtgctcgaccagcccgacgccgcgtgccatttgcagcagcaacaggagccttcccctctgcctcctggatgggaagagagacaggatatactgggccgcacctattacgttaaccatgaaagccgccgtacccaatggaagaggcccacaccacaggacaacttaacagatgctgaaaatgggaacatccagctccaggcccaacgggcttttaccactaggcggcagattagcgaggagacagaaagcgtcgacaatcgcgagagctccgagaactgggaaattatcagagaggacgaggctacaatgtacagcaatcaggctttccccagtccccctccctcctcaaacttggatgtacccacccatctggctgaagagttaaacgctcgactgaccatattcgggaattccgccgtcagccaaccggcatcaagttcaaatcatagttcacgtagaggaagcttgcaggcctacaccttcgaggaacagcctacactgcccgtcctgctacccacctctagcggcctaccgcccgggtgggaggagaagcaggacgagaggggaagatcctactatgtcgatcataattccaggactactacatggacaaagccaaccgtgcaggccacagtggagactagccagttgacaagttcgcagtcaagcgcaggaccccagtctcaggcctctacatctgatagcgggcaacaagtgacccagccctcagagatcgagcaagggttcctgcccaaagggtgggaggttcgtcacgcccctaatggtagaccatttttcattgaccacaataccaagactacaacatgggaagatcctcggctgaagatccccgcccaccttcggggaaaaacatcactggacactagcaacgacttgggcccactgcctcccggctgggaggaacggactcacacagatggtagaatcttctacatcaaccacaacattaagcgcacccagtgggaagaccctcgcctcgaaaacgtagccattactgggccagcggtgccctactcccgggattacaaacggaaatacgaattctttaggcgtaaactgaagaaacagaatgacattcccaataagtttgagatgaagcttagaagggcaactgttctagaagactcgtataggagaattatgggtgttaagagagcggatttcctgaaagctagactctggattgagttcgatggtgaaaagggtctggattacgggggcgtagcaagagaatggttttttctcatatccaaagagatgtttaatccatattatggcctcttcgagtattccgctactgacaactatacacttcagataaatcccaacagcggtctctgtaatgaagaccatctgagttactttaagttcatcgggagggttgcgggcatggcagtgtaccatgggaagttgctcgatggattcttcattagacccttctacaagatgatgttacacaagcctatcacactacatgatatggagtcagtagatagcgagtattacaactccctgcgctggatcctggaaaacgaccctaccgaacttgaccttcgcttcataattgatgaggaactgtttggacagacgcatcagcacgaactgaagaatggcggttccgagattgtcgttacaaataagaacaagaaggagtacatttacctagtgatccagtggcgattcgttaatcggatacaaaagcagatggctgcctttaaggaaggctttttcgaattgatacctcaagatctgataaagatttttgacgaaaatgagctggaactgttgatgtgtggcctcggcgatgtggatgtcaacgactggcgcgagcacactaaatataaaaacgggtactccgccaatcaccaggtaattcagtggttttggaaagccgtgcttatgatggatagcgaaaaaaggatccggctcttacagtttgtgacaggtacgtctcgggtgcctatgaatggctttgcagagctctatggttctaacgggcctcaatcttttacggttgaacagtggggaacaccggagaaactccccagagcacatacatgcttcaataggctagatttacccccctacgagtcctttgaagagttgtgggataagctgcagatggctatagagaatacacaaggtttcgacggagtggactag

SEQ ID NO: 126048 - DNA, 3912 bp, synthetic construct
  misc_feature 1..3912: note = Description of Artificial Sequence: Synthetic coding sequence
  source 1..3912: mol_type = other DNA
atggcccaatctctccgactgcatttcgctgcaaggaggtctaatacctatcccctttccgagacatctggtgatgacttggatagtcatgtgcacatgtgcttcaaacggccaacacggatatcgacatcaaatgtggtgcagatgaaactgacgcctagacaaactgccctggctcctctgattaaggagaacgttcaatcacaggaaagatcgtcggtgcctagctccgagaatgtaaataaaaaatcttcgtgtctgcagattagcctccaaccaactcgctacagcgggtacttgcaaagctcaaatgttctcgccgacagcgacgacgcttctttcacctgcatcctgaaggatggcatttacagctctgctgtcgtggacaacgaactcaatgccgtaaacgacgggcacttagtaagctctcccgccatatgcagcggcagcctgtctaactttagcacaagcgataatgggtcctatagcagtaatggaagtgacttcggctcttgtgcctcgatcacatccggtggctcctacacgaacagtgtgatatcggattcctcatcctacacttttccaccttccgatgacacctttttaggggggaatctccccagtgacagcacgtccaatagatcggtgcctaatcgtaatactaccccttgtgagatcttctccaggtccacctcaaccgatccgtttgtccaggatgatttggagcatggcttagagatcatgaagctgccggtgtctaggaacaccaagatcccactgaagcgatacagctcactcgtgatttttccaaggtccccctctaccactaggcccacctctccaactagcttgtgtacactactatctaaggggtcatatcagacaagtcatcaatttataattagtccttctgaaatcgcacacaacgaagatggcactagcgccaaaggttttctatccaccgcagtaaatggtctgcgcctgtcaaaaacaatctgcacgcccggtgaagtgagagacattcgcccgttacaccggaaggggtcactgcagaagaagatcgtgctctccaataatacgccacggcagactgtgtgtgagaaaagctctgagggttactcatgtgttagtgtccattttactcagagaaaggccgcgactctggattgtgaaaccacaaatggggactgtaagcccgaaatgagcgaaattaaactcaattcggattctgagtatatcaagctaatgcaccgcacatccgcatgtctaccatcgtctcagaacgtggattgtcagattaatattaacggcgagttagagcggccacactcgcagatgaataaaaaccatggaatactgagaaggagcatcagtcttggaggggcatatccaaatatctcctgtctctccagtttgaaacacaactgttctaagggcggtcccagccagctgctcataaaatttgccagtggaaacgagggcaaggttgacaaccttagtcgggactctaacagagactgcaccaatgagttgtctaactcatgcaagacacgagatgattttctggggcaagtggacgttcccctgtatcctctccctacagaaaaccctcggttagaacgcccatatacatttaaggactttgtcctccacccacggtcgcataaaagccgcgttaaaggttatcttcgactaaaaatgacttatttgcccaagacctccggttctgaagacgacaatgccgagcaggcagaggagctggaacagcaacaggagccatctccactcccacccgggtgggaagagcgccaggatatcctgggaaggacatactacgtgaatcacgaaagtcgcagaacacagtggaagcgacccacccctcaggacaatctgaccgatgcagaaaacgggaatattcagcttcaggctcagcgtgcctttaccacaagacgacagatctccgaagagactgaatcggtggacaatagagaatcctctgaaaattgggagatcatccgagaggatgaggccaccatgtattcaaatcaagcctttccaagtcctcccccttccagtaatttggacgtgccaacacatctggcagaggagttaaacgctcgacttaccattttcggcaactcagcagtgagtcagccagcatcttcttctaaccactcctctaggcggggcagtctgcaggcgtacacatttgaagagcagccaactctgcccgttctgctcccaaccagtagcggcctccccccaggctgggaggagaagcaggacgagcggggcagatcctactatgtggaccataactcccgcacaaccacttggaccaaaccaaccgtgcaggccactgttgagacctctcaattgaccagctcgcagtcctcggccggccctcagtcccaggcatcgacctctgatagtggccaacaggtgacacaacccagtgagatcgagcaggggttcctaccaaagggctgggaggtaagacatgcacccaacggacggcccttctttatagaccacaacaccaaaacgacaacgtgggaagatccgcgattgaaaatacccgcgcatctgagaggcaaaacctctttagatacttccaacgatctagggccactcccacctgggtgggaggagcgtacacacacagacggacgtattttttacattaatcacaacattaagcgaacccagtgggaggatcccagactcgaaaacgtggctatcaccggccccgcggtaccctacagcagagactacaagagaaagtacgaatttttccgacgcaagctcaaaaagcagaacgatattcccaacaaattcgaaatgaagcttcggcgggcaaccgtcctcgaagacagttacaggcgaatcatgggagttaagcgcgctgatttcttgaaggctaggctgtggatcgaatttgacggcgaaaagggtttggactacgggggagtggctagagagtggtttttcctgatatctaaagagatgttcaatccctattacgggctcttcgaatattcagctacagacaattatactctgcagatcaaccctaactcaggcctgtgcaacgaggaccacttatcttacttcaagtttatcggacgggtcgcagggatggctgtatatcacggtaagttgttagacgggtttttcatcaggccattttataagatgatgctgcacaagcccatcacactgcacgacatggaatctgttgattcagaatactataactcactccgctggatactggagaacgaccctactgaattagacttacggttcatcatcgatgaagaactcttcggccagacccatcagcatgagctgaaaaacgggggctccgagatagtagttactaataagaacaaaaaggagtacatctatttggttattcagtggaggttcgttaacagaatccaaaaacagatggccgctttcaaagagggttttttcgagttaattcctcaggaccttatcaagatcttcgatgagaatgagctggaactgctaatgtgtggcctgggcgacgtggacgtgaacgattggcgggaacacactaaatacaagaacggatacagtgctaatcatcaggtaatccagtggttctggaaggccgtcctgatgatggactctgagaagaggatcagactcttgcagtttgtgactggaacctctcgcgtccctatgaatggatttgctgagctgtatggatccaacggtccacagagcttcactgttgaacaatggggcacacccgaaaaactccctcgggcccatacttgtttcaatagactggatctaccaccttatgagagctttgaagaattgtgggacaaactacagatggcaattgaaaacactcagggtttcgacggggtagattag

SEQ ID NO: 126049 - DNA, 3960 bp, synthetic construct
  misc_feature 1..3960: note = Description of Artificial Sequence: Synthetic coding sequence
  source 1..3960: mol_type = other DNA
atggctcagtctctccggttgcatttcgcggcccgcaggtcaaacacctaccctttatctgaaacaagcggcgacgatttagatagccacgttcacatgtgcttcaaacgcccaacccgcatctccacctccaacgtcgtgcaaatgaagctcactccaaggcagactgcgctggcccctctcatcaaggagaatgtgcaatctcaagaacgttcgtctgtgcccagcagcgaaaacgtgaacaagaagtcgtcctgcctccagattagcctgcagccaacacgatattctggctatctccagtctagtaacgtgctcgcggacagcgacgacgcttccttcacttgcatcttaaaagacgggatttactcctcagccgttgttgataatgaactgaacgccgtcaatgacgggcacctggtatctagccctgccatatgcagtggatctttgagcaacttcagcacttctgacaacgggagttactctagcaacggctccgatttcggctcctgcgctagcattacgagtggcggaagctatacgaattcagtcatcagcgattcctccagctacacgttccctcctagtgacgacacattccttggaggaaaccttccctctgattccacgagtaacaggtcagttccaaacaggaatacgaccccgtgtgagatctttagccgctctacttcaaccgaccccttcgtgcaagatgacttggagcacgggttggagatcatgaaactgccggtctcaagaaacacaaagattcctctgaagcgttactcaagcttagtgatctttcccagatcaccttccacgactcggcctacatcaccaactagcctttgcacgctgctcagcaagggaagctaccagacatctcaccagttcattatttctccttccgaaattgctcacaacgaggatgggacatccgctaaggggtttctaagcacagcggtaaatggcctgaggctttccaaaacgatctgcacccctggggaggtgcgggacattcgtccgctgcacagaaagggatctctccagaaaaagattgttcttagtaacaatactcctcgccagacagtgtgcgaaaagagttcagagggctacagttgtgttagcgtgcacttcacccagcgcaaggcagctaccttggactgcgaaactaccaacggggactgtaagcctgaaatgagcgaaataaaactaaatagcgatagcgagtatattaagcttatgcatcgaactagtgcctgtctacccagtagccagaatgtcgattgtcaaattaacatcaacggggaactcgaaagacctcactcacaaatgaacaaaaaccacggcatattgcgccggagcattagcttggggggggcctaccccaatatatcttgtctgtcctctcttaaacacaattgttctaagggcgggccatcccagctgttgattaaatttgctagtggcaacgagggaaaagttgataacctatccagggatagcaacagggattgtaccaatgaacttagcaattcttgcaagacgagagacgatttcctcgggcaggttgacgtgccgctgtaccctctccccacagagaatccccggctcgagcgtccttatacattcaaggactttgtgcttcatcctagatctcacaaaagccgcgtgaagggttacctgcgcttgaaaatgacctatctgcccaaaacgagcgggagtgaggacgataacgcagagcaggcagaggaactcgaaccaggttgggtggtcctcgaccagcctgatgcggcctgccacctacaacagcaacaagagccctcacccttgcctcccggatgggaggagcggcaggatatcctcgggaggacttactacgtgaatcatgaatcaagaaggacccagtggaaacgacccactcctcaggataatctcactgacgcagaaaatggaaatatacaattacaggcacagcgggccttcaccacccgtcggcagattagcgaagaaaccgaatccgttgacaaccgcgaatctagtgaaaactgggaaataatcagggaagacgaggccacaatgtattccaatcaggcctttccatcacctcctcccagttcaaacctggacgtccctacccaccttgccgaggaactgaacgccagactcaccatatttggtaactcagccgtaagtcagcctgcgagttcttctaatcacagctccagaaggggtagcttgcaggcatataccttcgaagagcagcctactttacccgtgctccttcccacttcttcaggcttaccaccaggctgggaagaaaaacaggacgaaaggggtcgctcttattacgtggaccacaattctcggacaactacatggaccaagccaacagttcaagccaccgttgagacttcccagctcactagtagccagagttctgccggccctcagtcccaggcttccaccagtgattccggacagcaggttactcagccaagcgaaattgagcaggggttcttgcccaagggctgggaagtgaggcacgctcccaacgggcgccccttttttatcgaccacaatacaaagaccacaacctgggaagaccctcgtttaaaaattcccgcccacctgcgcggcaaaacttcattagacacctctaacgacctgggtccactgccaccaggatgggaggaaagaacacatacagacgggaggatcttctatattaaccacaatatcaaacgaactcagtgggaagaccctaggttggaaaatgttgcaatcacaggcccagccgttccctattcgcgagattacaaacgcaagtacgagttcttcagacggaagctcaaaaaacagaacgatattcctaacaaattcgagatgaagctgaggcgggctacagtgcttgaagactcctatcggaggatcatgggggtgaaaagagcagactttctcaaggcccgattgtggattgagttcgacggggagaaaggcctggattacggcggcgtcgcacgggaatggttctttctcatctctaaggagatgtttaacccgtattacggcctttttgagtactctgcgactgataattatacacttcagatcaatccaaatagcggcctctgcaacgaagatcacctttcttacttcaagtttataggaagggtggcgggaatggccgtgtaccacggcaaactgctagacggctttttcataagacccttctacaaaatgatgctccacaagcccattactcttcatgacatggaatcagtcgatagtgaatactataacagtctgcgttggatcctcgagaacgaccctactgaacttgacttacgctttatcattgatgaggagctatttggccagactcatcagcatgagctcaagaacggaggttccgagatcgtggtcactaacaaaaacaaaaaggaatatatttacctcgtgatccagtggcgctttgtgaataggatccaaaaacagatggccgcatttaaggaaggcttttttgagttaatcccccaggacctcattaagatcttcgacgagaacgaactggagttgctcatgtgtggtctgggtgatgtggacgtgaatgactggagggaacacacaaagtacaaaaacggatacagtgcaaaccaccaagtaattcagtggttttggaaggccgtcctcatgatggactctgaaaagagaatcaggctattgcaatttgtgacagggacgtcgcgggtgcctatgaacggtttcgccgagctgtatggaagtaacggaccccaatcattcactgttgagcaatgggggactccagaaaagttgcctagggctcacacatgcttcaacaggctcgatctcccgccttatgagtcctttgaagagctttgggacaagctgcagatggcaattgagaatactcaggggttcgatggagtggattag

SEQ ID NO: 126050 - DNA, 2616 bp, synthetic construct
  misc_feature 1..2616: note = Description of Artificial Sequence: Synthetic coding sequence
  source 1..2616: mol_type = other DNA
atggccactggcctgggcgagcccgtttatggcctctctgaagatgagggggagtcgaggatcctgagagtcaaagttgtttccggaatagatctggcaaagaaagatattttcggcgcctccgacccgtacgtgaaactatctctttatgttgccgacgagaacagggagctggctcttgtgcagaccaagaccattaagaaaactctaaatccaaaatggaatgaggaattctactttcgtgttaatccctctaaccatcgactgctcttcgaggtgttcgatgagaatcgcctgaccagagatgactttctcggccaggtcgacgttccactgtcacatctgcctacagaagatcctaccatggagcgaccttatacgtttaaggattttctgctgcggcctaggtctcacaaaagccgggttaagggatttctcagacttaaaatggcttatatgcctaagaacggcggccaggatgaggagaacagcgaccagagagacgacatggaacatggatgggaagttgtggattcaaatgatagcgcctctcagcaccaggaggagttgcccccaccccccctgcccccaggctgggaggagaaggttgacaacttgggaagaacctactacgtgaaccacaataatagaacaacgcagtggcacaggccaagtctcatggacgtgtccagtgagtctgacaacaacattagacagattaaccaggaggcggcgcatcgacggttcaggtccaggcggcacatcagcgaagaccttgagccagaaccaagtgaaggtggagacgtccctgagccctgggagaccatcagcgaagaggtcaatattgccggcgattcgctgggattggctcttccacctccaccagcgtctcccggtagtcgcacctctcctcaggaactgtcagaggagctatccaggagacttcagataactcccgatagcaacggtgagcaattttcctcccttatccagagggagccttcttcccgattgcgcagctgttctgtgactgatgcagttgccgaacaggggcatctccccccgggtgctaaggacagtccagtgcgacgggccgtgaaggatactctgtctaacccacagagccctcaaccctccccttacaattcccccaaacctcaacataaggtaactcagtcctttctgccaccagggtgggaaatgagaatcgctcccaacgggaggccctttttcatcgatcacaatacaaagacgactacgtgggaggatcctagactcaagttcccagtgcacatgcggagcaaaaccagtttaaatcccaatgatctcgggccattgccaccaggatgggaagagcgtatacacttggatggtcgcacgttctacattgaccacaatagcaagatcacccaatgggaggacccacggcttcagaatccagctattacaggccccgccgtgccatattcccgcgagtttaaacagaagtatgattattttagaaagaaactgaagaaacctgcagatatccctaatcgattcgagatgaagctccacagaaataacatctttgaggagagctacagacgtattatgtccgtcaagagacccgatgtgctgaaagcaaggttatggatcgagtttgaaagtgagaaaggccttgactacgggggcgtcgctcgggaatggttcttcctgctaagtaaagagatgtttaatccatattacgggcttttcgagtattctgctaccgacaactatactcttcaaataaatccaaatagcggcctatgcaacgaggatcacctgtcgtactttacatttatcggtcgggtggcaggcttagctgtgttccacggtaagcttttagatggctttttcattagacccttctacaaaatgatgctcgggaagcagatcaccctcaatgatatggagagtgttgactctgagtattataattccctaaaatggattctggaaaatgacccaaccgaactggatttgatgttctgcatagatgaagagaactttggacaaacctaccaggttgacttgaagcccaacgggagtgaaataatggtcaccaacgaaaacaaaagggagtacatcgacctcgtgatacaatggaggttcgtaaatcgtgtacaaaagcagatgaacgccttcctggaagggttcactgagctcttacccatcgatctcataaagattttcgatgagaacgaactcgaattactgatgtgcggactcggggatgtcgacgttaatgactggaggcagcactcgatctataaaaatggctactgccccaatcacccagtgattcagtggttctggaaggcagtactcctgatggacgcggagaagagaatccggttattgcagttcgtgaccggcacctcccgtgtccccatgaacggctttgccgagctgtacggtagcaatggccctcagctctttaccatcgagcaatggggttccccagaaaagctcccaagggcccatacttgtttcaaccgtcttgatctcccaccttacgagacgtttgaggatcttcgtgagaagctgctaatggcggtggagaacgcacaaggttttgagggcgtggattag

SEQ ID NO: 126051 - DNA, 2508 bp, synthetic construct
  misc_feature 1..2508: note = Description of Artificial Sequence: Synthetic coding sequence
  source 1..2508: mol_type = other DNA
atggagcggccctatacgtttaaggacttcttgctcagacctcgctctcataagtcccgagttaagggcttcctcagactaaagatggcttacatgccgaagaatggcggccaggacgaagaaaattccgatcagcgcgacgacatggagcacggctgggaggtggtggattcgaacgattccgcttctcagcaccaggaagaactgccacctcctccattgcccccaggatgggaggagaaagtggacaatcttggtcggacttattatgtcaatcataacaatcgtaccactcagtggcaccgcccttccctgatggacgtgagttcagagtcagacaataacataaggcagattaaccaggaagcagctcatagacgatttcggagccgcagacatatctcagaggacttggagcccgaacccagcgagggcggcgacgtacctgaaccttgggagacaatatcagaggaggtgaacatcgctggtgactctttgggactcgcactgccaccgccccccgcttcccccggcagtcgaacatctccccaggaactatccgaagaactgtcgcgtcgcctccaaattacccctgattccaacggtgagcagttctcgtcgctgatccaacgggagccaagctctagacttcgaagctgctccgtgaccgatgctgtcgctgagcaggggcacttgccacctcccagcgttgcctacgtgcatactactcctggcctgccctcaggctgggaagagcgcaaagacgctaaaggtcgcacttactatgtgaatcacaacaatcgtactacgacctggacacgacctattatgcagctggccgaagacggggcctcaggtagcgcaacaaattcgaacaatcacctgatagagccacagatccgacggcctagatcactcagctcccctacggttaccttgtccgctcccttggagggcgccaaagatagtccagtgagaagagcagtcaaagatacactgtcaaatccacagtcacctcagccctctccctacaacagtcccaagccacagcataaagttacacaatcatttctgccacctgggtgggaaatgagaattgccccaaacggcagaccttttttcattgaccacaacactaaaaccacaacatgggaggatccaagactcaagtttcctgtgcatatgcgaagtaaaacatccctcaacccaaacgatttgggacccctgcctcctgggtgggaagagcggattcacctagatggacgcacgttctacatcgaccacaactccaagatcacacagtgggaggacccccggcttcagaaccccgctatcacaggacctaaagcggtgccgtactctcgggaattcaagcaaaagtacgactatttccggaaaaagctcaaaaaaccagccgatattccaaataggttcgagatgaaactccacagaaataacatatttgaagaatcctacaggcgcattatgtcggtgaaacgtcctgacgttctgaaggctcgcctttggattgaattcgaatccgagaaagggcttgattatggtggagtggctagagaatggttttttctgctatccaaggagatgtttaacccgtactatggactcttcgagtacagtgccaccgataactatactctgcaaataaatcccaatagtggattgtgcaatgaggatcacctgtcttacttcacgttcatcgggcgggtagcaggcctcgctgtctttcatggcaaacttctcgacgggttctttattcgacctttctataaaatgatgctgggaaagcaaatcactctgaatgacatggaaagtgtggacagcgagtattacaattccctaaagtggatcctcgaaaacgatccaactgagctagatttgatgttctgcattgatgaagagaactttggccagacctaccaggtggacctaaagcccaatggatcggagatcatggtgaccaatgaaaataaacgggagtatatcgacctcgttatccagtggcgcttcgtcaacagagttcaaaagcagatgaacgccttcctagagggctttaccgagcttcttcccatcgatctgattaaaatctttgatgaaaatgaactggagttgctcatgtgcggcctgggcgacgtggatgtgaatgactggcggcagcactctatttataagaatgggtactgccctaaccaccctgttatacagtggttttggaaggctgtgctgttaatggatgccgaaaagaggattcgactgttgcaatttgttacagggacatcccgtgttcctatgaacgggtttgccgaactgtacggctccaacgggcctcagctgttcaccatcgagcagtgggggtctcccgagaagctacccagagcccacacttgtttcaatcgccttgacttgccgccttatgaaacgtttgaggatctgcgggagaagctactgatggccgtggagaacgcccaggggtttgaaggtgtcgactag

SEQ ID NO: 126052 - DNA, 2736 bp, synthetic construct
  misc_feature 1..2736: note = Description of Artificial Sequence: Synthetic coding sequence
  source 1..2736: mol_type = other DNA
atggccaccggtctgggagagcccgtctatggcctgtctgaagacgaaggcgaatctaggatattgagagtcaaagtggtgtctgggattgatttggctaagaaggatatattcggcgcctcggacccctacgtcaagctcagcctttatgtagctgacgagaatcgggagctggccctggtgcaaaccaaaaccataaagaagacactgaatcccaagtggaacgaggaattttactttagagttaatccctctaaccataggctcttgttcgaagtgtttgacgaaaaccgcttgacccgggatgactttctgggacaggtggacgttcctcttagtcatttgccgacggaagaccccaccatggaacgaccctacacctttaaggattttctccttcgccctcgcagtcacaagagtcgggttaagggttttctgcgactgaagatggcttacatgcctaagaatggcggacaggatgaagagaacagcgatcagcgagatgatatggagcatggatgggaagtggtggattccaacgacagcgcgtcgcaacatcaggaggagttgcctcctcccccacttccaccaggttgggaagagaaggtggacaacctggggagaacttactatgtgaatcataacaaccgaaccacccaatggcaccgcccgagtctcatggacgtttcatccgagagtgacaataatatcaggcagattaaccaggaggctgcccaccgaagatttaggtcccgtcgccatatttccgaagacctcgaacccgaaccatctgaggggggtgatgtccctgaaccatgggaaacaatctcagaagaggtgaatatcgccggcgattccctcggtctggcactacctccccccccagcgtcccccggcagcagaactagtcctcaggagctgagtgaggagctatcccgccggctccagataactcccgattctaacggggaacagttttcctccctcatccaacgcgagccttcctctcgcttgcgctcttgcagcgtcacagatgcagtggctgagcaggggcaccttcctccactggccgaggacggcgcttcaggatcagccacaaatagcaacaaccatcttatcgagccacagattagacggcctcggagcctttcttcgcccaccgttaccttatccgcacccttggagggcgcaaaggattctccagtgcgacgggcggtgaaggacactctctctaatcctcaatctccccagcctagtccttacaactcccctaaaccccagcataaagtgactcaatctttccttcccccaggctgggagatgcgaatcgccccaaatggccgccccttctttattgaccacaatactaagacaaccacatgggaagatcccagactcaagttccccgttcacatgaggtcaaagacttccctgaaccccaatgatctgggacccttgcctcccggttgggaggaaagaattcatctggatggccgaactttttacattgatcacaactctaagatcacacaatgggaggaccccagactacagaaccccgctataacaggccccgccgttccttatagtagagagttcaagcagaaatacgattactttcggaaaaaactgaagaagccggcagatatccctaatcgcttcgaaatgaagcttcatcgcaataacatcttcgaagaatcatataggagaattatgagtgtcaaacgtcccgacgtccttaaggctaggctttggatcgagttcgagagcgagaaagggttggattacggcggagtcgccagagagtggttttttcttctgagcaaggagatgttcaacccctattacggcctgttcgaatatagcgcaactgataactataccctgcagatcaatccgaactctggactgtgcaatgaggatcacctttcgtactttacctttattggacgtgttgcggggctggctgttttccacggcaaactactggatggctttttcattcgtcccttttataagatgatgcttgggaaacagattacattgaacgatatggagtcagtggactccgagtactacaattccctaaagtggatccttgaaaatgacccaacagagctcgaccttatgttctgtatagatgaagagaactttggccaaacctaccaagtggacctaaaacctaacgggagcgaaatcatggtcaccaacgaaaataagagagagtacattgatcttgtcatccagtggaggtttgtaaacagagtgcagaagcaaatgaacgctttcctggagggattcacagaactgctccctatcgacctgattaagattttcgatgagaacgagttagaactgttaatgtgtgggctgggcgatgtcgacgttaatgattggcgccagcactccatttacaaaaatggctactgtcctaatcacccagtgattcaatggttctggaaggcagtgctgcttatggatgccgaaaaacgtatcaggttgctgcagtttgttaccggaacttctcgtgtcccgatgaatggtttcgcagaattgtatggcagcaatggaccccagctgttcactatcgagcaatggggcagccctgaaaaactcccgcgcgctcatacctgcttcaacagactcgatctaccgccctatgaaaccttcgaagatctacgcgaaaagctccttatggcagtagaaaacgcccagggattcgagggggtggattag

SEQ ID NO: 126053 - DNA, 2904 bp, synthetic construct
  misc_feature 1..2904: note = Description of Artificial Sequence: Synthetic coding sequence
  source 1..2904: mol_type = other DNA
atgaggcgactggcattcgaacagggggaaagccgcatactgcgcgtcaaggtggtgtccggcattgatctggccaagaaagacatcttcggagccagtgatccctacgtgaagctgtcactatatgtggccgatgagaatcgcgagcttgctttagtgcagaccaaaacaattaagaaaaccctgaatcctaagtggaacgaggagttttactttcgcgtgaatccttcaaaccatcggctcctattcgaggtttttgacgagaacaggctgacacgcgacgacttccttgggcaggtcgacgtcccactttctcatcttccaacagaggacccaacgatggagagaccctacacattcaaggactttctcctgagaccacggagtcataagtctagggtcaagggcttcctgaggctgaaaatggcttatatgccaaagaatggaggccaggacgaggagaactctgatcaacgcgacgacatggagcacggctgggaggtagtcgacagtaatgattccgcctcccagcaccaggaggagctgcccccgccacccttaccccccgggtgggaagaaaaagtcgataacttaggcaggacgtattacgtcaatcacaataatcggaccacccaatggcaccgaccatccttgatggacgtgtctagcgagtctgataacaatataagacagattaaccaggaagccgcccatcgccggttcaggtccaggagacacatttccgaggatcttgagccagagccgtcagaaggcggagatgttccagagccctgggaaaccatttcggaggaggtgaacatcgccggagacagtctcggacttgccctgcctcctccacctgcctcccctggctctagaacctccccccaggagctgtcagaggaattatcccggcgcctccagattactcccgacagcaatggtgagcagtttagctccttgatccaaagggaacccagctcacggctgagatcctgcagcgtgactgacgccgtggccgaacaagggcaccttccaccaccctccgcccccgccgggcgggcccgctccagcactgtgaccggcggcgaggagccaacgccaagcgtcgcctatgtacacacaaccccaggactccccagcggctgggaggaacgaaaggatgctaaaggtcgaacctattatgttaatcacaataatagaacaacgacgtggacaaggcccattatgcagctggccgaagatggtgcctccggttcagcaactaacagtaataatcacctcatcgaacctcaaatacgcaggccgagaagccttagctctcccaccgtgactctgagtgccccccttgaaggcgcgaaggactccccggtcagaagggccgtgaaagataccttatcaaatcctcagtcacctcagccctcaccctacaatagtcctaagccccaacacaaggtgacacagtcatttttgccgcccggatgggagatgagaatagctccaaatgggcgtccctttttcatagatcacaacaccaagaccaccacctgggaggacccgcgattaaagttccccgttcatatgcggagcaaaactagcttaaatcccaacgatttggggccgctgcccccaggatgggaggagagaatccacttggacggaaggaccttctatatcgaccataactctaagatcacccagtgggaggatccaagactgcagaaccctgcgattaccggacccgccgttccttattccagagagtttaagcagaagtatgattacttccggaagaagttgaagaagccagcagacattcccaatcgtttcgaaatgaagctgcacaggaataatatcttcgaggagagctaccggcgcatcatgtctgtgaagaggcccgacgtgctgaaagcccgactatggatagagtttgagtctgagaagggactggactacggaggtgttgcccgggagtggttttttctgttaagtaaggagatgtttaacccttactacggattgtttgagtacagcgccactgataactatacgctgcagatcaatccaaattcagggttgtgtaatgaagaccaccttagctatttcaccttcatcggacgagttgccggcttagccgtgttccacggcaaactcctggatggattcttcatacgcccgttctataaaatgatgctcggtaaacagatcacgttaaacgacatggagagcgtcgactcagaatactataattctttgaaatggatcctggagaacgaccctacagagctggacctgatgttctgcatagacgaagaaaacttcggccagacctaccaggtcgacttgaagccaaatggaagcgagattatggtcaccaatgagaataagcgagagtatatcgatttggtcattcaatggcgcttcgtgaatagagtgcagaagcagatgaatgcatttttagaaggcttcacggaacttcttcctatagacttgattaaaatcttcgacgaaaatgaactggagcttctgatgtgcggcctgggagacgtggacgtgaatgactggaggcagcacagtatttataagaatgggtactgcccaaatcatcctgtgatacagtggttctggaaagcagtgttgctaatggacgctgagaaaaggattcgactccttcagtttgtgaccggcacctcgagagtccccatgaatgggttcgctgagctatatggtagtaatgggccccaactgttcactatcgagcagtgggggagtccggaaaagctgccgagggctcacacttgcttcaatagactcgacctgcctccctatgagacgtttgaggacttgagggaaaaactgttaatggccgtagaaaacgcccaggggtttgaaggcgttgattag

SEQ ID NO: 126054 - DNA, 2868 bp, synthetic construct
  misc_feature 1..2868: note = Description of Artificial Sequence: Synthetic coding sequence
  source 1..2868: mol_type = other DNA
atggccacagggctgggagagccggtgtacggactctccgaagacgaaggcgagagcaggatcctcagagtgaaagtggtcagcggcatcgaccttgctaagaaggacatcttcggggcaagcgatccctacgtcaagttgagcctgtacgtggcagatgaaaaccgggagcttgctctggtgcaaaccaagaccatcaagaaaactctcaacccaaaatggaatgaggaattttactttagagttaatccctccaaccatcgtctgctgtttgaggtgttcgacgagaatcggcttactcgggacgattttctgggccaggtggatgtgccgctgtcgcacctccccacagaagatcctactatggaacggccgtatactttcaaagatttccttcttaggcccagaagtcacaaaagtagggtgaagggcttcttgcggttgaagatggcctacatgcctaaaaacggtggacaggatgaggagaatagcgaccagcgggacgacatggaacacggatgggaagtggtggattctaatgactcagcaagccagcaccaagaggagctgccccccccaccactgcccccaggttgggaggagaaggtggacaatctgggtaggacatactatgtaaatcacaataacaggaccacccaatggcatcggccgagtctgatggatgtgtcttcagaatccgacaataacatccggcagattaaccaggaggctgcgcacagaaggtttaggtctcggaggcacatcagcgaggatctggagcctgagcccagcgagggcggtgatgtacctgaaccgtgggaaaccattagtgaggaggtgaacatcgccggcgatagccttggtcttgcactcccgccccctcctgcgtcaccagggtcacgtacaagccctcaggaactttctgaagaactgtcaaggaggttgcagattacccccgacagtaacggagagcagttttcatccttgatccagagagagccttcaagccggctccgctcttgtagtgtgactgacgcagtcgctgagcagggccacttgccgcctcccagtgtagcatatgtgcatacaacacccgggctaccttcaggatgggaagagaggaaggatgccaagggaaggacctattacgtcaatcacaacaacagaacgactacctggacccggccaattatgcaactggctgaggatggcgcatctggctcagcgactaattcaaacaaccatctcatcgaaccacagataaggcggccgcgctcactcagttctcccacggtaaccctgagcgcgccattggagggggctaaagattctcctgtgcggcgggcggtgaaagacactctcagcaatcctcaaagtccacagccatctccttacaactctccaaagccccagcacaaagtgacacagtcctttctgcccccggggtgggaaatgcgaatcgcccccaacggtcgtccgtttttcatcgatcacaacactaaaaccaccacctgggaggacccacggctgaaattccctgttcatatgaggtcaaagacctcactcaatccaaacgacctgggaccgctaccccctggctgggaggaaagaatacatctggacgggcgaaccttttacattgaccacaacagcaaaatcacacagtgggaagacccccggttgcagaacccggccatcaccggaccagccgtgccatactctagggagttcaagcaaaaatatgactattttcgtaagaaattgaagaaaccggccgacatacctaacaggtttgaaatgaaactgcatcgtaacaacattttcgaagagagttacagaagaataatgtctgtgaaacggcccgacgttctgaaagcgcggctgtggattgaattcgaatccgaaaagggactggactacgggggagtggctcgcgaatggtttttccttctatctaaagagatgttcaatccatactacggcctgttcgagtattctgccaccgataactacacactgcagattaatcccaattccggcctgtgtaatgaagatcacctgagttattttactttcattggcagggttgcgggattggccgtgttccatgggaagttgcttgacggctttttcattcgcccattctacaaaatgatgctcggtaaacagattacccttaacgacatggagtccgtcgattcagaatattacaactctctcaagtggatcctcgaaaatgatccaaccgagctggacctcatgttttgtatcgacgaagaaaatttcggccagacctatcaggtagaccttaaaccaaatggaagtgagattatggttaccaatgagaacaaacgcgaatatatcgatctggtcatccaatggagatttgtgaatcgggtacagaagcagatgaacgccttcctggagggcttcacagagcttttgccgatagatttgattaagatatttgatgaaaatgaactcgaattgctcatgtgtggcctgggtgacgtggatgtcaatgactggcgccagcactccatttacaagaatggatactgtcccaaccatcctgtaattcaatggttttggaaggctgtactgcttatggatgctgaaaagagaataagactgctgcagttcgtgacggggacatctcgcgtccccatgaacggctttgccgagctctatggcagcaacgggccacagctgttcaccatcgaacaatggggctctccagaaaagcttcctcgtgctcacacgtgttttaataggctggatctcccaccttatgagacattcgaggatctccgggaaaagctgttgatggcagttgagaatgctcagggcttcgagggtgtggattag

SEQ ID NO: 126055 - DNA, 2928 bp, synthetic construct
  misc_feature 1..2928: note = Description of Artificial Sequence: Synthetic coding sequence
  source 1..2928: mol_type = other DNA
atggccacaggattaggcgagcctgtgtatggactgtcagaggatgagggagaatcacggatccttagggtcaaggtggtttctggtatcgacttggcaaagaaggacatctttggcgcaagcgatccatatgttaaactgtccctgtatgtcgcagacgaaaatcgagaattagcgttggttcagacaaagaccatcaaaaaaactctcaaccctaagtggaacgaagagttctatttcagagttaatcccagcaaccatagactgctgtttgaggtgtttgatgagaatcgcctgacacgtgacgatttcctcggacaggttgatgtccctctgtcccacctcccaaccgaagatcccacaatggagcgaccatacacctttaaggatttcctgctccgtccgcgctcgcataagagccgagtgaaaggcttcctaaggcttaagatggcgtacatgccaaaaaatggcggacaggatgaggaaaattccgatcagagggacgatatggagcacggttgggaagtggttgactccaatgacagtgcctctcagcaccaggaggaacttccccccccgccgctcccgccaggctgggaagaaaaagtcgataatttaggacgcacttattatgttaaccacaacaaccgaacaactcaatggcacaggccatctcttatggacgttagttccgagagtgacaacaatattcggcagatcaatcaggaggctgcccatcgtaggtttagatctcggagacatatcagcgaggacttagagcctgagccaagtgaggggggcgacgtgcccgagccctgggagaccatcagcgaagaagtgaacattgcgggcgactctttgggcctggctctgccaccaccgcctgcatctccggggagtcgcacaagtccccaggaactgtcagaggaattgtctcgaagacttcagattacaccagattctaatggagagcaatttagcagtctgattcaacgtgagcccagcagcaggctaaggagttgttccgtcacagacgctgtcgccgagcagggccaccttcctccaccaagcgcgcctgctggcagagccagatcatctacagttactgggggggaggaaccaactcccagtgtggcctacgtacataccacacctggtctgccatccggatgggaggagcgaaaggacgccaaaggaaggacatattatgtaaaccacaacaaccgcacgaccacgtggacccgaccaattatgcagctcgcagaggacggcgcctcaggatctgctaccaatagcaataaccatttgatagagccccagatccgacgtcccagaagcttgtcttcccccaccgtgacactgtctgcccctttggaaggcgccaaagactcaccagtacggcgggctgtgaaggatacactatctaaccctcaatccccccagccctctccttacaactctcccaagcctcaacacaaggtgacccagtctttcctgccaccagggtgggagatgagaatagcaccaaacggaagaccattctttatcgaccacaacaccaagacaaccacctgggaggatccaagactcaagttccctgtgcatatgcgctctaaaacgtcacttaaccccaatgatctcggccctctccccccagggtgggaagaacgcattcatttggatgggagaaccttttacattgatcataacagcaaaataacgcagtgggaggacccacgcctacagaatccagccattactggacccgcagtgccttacagccgagagtttaaacagaaatacgactacttccggaagaagctaaaaaaacccgctgatattcccaatcggttcgagatgaagctacaccgaaataatatctttgaagagtcctatcggaggatcatgagcgtgaagaggcccgacgtgctgaaggccagactttggatcgagttcgaatccgaaaaagggcttgactacggaggggtggcacgcgagtggttctttctactatccaaggagatgttcaatccgtattacgggttgttcgaatactcagccactgataactacaccttgcagattaaccccaactctggtttgtgtaatgaagatcatctttcctatttcacattcatcggtagagtagcagggctggctgtctttcatggaaagcttctggatggtttcttcataaggccattctacaagatgatgttgggcaagcaaatcacgctgaatgatatggagagcgtggactccgagtactataacagtctgaaatggatcctggagaatgatcccacagagctggacctcatgttttgcatcgacgaggaaaatttcgggcagacctatcaggtcgatttgaaacctaacggcagtgagattatggtcaccaacgaaaataagcgggaatacatcgatctggttattcaatggcggtttgtgaacagagtgcagaagcagatgaacgcctttctggagggatttacagaattgctgcctattgatctcataaagatcttcgacgagaacgagcttgagcttctcatgtgtggactgggggatgtcgatgttaatgactggaggcagcattccatttataagaacggatattgtccaaaccaccccgtgattcagtggttttggaaggctgttctgttgatggatgctgaaaagaggatcagactgctgcagtttgtcacaggcacaagcagggtgcccatgaacgggttcgccgagctttatgggtccaatgggccacaactctttactatcgagcagtgggggtctcctgaaaaactgcctcgggcccatacgtgttttaaccggcttgacctccccccctatgaaacattcgaggacttacgggagaaattgctaatggcggtggagaatgcccagggattcgaaggcgtagattag

SEQ ID NO: 126056 - DNA, 2565 bp, synthetic construct
  misc_feature 1..2565: note = Description of Artificial Sequence: Synthetic coding sequence
  source 1..2565: mol_type = other DNA
atggagcgaccctacaccttcaaggactttctgctgcggcctcgatcacataagtcacgcgtgaaaggctttctccgcctcaaaatggcttatatgcccaagaatgggggccaagacgaggagaatagcgaccaacgagacgacatggaacacggctgggaggtcgtggattctaacgattcagctagccagcaccaggaggaacttccacctcctcctctgcctcctggatgggaagagaaagtagacaacctgggacgaacctattacgtaaaccacaacaacaggaccacacagtggcacagaccgagcttgatggatgtgtcatccgaaagtgacaacaatatccgccagatcaaccaggaggcagctcacaggcgcttccggtccaggcgtcatatttctgaggaccttgagcctgaaccttctgaggggggcgacgtccctgaaccttgggagaccataagtgaggaagttaatatagctggagattctctcggactggcactgcctccgccaccagcatctcccgggtcgcggacgtctccacaggagctgagcgaggagctgtcgcggcggcttcagattacacctgattctaacggcgaacaattttcaagcctgattcaaagagagccatcctcacggctgcggtcatgcagcgttactgacgccgtcgccgaacaggggcacctgcctccccctagtgcccctgctggccgggcgcggtcctctactgtaaccggcggcgaagagccaactccgtcagtggcctacgtccacacaaccccgggacttccctcaggctgggaagaaagaaaggatgcgaagggccgaacatactacgttaaccataataatcgaaccacaacatggaccagacccatcatgcaactggctgaggatggggcatccggttccgccacgaactccaacaaccatctgatcgagccacagatcagacggccccggagtctaagctccccaaccgtgactttgagcgctccactggagggggctaaagacagcccagtccgcagagcagtaaaagacacattgtcaaatccccagtctcctcagccatccccatacaatagccctaagcctcagcataaagtgacccagagcttcctgcctcccgggtgggagatgcgcatcgcgcccaacgggcgcccattttttatagaccataatactaagactaccacttgggaagacccccgtctcaagtttccagttcacatgcgatccaagacctctctgaaccctaatgatcttggcccactgccccctgggtgggaagagcggatccacctggacggcagaaccttctacattgaccataactccaaaattacccagtgggaagaccctaggctccagaatccagccatcaccggtccagctgttccatattcccgcgagtttaaacagaaatacgactacttcagaaagaagttgaaaaaaccagcggacattccaaatagatttgaaatgaaactccacagaaacaatatctttgaagagtcatacagacggataatgagcgtcaagcgccctgatgtgctgaaggctaggctgtggatagaatttgagagtgagaaaggactggattacggcggtgtggcccgagagtggttttttctactctccaaggagatgtttaatccttactacggcctgtttgagtactcagccaccgacaactataccctgcagatcaaccctaattcaggactgtgtaatgaagaccacctgagctatttcacctttataggaagagtcgccggcctggcggtcttccacggcaaattattagatggattctttatccggcccttctataaaatgatgcttgggaaacagataactttgaacgacatggaatccgtggattcagaatactacaattccctgaagtggattcttgagaatgaccctacagaactggatcttatgttttgtatcgacgaagaaaatttcggccagacctatcaggtggacttaaaacctaatggtagcgagattatggtgacaaatgagaataaacgtgagtatatagacttagtcatccagtggcggttcgtaaaccgggtccagaagcagatgaatgccttcttggagggcttcactgagctgctgcctattgatctgatcaaaatcttcgacgagaacgaactcgagctcctgatgtgcggcttaggcgacgtggacgtcaatgactggcgccagcattctatatataaaaacggatattgccctaatcaccctgtgattcaatggttctggaaggctgtactgctgatggacgcagaaaaacggatccgactgctgcagtttgtaacaggaacctcccgcgtgcctatgaacggctttgctgagttgtacggatccaatgggcctcagttatttaccatcgagcaatggggctcacctgagaagttgccgcgggcacatacgtgttttaataggttagaccttccgccgtatgagacattcgaggaccttcgggagaagctgctcatggctgtagaaaatgcccaaggatttgagggtgtggactag

SEQ ID NO: 126057 - DNA, 2505 bp, synthetic construct
  misc_feature 1..2505: note = Description of Artificial Sequence: Synthetic coding sequence
  source 1..2505: mol_type = other DNA
atggaaaggccttacaccttcaaggattttttactacggccgaggtcacacaagtctagagtcaagggcttcttgaggctgaagatggcttatatgcccaaaaatggcggacaggacgaggagaattctgatcagcgcgatgatatggagcatggttgggaggtcgtggacagcaacgactcagcatcgcagcaccaagaggaactgcccccaccccccctgcctcccgggtgggaagagaaagtggacaatttaggccggacttactatgttaaccataataatcgaactacccagtggcaccgaccaagtctgatggatgtgagctccgagagtgacaataatatccgacagattaaccaagaagccgcccaccgccgtttcaggtcacgacgccacatttcagaagacctcgaacctgaaccctccgaaggcggggatgtccccgagccttgggagactattagcgaagaagtgaatattgctggcgatagtctaggactggcattgccacctcctcccgcatcaccaggctccaggacatctccgcaagaactctcagaagagctgtctaggagactgcaaattactccagattccaatggcgagcagttctcttccttgatccaaagagagcccagtagccgcctgaggtcttgttcggttaccgatgctgtagctgaacaagggcatctcccacccccgtccgtggcttatgttcatacgacaccggggcttccgagtggttgggaggagagaaaagacgcgaagggtagaacatattacgttaaccataataatcgcacaactacctggacccggccgatcatgcagctcgcggaggatggggcctccggaagtgccaccaacagtaacaaccatcttatcgagccccagatacgaagaccccggtctctgtccagcccgacagtgacgctatccgcccccctcgagggcgccaaggattcccctgtgcgtagggctgtgaaggacactctaagcaatcctcagtcgccccaacctagcccttacaattctcctaaaccacagcataaggtgacccaatcttttcttcccccggggtgggaaatgcgaatagctcctaacggacgacctttcttcatcgatcataatacaaagactaccacctgggaggacccacggctaaaattcccagtacatatgagatccaagaccagtcttaaccccaatgacctgggccctctgcctccaggttgggaggaaaggatccatttggacggacggacattctacatagaccacaactctaagatcacacagtgggaggaccccaggctgcagaatccagccattactgggcccgccgtcccctattcacgtgaattcaagcagaagtatgactatttccgtaagaagctgaagaaacccgctgatatccccaatcgattcgaaatgaagctgcaccggaacaacatcttcgaagaaagctaccgccggatcatgtcagttaaaagacctgatgtactgaaggccagactgtggattgaattcgagagcgagaagggactcgattacgggggggtcgctcgcgagtggtttttccttctgtctaaggaaatgtttaacccttattatggtctgttcgaatacagtgcaacagacaattacactctgcaaattaatccaaacagtggcctttgcaatgaggatcatctgtcgtattttactttcataggacgcgtcgcaggacttgcggtgttccacggaaaactgctcgatggcttcttcatcaggcctttctataaaatgatgctggggaaacagattaccctcaacgacatggagtcggtcgattccgaatattacaattctctgaagtggattcttgaaaatgatcccaccgagctcgacctcatgttttgtatcgatgaagagaatttcggtcaaacttaccaagttgatctgaagccaaacgggtccgagatcatggtgacaaacgagaataagagggagtacatcgatctagtgatccaatggagattcgtaaatcgggtgcagaagcagatgaacgccttcctggaaggatttaccgagttgctccctatcgatcttatcaagattttcgatgaaaatgagcttgaacttctaatgtgcgggctgggagatgtcgacgtcaatgattggcgacagcacagcatctacaagaacggctactgccctaaccatccagtaatccaatggttctggaaggctgttctcttgatggatgccgagaagcgcatacggctgcttcagtttgttacaggcaccagcagagtgccaatgaacgggttcgccgaattgtacgggtccaacggtcctcagttgttcacaattgagcagtgggggagccccgagaagctcccaagggcccatacctgctttaaccggctcgaccttccgccctacgagaccttcgaggatctgcgagaaaagttgctcatggcggttgagaacgctcagggctttgaaggtgtggactag

SEQ ID NO: 126058 - DNA, 2505 bp, synthetic construct
  misc_feature 1..2505: note = Description of Artificial Sequence: Synthetic coding sequence
  source 1..2505: mol_type = other DNA
atggagaggccttataccttcaaggacttcctgctgcggcctcgtagccacaagtccagagtcaaaggattcctgaggctcaagatggcatatatgccaaaaaatgggggccaagatgaggaaaatagtgaccaaagggacgacatggagcacggctgggaggtggtagattcaaatgatagcgcctctcaacaccaggaggagctgccacccccacccctgccccccggctgggaagagaaagtcgataatctgggccgtacatattatgttaaccacaataataggacaacgcagtggcacaggccctcacttatggatgtttcttcggagtccgataataacattcgacagatcaaccaggaggctgcacaccgaagattcaggagccgaagacacatcagtgaagatctggaacccgagcctagcgagggcggcgacgtgccagagccatgggaaaccatctccgaggaggtcaacatcgcgggggactcccttgggctggcccttccaccccctccggccagcccggggagtcgaacttcaccccaggagcttagcgaggaattaagcagacggctccagataactcccgacagtaatggcgagcagttcagcagcctgatccagagggaaccctcaagccggctgcggagctgttccgtgactgatgccgtggctgaacaaggtcatctgcctcccccatcagttgcctatgttcacaccactcccggattgccgtcgggttgggaggagcggaaggacgctaagggcagaacttattacgtgaaccataataataggactacaacctggaccaggcccatcatgcaattggccgaggatggggcttccggcagcgctacaaattccaataatcacctgatcgaacctcagatccgcaggcctcgcagtctttctagccccacagtgacactgagcgctcctctggaaggcgccaaggacagtcccgtgcggcgagctgtaaaagacactctaagcaatccacagagccctcagccatcgccctacaactcccctaagccccagcacaaagttacacagagttttctgcccccaggctgggaaatgcgcatagcacctaatggccggccctttttcattgatcacaacactaagactacaacatgggaagatccacgcctcaagtttcccgtgcatatgcggagtaagacctcccttaaccctaatgacttgggtccactcccccctggctgggaagagcgtattcatcttgatggaaggacattctacatagaccacaacagcaaaattacccaatgggaggatccacggctccagaatcccgctatcacgggacccgccgttccttactccagggaattcaaacagaagtatgattatttcaggaaaaaattaaaaaaaccagcagatatccccaataggtttgaaatgaagctgcaccgaaataatatttttgaagagtcatatcgacgaattatgtctgtcaagcggccagacgtgctgaaggcccggctatggattgagttcgagtcagaaaagggcttggactacggtggtgtagctagggaatggttctttctgctcagcaaggagatgtttaacccttattacggcttgttcgaatactctgccactgacaattatactctgcaaataaaccctaactctggtctgtgcaacgaggatcatctctcctacttcacatttatcggaagagttgctggcctggccgtgtttcacggcaagctcctggacgggttctttataagaccgttttataaaatgatgttggggaagcagatcactctcaacgatatggaatcagtcgatagcgagtattacaatagtctgaaatggattttggaaaatgatccaaccgaactcgatctgatgttctgcattgacgaggagaactttggccagacctaccaggtggacctgaaacccaacgggagcgagataatggtgacgaatgagaataagcgagaatacatcgaccttgtcattcagtggcgttttgtgaacagagtgcagaaacaaatgaatgcgtttctggaagggtttaccgagctgctgccaatcgacctgatcaagatttttgacgagaacgaattggagctcttgatgtgtgggctgggtgatgttgatgtaaacgattggcggcaacactctatatataagaacggatattgcccaaaccatcctgtgatacagtggttttggaaagcggtgctgttgatggatgcagagaagaggataaggttacttcagtttgtgactggcacatctcgcgttcccatgaatggatttgctgaactgtacggtagcaacggaccccaattgtttacaatcgagcagtggggttccccagagaaactgccccgagcacacacctgcttcaacagattggacctaccaccttacgagacatttgaggaccttagagagaagctcctaatggccgtcgagaacgcccaggggtttgagggcgtggattag

SEQ ID NO: 126059 - DNA, 2565 bp, synthetic construct
  misc_feature 1..2565: note = Description of Artificial Sequence: Synthetic coding sequence
  source 1..2565: mol_type = other DNA
atggaaaggccttatacttttaaagactttctgctgaggccccgaagccacaaaagcagagtgaaaggtttcctgcgacttaagatggcctatatgcccaaaaacggtgggcaggacgaggaaaactctgaccaaagagatgatatggaacatggctgggaagttgtagattccaacgattccgcttctcaacaccaagaagaacttccgcctcctccgctgccaccagggtgggaagagaaggtagataacctcggtcggacctactacgttaaccacaataaccgaaccacacagtggcaccggcccagcctgatggatgtgtcatccgaaagtgataataatatcagacaaattaaccaagaggccgcccaccggagatttaggagtcgcagacacatcagcgaagaccttgagcccgaaccttcagagggaggtgacgtgcccgagccttgggagaccatctccgaggaggtgaatatagctggagacagtctcgggctcgcactaccccctccgccagcatcacctggcagtagaacctctccccaggagctgagtgaagagttgagccggcggttgcagattacgcccgattcaaacggtgaacaattctctagcctgatccagcgggagcctagtagtcggttgagatcttgcagcgtcactgatgcagtggcagagcaagggcacctgccaccaccatctgcgccggccggaagggcgagaagttccaccgtgacaggaggcgaagaaccaacccccagcgtcgcatatgtgcataccaccccaggcctccctagcggctgggaggagaggaaggacgccaaggggcgcacctactacgtgaatcataataaccggactacaacatggacccgacccataatgcaactggccgaagatggagcgagtggaagcgcaactaactcaaacaaccaccttatcgagccccaaatacgacgacctcgttcactttcatctcctaccgtgacgttatccgcccctttggagggggccaaggacagcccagtgcgcagggctgtgaaggacactttatccaacccacagtcccctcagccctccccctataatagcccaaagccacagcacaaagtgacacagtcatttttgcccccagggtgggaaatgcgcattgccccaaacggccggccctttttcatcgatcacaacaccaaaactactacctgggaagatccgcgcctgaaatttccggtgcatatgaggtcaaaaacttcactgaacccaaatgatcttggaccactccccccggggtgggaggaaaggatccacctggacggtcgtacattttacatagatcataattctaaaattacgcagtgggaggatcccaggctgcagaatcccgctatcacaggacccgctgtaccatattcaagggagttcaagcagaaatacgactacttccggaagaaacttaaaaaacctgccgatatccccaacaggttcgagatgaagctacatcggaacaacatattcgaggaatcttatcgcaggattatgtccgttaagcgaccagacgtgctgaaagcacggctgtggatcgaattcgagtccgagaagggcctggattatgggggggttgcccgcgaatggttttttttgctatcaaaggaaatgttcaatccctattatggcctcttcgagtacagcgctacagacaactacacactgcagatcaatcccaattccgggctctgtaatgaggatcacttgtcttacttcacttttattggtagggtggccggccttgccgtcttccatggcaaacttctcgacggcttcttcatccggccattttacaagatgatgcttggcaagcaaatcaccctgaacgacatggagtctgttgactccgaatactataacagcctgaagtggatactggaaaatgatccaaccgaattggacctgatgttctgcatcgacgaagagaacttcggccaaacatatcaggtggatttgaaacctaatggctcagagattatggttactaacgagaacaagcgtgagtatatagacctcgtgatccagtggcgttttgtaaatcgcgtacaaaagcagatgaatgcctttttagagggcttcaccgaactcctgcccatcgatctaatcaagattttcgacgaaaacgaattggaattgctgatgtgtggcctgggtgatgtagacgtcaatgactggaggcagcactccatttacaagaacggctactgtcccaatcatcccgttattcagtggttctggaaagctgtgttgttgatggacgccgagaagcgaatcaggcttctccagtttgtcacgggcacctccagagtgcctatgaacgggttcgccgagctgtatggttcaaatgggcctcagctgtttaccattgaacaatgggggtcgcccgagaagctgccgagggctcacacctgctttaatcgacttgaccttccaccatatgaaacatttgaagacctgcgagagaagttgttgatggccgtcgagaatgcacaaggattcgaaggagtggattag

SEQ ID NO: 126060 - DNA, 525 bp, synthetic construct
  misc_feature 1..525: note = Description of Artificial Sequence: Synthetic coding sequence
  source 1..525: mol_type = other DNA
atgaagtataagaacctgatggcacgggccctctatgataatgtaccggagtgtgctgaagagctcgcattccgcaagggtgatatattaacagtaatcgaacagaacaccggtgggctggaggggtggtggctctgcagcctccatggtagacaaggaattgtgccaggcaacagggtgaaacttctgatcggtcccatgcaggagaccgccagctctcacgaacagccagcctcaggcttgatgcagcagacgttcggtcaacagaaactttatcaggtccctaatccacaggcggcacctcgtgatactatctaccaggtgccacctagttaccagaaccagggaatctaccaggtcccgactgggcacggcacccaagagcaggaagtgtatcaagtcccacccagcgttcaacggagcatcgggggcacgtccggtccacatgtgggaaagaaggtgtttcagagagatgggcaggtgtcctattttctggtgcgggcctcaaagcaaactagcctgtag

SEQ ID NO: 126061 - DNA, 2505 bp, synthetic construct
  misc_feature 1..2505: note = Description of Artificial Sequence: Synthetic coding sequence
  source 1..2505: mol_type = other DNA
atgaagtacaagaacctgatggctagggccttgtatgacaatgtgcccgagtgtgctgaggaactggccttccgcaagggagatatcttgaccgtaattgaacaaaacaccgggggcctggaaggatggtggctgtgttctctccatggccgtcagggcattgtgccggggaaccgagtgaaactgctgatcggtccaatgcaggaaaccgcatcttcacacgaacaaccagctagcggtctgatgcagcaaactttcggacagcagaagctgtaccaagtgccaaaccctcaggcggcccccagagataccatctatcaggtgcctccgagctatcagaatcaaggcatttatcaggtgccaactgggcacggaactcaggagcaggaggtttaccaggtgcctccttcggtacagaggtccatcggcggtacaagtgggcctcacgttggcaaaaaagtcatcacaccggtgaggaccgggcacgggtacgtttatgaatatccaagtagatatcagaaggacgtgtacgacatacctcctagccataccactcagggagtgtacgacattccaccatcgtcagccaagggtcctgttttttctgtgcccgtgggcgagatcaaacctcagggagtttacgacatacctcccacaaagggcgtctacgctattcctcccagtgcctgtagggacgaggccggcctccgtgaaaaggactacgattttccacccccaatgcgccaggccgggcggccagatcttagacccgagggcgtttacgacattcccccaacatgtaccaaacccgccggaaaggacctgcacgtgaagtataactgcgatatccctggcgcggctgagccagtcgccaggcggcatcagagtctctctccgaaccatccgccacctcagttagggcagtctgtaggcagtcagaatgatgcctacgacgtcccaaggggtgtgcagttcctcgagccacccgcagagacgagtgagaaagccaatccacaagaaagagatggcgtatacgacgtacctcttcataaccccccagatgctaaggggtccagagatctagtggatggcattaatagattgagcttttcgagcaccggcagcactcgcagtaacatgtccactagctctacttccagcaaagaaagctcactctcagcatctcccgcccaggataaaaggttgttcctggatcccgataccgctatagagcgcctacaacgcctgcagcaagcgctagagatgggcgtcagctcacttatggcgctggtgaccacagattggaggtgttatggatatatggagagacacatcaacgagattagaacagcggtggacaaggtagagttgttcttaaaagagtacctccactttgtgaaaggtgcagtagctaacgctgcttgtttgccagaactgattttacacaataagatgaagcgggaactgcagcgcgtagaggatagccatcagatcctgagccagacatcccatgacctgaatgagtgttcatggagtttaaacattcttgctattaacaagcctcaaaataagtgcgatgacctcgatcgctttgtgatggtcgctaagactgtgccggacgatgcgaaacaactgacaactactattaatacgaatgcagaggccttgttcagacctgggcccgggtcattgcacctgaaaaatggacctgagtcaattatgaacagtactgaatacccccacggagggtcccaaggccagctgctgcaccctggagatcataaagcgcaggcccacaataaggcattaccccccggcctaagcaaagagcaggctcctgactgtagctccagcgacgggtccgagcggtcttggatggacgattacgattacgttcatctgcagggtaaggaagaatttgagcgccagcagaaagaactcttggaaaaggaaaacattatgaagcagaataagatgcagctcgagcatcaccagctaagccagtttcagctgctggagcaggaaatcaccaagccagttgaaaacgatatttctaagtggaagccatctcagagtctccccacaactaattctggagtctccgcccaagatcggcaactattatgtttctattacgatcagtgtgaaacccacttcatttcgctcctaaatgccatcgatgctctgtttagttgtgtgtcttccgcacagcctcctagaatcttcgtggctcacagcaaatttgtgattctcagcgctcacaagctcgtgttcataggggatactcttacccgacaggtcaccgcccaggacatcagaaacaaagtgatgaattcatcgaaccagctgtgcgagcagctcaagacaatcgttatggcgacaaaaatggctgctttgcattatccatctaccaccgcactgcaggaaatggtccaccaggtgactgacctgtctaggaacgcacaactgtttaagaggagtcttctcgaaatggccacgttctag

SEQ ID NO: 126062 - DNA, 99 bp, synthetic construct
  misc_feature 1..99: note = Description of Artificial Sequence: Synthetic coding sequence
  source 1..99: mol_type = other DNA
atgtggacaaggaacctgatggcccgcgcactgtatgataacgtcccggagtgcgcagaagaattggctttccgaaagggagatatccttactgtatag

SEQ ID NO: 126063 - DNA, 2505 bp, synthetic construct
  misc_feature 1..2505: note = Description of Artificial Sequence: Synthetic coding sequence
  source 1..2505: mol_type = other DNA
atgtggacacgcaatttgatggccagagcactctacgacaacgtgcccgagtgcgcagaagagctagcgtttaggaaaggggacatcctgaccgttattgaacagaacaccgggggactggagggatggtggctgtgctctctgcatggtagacagggtattgtgccgggcaatagggtcaaactgttaataggccctatgcaggaaactgcttcatcgcacgaacagccagcctccggtctcatgcagcagacattcggtcaacaaaagctgtaccaggtgcctaatccccaagctgcgccacgggacaccatctaccaagtgcctccctcgtaccagaatcagggaatctatcaggtgcctacgggtcatgggacccaggagcaggaagtctatcaggtgccaccctcagtgcagaggtcaatcgggggcacaagcgggcctcacgtaggaaagaaagtgatcactccagtgcggactggacacgggtatgtatacgagtatccctcgaggtatcagaaggatgtgtatgacatcccaccctcgcacaccacacagggagtttacgatattcctccatcatcagcgaaaggacccgtttttagcgtgccggttggcgagattaagccccagggcgtgtacgatatccctcctacgaagggcgtgtacgctatccctccctcagcctgtcgggatgaggccgggctgcgggagaaagattatgattttcccccgccaatgaggcaagcaggtagacctgatctacgacccgagggagtgtatgacataccacccacatgtactaagcctgctggcaaagatttgcacgtaaaatacaactgtgacattcccggggctgctgagcccgtagcccggcgtcaccaatccctgtcacctaaccatccacctccgcagctcggacagtccgtgggctctcaaaatgacgcttacgatgttcctagaggagtacagtttctcgaaccgcctgccgagacatcagaaaaggctaatccccaggaacgggacggcgtgtatgacgtgcccttgcacaacccccccgacgctaagggtagtcgcgacctagttgacggaataaatcgcttgagcttttcgagcacgggaagcacccgcagcaacatgtccacctcgtctactagcagtaaggaaagtagcctttctgcctcacccgcccaggacaaacgactattcctagaccctgacacggctatcgagcgactccaacgtctgcagcaagcactggagatgggagttagttcgctgatggctctggtgaccactgactggcggtgttacggctacatggaacggcacatcaacgaaatccgaacggccgtggacaaggttgagttgttcctgaaggagtacctgcactttgtaaaaggcgctgtggccaatgccgcttgcctccctgagctcattctgcataataagatgaaacgagagctgcaacgcgtggaggacagtcatcagatccttagtcagacaagccacgatctgaacgagtgttcatggtcccttaatatactcgcaattaacaaaccacagaataaatgtgacgacctcgataggttcgttatggtggccaagactgttcctgatgacgccaagcagctcaccacaacgatcaataccaacgccgaagccctgttccgccccggacctgggtccctgcatctcaaaaacggaccagagagtatcatgaacagcacagagtatccccacggcggttcccagggacagcttctgcatccaggcgaccacaaggcccaagcccataataaggcgcttccgcccggattaagcaaagagcaagctcctgattgtagcagctctgatgggtccgagcgcagttggatggacgactacgattacgtgcatcttcagggcaaagaggagttcgagcgccagcagaaggagctcctggagaaagagaacataatgaaacaaaataaaatgcagctggagcatcaccaactgtctcaattccaacttctagagcaggagattaccaagccagttgagaacgacatctccaaatggaaacctagtcagtccctgccaacaactaactctggagtctctgcccaggataggcagctgctttgtttttattatgatcaatgcgagacacactttatatcccttttgaatgccatcgacgcactatttagctgcgtttcaagcgcccaaccaccccgcatctttgtggctcactccaagtttgtgatactgtccgctcataagctagtttttataggcgataccttaacgaggcaggtcaccgcacaggatatcaggaataaggtgatgaattcctccaaccagctatgtgagcaactgaagactattgtaatggccaccaaaatggccgcactgcattacccatcaaccacggctctccaggagatggtacaccaggtgacagatctcagtagaaatgctcaattatttaaaaggagtttactagaaatggccaccttttag

SEQ ID NO: 126064 - DNA, 1212 bp, synthetic construct
  misc_feature 1..1212: note = Description of Artificial Sequence: Synthetic coding sequence
  source 1..1212: mol_type = other DNA
atgctccgaccagaagctgggctggtcggcctgcatggtcctgcccaggagaattctgcactgccaggacgtcgagacagtgcctccgaactgcgagctctgagtggcctggaagtcgacccgggcgagggctggggccgggtagtcctgatcagccccagaacagttcgcttccgagttctgtctccaggcgtgagggaagaaggacatgtgcaaaacaacggccagaatcaggcccggcccgcgaggggggttaccggtgcaggcgggtggggcagcgccgctgtgtgccgtgggagggctctccgggggagggaacccgccctgccctccgccagtttccccgacgtggcagcgtgcccggggtcactggactgtgctctcaagaggagagcacggtgtcctcctggcgcccatgcttgtggaccgtgccttcagcccttccaggaagaccagcaaggcctatgtgttcctaggatgagacgccctcccgggggcggccgcccccagcccaggctagaggacgaaatcgacttcctagctcaggaattagcacgaaaggaatctggacattccaccccacctctcccaaaggatcgccagcgcttgcctgagccagctacgctggggttcagtgcccggggccagggtctcgagttagggctcccctctacacccggaacacctacccctacgccccacacaagcttaggaagccctgtcagtagcgaccccgtgcacatgtccccccttgagccccgcggtggtcagggcgacgggctagctctggtgctgatcctggccttctgcgtggcaggggccgccgctctgtcggtggcatccctgtgctggtgccgattgcaaagggagattcgcctcacacaaaaagcagattatgccacggccaaagcgcctgggagcccagctgcgcctagaatatcaccaggtgaccagagactggcccagtctgctgagatgtatcattaccaacaccagcgccagcagatgttgtgtctcgagaggcataaggagcctccaaaggagcttgacacggcgagctcagatgaagaaaatgaggatggagatttcaccgtgtatgagtgccctggcctggcccccaccggcgaaatggaagtccggaacccactgttcgatcacgcggccctaagtgcacccttgccagcgcctagttctcccccagctctgccatag

SEQ ID NO: 126065 - DNA, 978 bp, synthetic construct
  misc_feature 1..978: note = Description of Artificial Sequence: Synthetic coding sequence
  source 1..978: mol_type = other DNA
atggctacccccttgccccccccaagtccccgccacctgagactgcttcggctgttgctgtccggtctggtgctgggtgctgctttgcgtggcgcagcagcaggacacccagacgttgcagcctgccccggcagccttgactgcgcacttaaacgtcgagctagatgccccccgggcgctcacgcttgtgggccttgtttgcaaccgtttcaggaagaccagcaaggcctatgtgttcccagaatgcgccgaccacctggcgggggaagaccccagcccagactcgaagatgaaatagacttcctagcccaggagctggcacgtaaggagagtggacattcaacgcctcccttacccaaagatcgacagcggctgcccgaacctgctaccctcggattctccgctaggggacaggggctcgagcttggattgccttctactcccggcactccaacgcctaccccccacacttccctggggagccctgttagctccgatcccgtgcatatgagcccgcttgagcctcgcggcggacagggagatggcctagcacttgtgttgatcctggccttctgcgtggcaggcgccgctgcattgagcgtggcgtcgctgtgttggtgtcgccttcagcgcgaaatacggcttacccagaaagcagattacgccacagccaaagcccccggttccccagcggcaccaagaatctctccaggggaccagcgtctggctcagtctgcagagatgtatcactaccagcatcaaagacaacagatgctctgtctcgaacgccacaaggaacccccaaaggaactcgacacagccagtagtgacgaggaaaacgaagatggagactttactgtgtacgagtgcccaggcctcgcccctaccggcgaaatggaggtcagaaacccgctgttcgaccacgccgctctgtcggcaccgctccctgcaccatctagcccccctgcactgccttag

SEQ ID NO: 126066 - DNA, 297 bp, synthetic construct
  misc_feature 1..297: note = Description of Artificial Sequence: Synthetic coding sequence
  source 1..297: mol_type = other DNA
atgtccgtaagagaactcaaccggcagctcagagggtgcggcagggatgaggccctgcggcttaaacaacgccgccggacactgaagaaccgagggtacgcgcaggcctgcagaagcaagaggttgcagcagcgccgtgggctcgaggcagagagagcccgccttgccgcacaattggatgctctcagggcagaagtggctagactggccagagaaagggacctctacaaggcccgctgcgatcggttaacatcatcaggtcccggctctggagatcccagtcacctcttcttgtag

SEQ ID NO: 126067 - DNA, 714 bp, synthetic construct
  misc_feature 1..714: note = Description of Artificial Sequence: Synthetic coding sequence
  source 1..714: mol_type = other DNA
atggctctgccacccagcccactggctatggaatatgttaatgatttcgacctgatgaaattcgaggtcaagagagagccatccgaaggccgtccgggtccccccacagcttccctgggatccacaccatatagttcggtgccaccttctcctacattcagcgagcctggaatggtgggtgccaccgagggtacgcgtcccggcctggaagagctttattggctcgccaccctccagcaacagttaggggccggcgaagctctaggcctgtcacctgaggaagctatggagctcctgcaagggcaggggcccgttcctgtggacggcccacacggatattaccccggctccccagaggagacaggagcccagcatgtgcagttagccgagcgtttctctgatgcggctctggtgagcatgtcagttcgcgagctgaaccggcagcttcgggggtgcggtagggacgaggctctgcgattgaagcagcgacgccggacacttaagaatcggggatatgcacaggcttgtagatctaaacgtctccagcaaaggcggggcttagaggccgagcgagctaggctcgctgcccagctggacgcactgcgggcagaggtcgcccggctggcccgagagcgcgacctctataaagcacggtgtgacagactcacttcctccggacctggttccggcgatccctcacacctgtttctatag

SEQ ID NO: 126068 - DNA, 714 bp, synthetic construct
  misc_feature 1..714: note = Description of Artificial Sequence: Synthetic coding sequence
  source 1..714: mol_type = other DNA
atggccctacctccatctccactcgctatggaatacgtgaatgattttgacctgatgaagttcgaggtcaaaagagaaccatcagagggtcggccgggaccccccacagccagcctcggctcaaccccgtacagtagtgtccctccgtccccgacgttttccgaaccgggtatggtgggagcaaccgaaggaaccagaccagggctagaggagctctattggctggccacactgcagcagcagctgggggcaggggaagcactaggcttgagtccggaagaagccatggagctgcttcagggacagggccccgttccggtggatgggccccacgggtactatccaggaagtccagaagagacgggagcccaacacgtgcagctggccgagaggtttagcgatgccgctctggtcagtatgtctgtccgggagctgaaccgccaactgcgggggtgcggacgcgatgaggctttacggctgaaacaacgtcgcagaacactgaagaatcggggttacgcacaggcttgccggtcgaaaagactccagcagcggcgcgggcttgaggccgaacgcgcaagattggcagcccagctggacgcacttagagccgaagttgccagactggctcgggagcgggatctatataaggcccgctgcgacaggctcacgtcgtctgggcccggttccggcgacccgtcacacttgtttctatag

SEQ ID NO: 126069 - DNA, 198 bp, synthetic construct
  misc_feature 1..198: note = Description of Artificial Sequence: Synthetic coding sequence
  source 1..198: mol_type = other DNA
atggcccttcctccttcccccctggctatggaatacgtgaatgacttcgatctgatgaagttcgaagttaaacgagagcctagtgagggaaggccggggccaccgacggcttctttgggcagcactccttattcttccgtgcctccgtctcctacctttagtgagcctgggatggtgggggcaacagaaggaacgtag

SEQ ID NO: 126070 - DNA, 297 bp, synthetic construct
  misc_feature 1..297: note = Description of Artificial Sequence: Synthetic coding sequence
  source 1..297: mol_type = other DNA
atgtcggtccgagagctgaatcgccagctgcgtggatgcggaagagacgaggctcttaggctgaaacagcgacgaagaactctgaaaaatagaggatacgcgcaggcttgccgtagcaagcgccttcagcaacggcggggtctcgaagcagagagggcgcgactggccgcccagctggatgccctccgagcagaagtggcaagactggcccgagagagagacctgtacaaggctagatgcgaccggctgacctctagcggtcccgggagtggcgacccgtcccacctttttttatag

SEQ ID NO: 126071 - DNA, 714 bp, synthetic construct
  misc_feature 1..714: note = Description of Artificial Sequence: Synthetic coding sequence
  source 1..714: mol_type = other DNA
atggcactgccccccagccctttggccatggagtacgtcaatgattttgacttgatgaaattcgaggtgaagcgggaaccgagtgaagggcggcctggccctcccacagcttcactcggcagcactccatatagctctgtccctccgtcccctaccttctcagaacccggtatggtaggggccaccgagggcacgagacctgggcttgaagaactgtactggctcgccaccctacagcagcaactgggggcaggggaagccttagggctcagtcccgaggaagcaatggaactgctgcaaggtcagggtcctgtgcctgttgacgggccacacggctattacccgggctcaccggaagaaactggtgctcaacacgtacaacttgctgagaggttttccgacgctgccttggtgtcaatgagcgtgcgcgagctgaaccgacagctgcggggctgtggtcgtgatgaagctctccgactgaaacagagaaggcgcacgctgaagaatcgcgggtatgctcaagcctgtagatcaaaaaggctgcagcagcggcgcggactggaggcagagcgggcgaggcttgccgctcagctggatgctcttcgcgccgaagtggcccgcttggcccgcgaacgggatctgtacaaagcccgttgtgacaggcttacaagtagtggacctgggtccggtgatccctctcatcttttcttgtag

SEQ ID NO: 126072 - DNA, 1674 bp, synthetic construct
  misc_feature 1..1674: note = Description of Artificial Sequence: Synthetic coding sequence
  source 1..1674: mol_type = other DNA
atgggtggtcagatcacccgcagtaccctgcatgattctattggaggcccctttcctgtcacttcgcacagatgccatcacaaacagaaacactgtcccgccgtgctgccatctggtggcctgcctgccactccgctgctctttcacccacacaccaaaggtagccagatacttatggacctgagccacaaagccgtgaaaaggcaggcctctttttgcaacgcaatcactttctctaatcgtccagttttaatctatgagcaggttcggttaaagattacgaagaagcaatgttgttggagtggcgcattgagactgggtttcacgagcaaggatccaagtcgcattcatcccgattctcttcctaagtacgcttgcccggatctcgtgtcacagtccgggttctgggctaaagccctccccgaggaatttgcgaatgaaggaaatatcatagctttttgggtggacaaaaagggtagagttttccacagaatcaatgactctgcagtaatgcttttttttagtggcgtgaggaccgctgaccctttatgggccctggtggacgtctatgggttaacgcgcggggtccagctgctggattcagaactcgtgctgccggattgtctccgaccaaggtcttttaccgcactcagaagacctagcttacgccgcgaggcagacgatgctcggctttccgtaagtctgtgcgacctcaatgtacccggggccgacggagatgaagctgctccagccgccgggtgtcccatcccgcagaattccttaaactcacagcactcccgggccctgcccgctcagctggatggcgatctcagatttcacgctctgcgcgccggcgctcacgtgagaattctggacgaacaaactgttgcacgcgtagaacatggcagagacgaacgggccttggtgtttacttccaggcctgttcgtgtagctgaaaccatttttgtgaaagttactcgttctggcggtgctcgccctggcgctttgtcatttggagtgaccacatgtgatcccggaacgcttcgtcccgctgatctgcccttcagcccggaggctctagtggaccgtaaggagttctgggctgtgtgtagggtccccggtcctctccactctggtgacatactgggactggtggtcaatgcagatggggaattgcacctaagccacaatggggctgcagctggaatgcaactttgtgtagatgcaagtcaaccgctgtggatgttatttgggctccacgggaccatcactcagatccgcatcctcggctctaccattctcgccgaaagaggtattccatcactgccatgcagccctgcaagcactcctacgtctcccagcgcgttaggatcccgactgtcagatccactcctcagcacctgctcctccggccctcttggctcctctgccggaggtactgcaccgaactctccagtaagcctgcccgagagcccagttacaccgggcctcggacagtggagcgacgaatgcactatctgctacgagcacgccgtcgatacggtgatctacacatgtggtcatatgtgtctgtgttatgcctgtgggctgaggctgaaaaaagctctccacgcctgttgtcccatctgccggcgacctatcaaggacatcatcaagacttaccggtcgtcctag

SEQ ID NO: 126073 - DNA, 1725 bp, synthetic construct
  misc_feature 1..1725: note = Description of Artificial Sequence: Synthetic coding sequence
  source 1..1725: mol_type = other DNA
atgggcaataatttctctagcattccaagcctgccgcgggggaacccctcccgggccccaagagggcacccccagaacctgaaggactcgatagggggacccttcccagtgaccagccatagatgtcaccacaagcagaaacactgcccggcagtgctgcctagtggaggcctgccagcaacccccctcttgttccatccccacacaaaaggctctcaaatcttaatggatctgtcacacaaggctgttaagaggcaggcttcgttttgtaacgcgattactttctcgaacagacctgttctgatctatgaacaggtccgattgaaaattacaaagaagcagtgctgctggagcggcgcactcaggctaggattcacgagtaaggacccctcacggatccacccggacagcttgccgaaatatgcttgccccgacctggtctcacaatccggcttctgggcaaaggccctccctgaggaatttgcaaacgaggggaacattatcgctttctgggtggacaagaaaggcagagtctttcatcgcatcaacgattcagccgtgatgctttttttttccggagtgagaacagctgatcctctgtgggccctggttgatgtttacgggctgacgcggggcgtccaacttctagactcggagttagtgttaccagactgtctccggcccagatcatttactgcattgaggcggcccagtttgcggcgggaggcagatgacgcgcggctgagcgttagtctgtgtgaccttaatgttcccggggcggacggtgatgaagccgcaccagcagcgggctgccccatccctcaaaacagcttgaattcccaacactcccgagccctgcctgcacagctcgacggcgaccttcgattccacgctctgagggccggcgctcacgtgaggatccttgacgagcagactgtggctagggtggagcacggccgcgatgagagagccctcgttttcacgagcagacctgtcagggtggcagagacgattttcgtaaaagttactcggtcaggaggcgctagacccggtgccctgtccttcggcgtgacaacctgtgatccaggcaccctccgtccagctgacctgccctttagtcctgaggccctggtggaccgaaaagaattctgggctgtctgtcgcgttcccggcccactgcattccggagacatcctcggcctggttgtgaatgccgatggggagctccatctcagtcataacggagctgctgccggcatgcaactctgcgtcgacgcaagtcagcccctttggatgctcttcggattgcacggcaccataactcaaattagaatcctggggtcaacaatcctagccgaacgtggcatcccctcccttccttgctcacccgcgtcaactccaacttctccttcggcacttgggtccagattgagtgatcctctgctgtctacatgctcttccgggcctcttggttcatctgccggaggcaccgctcctaactcccccgtctctttgcccgaaagtcccgtcacccccgggttaggtcaatggagcgacgagtgcaccatctgctatgaacacgctgtcgataccgtcatttacacgtgcggccacatgtgcctctgttacgcttgtggcctgcggctgaagaaggcactgcacgcctgctgcccaatttgcagacggccgataaaagacatcattaaaacgtatagatcatcctag

SEQ ID NO: 126074 - DNA, 600 bp, synthetic construct
  misc_feature 1..600: note = Description of Artificial Sequence: Synthetic coding sequence
  source 1..600: mol_type = other DNA
atgggagggcagatcacccggagtacgctgcacgattctatcggaggcccattccccgtgacgtctcaccgctgccaccacaagcagaagcactgtcccgccgttcttcccagtggcgggcttcctgcaactccactcttattccatccacacacgaaagggagccagattctgatggacctttcccataaagctgtgaagcgccaggcatcattctgcaatgccataactttcagcaaccgccccgtgttaatctatgagcaggtgagactgaaaatcacaaaaaagcagtgttgctggagcggggcactacgcttaggttttacgagcaaggatccctctaggatccatcctgacagcttgccaaaatacgcttgtccggacctcgtgtcccagtctggtttttgggcaaaagcactgcccgaagagttcgctaatgaaggcaatataattgcattttgggtcgacaagaagggaagggtttttcacaggatcaatgacagtgccgtgatgctgttttttagtggagtccgcacagctgatcctctgtgggccctcgtcgatgtttatggccttacgcgaggagtgcagctgctgtag

SEQ ID NO: 126075 - DNA, 327 bp, synthetic construct
  misc_feature 1..327: note = Description of Artificial Sequence: Synthetic coding sequence
  source 1..327: mol_type = other DNA
atggatctctctcacaaggccgtaaaacgccaggccagcttctgcaatgcaattacctttagcaaccggcccgttcttatctatgaacaggtcaggctgaaaataacgaagaagcaatgctgctggtcgggcgctctgaggctcgggtttaccagtaaggacccctctagaattcacccggactctctacccaaatatgcctgccccgacctggtcagccaatcaggattctgggccaaggccctgcccgaggaattcgctaacgaaggaaatatcatcgccttctgggtggacaaaaaaggacgcgttttccacaggatcaattag

SEQ ID NO: 126076 - DNA, 2553 bp, synthetic construct
  misc_feature 1..2553: note = Description of Artificial Sequence: Synthetic coding sequence
  source 1..2553: mol_type = other DNA
atgcgtcaggtgtgttgtagtgccttgcccccgccccctttggagaaggggcgctgctctagctactcagatagctcctcttcttctagtgagaggagttcttccagctcttcatctagcagtgaatcaggcagctctagcaggtcttcctccaataacagctccattagccgaccagccgcccctcccgagcccaggcctcaacagcagcctcaaccaagatcccctgcagcacggcgggctgcggcaaggtcgcgcgccgccgcagctggcggtatgcggcgggatcccgcccccggcttctcaatgctcctgttcggtgtgtccctcgcatgctattccccgagtttgaagagcgtccaagaccaggcatataaggctcccgttgtcgtggagggcaaggtccaaggtttagtccctgccggaggttcttctagcaattccacaagggaaccccctgctagtggccgcgttgcgctggtaaaggtgctggacaagtggccactccgtagtggtgggcttcaacgtgaacaagtgatttcagtaggtagttgcgtgccccttgagcgtaaccagcgttacatctttttcctggaacccaccgaacagcccctggtattcaagacggcctttgcacctcttgacactaacggtaaaaatttaaagaaggaggtggggaagatattatgtactgattgcgccaccaggccaaaactgaagaagatgaagagtcagaccggtcaggtaggcgagaagcagtcactgaagtgtgaagctgccgcaggaaatccccaaccttcctatcgctggttcaaggacgggaaggaattgaatcgatctagggacatacgtatcaaatatgggaacggacggaagaatagtcgtctacagttcaataaagtgaaggtggaagatgctggggaatacgtatgcgaggctgaaaacatcctggggaaagacacggtacgcggaagactctacgtaaatagtgtatcgacgaccttgagctcctggtcaggccacgcaagaaaatgcaatgaaaccgcaaagagttactgtgtaaatggaggcgtgtgctattatattgagggaattaatcaattgagttgtaaatgccctaatgggttctttggccagaggtgcttggagaaacttccattgagactctatatgccagatcccaagcagaaggccgaggagttataccagaagcgcgtgctgacgatcacgggtatttgcgtagctctgttggtggtgggcattgtgtgcgtcgtggcgtactgtaagaccaagaagcagagaaaacagatgcataatcacttgagacagaatatgtgcccagctcaccagaatcggtccctggctaacggaccatctcatccaagactagaccctgaagaaattcagatggctgactacatctcaaaaaacgtgccggcaaccgaccatgtgatccgccgggaaacggagacaaccttctctggctcccactcttgtagtccttcacatcattgctctactgccacaccgacatcctctcataggcatgagtcacacacatggagtcttgagagaagtgagtccctgacctccgacagtcaatctgggatcatgctttccagcgtcgggacaagcaaatgcaacagtcctgcttgcgttgaagctcgagctagacgcgctgctgcatacaacttagaagagcgtcggagagccacagctcctccttaccatgactctgtggacagcctgagagactctccccactctgagaggtatgtgtcggcactgacaacacccgccagactctcaccagtcgatttccactatagcctggccacccaggtcccgaccttcgagatcacctctcctaactctgcccatgccgtaagcctgccaccagctgcacccattagttataggctcgctgagcagcagcccctactgcggcatccagcccctcctgggcccggtccaggccctggacctgggccagggcctggagccgacatgcaacgctcttatgattcttactactatcccgctgccggacctggccccagacgcggcacatgtgctctaggtggctccctgggcagcctgccagcaagcccttttaggatcccagaggacgatgaatacgaaaccactcaggagtgcgccccacctcccccgccgcggccccgcgcacgcggagcctccaggcgcacctccgctggccccaggcggtggagaagaagcaggctgaacggattagctgcccagcgcgctagagctgcaagagattctctttctctgtcatctggttccggcgggggcagtgcaagcgccagcgatgacgacgccgatgatgccgacggcgccctggccgccgagtctactccattcctaggactcaggggagcccacgacgcactccggagcgatagtccaccgctgtgcccagcggctgatagtcgcacttattattctctcgattcacactccacacgtgcttcatctcgccactccaggggcccacccccccgcgctaagcaggattccgccccgctctag

SEQ ID NO: 126077 - DNA, 1281 bp, synthetic construct
  misc_feature 1..1281: note = Description of Artificial Sequence: Synthetic coding sequence
  source 1..1281: mol_type = other DNA
atgagacaggtgtgctgcagcgccttgcccccacctccccttgagaagggtagatgttcaagttacagcgattcaagctcctcctccagcgagaggagcagctcttcatccagctcttcatctgaatctggaagctccagcaggtcttcctctaataactcttccattagtaggccagcagcccctcctgagcccagaccccagcagcaaccacagccaagatctcctgccgcaagaagggccgctgctaggagccgggcagccgccgcgggagggatgcgaagggatcccgcccctggattctccatgttattgttcggcgtctcacttgcttgctactcaccttcgctgaaatccgtacaggaccaagcctacaaagccccagtggtggtcgaaggcaaggtgcaggggctagtccctgcaggtggctcttcttctaattcgacgagagagcctcccgcctccggaagagtggccttggtaaaagtgcttgataaatggccgctgcggtccggcggactacaaagggaacaggtgatcagcgtaggctcctgcgtccccctcgaacgcaaccagcgctatatcttttttctcgagcccaccgagcagcctttggtattcaagaccgcatttgctcctctagacactaacggcaaaaaccttaaaaaagaagtgggcaaaatcctctgcaccgactgtgcaaccaggccgaagctgaagaagatgaaatcccaaacaggccaagtaggagaaaagcagagccttaagtgtgaggctgctgctggcaacccccagccttcctataggtggtttaaggatggtaaggagctgaacaggagccgcgacatccggattaagtatggcaatgggcggaaaaatagcagacttcaatttaataaggttaaagtcgaagacgctggggaatatgtgtgcgaagctgaaaacatcctgggaaaggatacagtcagaggtcgcctgtatgttaattccgtgtcaacgaccttatcatcatggtctggacacgcccgcaagtgcaatgaaacagcgaaaagttactgcgtaaacggaggagtctgctattatatcgagggcataaaccagttgtcttgcaagtgcccgaatggattctttggccagcgttgtttggagaagctgccgcttcgtctgtatatgccagaccccaagcaatctgtgctttgggacacgccgggtaccggcgtgagtagttcacagtggagcaccagtccaaagcctcgctcctgtacgcggcgcgggtcatag

SEQ ID NO: 126078 - DNA, 2577 bp, synthetic construct
  misc_feature 1..2577: note = Description of Artificial Sequence: Synthetic coding sequence
  source 1..2577: mol_type = other DNA
atgcgccaagtctgttgtagtgcactgcccccacccccactcgaaaagggaagatgttcaagctactctgatagttcgagctcgtcctctgaacggagctcctcatcttcatcttctagtagtgagtccggctcaagcagcagaagttcttctaacaactcctcgatctcccgccccgctgctccacctgagccccgcccccagcagcaaccccagccaaggtccccagctgctcgacgggctgctgctagaagccgggcagctgcagccgggggcatgcgcagggatcccgcccctggattctcaatgctgctgtttggagtgagcctcgcttgttatagcccctcccttaagtctgtgcaggaccaggcatacaaggccccagtagttgtagaggggaaggtccaggggctcgtccctgctggcggctcctcgtctaactctacaagggagcctccagccagtggtcgagttgcacttgttaaggtactggacaaatggcctctgagatctggtggcctgcagcgagaacaggttataagcgtcggttcctgcgtgccgctggagcggaatcagcggtacatttttttcctggaaccgactgaacaaccgctggtattcaagacagcatttgcacctctggacacaaatggaaaaaacctgaagaaggaggttggcaagatcctctgtaccgattgcgcaacacgcccaaaactgaaaaagatgaagagtcagacagggcaggtaggagagaaacagtcgcttaaatgtgaggcagctgccggaaaccctcagccttcatatagatggttcaaggatggtaaggaactgaacagaagccgcgacatcagaataaagtacggcaacgggcgtaagaacagtcggcttcaatttaataaagttaaagtggaagacgccggcgagtatgtgtgtgaagcagagaacattcttggaaaagatactgttcgcggccgcctttatgtgaactcagtgtcaacaaccctgtcttcctggagtggacatgctcgcaaatgtaatgagaccgcgaaatcctattgcgtcaatggcggggtgtgttattacattgagggcattaaccaactctcctgcaagtgccccaacggattctttggccaacgctgcctggaaaaattgccgctgaggctgtacatgccagacccaaagcagtcctttctctcttttgagctgtcaaaggccgaggagctgtaccagaaacgcgtgctcactataaccggaatttgtgtagccctgttggtggttggaatcgtctgcgtggtggcatactgcaagacaaagaaacaacgtaagcagatgcataaccatctccgtcagaatatgtgtcccgcacaccagaacagatcgcttgcaaacggcccatcccacccacggttggaccctgaggagattcagatggccgattacatctccaaaaatgttcccgctactgatcacgtgatccgacgcgaaactgagaccacgttcagcgggtcccacagttgttcaccatcccaccactgctccaccgccacacctacatccagccaccggcacgagtctcacacctggagtctcgaaaggagcgagagtctcacctctgattcccagtcaggaatcatgctctcttctgtcggaacctcaaagtgcaattcgccagcctgtgtggaggcaagagcgagaagggccgccgcctataatctggaagagcggagaagagccacagcccccccttatcacgacagcgtcgatagcttgagagacagtccacactcagagaggtatgttagtgcactgacaactcctgcccgcctgagccccgtggatttccactatagtctggctacacaggtgcccacattcgagatcacaagccctaattccgcgcacgccgtgagcctacccccagcagccccgatctcatataggctcgcagaacagcagccactactgagacatccggccccacccggcccaggaccaggtcccggccccgggcccggcccaggcgccgacatgcaaaggtcatatgattcctactactaccccgcagcaggccccggcccccgccgagggacctgcgccctgggcggatctctggggtcgctccccgcctccccctttcgcatcccagaggacgatgagtatgaaactactcaagaatgtgcaccaccccccccaccccgccccagagcgcgcggtgcaagtcggcgcacctctgcgggcccgaggcggtggaggagatcccgcctcaacggcctcgctgcccaaagggcgagggcagctagggacagcctctcgctgagctcggggagcggggggggaagcgctagcgccagcgacgatgacgccgatgatgccgacggggctctcgctgccgagtctactccttttttaggcctgcgtggagcccatgatgccttaagaagcgactcccctcctctctgtccagcggctgattcgagaacatattactcactcgactcacattctactcgagcatcaagcaggcactcccgaggacccccaccgcgggccaaacaagatagcgctcctttatag

SEQ ID NO: 126079 - DNA, 2355 bp, synthetic construct
  misc_feature 1..2355: note = Description of Artificial Sequence: Synthetic coding sequence
  source 1..2355: mol_type = other DNA
atgcggcaggtgtgctgctcagccctgccacctcctccactggagaaaggtaggtgttccagctattccgatagtagcagtagcagctcagaacgaagttcctcctcgagttccagctccagcgaaagcgggagctcttcgagatcttcgagtaataactcttcgattagccggccagcagcccctcccgagccgcgtccccagcagcaacctcaaccgcgctcgcctgcagcccggcgcgcagccgcgcgaagtagagctgccgccgccgggggcatgagaagagaccctgctcctggcttctcgatgctcctgttcggcgtgtccctagcttgttatagtccaagtctgaaatccgtgcaggatcaggcatacaaggcccctgtggttgtggaggggaaagtgcaagggctagtgcccgccggagggagtagttccaattctacaagagagccccccgccagcggccgcgtggcattggtcaaggtgttggataagtggcccctgcgaagtggcggtctgcagcgagagcaggtcatctcggttggctcctgtgtgcctttagagaggaaccagagatacattttcttcttggaacctactgagcagcccttggtatttaagactgcttttgccccccttgataccaatggcaagaatttaaagaaggaggtaggaaagatcctttgcacagattgtgcaacccggcctaagttaaagaaaatgaagtcacagacaggacaggttggcgagaagcagagcctcaagtgtgaggccgctgccggaaatccccagccaagctataggtggtttaaagatggtaaagagctaaatcgtagtcgcgatatacggatcaaatacggaaacggcagaaagaattcgcgcctgcagtttaataaggtcaaggttgaggatgccggtgagtacgtgtgcgaagctgaaaatatcctcgggaaggacacagtgcgcggccggttgtatgttaactccgaagctgaggagctgtaccagaagagggtcttgaccatcacaggcatctgtgtagccttgctcgtcgttggcatagtgtgcgtggtggcctattgtaagactaagaaacagcggaaacagatgcacaatcatctgcgccaaaatatgtgtccggcgcaccagaatcgctcgctcgccaacggcccaagccaccccagactggacccagaagagatccaaatggccgattacatcagcaagaatgtccctgctactgatcatgtgattagacgagaaacggagaccacctttagtggctcacactcatgtagccctagccatcattgctcaaccgctacacccacctcttcacatagacacgagtcacatacctggtccttggaacgcagcgaatcactgacttccgatagccagtcaggaatcatgttatcttctgtgggaacctcgaagtgcaatagccctgcatgtgtcgaggcacgtgcacgccgggcagctgcttacaatttggaggagaggagaagagccaccgcccccccctatcatgatagtgtcgactcacttagagatagccctcattctgaacgttatgtttctgccctgacaacgccagccaggctctcacctgtggattttcactactccctggctacccaggtacctacgtttgagattaccagtccgaatagcgcccacgctgtttcgttacccccagccgcgcctatttcctatcggctcgcagagcaacagccacttctgcggcaccccgctcccccaggtcccggcccagggccaggacctgggccgggaccgggagcagatatgcagcggtcatatgactcctattactacccggcagccggccccgggcccagacgcggcacttgcgccctggggggaagcttgggatctctgccggcttctcccttccggattcctgaggacgacgagtatgaaaccacacaggagtgcgccccaccaccccctccacggcccagagcgagaggcgcaagtcgacgcacttctgcgggaccccggagatggcgtcggtcaaggttgaacggccttgccgctcaacgggcgagagccgcacgagatagcttgtcgttgtcttcagggagtggtggagggtccgcctcggcctcagatgatgatgccgacgacgcagatggtgcactcgcagctgagtccactccgtttctgggtctaagaggcgcacatgatgctctgagatctgacagcccgccgctctgtccagcagcagacagtcggacatactactcccttgacagccattcaactagggcctcttcgcgccatagccggggccctccaccgcgtgccaaacaggatagtgcccctctgtag

SEQ ID NO: 126080 - DNA, 993 bp, synthetic construct
  misc_feature 1..993: note = Description of Artificial Sequence: Synthetic coding sequence
  source 1..993: mol_type = other DNA
atgaggcgggatcccgcccccggcttcagtatgctcctgtttggcgtttccttagcatgttattcccccagtctgaaaagtgttcaggatcaggcatacaaggctccggtggtggttgagggaaaagtccaggggcttgttcctgcgggcggcagttcctctaactcgacccgggaaccacccgcatctggcagggtggccctggtgaaggtcttggacaaatggccactccggtcaggcgggcttcagcgggagcaggtcatttccgtaggcagctgcgttcccctcgagcgcaatcagaggtacatcttctttctggaaccgaccgaacagccgttggtgtttaagacagcgttcgctccccttgacacgaacgggaaaaacctcaagaaggaggttgggaaaatcctgtgtaccgattgcgctacaagaccgaaactgaagaagatgaaaagccagactggccaggtaggcgaaaagcagtccctgaaatgtgaagcggcggctggaaacccacaacctagttacagatggttcaaggatggcaaggaactgaacaggtcccgggacatcaggatcaagtacggcaacggccgaaagaatagccgcttacagtttaacaaggttaaggttgaggatgcaggtgaatatgtctgcgaagcagagaatattcttgggaaagatactgtgcgcggccgcctatacgtaaactcagtgtctaccactctcagcagctggtcaggtcacgcccgtaagtgcaatgaaaccgctaaaagctactgcgtgaacgggggtgtgtgttattatatcgagggcataaatcaactgagttgcaaatgtcccaatgggtttttcggtcagagatgcctggagaagctgccactcaggctgtatatgccagatcccaagcagtccgtcctgtgggatacccctgggacaggcgtctccagttcccaatggagcactagtccctctacccttgaccttaactag

SEQ ID NO: 126081 - DNA, 2559 bp, synthetic construct
  misc_feature 1..2559: note = Description of Artificial Sequence: Synthetic coding sequence
  source 1..2559: mol_type = other DNA
atgaggcaggtttgttgctccgccctacccccccctccactggagaaggggcgctgctctagctactctgactcatctagttcgtctagcgagcggagtagcagttcgtccagcagcagttccgaatcaggcagttcatccagatcgtcatcaaacaatagcagtatttctcgcccagctgcacctcctgaaccgcgcccccagcagcagccgcagccaaggtccccagcagctcgacgagccgctgcacgaagccgcgcagccgcagccggaggtatgcgaagagatccagccccagggttctctatgttgctgttcggtgtcagcctggcctgttattcccctagtctcaagagtgtgcaggaccaggcctacaaggcccccgtggtggtcgaaggcaaggttcaaggcctggtgcccgcaggcggaagcagttccaattcaactcgcgaaccaccagcaagtggtagagtggcactcgtgaaggtgctagacaagtggcctctccgcagcgggggattgcagcgggaacaggtcatcagtgttgggagttgtgtgccactggaacggaaccagcggtatattttcttcctggagcccaccgaacagcccctggtatttaagactgctttcgcccctctggacaccaacggtaaaaatctcaagaaagaggtcgggaagatcctttgtacagattgtgctaccagaccaaagctgaagaaaatgaagtcacagaccggccaggtcggtgaaaagcaatcccttaagtgcgaagccgcagccggcaatccacaaccatcttaccgttggttcaaggacggcaaagaactgaatcgaagccgcgacattcggattaagtatggcaatggaaggaaaaacagcaggctgcagttcaacaaagtcaaagtagaggacgcaggagagtatgtatgtgaggcggagaacattctgggtaaagacacagttcgggggcgcttgtacgtgaacagtgtttccacaacgctttcaagttggtccggacatgcacggaagtgtaatgagacagcaaagtcatattgcgtaaacgggggcgtgtgctactacatagagggtattaatcagttgtcttgtaagtgtccagtcggctatacaggtgaccgatgtcagcagttcgcaatggtcaatttctctactcgccttggcggtgacgtagaagaagcagaggaattgtaccaaaaacgggtgcttacgattaccggcatttgcgtagctctgctggtggttggtatagtgtgcgtggtggcttactgcaagaccaagaaacaaaggaagcaaatgcacaatcacctcagacagaatatgtgtccagcccaccagaaccgaagcctggccaatggcccatcccaccccaggctggatcctgaggaaattcagatggcagactacatctctaagaatgttcccgccaccgatcacgtcattagacgagagacagagaccactttttcaggtagccactcctgcagccccagccatcattgtagtacggctacacctacaagctcccacagacatgaatctcatacgtggtctctcgagagaagtgaaagcctaactagcgatagccagagcggaattatgctgtcgtcagtgggcacaagcaagtgcaatagcccagcatgtgtcgaagctcgagcccggagggcagcagcctacaatcttgaagagagacggagggcgaccgctcctccttaccatgatagcgtggatagtctacgtgattccccacactcagaaaggtacgtttccgccctcaccacacccgctcgactgtcacctgtcgatttccactattctttggcaacacaggtgccaacctttgagatcacaagtccaaacagcgcccacgctgtgagcctgcccccagccgcgcccatttcttaccggctggctgaacagcaaccgctgctgagacaccccgcacctcccggaccggggccaggccctgggcctggaccaggacccggggccgatatgcagcggtcatatgattcatactactaccccgctgcagggcccggcccacgaagagggacatgtgccttggggggcagcctcggctcattgcctgcatcccccttccgcattcctgaggatgatgagtacgagaccactcaagaatgcgccccaccccctccacccagaccaagagcgcggggtgcctctcgcagaaccagtgccggcccacgcaggtggcggagatcgaggttgaacggcttggcagcccagagggctcgggctgcccgagactcactctcgctgagcagtgggagcggaggaggctccgcctccgcatccgacgatgacgccgacgatgcagacggtgccctggcagcggagtctactccctttctcggccttagaggcgcccacgacgccttacggagcgattcaccccccctttgccccgccgctgactcacgcacatattactctctggattctcacagtacgcgggcttccagccgccatagcagagggccaccccctcgcgccaagcaggattccgctcctctgtag

SEQ ID NO: 126082 - DNA, 2535 bp, synthetic construct
  misc_feature 1..2535: note = Description of Artificial Sequence: Synthetic coding sequence
  source 1..2535: mol_type = other DNA
atgaggcaagtatgctgctctgcgctcccacccccccctctggaaaaaggacgatgcagctcatattccgattcttcttcctcctccagcgaaagaagttcttctagcagctcctcatcgagcgaatctggttcttcctctcgctcatcctctaacaactcctctatctcaagacccgcagcaccacccgaacctaggcctcagcagcaaccacagcctcggagccctgctgcgaggcgcgccgccgcacgttctagagcggcagccgcgggaggcatgcgcagagatccagcccccggtttctccatgctcctatttggcgtgtccctggcctgttacagccccagcctcaagagcgttcaagatcaggcatataaggcacctgtcgttgtagaaggaaaagtgcaaggcctagtccccgccgggggctctagctccaattcaacgagggagccaccagcctctggtagggttgccttggtcaaggtgctggataaatggccactgcggtctggtggcctgcagcgagaacaggtgatctctgttggctcctgcgttcccctagagaggaaccagcggtatattttctttctggagccaacagagcagccattagtctttaagactgctttcgcacctctggacacaaacggaaaaaacctgaagaaagaagtgggaaagattttatgtacagactgtgctacaaggcccaaactgaagaaaatgaagtcacagaccggccaggtgggagaaaagcagtccctgaagtgtgaagccgccgcaggcaacccccaacccagttaccggtggtttaaagatggcaaagaactgaatcggagccgcgatattcgcattaaatatggtaatggtagaaagaactcccgactgcaattcaacaaggtgaaagtggaagacgccggagaatacgtatgcgaagctgagaatattctcggtaaggatacggtgagaggccggttatacgttaattctgtgtctaccaccctgagttcgtggagcggtcatgcccggaaatgtaacgaaaccgctaagtcatattgtgtgaacggtggtgtatgctactatatcgagggaattaaccagttgagctgcaaatgccccgtggggtacactggcgacaggtgccagcagtttgcgatggtgaacttttccaaggctgaagagctgtaccagaagagggtgctgacaattaccgggatctgcgtagccctgctggttgtcgggatcgtctgcgtagtagcttactgcaaaactaagaaacagagaaaacagatgcataaccatctcagacagaatatgtgcccagcccatcagaatcggtcactggccaacggcccttctcatcccagactggaccctgaggaaattcaaatggccgattacatttcaaagaacgtaccggccacagaccatgtaatcagacgggagacagaaactacgttctcaggtagccactcctgtagtccaagccaccactgctcaacagccacacctacttcatctcaccggcacgaatcccatacctggagcctagagcggtcagagtctctcacctccgacagccagtcaggtattatgctgtcctctgtcggtactagcaaatgtaatagccccgcctgtgtggaagccagagctaggcgggccgccgcttacaatctcgaggaaagacgaagggccaccgcaccgccgtatcacgactcggtcgacagcctcagggactcacctcactccgagcgctacgtctcagcactgaccacccctgcaaggctttcccccgtcgatttccattattctctggctacccaggtccccaccttcgagatcacatcgccaaattctgcccacgcagtatcacttccaccagccgccccaatttcctaccggcttgccgagcagcagcctctactgcgacatcccgcccccccagggccggggccaggcccagggcctgggcctggtcctggagctgacatgcagagaagctatgactcctactattatcccgccgccgggcccggccctcgtagagggacctgcgctttgggtggaagcctggggtcattgccagcatctccctttagaatcccagaagatgacgagtacgagacaacccaagagtgtgcgccccctcctccacctcgacctcgcgcacgcggagcctcacgtcgaacttccgccggccctaggcgatggcgcagatctaggctcaacgggctggcagcccaacgggcaagggccgcccgcgactctctctccctgtcaagtggatccggcggggggtcagcctctgcctctgatgacgacgccgacgacgccgacggagctctggctgctgagtcaaccccttttctgggcttgcgcggagctcacgatgccctgcgtagcgactctcctcctttatgccccgccgccgactctcgaacatactacagcctggactctcattctacacgtgcctcttcacggcattcacgaggtccccccccaagggctaagcaagatagcgcccccctctag

SEQ ID NO: 126083 - DNA, 2577 bp, synthetic construct
  misc_feature 1..2577: note = Description of Artificial Sequence: Synthetic coding sequence
  source 1..2577: mol_type = other DNA
atgaggcaggtgtgctgctctgctctgccgccgcccccactggaaaaaggccgatgttcttcgtactcagactctagcagctcctcttctgagcgcagcagcagttctagtagtagttctagcgaaagcggaagctcttcacggagcagcagtaacaacagctcaatttcacggccagctgcccctcccgaaccacgtccccagcagcagccgcagcctcggtcccccgccgccaggcgggcggccgctcgtagcagagctgccgccgctggcgggatgagacgggaccccgctccgggctttagcatgctgctgttcggtgtgagccttgcttgttactcaccctccctgaagtctgtgcaggaccaggcctacaaggccccagtagtggtggaaggaaaggttcagggcctggtgccagctggcggttcctccagtaatagcacaagagagccccccgcttctggacgtgtcgctctcgtgaaagttttggacaaatggccactgcgaagcggaggtttgcagagagagcaagtcattagcgttggttcatgtgtgccactcgaaaggaatcagcgctacatttttttcctggagcctaccgagcagcctctggtttttaaaaccgcgtttgcaccactggatactaatggcaagaatctcaaaaaggaggttggaaagatcctgtgcaccgactgtgccactaggcctaaactgaagaagatgaagtctcagaccggacaagtgggcgagaagcagtctctcaagtgtgaggcggctgctggcaaccctcagccgtcctacagatggtttaaggatggcaaggagctgaaccgcagccgagacattcgcattaagtatggcaacggccgtaaaaatagccgcctgcaattcaataaagtcaaggtagaagacgcaggcgaatatgtgtgcgaagccgaaaacattctgggaaaggatacggtgcgtgggcgattgtacgtcaactcagtaagcacaacgctgtcttcttggagcggccatgccagaaaatgtaacgagactgcaaaaagctattgtgtcaatggaggggtctgttactatatcgaagggattaatcagctcagttgtaagtgccctaacggcttttttggccaaaggtgtctcgagaaacttcctctgcggttgtacatgccagatccgaagcagaagcatcttggtttcgaacttaaagaagcagaagaactgtatcagaagcgagttcttactattaccggaatctgcgtggcattgcttgttgtgggaatcgtttgcgtggttgcctactgcaaaaccaagaagcagcgaaaacagatgcacaaccacctgcggcagaacatgtgcccagcacaccaaaaccggagcctcgctaatggaccttctcatccaaggttggatccagaggagatccagatggccgattacataagcaaaaacgtgcccgctacagatcatgttatcaggcgcgagaccgagacaacctttagcggcagtcacagctgttccccaagccaccattgctcaacagccacgccgaccagctctcatagacacgagtcccacacctggtccctcgagcgtagcgagagtctaacctcagattcacagagcgggattatgctctcttccgtgggcacatccaagtgtaacagcccagcatgtgtggaggctagggctcgacgggccgcggcatataatttggaggaacgcagacgcgccaccgctccaccataccacgacagcgtggactctctgcgcgattccccccatagcgaaaggtatgtatcggctcttacaaccccggcgcgcctgagccctgtcgacttccactattccctggctacccaagtccccacgtttgagataacaagtcctaactccgctcatgctgtgtcgctgccccccgctgccccaatcagctatcgactggctgagcagcagccactcctgagacacccagctccacctgggccagggccaggtcccggaccgggacccggtccgggggcagacatgcaacggagctatgatagttattactatccagccgccggtccaggaccgcgacgaggaacatgcgccttgggaggttccctggggtcgctccccgctagccctttccgcatcccagaggatgatgagtacgagacaacacaggagtgcgcccccccacccccacctcgtccccgggcgaggggggcctctcgcagaacaagcgctggcccccgcaggtggcggcgcagccgcctgaacggcctggccgcccagcgggctagagccgctcgggattcactgagcctgtcatccggctcagggggtggatctgcaagcgccagtgacgacgacgctgacgacgccgacggagcactggccgcagagtccaccccattcctcggtctgcgcggggcccatgatgctcttcggagtgacagtccgcccttatgtcccgctgctgattccagaacatattatagtctggattcccattccacacgggcgtccagccgacactcccggggcccaccaccgcgggccaagcaggacagcgcacccctgtag

SEQ ID NO: 126084 - DNA, 2091 bp, synthetic construct
  misc_feature 1..2091: note = Description of Artificial Sequence: Synthetic coding sequence
  source 1..2091: mol_type = other DNA
atgtctgagggcgcagctgccgcctcgccaccaggagcggcctcggcagcagcagctagcgcagaagagggcacggcagctgcggcagcagctgcagcagcaggcggcggacctgacggaggcggggagggcgccgctgaacctcctagagagttgcgctgctctgattgtatagtgtggaaccgccagcaaacgtggctgtgcgttgtgcccctttttatcggcttcattggtttgggccttagcctgatgctgttaaaatggatcgttgtgggatcggtcaaagaatatgtccctacggacctggtcgattcaaagggaatgggacaggatcctttctttctgagcaaacctagtagtttccccaaggccatggagaccacaaccacgactacaagtactactagccctgccactccaagcgcaggtggcgccgccagctcacggacacctaataggatttcgaccaggctgactacgatcacccgggccccaaccaggttccccggtcacagggtgcccattagagcttctcccagatccactacggctaggaataccgctgcgcctgccacagtcccgtcgacaactgccccattctttagttccagcaccctcggttccagaccaccagtgcctggcactccgtccactcaggcaatgcctagttggcctacggctgcctatgcaacatctagctacttacacgatagcacaccgtcttggactttgagcccatttcaggacgctgcatccagttcaagctcaagttcttcatccgccaccacaaccacaccagagacctctactagtccaaaattccacacgacaacatattccaccgagcgttccgagcactttaagccctgccgggataaagatctggcatactgtctgaatgacggagaatgcttcgtgatagagaccctcacggggtcgcacaagcactgtcgctgcaaagaaggttatcaaggcgtacggtgcgatcagttcctgcctaaaaccgattcaatcttgtcagacccaaccgaccacctgggtattgaattcatggaatcagaggaagtataccagcgacaggtgctgtccattagttgcatcatttttggtatcgtcattgtcggtatgttctgcgccgccttctacttcaagagcaaaaaacaagccaaacagatccaggaacagcttaaggtccctcagaatgggaagtcttactccctcaaggcctcatccaccatggccaagtctgaaaatctcgtgaagtcccacgtacagctccagaattacagtaaagtagagagacacccagtgactgcgttggaaaaaatgatggagagtagtttcgtgggtcctcagtcatttccagaagtgcctagtcctgatcgggggtcccaaagcgtgaaacatcacaggtccttaagttcatgttgtagtcctggtcagaggtctggcatgctccatcgaaacgcattccgcagaacgccgcctagcccaagatctcgtctgggaggcattgtggggcccgcttatcaacagctggaagagagcaggatccccgatcaggatactattccttgccagggatactcaagtagcggcctgaagactcagcgtaacacatccatcaacatgcagttgccctccagggagacaaacccttatttcaattccctagaacagaaagacctggttggatacagctccacaagagcaagttctgtccccatcattccgagtgtggggctggaggaaacctgcctgcaaatgccagggatctcggaagtgaagagtatcaagtggtgcaagaattcttattctgcggacgtggttaatgtcagtattcccgtttcagattgtctcatagccgaacagcaggaggtgaagatcctgctcgagacggtgcaagagcagatccggatcctgactgacgcccggcgctctgaggattatgagctcgccagcgtggagactgaagacagcgcctcagaaaatacagccttcctacctctatctccgacagccaaatccgagcgcgaggcacaattcgtgttgcgtaatgagattcagagagattccgcacttacaaaatag

SEQ ID NO: 126085 - DNA, 1500 bp, synthetic construct
  misc_feature 1..1500: note = Description of Artificial Sequence: Synthetic coding sequence
  source 1..1500: mol_type = other DNA
atggagtgtggcatacctcccacactggtatgcgtgggaagaggagggggactgcacacaataaatatcataatatggtactatttcccctcggcatggaggacttgtttcaacatcagcagctccgttggcctattactgacaaatagctacaaattttacacgaccacctacagcacagaaagaagcgagcattttaagccctgtagagacaaggatttggcctactgcctaaacgacggagaatgctttgtcatcgagactcttactggttcccacaagcactgtcggtgcaaggaaggataccagggagtcagatgtgaccagtttttacctaagacagattctatcctctccgacccaaccgaccatctcggcatcgagttcatggagtccgaagaggtgtaccagcgccaagtactatccatctcttgcattatctttgggattgtgatcgtgggcatgttctgcgccgccttctacttcaagagtaagaagcaggcaaagcagatccaggagcaacttaaagtgccgcaaaacggcaaatcttacagcctcaaggcctcttccacaatggccaaaagtgaaaatctcgtcaagagtcatgtccagctccaaaactattcaaaggtcgaacggcatccagtgactgccctagagaagatgatggagtccagcttcgtgggccctcaatcatttcctgaagttcccagtccagatagaggctcccaaagcgtgaaacatcaccgatccctttcatcctgttgttcccccggtcagcggagcggcatgctacatcgcaacgcgtttcgacgcacgccgccctctcctcggtcccggctgggcggtattgtggggcccgcatatcagcagctggaagaaagcaggatcccggaccaggacaccataccctgccaagggattgaagtgaggaaaactatctcacacctgcccattcagctgtggtgtgttgaacggccactcgatttgaagtacagttcgtccgggctgaaaactcaacgtaacacttccattaacatgcaattgccatccagggaaactaacccttattttaatagtttagagcagaaggacttagtaggatatagctcaaccagagcatcctccgtaccaattatcccaagtgtgggcctggaagagacttgccttcagatgccgggcatttcagaggtcaaaagtataaaatggtgtaaaaatagctattccgctgatgtggttaacgtaagcattcctgtaagtgattgcctcattgccgaacaacaagaggtcaagatactgctcgagactgtccaagagcagatcagaattctgacagacgcaagacggtctgaggactacgagctggcatcggtagagacagaagactccgcttctgagaataccgcattcctgcctctgagcccaacagccaaatccgagcgggaagctcagttcgtcttgaggaacgaaatccaaagggatagcgccttgacaaaatag

SEQ ID NO: 126086 - DNA, 2163 bp, synthetic construct
  misc_feature 1..2163: note = Description of Artificial Sequence: Synthetic coding sequence
  source 1..2163: mol_type = other DNA
atgagcgaaggtgctgcagccgcatcacctcctggcgcagcatccgctgccgctgcctccgctgaagagggcacagccgcagctgctgcagccgcagcagctggcggcgggcctgacggaggcggcgaaggcgctgccgagccaccgcgcgaactgcgttgcagtgactgtattgtgtggaacaggcaacagacatggctctgtgtcgtgccgctatttattgggtttattggactggggctgtcgctgatgttattaaagtggatcgttgtcggctctgtgaaagaatatgtgccaacagacctggtggactcaaaaggtatgggccaggaccccttcttccttagcaagccttcttcttttcctaaggcaatggagacgacaacaactactacctccacaacaagtcccgctaccccaagcgcaggcggcgccgcaagttcacgcactccaaatcgcatctcgacacgcctgactactattacaagagctccaactaggtttcccggccatcgtgtgccaattcgggcgtcccccagaagcaccacggcaagaaatacagcggctccggccacagttccaagcacaacagcaccgttcttcagttcctcaacactagggtcccgccctccagtgcccggcaccccgtctacccaagccatgccttcctggccaactgccgcgtacgccaccagcagctacctgcatgacagtactccatcttggacgctttctccctttcaggacgctgcttcttccagcagttcttcgtcgtctagtgccactaccacaacaccagaaacctctacatccccaaagttccacaccaccacttatagtaccgagcgcagtgagcacttcaagccttgcagggataaagaccttgcctactgcttgaacgacggagaatgctttgtgatcgagacgctgacgggttcgcacaagcactgtcggtgcaaggaagggtaccagggcgtgaggtgcgaccaattcctccctaaaacagattccattctcagtgaccccactgaccacctgggcatcgaattcatggagagcgaggaggtctatcagcgtcaagtcctctctatctcttgcattatcttcgggattgttattgtggggatgttttgcgccgcattctacttcaaaagtaagaaacaggcgaagcaaattcaggaacagttaaaggtcccccaaaatggtaagagctactcactcaaggcatcctctacaatggccaagtctgagaacttagtgaagagccatgttcaacttcagaactattccaaggttgaaagacaccccgttactgccctagagaagatgatggagagtagtttcgtcggacctcaaagttttccagaagtgccttcccccgacagggggtctcagtcagtgaaacatcaccggagcttatcttcctgttgttctcccggccaaagatcaggcatgctccaccgtaacgctttccggcgaacgccccccagccctcgttctaggctgggtggtattgtgggacccgcataccagcaattggaagaaagcaggatccctgatcaggacacgattccgtgtcagggcattgaggtgcggaagaccatctctcacctccccatacagctgtggtgtgtggaacgaccactggacctcaagtattcctcttctgggctcaaaactcaacgtaatactagcattaacatgcagctgcccagtagggagaccaacccctactttaatagcctcgaacaaaaggatctggtcggatacagcagtactcgggccagctccgtccctattatccccagtgttggcctggaggagacttgtcttcagatgcccggcatatcggaggtgaaatccattaagtggtgcaagaactcctatagcgcagacgtggtgaatgtatcaattccagttagcgactgcctgatagcagagcagcaagaggtcaagatactcttagaaactgttcaggagcaaattcggattttgaccgatgcacgccggtcggaagattatgagcttgcgtccgtcgaaacagaggatagtgctagtgaaaatacagcgttcctgccactgtcccccacagctaaaagcgagagagaggcccagttcgtgttgcgtaacgagattcaacgtgatagcgctctgactaagtag

SEQ ID NO: 126087 - DNA, 2088 bp, synthetic construct
  misc_feature 1..2088: note = Description of Artificial Sequence: Synthetic coding sequence
  source 1..2088: mol_type = other DNA
atgagtgagggagccgcggcggcctctcccccaggcgctgcctctgctgccgctgcatcggcagaagagggcaccgccgcagccgctgccgcggctgcagcaggggggggacccgatggcggcggcgaaggtgcagcagagcctccgagagagctcagatgctctgattgcatcgtatggaatcgccagcagacttggctttgtgttgtaccccttttcattggatttattgggctgggactgagcctgatgttgcttaagtggattgttgtaggaagtgtcaaagaatatgtgcctacagatctggttgattcgaagggtatgggacaggaccctttctttctgtctaagcccagcagcttcccgaaggcaatggaaacaaccacgactactacttcaacaacctctcccgcaaccccgagtgctgggggcgctgcgtcttctcgcacaccaaaccgcatctcaacacggttgacgactatcacacgggctccaaccaggtttcccggccaccgtgtcccaatcagagcatcacctcgatcaactactgccagaaacaccgccgcacctgctaccgtgccatccaccaccgcacccttcttctcctcgtcaaccctcggatctagaccccccgtaccaggtactccttctacccaggccatgccctcatggcctacagcggcgtacgccacatcctcttacctacatgattctactccctcatggacgctctcgccttttcaggacgctgcctcttcctcctcttcctcatcctcgtccgctaccacgactacccctgagacctccacctccccaaagtttcacaccaccacgtacagtaccgagcgaagcgagcatttcaagccatgtcgggataaggacttggcttattgcctgaacgacggcgaatgttttgtgatcgagacacttactgggtctcacaagcattgccggtgtaaggagggataccagggcgtgcgatgtgaccagtttctcccgaagacggacagcatcttatctgaccccacccatattggaattattttcaccgagagcgaggaagtctaccagcgccaggtgctcagcatctcctgcatcattttcggaatcgttattgtgggcatgttttgcgctgcgttctatttcaagtccaagaagcaggccaaacagatccaagagcagttgaaagtcccccagaacggtaaatcttatagcctaaaagcctcatccacgatggcaaagagcgagaacctggtgaagtcccatgtgcagctgcagaactattcaaaagtcgaacgacaccccgtgactgccctcgagaaaatgatggagtcctctttcgtgggtccccaaagcttccccgaagtgccgtcaccagaccgagggagtcaaagtgtgaaacatcaccgttcattatctagctgctgctcacctggacagaggtccgggatgctgcaccgcaacgcattcagaagaaccccaccatcacctaggtcaagattgggtggtattgtggggcctgcttaccagcagttggaggagagtaggataccggatcaggacaccataccatgtcagggctattcgtcatccgggctgaaaacacagcgaaacacctccattaacatgcagctgccctccagggaaaccaacccttacttcaattccttggaacagaaagacctcgtggggtacagctccacaagggccagcagcgtcccgatcatcccgtctgtcggacttgaagaaacttgtttacagatgccaggcattagtgaggttaagagtatcaaatggtgcaagaattcttactccgccgacgtggtcaacgtgtctatacccgtgagcgattgtctgattgccgagcagcaggaagttaaaattcttctggagaccgttcaagaacagataagaattctaacagatgctcgacgctctgaagattatgagcttgcctccgtggagacagaggactccgctagtgagaacacggcattcctgcccctttctcctacagccaagtccgagagggaggctcaattcgtgctgagaaacgaaatccaacgcgactcggccctaaccaagtag

SEQ ID NO: 126088 - DNA, 1041 bp, synthetic construct
  misc_feature 1..1041: note = Description of Artificial Sequence: Synthetic coding sequence
  source 1..1041: mol_type = other DNA
atggagagcgaggaggtgtaccagcgacaggtgctgagcatttcctgtataattttcgggatagtgatagttgggatgttttgtgccgcattctacttcaaatccaagaaacaagctaagcagattcaggaacagttgaaggtcccccagaacggaaagagctacagcctgaaggcatcctctactatggctaaaagtgaaaacctggtgaagtcccacgtccagctgcaaaattattctaaggttgaaagacaccctgttaccgctttggagaagatgatggaaagcagctttgtggggccccaatcctttccggaagtgcctagccccgatcgcgggagccagagtgtaaaacaccacagaagtctgagttcttgctgcagtccgggccaacgctccgggatgttacatcgcaacgccttcaggcgcacgccaccctcaccaagatccaggctggggggtattgtcggtcctgcctaccagcagctggaagagtcacggatccctgaccaggatactattccctgccaagggtactcaagctctggcctcaagacacaacggaatacctctataaacatgcagttgccctccagagagacaaacccatactttaattccctggaacagaaggatcttgtgggatattctagcactagagctagctccgtgcccatcatccctagcgttggactcgaggagacatgcctgcaaatgcctggaatctccgaagtgaagtccatcaagtggtgcaagaactcatactccgcagacgtggtaaacgtgtccatccccgtgtctgactgtctgattgccgaacaacaagaggtgaaaatcctcctcgagacggttcaagagcagattagaattctcacagacgcccgcaggtctgaggattatgaactggccagcgtagaaacagaggatagtgccagcgagaataccgcttttctgcctctgagccccacggccaaaagtgaacgggaggcccaattcgtcctgaggaacgagattcagcgtgacagtgctctcactaaatag

SEQ ID NO: 126089 - DNA, 1041 bp, synthetic construct
  misc_feature 1..1041: note = Description of Artificial Sequence: Synthetic coding sequence
  source 1..1041: mol_type = other DNA
atggaaagcgaagaagtctaccaaagacaggtgctgtcgatcagttgcataatatttggcatcgtgattgtgggcatgttttgtgctgctttctactttaagtctaagaaacaggctaaacagattcaggagcagctgaaagtgccacagaatgggaaatcctatagcctgaaggcttcatctactatggccaagtccgaaaacttagtcaaatcccatgtacagctacagaactattccaaggtggagcggcaccctgtgaccgcgcttgagaaaatgatggaatcatcatttgtaggtccacaatctttccctgaggttcccagtcctgacaggggaagccagtcggtaaaacatcacaggtccctatcaagttgctgttcaccaggccaacgaagcgggatgttacaccggaatgcgtttaggagaacacctccgtcccctagatcccgcctggggggtattgtcggccctgcataccagcagctggaagaaagtcggataccagatcaagataccatcccgtgtcagggatacagctcctcaggcctcaaaacacaacggaatacctccatcaacatgcagctgcccagtcgggagaccaacccatattttaattcgctcgaacagaaagacttagtggggtattcctcaacacgcgcaagttcggtgccaattattccctccgtgggtctggaggagacatgccttcagatgcccggtatttccgaggttaagtcaataaaatggtgcaagaactcctatagcgcggatgtggttaatgtgtcaataccagtttcagattgtcttatcgccgagcagcaggaagtgaaaattttgctggagactgttcaggagcaaatcaggatcttgactgatgcccggcgaagtgaggactacgaactggcttccgtggagactgaagattcagcgtcagagaacacagcatttcttcctctttcaccgaccgccaagtccgaaagggaagcacaatttgtgctccggaatgaaattcagcgtgactcggccctgactaaatag

SEQ ID NO: 126090 - DNA, 171 bp, synthetic construct
  misc_feature 1..171: note = Description of Artificial Sequence: Synthetic coding sequence
  source 1..171: mol_type = other DNA
atgcccacggatcacgaagaaccttgcggcccaagccataaatccttctgcctgaatgggggcctctgctatgttatacccacaatccctagccccttctgcagtctgcacgaaaacgagaatgacaacaatgaggacctttatgacgatctgctgcccttgaacgagtag

SEQ ID NO: 126091 - DNA, 348 bp, synthetic construct
  misc_feature 1..348: note = Description of Artificial Sequence: Synthetic coding sequence
  source 1..348: mol_type = other DNA
atgccaacagaccacgaagaaccgtgcgggccaagtcacaaaagtttttgcctgaacggtggattgtgttatgttatccctactatcccttctcccttttgtaggtgtgtagagaactataccggcgctaggtgtgaggaggtcttcttgcccggcagtagcatccagactaaaagcaacctgtttgaagcttttgtggccctcgccgtcctggttaccctcatcatcggagccttctactttctctgccggaagggacacttccagagggccagcagcgtgcagtatgatattaacctggttgagacatcctccacctccgcccaccatagtcacgagcagcactag

SEQ ID NO: 126092 - DNA, 273 bp, synthetic construct
  misc_feature 1..273: note = Description of Artificial Sequence: Synthetic coding sequence
  source 1..273: mol_type = other DNA
atgcccactgaccacgaggagccttgtggaccctcacacaagagcttttgcttgaacggaggcctgtgctacgtgattccgactatccctagccctttctgtcgctgcgtggaaaattacactggtgcccgctgcgaggaggttttcctcccggggagctctattcagacaaagtctaacctcttcgaggccttcgtggcattggccgttttagtgacactcatcatcggagcgttctattttctgtgtcgctgtgggaacacatgtatgtag

SEQ ID NO: 126093 - DNA, 615 bp, synthetic construct
  misc_feature 1..615: note = Description of Artificial Sequence: Synthetic coding sequence
  source 1..615: mol_type = other DNA
atgatgcccagttgtaaccgatcctgctcatgcagtagaggtccatcggttgaagatggaaagtggtacggtgtccgaagctacctccatctgttttacgaggactgcgctggcacagctctctcagacgatccggagggccctccggtgctatgccctaggaggccctggccctccctttgctggaagatctccctctcgtctgggaccctgctgctcctgctaggcgtggccgcgctgacaactggctatgctgtgcctcctaagctggaaggtattggtgaaggagaatttcttgtgctggaccagagggccgcagattacaaccaagctcttgggacctgccgcctggctgggaccgccttgtgtgtggccgcgggtgtcctgctcgccatctgcctgttctgggctatgatcggttggctgtcgcaggatacgaaggcggaacctctcgatcctgaagccgattcacatgtggaagtgttcggggacgaacccgaacaacagctctcaccgatcttcaggaatgcatcaggtcagtcttggttctcgccacccgcgagcccttttggccagagttctgttcagaccattcagccgaagagggatagttag

SEQ ID NO: 126094 - DNA, 615 bp, synthetic construct
  misc_feature 1..615: note = Description of Artificial Sequence: Synthetic coding sequence
  source 1..615: mol_type = other DNA
atgatgccatcctgtaatcgatcatgcagctgtagtagaggccccagcgtggaagacggcaaatggtacggtgtacgtagctaccttcacctgttctacgaggactgcgcaggaaccgccctaagcgatgacccggagggccctccggtgctgtgtccccgtagaccttggcccagcctgtgttggaaaatctcgttatcatctggtaccctactgctgttattgggcgtagctgcactcactacgggatatgccgtgcccccaaagctcgaaggaataggagagggagaattcctagtgctcgaccaaagagctgccgactacaaccaggcgctggggacatgcagactggccggaaccgcgctttgtgttgccgctggagttttgttggccatttgcctgttttgggctatgattggctggctctctcaggacacaaaagcagagcccctcgatccagaggccgattcccatgtggaagtgttcggcgacgaaccagagcagcagttatcacccatttttaggaacgcctcaggtcaatcatggttttctccccctgccagcccgttcggacaatcctcagtgcaaaccattcagccaaagagggacagctag

SEQ ID NO: 126095 - DNA, 1329 bp, synthetic construct
  misc_feature 1..1329: note = Description of Artificial Sequence: Synthetic coding sequence
  source 1..1329: mol_type = other DNA
atgtaccagagaatgctccgatgtggtgcggagctggggtcacccgggggcggcggtggcggtgggggtggcggaggtgcgggaggcaggcttgcattgctctggatagtaccgctaaccctgtcgggcctgctgggagtagcttggggagcctctagcttaggggcccatcatattcaccattttcacggaagcagcaaacatcactcagtgcccatcgccatatatcggagcccagcctccctccgcggcggacacgctggtacaacttacatcttctccaagggtggcggtcagattacatacaaatggcctcccaacgatagaccaagcacccgagccgacaggctcgctatcggattcagcaccgtgcagaaggaagctgtcttagtgcgggtggactcttcatctggccttggtgactatcttgagctgcatatccatcagggcaaaattggcgtcaagttcaatgtaggtactgatgacatcgctattgaggaaagcaatgcaatcatcaatgacggcaagtatcacgtcgttcgttttacccgctccggaggaaacgctactctgcaggtggacagctggccagtgatagaacgatacccagcaggtcggcaattgaccattttcaactcacaggctactatcattattggtggaaaagaacaggggcagcccttccaggggcagcttagtggcctctactataatggcctgaaagtccttaatatggcagccgagaacgatgcaaatatcgcgattgtaggaaacgtgcgccttgtgggagaagtgcccagcagcatgaccacagagtcgacggcaaccgctatgcagagcgaaatgtcaacctcgatcatggagactacaacaaccctcgcaacaagcaccgcgagacgcggaaagccacctacgaaggaaccaatctcccaaacaaccgatgacattttggtggcctctgccgaatgtccttccgatgatgaggacatcgatccttgtgaaccatcttctggggggctggctaatcccaccagggcagggggtcgggaaccatacccaggtagtgccgaagtgatcagggaatcctcgtcaacaaccggtatggttgtcgggatcgtggctgcagcggcgctgtgcattttgatcctgctgtacgccatgtataaatatagaaacagagacgaggggtcctaccacgttgacgagtcaaggaactatatctcgaacagtgcccagtctaacggggccgtggtgaaagaaaaacagccctcatctgctaagagcagcaataagaataagaaaaacaaagacaaagaatactatgtgtag

SEQ ID NO: 126096 - DNA, 4524 bp, synthetic construct
  misc_feature 1..4524: note = Description of Artificial Sequence: Synthetic coding sequence
  source 1..4524: mol_type = other DNA
atgggcaccgccttactccaacgcggaggctgcttcctcctctgtctatcactacttctcctgggttgttgggctgagttgggatccggacttgagtttccaggggccgaaggccagtggacgcggtttcctaagtggaatgcctgttgtgaatccgaaatgagcttccagctcaaaactagatcagcccgtggacttgtactgtacttcgatgatgagggtttctgtgactttttagagcttatactcacgagaggcggcaggctccagctttcattctcaatcttttgtgctgagcccgctaccctccttgctgacacaccggtaaacgatggcgcatggcactccgtccggatccgtcggcagtttcggaacacgactctttttatcgatcaagtggaggctaaatgggtggaagtgaagtcaaagaggcgcgatatgacagtgttttccggattatttgtgggaggcctaccacctgaactgcgagcggcggcattgaaattaactctggcgagcgtacgcgagcgcgaaccgtttaagggatggataagagacgtgcgggtgaacagcagccaggtgctgcccgtggatagcggcgaggttaagctggatgatgagcctcccaacagtggaggtggatccccgtgcgaggcaggggaggaaggggaagggggggtatgcctcaatggaggcgtctgctccgtcgtcgatgaccaagcagtctgcgactgctcaagaactggatttcgcggcaaggactgcagccaggaagacaacaacgtggaagggcttgcccacctgatgatgggggatcagggtaagagcaaagggaaagaggagtatattgctacgttcaagggtagcgagtacttctgctacgaccttagccagaatcctatacaatcttcatctgacgagataactttgtctttcaagacccttcaaagaaacggtcttatgctgcacactgggaagagtgccgattatgtgaatttggctctgaagaacggagcagtgagcttggtgataaacctgggaagtggggctttcgaggctctagtcgaaccagtaaatggcaaatttaatgataacgcgtggcatgatgtaaaagtgacccggaatcttcgacagcatagtgggatcgggcacgcgatggtgaccatctctgttgatggcatcctgaccacaacaggttatacacaggaagactacacaatgcttgggagcgatgacttcttttatgttggcggaagtccctcgacagccgacctcccaggatctccagtctcaaataactttatgggctgcctcaaggaagtggtttataagaacaacgacgtgcggctggagctctctcgcctcgccaagcagggtgatccaaaaatgaagatacacggcgtcgtggctttcaaatgtgaaaacgtagccacattggatccaatcaccttcgaaacccccgagtcctttattagcctgcccaagtggaacgccaaaaagacaggatccattagcttcgacttccgaacaactgagcccaacggactgattttgttttctcacggcaaaccacggcaccaaaaggacgctaagcaccctcaaatgataaaggtggactttttcgcaatcgagatgctcgacggccacctatacttattgctagatatgggtagtggcactatcaagatcaaagccctcctgaaaaaagtgaacgacggtgagtggtaccatgtggactttcagcgcgacggtaggagcggaaccattagcgtaaataccttgcgaacgccttataccgcccctggagaaagcgagatcttagacctcgacgacgagctctaccttggcggactgccagagaataaggccggcttagtgttcccaacagaggtatggacagctctactgaattatgggtacgtgggatgcatcagggacttatttatcgacgggcagtctaaggacatcagacaaatggccgaggtgcagagcaccgccggcgtgaaaccctcttgtagtaaggaaacagccaaaccttgtctcagtaatccgtgtaaaaataacggcatgtgtagggatggctggaaccgttatgtatgtgactgtagtggaaccggctacctggggaggtcttgtgagagagaagccactgttctgtcatacgatggctcaatgtttatgaaaatccagctgccggtcgtcatgcacacagaagctgaagatgttagtctcagattccgcagccagcgggcctatggcattctgatggcaacgaccagccgcgacagcgccgatactctgcggctcgaacttgatgccggtcgggtgaaacttacagtgaatctggactgcatacgcattaattgtaatagctccaaagggcctgagactctgttcgccggctataatttgaatgataatgaatggcatactgtgagagtagtcagaaggggtaagagtctgaaactgaccgttgacgatcaacaggcaatgaccggccaaatggctggggatcatacacgcctggaattccacaatatcgaaacagggataattacagaaagaagatatctgagcagtgtcccaagcaattttatcggacacctccagtcgctgacgttcaatgggatggcctacattgatttgtgtaaaaatggggatatagattactgcgagttgaacgcaaggttcggattccgaaatatcatcgcagaccccgtgacattcaagaccaaatccagttatgtggccctggcaactcttcaggcctatacttccatgcatctgttcttccaattcaaaactacaagcctggacggtttgatcctgtacaactctggtgacggaaacgattttatcgttgtggaactcgtgaaggggtacttacactacgtcttcgatctcggcaatggggcgaacctaattaaggggtctagcaataagcctctgaacgataaccagtggcataacgtgatgataagccgggatacctctaacttacacacagtgaaaatcgatactaaaattacaactcaaattaccgccggcgcgcggaatttggacctgaaaagtgacttgtacattggaggggtcgcaaaagaaacctataagtctcttccgaagctggtacacgcaaaggagggtttccagggatgtttggcatcagtggacctaaacggacggctccctgatctcataagtgacgcattgttttgtaacgggcagatagaacgagggtgtgaggggcccagtacaacctgtcaggaagactcttgcagcaaccagggtgtatgtctgcagcaatgggatggattcagctgcgattgttccatgacttctttttctgggcccttgtgtaatgaccccggaactacctacatcttttctaaagggggagggcagattacttacaaatggcccccaaatgaccgcccctctacccgagcagacagattggccatcggcttttccaccgtgcagaaggaagctgtccttgtgcgcgtggatagcagctcgggactgggggattacctggaactgcatatacatcagggcaaaataggcgtgaagtttaatgtaggaaccgatgacatcgccattgaggaatctaatgccattataaacgacggaaagtatcacgttgtgaggttcacccgatctgggggaaatgccacactgcaagtcgactcctggccagtgattgagcgatatccagctggtaacaatgataatgaaagattggctattgctagacaaaggatcccctatcgacttggccgggtggtggacgagtggctcctcgataagggtaggcagctgacaatcttcaacagtcaggccaccatcatcatcggaggaaaggagcaaggacaacccttccaaggccagctgtccggcctatattataacggcttgaaggtacttaatatggctgcagaaaatgatgccaatattgcgatagtgggcaacgtgcgacttgtgggagaggtccccagctctatgacaaccgagagtaccgccaccgctatgcaaagcgaaatgtctacctctatcatggaaacaacgactaccctggcgacttccaccgcccgacggggcaaaccgccaactaaggagcctatttctcagaccacagatgacatcctggtggcatctgctgagtgcccctccgacgatgaggacatagatccgtgtgaaccaagctcaggcggactggccaacccaactcgggcggggggaagggaaccatatccgggctctgctgaggtcatcagagaaagtagctctaccactggtatggtggtggggatagtggccgcagctgctttgtgtatcctgattctgctgtatgctatgtacaagtacagaaaccgggatgaggggtcctaccacgttgatgagagtcggaattacatcagcaacagcgcacaatcaaacggagccgtcgtgaaggagaagcagcctagcagtgctaaaagctccaacaaaaataaaaagaataaagacaaagaatactacgtgtag

SEQ ID NO: 126097 - DNA, 1488 bp, synthetic construct
  misc_feature 1..1488: note = Description of Artificial Sequence: Synthetic coding sequence
  source 1..1488: mol_type = other DNA
atgatctcccgagacacttctaatctccacactgtgaaaatcgacactaagatcaccacacaaattactgcgggagccagaaatctggacctgaaatccgacctgtatatcggtggcgtcgctaaggagacatacaagagcttacccaagcttgtgcatgccaaggaagggttccagggttgtctggcatccgtggatctcaacggcaggctacccgatctcatctccgacgcactgttttgtaacggacagatcgagcgtggctgtgaagtggctttaatgaaggctgatctacagggacctagtacgacatgtcaggaagatagctgttcgaaccagggcgtatgtttgcaacagtgggatggtttttcctgcgattgttctatgacttcgttcagcgggccactgtgcaatgaccccggtactacttacatattttccaaaggagggggccagatcacatataagtggcctcctaatgaccgacccagcaccagagccgatcgactggctattgggtttagcacagtgcagaaggaagccgtgctggtgagggttgacagtagttcgggtttaggtgactatctagaattacacatccaccagggaaaaattggcgtcaaattcaacgtcggcacagatgacatagctatcgaggagagcaatgccataattaatgacggaaaataccatgtggtgaggtttacaaggagtggtggcaacgctactctgcaggttgacagctggccggtgatcgagaggtatccagcaggcaggcaactcaccattttcaatagtcaggccaccattattatcgggggcaaagagcagggacagccatttcaaggacagctatctggtctctactataatggcctgaaagtgctgaacatggccgccgaaaatgacgccaatatagcaatcgtcgggaacgtgaggcttgtaggcgaggtgccctcctcaatgactaccgaatcaacagcaacggccatgcagagcgaaatgagcacctccattatggagaccacaactacactagctacaagtaccgctcgtagaggcaaaccgccgactaaagaacctatttcccagaccactgatgatattctcgttgctagtgcagaatgtccaagcgatgatgaggatatcgacccgtgcgaaccatctagtggcgggctcgccaatcccacgcgtgccggtggacgggagccttaccccggcagcgcagaagtgatccgcgaatcgtccagcacaaccggcatggttgtggggatcgtcgcagccgctgcactctgtatcctgatcctgttgtatgccatgtacaaatataggaatcgagatgaggggagttaccacgttgacgaatcaaggaactacatctctaatagcgctcagtcaaacggagccgtcgtgaaggaaaagcagccatcatccgccaaaagcagtaataaaaacaagaaaaataaggataaggagtactatgtctag

SEQ ID NO: 126098 - DNA, 4500 bp, synthetic construct
  misc_feature 1..4500: note = Description of Artificial Sequence: Synthetic coding sequence
  source 1..4500: mol_type = other DNA
atgggcacagccctccttcagaggggcgggtgtttcttgttatgtctgagcttgctgctgctcggctgctgggctgaactggggtctggacttgagtttcccggagcggaaggacaatggacccgcttcccgaaatggaacgcttgttgtgaatcagagatgtcgttccagcttaaaacgcggagcgcacgaggtctcgtcctatactttgacgatgaagggttttgtgatttcctggagctgatactgacccgcggaggccgccttcagttgtcattttcaatattttgcgctgaacctgctactctgctagccgatacccccgtgaacgatggtgcttggcactccgtccggatccgcaggcagttccgcaataccacactgtttatcgaccaagttgaggcaaagtgggtggaagtgaagtctaagcgcagggacatgaccgtttttagcgggctatttgttggggggctgccaccggaactgcgggctgcggccttaaaactcacacttgcttctgtgcgggagagagaaccgttcaaggggtggatacgggatgtgcgggtcaattcttcacaagtgctccccgtcgacagcggtgaggtcaaactcgacgacgaaccgcctaactccggcgggggctctccttgtgaggccggggaagagggcgaggggggtgtctgcctgaacggaggtgtgtgtagcgtggttgacgaccaggccgtttgtgattgctctcgcactggtttccgggggaaggattgttcgcaagctgacacgaacttggagggcctggctcacctgatgatgggagatcaggcgaagagcaaaagaaaggaagagtacattgccacgtttaagggttctgaatacttttgctacgacttgtctcagaatcctatccagagttcttctgacgagatcactctcagtttcaaaacactgcaaagaaacgggctaatgctccatacaggcaagagtgcagactacgttaatctcgcattgaaaaacggggcggtttctctcgtgatcaatctgggtagcggggcattcgaagctctcgtggagccagtcaatggtaagttcaatgacaacgcctggcatgacgtgaaggtgacacggaacctgcgacaggtcactataagtgtggatggcatactgaccactactgggtatacccaggaggattatacgatgctaggaagcgatgatttcttctacgttggtggtagcccatctactgctgacctccctggatcccccgtctctaataatttcatgggttgcctgaaggaagtggtctacaagaataatgacgtccggctcgagctatctcgattagccaagcagggagacccgaaaatgaaaatacatggggtggtggcgtttaagtgtgagaatgtggcaaccctggaccctattacatttgagaccccggagtcatttatcagcttgccaaagtggaatgccaaaaagacaggctctattagcttcgactttcggactacagaaccaaacggccttatcctgttctcacatggaaagcctcggcatcaaaaggatgccaaacacccccaaatgattaaagtggattttttcgccattgagatgctcgacggtcacctgtatctgcttctggacatggggtctgggaccattaagattaaagccctgctcaagaaggttaatgacggggaatggtaccacgtcgactttcaacgagacggacggagtggcaccatcagcgtgaacaccttgagaacaccatataccgcgccgggtgagtcagaaatcctcgacttggacgacgaactgtacctcggggggctcccagaaaataaggcgggcctggtgtttcccaccgaagtttggacggctttgctcaattatggttacgttggttgtattagggatttgttcattgacggacaaagtaaggacattagacaaatggcagaggtccagtcaacggccggggtgaagcctagctgctctaaagaaaccgccaagccatgcttatccaacccttgtaagaacaacggcatgtgtcgagacggctggaatcgctacgtctgcgactgctccggaacaggataccttggcagaagctgcgagagagaagctactgtgctctcctacgatggcagtatgttcatgaagattcagttgcccgtggtgatgcacacagaagcagaggacgtgagcctcaggttcaggagtcaaagggcctatggtatactcatggctacaacctctcgagactccgccgacactctccggcttgagcttgatgctgggcgggtaaagcttaccgtgaatctggactgtatcaggattaattgcaacagctcaaagggcccagaaacactttttgcgggctacaaccttaacgacaacgagtggcatacagtcagagtggtgagacggggaaagtccctcaagctgacggtcgacgatcaacaggctatgacaggacagatggctggggatcatacacggctcgagttccacaatatagagaccggcattattactgagcgccggtacctgtccagcgtgccttccaactttatagggcatctgcaaagcctcacatttaacggaatggcttacatcgatctctgtaagaacggcgatatcgattactgtgagctgaacgccaggtttggtttccggaatataatagccgaccctgttacattcaaaacgaagtctagctatgttgccctggccacgctccaggcctacacctctatgcatcttttcttccaattcaagacgacaagtctggatggcctcatcctgtacaattctggggacggcaacgacttcattgtagtcgaactggtgaagggctatctccactacgtttttgacctgggaaatggcgcgaacttgatcaagggaagcagtaacaaacccctcaacgataaccagtggcataacgttatgatctcaagggatacttcaaacctgcacacagtgaaaatcgacacgaaaattacaactcagataactgccggcgcccgcaatctggatctgaagtctgacctttatatcggtggggtcgctaaagagacctacaagagtcttcccaagctcgtgcacgcaaaagagggattccaggggtgtctggcatccgtggacctgaatgggcggctgcccgatctcatttctgatgctctattctgtaacgggcaaatagaacgaggatgtgaaggcccttcaacaacctgccaggaggacagttgcagcaatcaaggcgtctgtttacaacaatgggacggattttcgtgcgattgtagtatgacttcattctctgggcccctgtgtaacgatccgggcacgacttacattttttcaaaagggggggggcaaatcacatacaagtggccgcccaacgatcggccttccacacgagccgaccgcctcgcaattgggttttcgacggttcagaaagaggccgttctggtgcgtgtggattcttcgagtggtctcggcgactacctggaattgcacatccatcagggcaaaattggggtgaagttcaatgtgggtacggatgacattgccatcgaggagagtaatgcgataatcaacgacggaaaataccacgtggtccgattcacaagatcaggcggtaacgcaaccttgcaggtggattcatggcctgtgatcgagcgataccccgccggtaacaatgataacgaaagactcgctatcgcgcgccaacggattccctataggttgggacgggtcgtggacgagtggctgctagacaagggccgacagctgacaattttcaatagtcaggctaccatcatcataggggggaaggaacagggccagccatttcagggtcagctctccggtctgtactataacggtctgaaagtcttgaacatggcggctgaaaacgacgccaacatagccatagtgggcaacgttcgacttgtgggcgaagtccccagctcaatgaccactgaaagcactgccacagccatgcaaagcgaaatgtccacgagcataatggagaccacaaccacgcttgctactagcacggctcgcaggggaaagcccccaactaaggagcctatcagtcagactacagatgatattttagtcgcttcagcagagtgcccatccgacgacgaggatattgatccttgtgaaccttcgagtggcggacttgccaatcctactagggccggaggccgggagccctacccagggtcagccgaagtcatacgtgaatcatccagtactaccggtatggtcgtcggcattgtcgccgcagctgctctatgcattcttattctgctgtacgctatgtacaaatatcggaatagggatgagggatcttaccacgtcgatgaaagccgaaactatatatccaatagtgcccagagtaacggggccgttgtcaaagaaaagcagccctcctcagctaagagctcaaacaagaataagaagaataaagacaaagagtattatgtgtag

SEQ ID NO: 126099 - DNA, 4644 bp, synthetic construct
  misc_feature 1..4644: note = Description of Artificial Sequence: Synthetic coding sequence
  source 1..4644: mol_type = other DNA
atgggcaccgccttacttcagcggggcggatgctttctcttgtgtctgagcctgctcctgttgggatgttgggcagagttgggttctggcctcgagtttccaggggctgagggacagtggacaaggttccccaaatggaatgcatgctgtgaatccgagatgtccttccagctaaagacaaggagcgcaaggggcctggtactatactttgacgacgaagggttttgtgactttctcgagttaatcctcacacgaggagggaggttgcaactgtcctttagcatattctgcgcagagcccgctaccctgctggctgacactcccgtcaacgatggcgcctggcatagtgtgcggatccgcaggcagttccgtaataccacactcttcatagatcaagtggaggccaaatgggttgaggtgaaatccaagagaagagatatgactgtgttttcaggtctttttgtcggcggtctcccccctgagctgcgggctgccgccttgaagctgaccctggcaagcgttagggaaagagagccgttcaaagggtggattcgggacgttagagtcaactcaagccaggtgctgccagttgattcaggagaggttaaactggacgatgaaccccctaactcaggtggaggctcaccctgcgaagctggagaggaaggcgagggcggggtatgtttgaacggcggcgtttgttcagtggtggacgatcaggccgtatgtgactgtagccggactggcttccgaggaaaggattgttcacaagaaatcaaatttggactccagtgtgtgctccccgttttgcttcatgataacgaccagggaaaatactgttgtatcaacacagctaagccccttactgagaaagacaacaatgtagaagggttggcacatctgatgatgggagatcaagggaaaagcaaaggaaaagaagaatacatcgctacattcaaaggcagcgaatatttttgttacgatctgtctcagaaccccatccagtcaagctctgatgagattactctctcgtttaagaccttgcaaagaaacggactgatgctgcacacgggcaaaagcgcagactatgtcaaccttgctctcaaaaatggggccgtttcgctggttatcaacctgggctcaggcgcctttgaagccttggtagagcccgtgaacggaaaattcaacgacaacgcatggcatgatgtgaaagtgactcgcaatctgcgccagcacagcggtataggccatgccatggtaaataagctgcattgttctgttacaattagcgttgacggaatcctgactaccacagggtacacacaggaggactacacgatgctcggatcagacgactttttctatgtggggggctcaccatcaaccgccgacctgccaggctcaccagtgtctaataattttatgggctgtctgaaagaggtagtctataagaacaacgatgtaagactggagctgtcaagacttgccaagcagggcgacccaaaaatgaaaattcatggagtggtggcattcaagtgtgagaacgtggcaactctggatccaatcacattcgaaacacctgaatcattcatctctctgcctaagtggaatgctaaaaaaacgggtagtattagctttgacttcaggacaactgaacctaacggcctaatcctcttttcccacggcaagccacggcatcaaaaagatgccaagcatccacagatgattaaggtcgatttctttgccatcgagatgcttgatggccacctgtatctgctgctggatatgggaagcgggactatcaagatcaaagctttgttgaagaaggtaaatgacggtgaatggtaccatgtggactttcagcgggacggtcgaagcggtacaatcagcgtaaacacgcttagaaccccctacaccgcccctggggaatctgaaattctcgatctggatgatgagctgtacctgggcggcctccccgaaaataaagctgggctggttttccctaccgaggtctggactgctctgctcaactatggctacgtcggctgcattcgggatctgttcattgatggacagagcaaagatattaggcagatggccgaggtccagtccacagctggcgtcaagcctagctgcagcaaagaaacagccaagccttgcctctccaatccctgtaagaacaacggaatgtgccgggacggctggaatcgctacgtttgtgactgctctggcaccggttatctgggaaggtcatgcgagagagaggccactgtgttatcttacgatggaagtatgttcatgaaaatccagcttccagtcgtgatgcacacagaggccgaagatgtgagtctgcggtttagatcacagcgcgcgtacggaatcctaatggcgaccacaagtcgcgactcagccgacacacttcgcctggagcttgacgccggaagagttaagctcacagtgaacttagattgcatcagaattaattgcaactcatctaaggggcctgagacgttgttcgcagggtacaatttgaacgacaacgaatggcacacggtgagagtagtgcgccggggcaagtctctgaagcttacagtcgacgatcagcaagcaatgaccgggcagatggcaggcgaccatactcgtctcgaattccataacatcgagacgggtatcatcacagagcggcggtatctgagcagcgtgcctagcaacttcattgggcacctgcagagtctgaccttcaatggcatggcgtacattgacctgtgcaagaatggagatatcgattactgcgagctcaatgccagattcggattcagaaacattatcgccgaccccgttacattcaagaccaaatcttcctatgtggcactggccacacttcaggcctacacatccatgcacttgtttttccagtttaagactactagcctggatgggctgatcctgtacaactccggcgatggaaacgactttatcgttgtagaactggtaaagggatacctccattatgtcttcgatctggggaacggagctaatctgatcaaaggcagcagtaacaagccactcaatgataatcagtggcacaatgtgatgattagcagagacacgtctaatttgcataccgtgaagatcgacacaaagatcactacccaaattactgctggtgcccggaaccttgacctgaaaagtgatttgtacatcggcggcgtcgcaaaggagacttacaaatctttaccaaaacttgtgcatgccaaagaggggttccagggctgcctggctagcgtagaccttaatgggcggctgcccgacctcatctcagacgctctgttttgcaacggccagatcgaacggggatgcgaaggaccttcaacaacttgtcaagaagactcttgcagcaatcagggggtctgccttcagcaatgggatggatttagttgcgattgctctatgacctcttttagcgggcccctgtgtaatgaccccggaactacttatatcttctccaaaggaggcggccagatcacatataaatggccccctaacgatcgaccatccacccgggctgaccgccttgcgattggcttcagtacagtgcagaaggaggcagtcttagtccgagtggattcctcaagtggcttgggggactatctggagctccacatacatcaagggaagatcggcgtgaagttcaatgttgggacagatgacatcgcaattgaggagagcaacgccatcattaacgatggcaaataccacgtggtgaggtttactaggagcggagggaatgccaccctccaggtggatagttggccagtgatcgagaggtatccagctgggaataatgacaacgaacgtctagccattgcccgccaaaggataccctatcgtcttggcagggtagttgacgagtggttgctcgataagggccgccaactaacaattttcaactcccaggccactatcataatcggcggcaaggaacaagggcagcccttccagggtcagctgtctggactgtattacaacggcctgaaagtgttgaacatggcagctgagaacgacgccaatatagccatcgtcggcaacgttaggctcgtcggagaagtcccttccagtatgaccacagaaagtacagcaaccgccatgcaaagtgagatgtcaactagtatcatggagaccaccaccactctggccacatcaactgccagacgcggaaaacccccaacaaaagagcccataagccagaccacagatgacatcttggtcgcaagtgctgagtgtccctctgacgatgaggatatcgatccatgcgagcccagctcaggaggcttagccaaccccacacgcgctggaggacgtgaaccttacccaggatctgctgaagttattagagagtcctcaagtacaactggaatggtagtgggcatcgtcgctgccgccgcgttatgtatcctgattctgttgtacgccatgtacaagtaccggaacagggacgaaggaagttaccacgttgatgagtcaaggaactacatctctaactcggcacaaagcaacggcgccgttgtgaaggagaaacagccgagttctgccaagagcagtaataagaataagaagaacaaagacaaagagtactatgtatag

SEQ ID NO: 126100 - DNA, 4434 bp, synthetic construct
  misc_feature 1..4434: note = Description of Artificial Sequence: Synthetic coding sequence
  source 1..4434: mol_type = other DNA
atgggtaccgccctcctgcagagagggggctgtttcctgctgtgtctatcattactactcctcggttgttgggctgagcttgggagcgggttagaattccccggagcagaaggccagtggactcgctttcctaagtggaatgcatgctgcgaatctgaaatgtcgttccaactgaagactagatcagcacgggggctggtgctgtatttcgacgatgaaggcttctgcgactttctggaattgatattaaccagaggagggcgtcttcagctgagtttcagcattttttgtgccgagccagcaaccctcttagcggatactcccgttaacgacggagcatggcactctgtgaggattcgacgccagttcaggaacactaccctgtttattgaccaggtggaggctaaatgggttgaagtcaaatccaagagacgcgatatgactgtgttctcgggactgtttgtaggtggcctgccgcctgaactccgcgcagccgcactcaagcttactctcgcatctgtcagagaaagagagccatttaagggctggattagagacgtgcgtgtgaattcctcccaagtactgccggtcgactccggagaggtgaaactggatgatgaaccacctaactcgggcgggggaagcccctgtgaagctggggaggagggcgagggaggcgtgtgtctaaatggcggcgtctgcagcgtcgttgacgaccaggcggtatgcgattgctcgcgcaccgggtttcgaggcaaagactgctcccaggaggacaataacgtggagggtcttgcccatctgatgatgggtgaccaaggcaaatcaaaaggaaaagaagagtacatcgctacctttaagggctccgagtatttctgctatgacctttcgcagaatcctatacagagctccagcgatgagattactctgtccttcaagactctgcagaggaacggtctaatgctgcacacaggaaaatcagccgactacgtgaatctggccctgaaaaatggggcagtgagtttagtaataaacctggggtctggcgcattcgaagcactcgtggagccggtgaacgggaagtttaatgacaatgcatggcacgatgtgaaagtcacccgcaatcttcggcagcactcgggcattgggcacgccatggtgacaatttccgtggacgggattctgaccaccaccgggtacacacaagaggattatactatgctggggagcgacgactttttctatgttggtggaagcccgagtaccgctgacttacccggttcaccagtgtcaaacaatttcatgggatgcctcaaggaagtggtctataagaacaacgatgtaaggctggaattaagtcgcctggcaaagcagggcgatccgaagatgaagattcatggagtggtggcatttaaatgtgagaatgtagccaccctcgaccctataacatttgagacaccagagtcttttatcagtctgccgaagtggaatgccaagaaaaccggttctatctcatttgatttccgcacaactgagcctaatggcctcattctttttagccatggtaaaccccggcatcagaaggacgcgaaacacccgcagatgatcaaggtagactttttcgccatcgagatgctggatggacacctgtatctgctcctggatatgggctcggggacaattaagatcaaggccttattaaagaaagtgaatgatggggagtggtaccacgtggattttcagagagacggccgctccggcactatttctgttaatactcttagaaccccttatacagcacctggggaaagtgagatcttggacctggacgatgaattgtatctggggggtctccccgaaaacaaagcaggccttgtgtttccaacagaagtgtggacggctctacttaattatggatacgtcggatgcatcagagatctgtttattgacggtcaatctaaagacatccggcagatggccgaggtgcagtctactgctggcgttaaaccaagttgttctaaagagacagctaagccttgtcttagtaacccctgtaaaaacaacggcatgtgccgggacggctggaacagatacgtttgtgattgttcgggaacagggtatctgggaagatcttgtgaaagggaggctactgtgctgtcttatgatggctcgatgtttatgaaaattcagttgccagtggtgatgcatactgaagccgaagatgtttccctgaggtttcgcagtcagcgggcgtatgggatactcatggccactacttcccgggattccgccgacactttgcgtctggagctggacgctgggagagtgaagttaacagtgaatttggattgtattagaattaattgtaatagctccaagggccctgagactctcttcgctgggtacaacttgaacgacaatgagtggcataccgtacgcgtggtgcgacgcggaaagagcctcaaactgactgtagacgatcagcaggccatgaccggtcagatggccggcgaccacaccaggttggaattccacaatatagaaaccggaatcattacagaaaggcgctacctgagcagcgtgccatctaattttatcggtcacttgcagagcctgaccttcaatggaatggcctatattgatctgtgtaaaaacggcgacatagactactgcgagttgaatgcacgcttcggcttccgcaatatcatcgctgaccctgtcacatttaagacaaagtcctcgtatgtcgcgctggccaccttacaagcctatacctcaatgcacctgttttttcagttcaagaccacctcattggacggcctgattttatacaactctggcgacggcaacgattttatcgtggtggagcttgttaaaggctatctccactacgtcttcgacttagggaacggggctaaccttattaagggaagttccaataagcctttgaatgacaaccagtggcataacgtgatgatatcgagagacactagcaacctccataccgtaaagatcgatactaagatcaccacacagataacggccggggcccggaatctcgacctgaaatccgacctttacattggaggcgtcgctaaagagacctataagtctcttcccaagctcgtccacgccaaggagggtttccagggctgcttagcatctgtggatctcaacggccgtctgccagacttaattagcgatgcccttttctgcaacggccagattgagcgaggatgtgagggcccctctaccacctgccaggaagattcttgcagcaatcaaggggtgtgcttgcagcagtgggatgggttttcttgcgactgctccatgacatccttttcgggtcccttgtgtaacgatcccggcactacctacatcttctctaaaggtggaggccaaatcacatacaagtggccgcccaatgacagacccagcacccgcgctgacagacttgctatcgggttctccaccgtgcagaaggaggccgtactcgtgcgggttgattcgtcatctgggctaggtgactatttggaactgcacatccatcagggtaagataggcgtgaagtttaatgtgggcactgatgatatcgcgatcgaggagtccaatgccatcatcaatgacgggaagtaccatgtcgtgaggtttacacgcagcggcggtaacgcaactctgcaagtggatagctggccggtaatcgagcggtacccagcaggcagacagctaactatctttaactcacaggcgacaatcatcatcggggggaaggagcagggccagcccttccaggggcagctgtccgggctttactataatggcctgaaggtgttgaatatggccgccgagaatgacgctaacattgccatagtcgggaacgtgaggcttgttggcgaagtaccctcgagcatgactaccgaatctacggctactgccatgcagtctgaaatgagtaccagtatcatggagacaactacaacgttagccaccagtacagccagaagggggaagccaccaacaaaggagccgattagccagacaaccgacgatatcttagtcgcatccgccgaatgtccgtctgacgacgaggatatcgacccttgcgagccatcctccggagggcttgcgaaccccactcgggcgggaggcagagagccttatcctgggagcgccgaagtaatacgggagagctcaagtaccactggaatggttgtggggatcgttgccgcagccgcattatgcattcttattctgctgtatgccatgtacaagtatcggaacagagacgagggatcttaccacgtggatgagagccggaactacatctcaaacagcgcacagtcaaatggtgcagttgttaaggaaaagcagcccagcagcgccaaatcttctaataagaataagaagaacaaggataaagaatactacgtctag

SEQ ID NO: 126101 - DNA, 4434 bp, synthetic construct
  misc_feature 1..4434: note = Description of Artificial Sequence: Synthetic coding sequence
  source 1..4434: mol_type = other DNA
atgggtactgctctgctccagaggggcggatgtttccttttatgtttaagtctactgctgctggggtgctgggctgaactcggttccgggcttgaattccctggtgcggagggacagtggacacgcttcccaaaatggaacgcttgttgtgaaagcgaaatgtctttccagctcaagactcggtctgccaggggcctggtgctctatttcgacgatgagggattctgtgatttcctggagctgatattgaccaggggcggacgcctccagctatcttttagtatcttttgcgcagaacccgccactctgcttgcggacacaccagtcaatgatggagcttggcatagtgtacgcattcgcaggcagtttcgcaatactacactgttcatcgaccaggttgaagcaaagtgggtagaggtcaagtctaagcggcgcgatatgacggtgtttagtggactctttgttggcggactgccaccagagttgcgcgccgcagcccttaaactgactctcgcctcagtgagagagagagaacccttcaaagggtggatcagggatgtgagagtaaatagttctcaggtcctcccagtagacagcggggaggttaagttagatgacgaacccccaaacagtggcggcggatctccctgtgaggcgggtgaggaaggggaaggcggagtgtgtctgaatggcggggtctgcagcgtggtcgatgatcaggccgtgtgcgattgctcaaggaccggattcagaggaaaggattgctcccaggccgacaccaacctcgaggggctcgcccacctaatgatgggcgaccaggcaaagagcaagaggaaagaagagtacatcgccactttcaaaggctcggaatatttctgctacgatctctcccaaaacccaattcaatcttcatctgatgagatcaccctgagctttaaaaccctacagcgcaacggcctcatgttacatactgggaaatccgctgattatgtaaacttggcactgaagaatggcgccgtatctctcgtgatcaacttggggtccggagcctttgaggctcttgtcgaaccagtaaatggaaagttcaatgataatgcctggcatgacgtgaaggtgacacgcaatctgcgccagcatagcggtatcggacatgcaatggtcaccatcagtgtggacggaattcttacgactacaggatacacacaggaagactataccatgttgggcagtgacgactttttttacgtgggcggttctccatcaacagccgacttaccggggtcgcccgtgtccaacaatttcatgggttgtctgaaggaggtggtgtacaagaacaacgatgtgcgcttagagttgtctcggttggccaaacagggtgaccccaagatgaagattcacggggtggtagcatttaaatgcgaaaatgtggctaccctcgaccccattacattcgagacaccagaatccttcatcagcctgcctaagtggaatgccaaaaaaaccggtagcatctccttcgattttcgtaccaccgagcctaatgggctcatactgttcagccatggcaaacccaggcaccagaaggacgccaaacacccgcagatgattaaggtagacttctttgcgatagaaatgcttgacgggcatctttatctgcttttggacatgggttctgggaccattaaaatcaaggccctccttaagaaagtcaacgatggcgaatggtatcacgtggacttccaaagggatggccggagtggcacaatctctgtgaatacactgcgcacaccatacacagctccaggcgaaagtgagatcctagacctcgatgacgaactatacttaggcgggctacccgaaaataaggctggccttgtcttcccgactgaagtgtggaccgccctgctgaattatggctacgtcgggtgcattagggacctctttatagatggtcaaagtaaagacataaggcagatggcagaagtgcaatccactgccggcgtcaaacccagctgcagcaaggaaaccgctaagccctgtctaagcaatccatgtaaaaataacgggatgtgccgggacggctggaatcggtacgtgtgtgactgctctgggactggttatttgggacggagctgcgagcgagaggccaccgtcctgagttacgatggctctatgtttatgaagatccagttacctgtcgtcatgcataccgaagctgaagacgtatctctccgctttcgctcccagcgggcctacggtattctcatggcgactaccagtagagactctgcggatacattaaggcttgagttggatgcaggccgcgtgaagctgacggtcaatcttgactgtatacgaatcaattgtaacagctccaagggacccgaaactctgtttgccggctacaatctcaacgataatgaatggcataccgtccgagtggtcagacgtgggaagagcttaaagctgactgtggacgatcagcaggctatgaccggtcagatggcgggcgaccacactcggctcgagttccataacattgaaaccggaattattacagagcggcgctatctctccagtgttccttccaacttcattggccacctccagtccctcacttttaacggcatggcatatatagacctctgtaaaaatggagacatcgattattgtgagttaaacgcccgatttgggtttcgcaatataattgcagaccctgtgacgtttaaaacgaagtcttcttacgtggctttagctaccctgcaggcctacacgtcgatgcacctgttttttcagttcaaaaccactagcctggatggcctaatactctataattccggcgatggcaacgatttcattgtggtcgaactggtgaaggggtacctgcattacgtgtttgacctggggaacggagctaaccttattaagggttcctctaataagccccttaacgataatcagtggcacaacgtgatgattagtagggacaccagtaacttgcacacggtgaagattgacactaaaattactactcaaattactgctggtgctcggaatttagacttaaagagcgatctgtatatcggtggagtcgctaaggaaacatataaatctctccctaagctggtccatgctaaagagggcttccagggctgtctggcgtccgtggacctaaacggccggctgcccgatctgattagtgatgcactcttttgtaatggtcagatcgaacgtggctgcgaaggcccttctacgacttgccaagaggatagctgtagtaaccaaggagtgtgcttgcaacagtgggatggcttctcttgcgactgcagtatgacgtcttttagcggcccactttgcaacgaccccggaaccacctatatattctctaagggaggaggacagatcacttacaagtggcccccaaatgacaggcctagcacaagagccgacagactggccatcggtttcagcactgtccagaaggaagccgttcttgtgagagtggacagttcatctggactaggagattatcttgagcttcatatccaccaggggaaaatcggcgtgaaattcaacgtgggcacagacgatatagcgatcgaagagagtaatgccataatcaatgatgggaagtatcacgtggtgcggttcacaaggagcggtggcaacgcgaccttgcaagtagattcttggcccgtgatcgaaagatacccggccggtaggcaactgactatcttcaactcccaggccaccatcatcatcggtggcaaagagcagggtcagcctttccaaggccagctgtccggcctctactataacggcttgaaggttctcaacatggccgctgagaacgatgctaatattgccatagtgggcaacgttcgcctggtcggcgaggtgcccagttcaatgaccaccgagtctacggccactgccatgcagtctgaaatgtctacatctataatggagacaacgacaaccctggctacatccacggctagaagaggaaagcccccaactaaggagcctatttcgcagacgactgacgacatattggtggcaagcgcggagtgcccatctgatgatgaagacattgacccttgcgaaccaagtagcggcggattggctaatcctactcgggccggaggtcgtgagccataccccgggtccgccgaggtgatcagagaatcctccagcaccactgggatggtcgtcggtatcgtggccgccgcagctctctgcatacttattcttctatatgccatgtataagtaccgcaacagggacgaagggtcttatcacgtggacgagagccgcaactacatatccaattccgcccagagcaatggtgcggtagtgaaggaaaaacagccttctagtgccaagtctagcaacaagaacaaaaagaacaaggataaggagtattacgtgtag

SEQ ID NO: 126102 - DNA, 4647 bp, synthetic construct
  misc_feature 1..4647: note = Description of Artificial Sequence: Synthetic coding sequence
  source 1..4647: mol_type = other DNA
atgggtacagcattactgcagcgcgggggttgctttttactttgtctgtctctcctgctcctcggctgttgggccgaattgggatccggtctggagttccctggggcagagggtcagtggactcggtttcccaagtggaacgcgtgttgcgaatctgagatgtccttccagctgaagactcggtccgcccggggactggttttatacttcgacgacgagggcttttgcgatttcttagagcttattttgacaagaggcggccggcttcaacttagcttcagcatcttctgcgcagagcctgcaactctgctggctgatacccccgtgaatgacggcgcctggcatagtgttcgcatccgcaggcagttccggaacaccacgctcttcattgatcaggtcgaagcgaaatgggtggaagtcaagtccaagaggagggatatgacagtgttttcagggctgttcgtcgggggactcccaccggagctgagggcagccgcactgaagctgactctggcgagcgtcagggagcgcgaaccttttaagggctggattagggacgtcagagtgaactcaagccaagttctgccagtcgattccggagaggtcaaattagacgacgaacctccaaactccggtggagggtcaccttgcgaggccggtgaggagggcgaaggcggcgtgtgcttgaatgggggcgtctgctctgtggtagatgatcaagccgtatgcgactgtagcagaacaggctttcgaggaaaggactgtagccaggaaattaaatttggacttcagtgcgttctgcccgttctgttgcatgataacgatcagggcaaatactgctgcatcaacaccgccaagcccctgacagagaaaaaggataacgactttgagggccttgctcatctgatgatgggtgatcaggcaaagagcaagaggaaagaggagtacatagctacatttaaaggctctgaatatttttgttacgatttgagccaaaatcccatacagagttctagcgacgagataacactctctttcaagaccctgcagagaaatgggctgatgttacatactggtaaaagcgctgattacgtcaatctggcactcaaaaacggggctgtcagtctagtgatcaatctgggctccggcgcattcgaggctttggtcgaacctgttaatggaaagtttaacgacaatgcctggcatgacgtcaaggtgacaagaaatctgcggcagcacagcggaattggccacgccatggtcaacaagctccattgttccgtgacaatttccgtggacggcatacttaccacaacaggatatacgcaggaagactacacgatgttggggagcgatgacttcttttacgtcggaggcagtccatctacggctgatctaccggggagtcctgtgtcaaataatttcatggggtgtcttaaagaagtggtctacaaaaataatgatgtgcgcctcgagttaagtaggctcgctaaacagggagaccctaagatgaagattcacggcgtcgtcgctttcaagtgtgaaaatgtcgctactctcgatcccattacctttgagacgcccgaatctttcatttcgctacccaagtggaacgccaaaaaaaccgggtctatttcgtttgactttcggacaaccgaacctaacgggctcatccttttttcccacgggaagcctcgacaccaaaaagatgccaagcacccccagatgatcaaggttgacttctttgccatcgagatgctggacggccatttgtaccttctgcttgatatgggaagtggaaccattaagattaaagctctcttgaaaaaggtaaacgatggcgagtggtaccacgtggacttccagagggacggaagaagcgggacaatttccgttaatacactgcggacgccttacaccgcccccggtgaatctgagatcctggacttggatgacgagctgtatctcggaggattacccgagaacaaagccggccttgttttcccgactgaagtctggaccgccctgctcaactatggctacgtcggttgcatccgggacctctttatcgatgggcagtcaaaagatataagacaaatggcagaggtgcagagcactgcaggcgtaaaacccagctgttccaaagagacagcaaaaccctgtctgtcaaatccgtgtaagaataacggtatgtgtagggacggctggaatagatatgtctgtgattgttccggcacaggctatctcggccgcagctgcgagcgggaggcgaccgtcctctcatacgacggatcaatgttcatgaaaattcaactacccgtcgtcatgcataccgaggctgaggacgtgagcctgcgctttcggagccagcgggcctatggcatcttgatggcaactacctcgcgagatagcgcggacaccttgcggctggaactggacgccggcagagtgaagctgaccgttaatttggattgtatccgaatcaactgtaactccagcaagggtcccgaaacattatttgcaggctataacttaaacgataacgaatggcacaccgttcgcgtggtgcgccggggcaagtcattgaagcttactgttgatgaccagcaagcaatgactgggcagatggctggagatcacaccagactggagttccacaacattgagactggcattataactgagcggagatatctaagctcagtgccctccaatttcataggacatttgcagtccctgacattcaatggaatggcctacatcgacctatgcaaaaacggagatatagactactgcgagctcaacgcccgcttcggtttccgaaatatcatagccgaccccgtgaccttcaaaaccaagagctcatacgtagcactggctactctccaagcatacactagtatgcatctcttttttcagttcaaaacgacctcgctagatggcctcatcctgtataatagcggggatgggaacgatttcattgtggttgagctcgtcaaagggtatttacactatgtctttgacctggggaatggggccaatctcataaagggaagttctaataaacccctgaatgacaatcaatggcacaacgtgatgatatctagagacacaagcaacctgcatactgtgaaaatcgacacaaagataacaactcagataacggctggtgcccgcaacctagacctcaagtcagacctgtacattggaggagtggccaaagaaacctacaagtctctgccaaaactggttcacgccaaagaagggttccagggctgtctggcctcagtcgatctcaacggaaggctgcccgatctgatttccgacgcactgttctgcaatggacaaattgaaagaggatgcgaagggccatccacaacatgccaggaggactcctgttctaatcagggtgtgtgtcttcagcaatgggatggctttagttgcgactgcagcatgaccagtttcagcggaccactctgcaacgacccgggaacaacgtacatattttctaaggggggaggacagattacctacaagtggccaccgaacgatcgaccctccacaagggctgatcgtttggccatcggcttttccaccgtccaaaaggaggccgtactggtacgggttgattcttcatccggattgggcgactatctagagctgcacatccaccagggtaaaatcggtgtaaaatttaacgtgggtacagatgacattgccatagaggaatccaatgccatcatcaacgacgggaaataccatgtagtccgctttacccgatcgggaggcaatgccactctgcaggtcgatagctggccagtgatcgaacggtaccccgcaggaaacaatgataacgagcgtctagccatcgcccggcagagaattccttacagactcggaagggtggtcgacgagtggctgctggacaaaggtaggcagctgacaatcttcaactcacaagctaccatcattataggcggcaaggaacaagggcagccctttcagggccagttgagtgggttatactataacggtctcaaagtccttaacatggcagccgaaaatgacgctaatattgctatagtaggcaacgtgagattggtgggagaagttccgtcttccatgaccacagagagcaccgctaccgcaatgcaatccgagatgtctacaagcattatggagactaccaccacccttgctactagtacggctcggcgcggaaaacctccaaccaaggaacctatcagccagaccacagatgacatactggtggcctcagccgaatgtccgagtgacgacgaagacatagacccctgcgagccatccagtggcgggctggcaaatccgacgcgtgccggggggcgcgagccttaccctggttctgctgaagttataagagagagcagttctacaacaggaatggtggtggggatagtggccgctgcagcgttgtgcatactcatcttgctctacgcaatgtacaagtatcgtaaccgagacgaagggtcctatcacgtggacgagtccagaaattatatatcaaactctgcacaatctaatggagctgttgtgaaggagaaacagccctcgtcagccaaatcctcaaacaaaaacaagaaaaataaagataaagaatattatgtgtag

SEQ ID NO: 126103 - DNA, 1191 bp, synthetic construct
  misc_feature 1..1191: note = Description of Artificial Sequence: Synthetic coding sequence
  source 1..1191: mol_type = other DNA
gcactggagatttgggaacagccgcctgcccctcgcttattattccccggcctccccttccgcacgagccccagccctgcggccttttacagaagccctgccagtctacgcggcggacacgccggaacaacgtacatcttttccaaagggggcggccagataacatacaagtggcccccaaatgacagacccagtacacgggcagacaggctggctatcgggttctcgaccgtgcagaaagaagccgttctggttcgcgtggactctagtagtggcctaggcgactaccttgagctacacatccatcaaggtaaaatcggagtgaagtttaatgttggtactgacgacattgcgatcgaagagagcaatgcaattatcaacgatggcaaataccacgtggtaagattcactaggagcggtggaaacgccaccctgcaagttgatagttggcctgtgatcgagaggtatcccgccggtagacagctgacaatcttcaattcccaagctacaattatcattggcggtaaggagcagggacagccctttcaggggcaactctcaggactttattataacggtttgaaggtgctgaacatggcagctgagaatgacgccaatattgctatagtgggcaacgttcgcctggtgggagaggtgccctcgtcaatgaccactgaaagcaccgcaactgcaatgcagagtgaaatgagtacttctatcatggagaccaccaccacactcgccaccagcactgctcgcaggggcaagccccctacaaaggaaccaatttctcagactacagatgacattttagtggccagcgccgagtgtccttcagacgatgaggacatagacccatgtgagccctccagtggcggcctggcaaacccaacacgagctggcggacgcgagccctatcccggatccgctgaagtcatacgggagtcatcatccacaaccggaatggtggtcgggatagttgctgctgccgcattgtgcatccttattctcctgtatgcgatgtataagtacagaaatagagacgaagggtcttaccacgtggacgagagtcgtaactatatttctaacagcgctcagagtaacggcgccgtcgtcaaagaaaagcagcctagcagcgccaaatcatccaataaaaacaagaagaataaagataaagagtactacgtgtag

SEQ ID NO: 126104 - DNA, 5139 bp, synthetic construct
  misc_feature 1..5139: note = Description of Artificial Sequence: Synthetic coding sequence
  source 1..5139: mol_type = other DNA
atggcatctggtagccggtggaggcctactccccctccacttctgttactcctccttctggctctcgccgcccgggccgacggtctggaattcggagggggaccaggacagtgggcacggtacgcacggtgggccggcgccgctagttcaggggagctgtcattctccctgcggacaaacgctactagagctctgttgctttacctcgacgatggcggtgactgtgactttctcgaactgctgctcgtagacggcaggctgcgactcagatttactcttagttgcgcagaacccgctacgctgcagttggatacgcccgtagcggatgatcgctggcacatggtgctgctaactcgcgatgctcggcgcactgcgctagccgtggacggcgaagcccgggccgcagaagtgcgctcaaaacggagggaaatgcaagtcgctagcgacctgtttgtcggtggaatcccccctgatgtgcggttgtccgccctaacactgtccaccgttaaatacgagccaccatttcggggactgctggccaacctgaagctgggagagcgcccgcccgcacttcttggctcccagggccttagaggtgcgactgccgacccactgtgtgcgccagctagaaatccttgcgcaaacggcggtctctgtaccgtcctcgccccaggcgaggtgggctgcgactgctctcacaccgggtttgggggaaagttttgttccgaagaagagcacccaatggagggccccgctcatcttacacttaactcggaagtcggttctctgctgttttcagagggaggagccggtcgaggtggtgcaggcgacgtgcaccagccaacaaagggcaaggaagaattcgttgcaacattcaaaggtaatgagtttttttgctatgacctcagccataaccccatacagtcctcgaccgacgagatcacccttgcatttagaacgttgcagcgaaatggtctcatgctccacacagggaagagtgccgattacgtcaatctctctctgaaaagcggggccgtctggctggtgattaatttgggatccggcgccttcgaggccctggtggagcctgtgaacggtaagtttaatgataacgcttggcacgacgtacgcgtgacccgcaacctgcggcagcacgcaggtatcgggcatgccatggtcaataagctgcactacctcgtgaccattagcgtggacggcatcttaacaacaactgggtatacacaggaggattacacaatgttgggtagcgacgactttttctatataggggggagccctaataccgccgacctccccggcagtcccgtgtcaaataactttatgggttgtctgaaggacgtagtgtacaagaacaacgactttaagctggaattatctcgcctggctaaagaaggggacccgaagatgaagctgcagggcgatctgtcctttcgctgtgaagacgtggccgcactggatcctgtcaccttcgagtccccagaggcgttcgttgccctccctagatggtccgcgaaaaggaccgggagtattagtttggactttcgaaccactgaacccaacggactgttgctgttttcccagggccgcagggcaggaggtggcgccggaagccactctagtgcccaaagggcagattacttcgccatggagctgctggatgggcatctgtacctgttgctggatatgggaagcggcgggataaaattgcgggcatctagtagaaaagtgaacgacggcgagtggtgccacgtggactttcagagagatgggcgtaaaggctcaatttcggtgaatagtaggtcgacacctttcttggccaccggcgattctgagatactggatttggaatctgaactatacttagggggcctgccagaaggtggtcgggttgatctgcccctccctcctgaggtatggaccgccgcacttcgcgccggttatgtgggctgcgtgagagaccttttcattgacggcaggtcaagggacctaaggggactggccgaggcacagggagcggtgggcgtggccccattttgtagcagggaaacactaaaacagtgtgcatccgccccttgccggaacgggggcgtatgccgagagggatggaacaggttcatctgcgactgtataggcaccgggttcctgggcagggtgtgcgagcgggaggctacagtgttgtcctacgatggtagcatgtacatgaaaattatgcttcctaatgccatgcataccgaggcggaggacgtaagtcttaggttcatgagtcagcgggcatatggacttatgatggctacaacttctcgggaatccgcagacaccctcaggctcgagctggatggtgggcagatgaagttgaccgttaaccttgactgcctccgggtcggctgtgccccctcgaaagggccagagaccctgttcgcaggacataaattgaatgataacgagtggcatactgtgcgggttgtgcgccgagggaagtcccttcaattatcggttgataatgtcaccgtggaaggtcagatggcgggcgcacacatgaggctggagtttcacaatattgagactggcattatgaccgagcgcaggttcatctccgtggtgccatccaactttattggacacctgagtgggttggtgtttaatggacagccttacatggaccagtgcaaagacggcgacatcacatactgtgagctcaatgccaggttcgggctgcgagctattgtggctgacccagttacttttaagagtcgctcctcttatctggcattggcaaccctccaggcctacgcgtccatgcacctcttcttccagttcaaaactaccgcgcccgacggactcctgctgttcaactccggcaacggcaacgatttcattgtgatagaattggtgaagggatacattcactacgttttcgatctagggaatggacctagcctgatgaaaggaaacagcgataaacccgttaacgacaatcagtggcacaatgtggtggtcagcagagacccagggaacgtgcatacattgaagatagacagccgaacagtcactcagcatagcaatggggctagaaatcttgatctgaaaggagagctgtacatcggcggtctgtccaagaacatgtttagcaacctgccaaagctggtggctagtcgcgatggcttccagggttgcctggcttccgtggatctgaatgggcggctgccagacctaatagcagacgccttgcaccggatagggcaggtggagagggggtgcgatggtccttccaccacgtgtactgaagaaagctgtgccaatcagggcgtgtgtctgcagcagtgggatggattcacttgtgattgtactatgaccagttatggcgggccagtgtgtaatgatcctggcaccacctacatttttggaaaaggtggggctttgatcacatatacctggccccctaacgatcggccctcgacgcgtatggatagactagcagttgggttttccacacatcagagatccgccgtactggtgcgggtagactccgccagcgggcttggcgactatctccagctgcacattgatcagggcaccgtaggagtgattttcaatgtgggaacagatgacatcactatagacgagcctaacgcaattgtgtccgacggaaagtatcacgtcgttcggttcacccgcagtggaggcaacgctactctccaagtggattcctggcctgttaacgaacggtacccagccggcaacttcgataacgaacggctggccatcgcgagacagcgaatcccatacagactaggacgagtggtggacgagtggcttctcgacaaagggcggcagctgaccattttcaattcacaagctgccatcaagattggtggccgggatcagggcagaccgttccaggggcaggtgagtggactgtactacaatggcttaaaagtgctagcattagcagcagaatcagacccaaatgtgcgaactgaaggacaccttagactggtgggggaaggcccttccgtgttactcagcgctgaaactaccgcaactacgctgttggctgacatggcaaccactatcatggagaccaccaccactatggcaactacaaccactcgccggggccgatcgcccaccttgagggatagtacgactcagaacaccgacgacctcctggtcgcctctgcggaatgcccatcagacgatgaggatctggaggagtgcgaacccagcaccgggggcgaattgatcctgcctattatcaccgaagattccctagaccctcctcctgtggcaactcggtccccttttgttccacctccccctacgttctacccattccttactggggtgggcgctacacaagacaccctgccacccccagccgcccggcgaccgcctagcggtggaccatgccaagccgaacgggatgattccgactgcgaggagccgattgaagcctccgggttcgcaagtggcgaggtttttgattcttctttacccccgaccgatgacgaggatttctatactacattccctctcgtgactgataggacaaccctgttgtctcccagaaagcccgctcctagacccaacttacggacggatggcgccaccggagctccaggcgtgctcttcgctccttcagccccagcgccaaacctccctgccggtaaaatgaatcacagagaccccctgcagccgttactggagaatcctcctcttggcccgggagctcccactagcttcgaaccccgccgaccgcctcccctgcggccaggggtgacctcagctccaggtttcccgcacctgcctactgccaatcctaccggtcccggagagagagggccacccggcgctgttgaggtgattcgagagagctcatctaccaccgggatggtcgtcggcatagtggccgccgcagccctgtgcatcctgatactcttgtacgccatgtataagtatagaaaccgcgacgagggcagctatcaagtggaccagtccagaaattatatttcaaattccgcccagagcaatggagccgtggtcaaggaaaaggcacctgcggcacccaagacaccttctaaggcaaagaagaacaaggataaagagtattacgtatag

SEQ ID NO: 126105 - DNA, 4929 bp, synthetic construct
  misc_feature 1..4929: note = Description of Artificial Sequence: Synthetic coding sequence
  source 1..4929: mol_type = other DNA
atggcctccggatctcgctggaggcccacccctcctcctctgttgctgctcctgctactcgcattggccgcaagagcagacgggctagagtttggaggcggccccggccagtgggccagatatgcccgatgggcaggggcagcttcctctggggagcttagttttagcctccggacaaatgcaacaagggctctgctgctgtacctggatgatgggggtgattgcgacttcctggagctgcttctggtggacggaaggctgcggctgcgctttacgctcagttgtgctgaaccagccacattgcaactcgatacacctgttgcagacgataggtggcatatggtgctgctgacgagagatgctcgacgcacggccctggctgtggatggcgaagcaagggctgcggaagtgagatccaaaaggagggagatgcaggttgcttctgaccttttcgtgggaggtatccccccagatgtgcgcctgtcagcgctcaccctgagcaccgtgaagtacgagccaccatttagagggcttctcgccaacctcaaactgggagagagacccccagctcttttaggatctcagggcctgagaggggctacagcagatccactttgcgcaccagccagaaatccatgtgccaacggggggctgtgcaccgtcttagctccgggggaagttggatgcgattgcagtcatacaggatttggaggtaaattctgcagtgaggctccaagcccttttcaggggcctgcacatctcaccctgaattccgaaggaaaggaagaattcgtcgcgacatttaagggcaatgagttcttctgctacgacctgagtcataatcccatccagtcgtccacggacgaaataacattggccttccgcacactacagagaaacggactgatgttacatacaggcaaatcggccgattacgtaaatctgtctctgaagagcggcgccgtctggcttgtgatcaacctgggatctggagcattcgaagctcttgtggagcccgtaaatggcaaatttaatgataatgcctggcatgatgtgcgcgtgacgcggaatcttagacaacatgcgggaattgggcacgcgatggttaccatctcagtggatggtattctgactactacgggatacacccaagaggattatacaatgctgggatcagatgactttttctacattggggggagtccaaacacagccgacctgcccggaagcccggttagtaacaatttcatgggctgtttgaaggacgtggtttataaaaacaatgatttcaaactggagctgtctagacttgctaaagaaggtgaccccaagatgaaactgcagggcgacctatccttccggtgtgaggacgtggcggcattggacccggtcacatttgaaagcccagaggcttttgtggcactcccccggtggtccgctaagagaaccggatctatttcccttgactttcggaccactgaacccaatggactattgttgttttcacagggtaggcgagcaggcggcggggcaggaagtcactcaagcgcccagagagccgattattttgcaatggagctgttagacggacacctgtacctgctgctggatatggggagtgggggtattaagctcagagcctcatctagaaaagtaaacgatggggagtggtgtcacgtagactttcagagagacgggaggaagggatctatcagtgtgaacagccgatccaccccatttctcgcaacaggcgattcggagatcttggacctcgagtcagagctgtatctgggcgggttgccagaaggggggagggtcgacctgcctctacccccagaagtctggaccgccgccttgagggccgggtatgtgggctgcgtccgggatcttttcatcgatggtcgctcgcgagatctgcgagggctggcagaagcacagggagctgtgggagtcgctccgttctgctctcgggagacgcttaagcagtgtgcaagtgcgccatgccgaaacggcggcgtgtgccgggagggatggaatcggtttatctgcgactgcatcggtactgggtttcttggaagggtgtgtgaacgtgaagctacggtgctgagttacgatggatctatgtatatgaaaatcatgcttccaaatgcgatgcataccgaggccgaagacgtctcactgcgatttatgtcacagcgagcttacggtctgatgatggccactacgtccagagaaagcgctgatactttgagactggagctggatggaggacagatgaaactcactgtcaatttgggaaagggcccggaaacactgtttgctggacacaagttgaatgataatgagtggcacacagtcagagtggtaaggcgggggaagagtttgcagcttagtgtcgacaacgtgaccgtggaagggcaaatggccggagcgcatatgagactcgagtttcacaacattgagaccggtatcatgaccgagaggcgctttattagcgttgtgccatctaacttcattggtcacctgtcaggattggtgttcaacggacagccttatatggaccagtgcaaggacggagacattacctactgcgaactaaacgcacgatttgggcttcgagcgatagtggccgatcctgtaacctttaaaagcaggagctcctacttggctctggcaactcttcaagcctacgcaagtatgcacttgttcttccagtttaagaccacagcacccgatgggctcctgttgtttaattccggcaacggcaacgatttcattgtgatagaattggtgaagggatacattcactacgtctttgacctgggcaatggacccagtctgatgaaaggaaactccgataagccagtgaatgacaaccagtggcataacgtggtggtcagcagggatccaggaaacgttcacacactcaaaattgattcgcgcaccgtaacccaacactcaaatggagccaggaatctcgatctcaagggggagctctacataggcggcctttccaagaacatgttctccaatctcccaaagcttgttgcttctcgcgatggattccaaggctgcctcgcatccgtcgacctgaatggccgcctgcccgatcttatcgccgacgccttgcaccgcattggccaggtggagcgcggttgtgatggcccgtcaacaacgtgtacagaggaaagctgtgcaaatcagggcgtctgcctccagcagtgggatggattcacgtgtgactgtactatgacaagctacggcggccctgtgtgcaacgatcctggaacaacatacatcttcggcaagggcggcgccctcatcacgtatacttggccaccaaacgatcggccctccacacgcatggacagattagccgtgggcttttcgacccaccagaggagcgcagttttagtgcgcgtggattcagctagcggtctgggggactatctacaactgcacatcgatcagggcaccgttggagtcatctttaacgtggggactgatgatatcaccatagacgagccaaacgcaatagtaagcgatgggaaataccacgtcgttcggtttacccgtagcggcgggaacgctaccctgcaggtggattcctggcctgtcaacgagcgctacccggctggccggcagctgacaatttttaactcccaggccgcaatcaagataggcggccgagatcagggtaggcctttccagggacaggtgagcgggttatattacaacggactgaaagttcttgccctggcagcagagtcagaccctaatgtgcggactgaggggcatctccgactggtgggagaaggtccctcagtacttctgtcagccgagacaaccgccacgacccttctggctgatatggctaccaccatcatggagacgaccactaccatggctaccaccaccacacgcagaggcagaagcccaacactgcgcgacagtacaacccagaacacagatgacttgctggtggcatctgcagagtgcccctcagatgatgaggatctggaagaatgcgaaccctcaactggaggggagctcatcttaccaattatcaccgaagattctttagacccgccccccgtggccacgagatcccctttcgtcccaccacccccaactttctacccctttctcacaggagtcggtgcaacacaagatacactaccccctccagccgcccggcggccaccaagtgggggaccctgccaggccgaaagggacgacagtgattgtgaagagcctattgaagcttccggatttgcctctggggaggtgttcgacagctccctgcctcccactgatgacgaagatttctatacaacctttccactggttaccgatagaactactctcctgtcacctcgcaaacctgcccctcggcctaatctcagaaccgatggcgctacaggagctcccggggtacttttcgcccctagcgcccccgcccctaatttgcctgctgggaagatgaaccatcgcgaccctctgcaaccattattggagaacccacctctgggccctggcgccccgacctcctttgagcctcgacgccctccgcccttgcggccaggggttaccagcgccccagggtttccccatctaccaaccgcgaatccaacagggcctggcgaacgaggccctcccggggccgtagaagtgatccgggaatctagctccaccaccggcatggttgtgggcatcgtggcagcagccgcactgtgtattcttatcctgctatatgccatgtacaaataccgtaaccgcgatgaaggatcataccaggttgaccagagtcggaattacatttcaaattcagcccagtcaaacggggcggttgtcaaagagaaagcccccgccgctcctaaaacgccaagcaaagctaagaagaacaaggacaaggaatactacgtgtag

SEQ ID NO: 126106 - DNA, 5139 bp, synthetic construct
  misc_feature 1..5139: note = Description of Artificial Sequence: Synthetic coding sequence
  source 1..5139: mol_type = other DNA
atggctagcgggagtcgttggcgaccgacacccccgcccctcctgttgctcctcctgttagcgctggccgcgcgcgctgatggtctcgagttcggcgggggtcccgggcagtgggcgcgatatgccagatgggccggagccgcttccagtggagagttgagtttttcactccggacgaatgctacccgcgcccttcttctgtaccttgatgacggaggtgattgtgacttcttggaactcctgttagttgatggccggcttcgcctgcggttcactctgagttgcgctgagccagccaccttgcaactggacacccccgtggccgatgacaggtggcacatggtgttgcttactcgggatgccagaagaaccgcccttgcagtcgacggcgaggccagagctgcagaagtgaggtctaaaagacgcgaaatgcaggtagcgtccgatttgtttgtgggaggcattcctcctgacgtacgcctgtctgccttaacactctccactgtcaagtacgaacctcctttccgcggcctgctcgccaatctgaagctgggtgagcgaccccccgccctacttggatcccagggcctgcgaggtgccacggcagacccattatgtgctccagctcgcaatccttgtgctaacgggggcctgtgcactgtgctggcccctggagaggtggggtgtgattgcagccacaccggcttcggaggtaagttttgctcagaagaggagcaccccatggaaggcccggcgcacctaactctgaattcagaggttggctcccttctgtttagcgaaggcggggccgggcggggcggggcgggagacgtgcaccagccaaccaaaggcaaggaagagtttgttgccacctttaaggggaacgaatttttctgttacgacttgagtcataacccaatccaaagctcaacagacgagattaccctggcctttaggacactccaaaggaacgggcttatgttgcataccgggaaatctgccgattacgtcaacctttccctcaaatctggggcagtgtggctggtgatcaatttaggcagcggtgccttcgaagctctggtcgaaccggtgaacggaaagtttaatgataatgcgtggcatgatgttagggttaccagaaacctgaggcagcatgcgggcatcgggcacgctatggtgaacaaactccactacctcgtgaccattagtgttgacgggatcctcacaactacggggtacacgcaggaagactatactatgctcggcagtgacgattttttctacattggcggatctccgaacaccgcagatctgcccggatctcccgtctccaacaattttatgggttgtctgaaagatgtcgtgtacaaaaataatgacttcaaacttgaactttcccgtttggcaaaggaaggcgacccaaagatgaagctgcaaggggaccttagctttagatgcgaggatgtggccgctttagatccagttactttcgaaagcccggaagccttcgtggcgctacccaggtggagcgcaaaaaggactggctccatcagcttagatttcaggaccactgagcccaatggactcctcctgttttcgcagggcagaagagcagggggaggagcaggaagccacagctccgcacagagggccgattatttcgccatggagctgcttgatggtcacttgtatcttctcttggacatgggtagcggaggcattaagctgagagcaagcagcagaaaagtgaatgatggagaatggtgccacgtggacttccagcgcgacggaaggaaaggatctatttcagtcaactcaaggtcgactccttttctggcaaccggagatagcgagattctggacctcgagtctgagctgtatctcggggggctgcctgaaggagggcgcgtggatctgccgttgccccccgaggtgtggaccgctgccctgagagcgggatacgtggggtgcgtgcgggacctgtttatcgacggccggtccagggacttgagaggcctggctgaagcacagggcgcggtaggggtagcgcccttctgttctagggagacactcaagcagtgtgcttccgccccctgcaggaatggaggcgtctgccgggaaggctggaaccgattcatctgcgattgcataggaactggcttcctgggacgggtgtgtgagagggaagccacggtgctctcatacgacggtagtatgtatatgaagatcatgctcccaaatgctatgcatacagaagccgaagacgtctcattacgatttatgagtcagagggcatacggtctgatgatggccactactagcagagagtcagcagacactctgcggctcgaactcgacggcgggcagatgaagctcacagtcaatttggattgtttacgagtaggctgtgcccctagtaaaggacccgagaccttgttcgctgggcacaagcttaacgacaacgagtggcataccgtgcgcgtggtcagacgggggaaaagcctgcagttaagtgtagacaacgtgaccgtagagggacaaatggcaggggcccatatgaggctcgagtttcataatattgagaccggcataatgacagagcgcaggtttatttctgtcgtccctagtaatttcatcggacacttgtccggacttgtgttcaacgggcagccgtatatggatcaatgcaaggatggggacataacatactgcgagctaaacgcacgtttcggacttcgtgcaatcgtggccgaccctgtaaccttcaagtcaaggtcttcttaccttgcgctggctacactgcaggcatatgcttcaatgcacctctttttccagtttaaaacgacagcacctgatggactcctactgttcaattccggaaatgggaatgattttatagtgatcgagctggtaaaaggttacattcactacgtgttcgacctcggaaatggtccctctctcatgaagggtaacagcgataagcccgtcaacgataatcagtggcataatgtcgttgtctcgagagaccccggcaacgttcatacactcaagatagacagtcgtactgtcacacagcacagcaatggggcacgcaacctggacttgaagggggaactatacattggcggcctgagcaaaaatatgttttcaaacctacctaaattagtggcttctcgcgacggcttccagggctgtctcgcctctgtggacctgaacggaagactgcctgacctcattgcagacgccctgcataggattggccaagtcgagcgcggctgcgacggccctagtactacctgcactgaggaatcctgtgccaaccaaggcgtatgtctgcagcaatgggatggattcacgtgcgactgcaccatgacctcatatggtggcccagtctgcaacgatcctggcacaacctatatattcggaaagggtggggccctgataacctacacatggccacccaacgaccggccaagcactcgcatggataggctcgcggtaggattcagcacgcatcagcggagtgccgttcttgtaagggtggactcagccagcggccttggagactatctgcagctccacattgaccaaggcactgtgggggtaatcttcaacgtgggcacagacgatattacaatcgatgagcctaacgccatcgttagcgatgggaaatatcacgtggtgcggttcacccgatcagggggcaacgcgacactacaggttgactcctggcctgtcaatgagcgttatccagccggtaacttcgacaacgaacgacttgccatcgcccgacagcggatcccctaccgcctcgggagggtggtcgacgaatggctgctggacaagggacgacaattgaccattttcaactcgcaagctgccattaaaattggcggacgtgatcagggccggccctttcaagggcaagtctccgggttgtactataatgggctcaaggtactcgcgcttgcagccgagtccgatcctaacgtgcgtacagaggggcatctgagactagtcggggaaggaccgagcgtgctgctttccgccgaaactaccgccactacactgctggcagatatggctacaactattatggaaacaaccacgacaatggcaaccaccacaacacgtagggggaggtcccccacacttcgggattctactactcagaacacggatgacctgctcgtggcctctgccgagtgcccatcggatgatgaagacctcgaagagtgtgagccaagtaccggcggggaattgatcttgcctatcattacagaagatagtctggatccccccccagttgctacccgttctccctttgtgccgcccccaccgacattttacccttttttaaccggggttggcgcgacgcaagacaccctgcctcctccggccgccagacgcccaccctcaggtgggccatgccaggcagagagggacgattcagactgcgaagaaccgatcgaagcttcgggtttcgcgagtggagaggtttttgattcctctctgccccctaccgacgatgaggatttctacacaacattccctctagttactgatcggaccaccttgctgagcccaagaaaacctgctcctaggcccaacttgagaaccgatggggcaaccggagcacccggggtcctttttgccccatccgcaccagctcccaacctgccagctggcaaaatgaaccaccgggaccctctgcaacccctcctggagaatccacccctgggacctggggcccccactagcttcgagccgcggcgtccacctcccctgagaccgggtgttaccagtgcccccggcttcccgcatcttccgacggccaatccaaccggccctggggagcggggacctccgggcgcagtggaggtaattcgcgaaagcagcagcactaccggcatggtggttggaatcgtagcggctgcagcactgtgtatcctaattcttttgtatgccatgtataaataccggaaccgggatgagggaagctaccaggtcgatcagtctagaaattacattagcaactccgcgcagtctaatggagctgtagtcaaagaaaaggcccctgccgctccgaagacgccgagcaaagctaaaaagaacaaggacaaggagtactacgtttag

SEQ ID NO: 126107 - DNA, 4929 bp, synthetic construct
  misc_feature 1..4929: note = Description of Artificial Sequence: Synthetic coding sequence
  source 1..4929: mol_type = other DNA
atggcaagcgggtccaggtggcggcctacacccccccctctcctcctgctgctgctgctggctctggcggcacgtgcagatggcctcgaatttggtggaggaccaggtcagtgggctaggtacgcccgatgggcaggggctgcaagctctggcgagctctcattctctcttagaacaaacgccactagagcactgctgctgtaccttgacgatggtggtgattgcgactttctggaactcttactggtggatggacggctacggctccggttcaccttgtcctgcgctgaaccagcaacactgcagcttgacacaccggtcgcggatgatcgctggcacatggttctgctgacgcgcgatgctcggaggaccgcgttagccgtcgacggagaagctcgagctgccgaggtgcgttcaaaacgaagggaaatgcaggtggcctcggatctgttcgtgggcgggatcccacccgacgtccggctcagcgctttaaccttatccactgtaaaatacgagcccccatttcgcgggctactggccaatctcaagctgggggagaggcctccggccctgctgggatcacagggactccgaggcgccaccgctgaccctttatgtgctcccgcaaggaatccttgtgccaacgggggcctctgcaccgttctggcacctggagaagtcggttgcgattgctctcacaccggcttcgggggaaagttttgtagtgaggaggagcacccaatggaaggtccggcccatcttactctgaacagcgaagggaaggaggagttcgtggccacgttcaagggtaatgagttcttctgctatgatctgagccacaaccccatccaaagtagtactgacgagataactcttgcttttagaacactccaacggaatggcctgatgcttcacacgggcaagtctgctgactatgttaacctaagcctcaagtccggcgctgtttggctagtgatcaacctgggatcgggtgcatttgaggccttagttgaacctgttaatggaaagttcaatgacaacgcttggcatgatgtgcgcgtgacacgtaatctcagacagcacgccgggatcggccacgcaatggtgactataagcgtagacggcatcctaactacgactggctacacccaggaagactatacaatgctgggaagcgatgacttcttttacataggaggctcccccaatacagcagacctgcccggttcccccgtatcaaataattttatggggtgtttgaaagatgttgtgtacaaaaacaacgattttaagctggaactgagccggctggcaaaggaaggggaccccaagatgaagctgcagggtgacctaagctttaggtgcgaggacgtagccgcactagacccggtgacctttgaatcacccgaggcctttgtggccctccccaggtggtctgcgaaacgaacaggctccataagcctcgattttcgcactactgagcctaatgggctcttgctgttctcgcagggccgccgcgcgggcggtggcgctggcagccatagctctgcacagcgggcagattatttcgccatggagttgctcgacgggcacctctaccttctgctggatatgggttccgggggtataaaactacgcgcgtcttcacgcaaagtgaatgacggagagtggtgccacgtagactttcagcgagatggcagaaagggctccatttctgtgaacagcaggagcacgcccttccttgcaaccggcgacagcgaaatcttggacctagaaagtgagctttacctcgggggtttaccggagggcggccgcgtagatcttccgctgccgccagaagtgtggacagctgcactgcgcgctggctacgtggggtgtgtccgggacctgttcatcgacggaagatcaagagatcttcgcggactcgctgaggctcagggtgccgtcggcgttgccccattttgctccagagaaaccctgaaacagtgtgcaagcgcaccttgccgcaatggaggcgtgtgtcgcgagggttggaatcgtttcatctgtgactgtatcggaaccggctttctgggacgggtttgcgagcgcgaggctacagtgttatcctacgatggctctatgtacatgaagatcatgcttccgaacgcaatgcacaccgaggctgaagacgtcagcctgcgattcatgtctcagcgagcttacgggctgatgatggctacgactagccgggagagcgcagatacgctcagactggagctggacggaggccagatgaaactgactgtgaacttgggaaaaggcccggagacgctgtttgccggacataagctgaacgacaatgaatggcatactgtccgtgtggtgcggcggggaaaatccctccaactttccgtggacaacgtgaccgttgagggccaaatggccggagctcacatgcgtctcgagttccacaacattgagactggaattatgactgagcgccgtttcatctcagtggtgcctagcaacttcattggacatctaagtggcctggtgttcaacggccagccctatatggaccagtgtaaggacggagatattacttactgcgaactgaacgctcggttcggattgcgcgctatcgtcgccgacccggtgacattcaaaagccgcagcagctatctggccctggccaccctgcaggcatacgcttctatgcatctgttcttccaattcaaaacgaccgcccctgacggccttctgctgttcaattcaggaaacggaaacgatttcatcgtgatcgagttagttaaggggtacattcactatgtatttgatttgggcaatggtcctagcctgatgaaaggcaactcggataagccagttaacgacaaccagtggcacaatgtcgtcgtgagccgcgatcctggtaacgtccatacactgaaaattgactcccgcacagtgacacagcacagtaatggagccaggaacctagaccttaaaggtgagttgtacatcggcggtttgtcaaagaatatgttcagcaatctccctaagctggtggcctcgagagatggcttccaggggtgcctggcctccgtggacctcaacggaagactgcccgacctcatcgcagacgctctccacaggataggccaagtggagaggggctgcgatggaccatctacgacctgtaccgaagagagctgcgcaaatcagggggtctgcctgcagcaatgggatgggtttacttgcgattgtacaatgacttcctacggtgggcctgtttgcaatgaccccggcactacatacattttcggcaagggcggagccctgatcacatatacgtggcccccgaatgatcgcccaagtacccgtatggatcgtctggcagtaggtttttctacgcatcagagatcagccgtgctcgtaagggtagactccgctagtggtttaggggactacctgcagcttcacatcgatcagggcacggtgggcgtgatattcaatgtaggcactgatgacattactattgatgagccaaacgccattgtgagtgatggaaagtaccatgtggtgcgatttactcgctccggaggcaatgccactctgcaagtggacagctggcccgtaaacgagaggtaccccgccggccggcagctcacgatctttaattcacaggccgctattaaaattggcggcagggatcagggaaggccgttccagggtcaagtctccggcttgtactataacggcttaaaggtcctcgctttggccgccgaatctgatccaaacgtacgaactgaggggcacctccgacttgtaggagaaggcccttccgtgctactctctgctgaaacaaccgcaacgacattactcgccgatatggcgacaacaatcatggaaacgacaactactatggctaccacaacaactcgcagaggacggtcccctactctgagggacagcactacccaaaatacagacgatctgctagtcgctagtgccgagtgcccttctgatgatgaggatttggaggagtgtgagccttctacgggtggtgaactaatcctccctatcatcaccgaggattccctcgatccccctcctgttgcgacacgctcaccattcgtgccgcccccccccactttctacccttttcttacaggtgttggggccacccaggatacactgcctccacccgctgcgcggcggcctccttctggcggcccttgccaagctgaacgagatgattccgactgtgaggagcctatcgaagccagcggatttgccagcggagaggtctttgatagctctctgccccctacagatgacgaagacttttacaccactttcccattggtgacagatcggactacactcctatcacctcgcaaaccagcccccagacccaacctccggactgacggcgccacaggggcgcccggcgtgctcttcgcaccctccgcccccgcacccaacctgcctgcaggaaagatgaatcaccgtgaccctctgcagccacttctggagaatccacccttgggacctggcgcaccaacttcgttcgagccccgccgcccgccaccactgcggccaggcgtgacaagcgcccctggctttccgcacctaccaactgctaatccgaccggaccaggggaacgaggacccccaggagcggtggaggtaattagagaatcttcctctacaacaggcatggtggttggtatcgttgcagcggcagccctgtgcattctgatactgctctacgcgatgtataagtatagaaatcgggacgaggggagctatcaagtggatcagtctagaaactatatcagcaacagtgcccaatcaaacggggccgtcgtgaaggaaaaggccccagctgctcctaagaccccatctaaagccaaaaagaacaaagataaggagtactacgtctag

SEQ ID NO: 126108 - DNA, 5118 bp, synthetic construct
  misc_feature 1..5118: note = Description of Artificial Sequence: Synthetic coding sequence
  source 1..5118: mol_type = other DNA
atggcgagtggctctagatggagacctacaccccctcctctcctgctgcttctgctcctggccttagcagcccgggctgacggactggaattcggcggcggacccggacagtgggcaaggtatgcccggtgggcaggagcggcttcctcaggagagttatccttttcccttcgcacgaacgccacccgagctctgctgctgtatctggatgacgggggagattgtgatttccttgaactgttgttagtggatggcagactgaggcttagattcactcttagctgcgccgagcccgccaccttacaactagacactccagtggctgatgaccggtggcacatggtgctcctgacccgggacgctaggaggactgctttagcagtcgatggtgaggcacgagcagccgaggtacgctccaagcggagagagatgcaagtggccagtgacttgttcgttgggggcattcccccagatgtgcgattgtcagccctgaccctgagcaccgtcaagtatgagcccccctttcggggactgctggcaaacctaaagctcggcgaacggccacctgctctgcttggctctcaaggccttagaggggctaccgcggatcctctttgtgctcccgcacgtaatccatgcgcgaacggtggactgtgcacggtcttggcgcctggtgaggtgggctgcgactgttcacataccgggttcggaggcaaattctgcagtgaggaagagcacccgatggagggccctgctcacctgacactgaatagcgaagtgggctcccttctctttagcgagggtggcgcaggccgcggtggcgccggcgacgtgcaccagcctacaaagggaaaggaagagtttgtggccacttttaagggcaatgagttcttttgttatgacctgagccacaatcctatccaatccagcacggacgagatcactctggcattcagaaccctccagaggaatggactcatgctacacaccggcaaatctgctgattatgttaatctcagtttgaaatccggggcggtgtggctcgtgattaacctgggcagcggcgctttcgaggccctggtggaaccagtcaacggaaagttcaacgacaacgcctggcatgatgtaagggttacgcgcaacctgcgacaacacgccggaattggtcatgcaatggtgactatttcagtggacggcatcctcacaacgacagggtatactcaagaagactacactatgctgggcagcgatgactttttctacattggtggtagtccgaatactgcagatcttcccgggagcccagtcagcaacaatttcatggggtgcctgaaagatgtcgtgtacaaaaataacgacttcaaactggaactgtcccgtttggcgaaggagggtgatcctaagatgaagctgcaaggagacttatcatttcggtgtgaggacgtggctgcactcgatcccgtgacgttcgagagccccgaggccttcgtggctcttcctcgctggtctgctaagcgcacaggcagcatctctttggattttcgcacaactgagcccaatggcctcctgctgttttcgcaaggtcggagggctggcggtggagccggctcacattcaagtgcccaacgcgcagactatttcgccatggagctgctggatgggcacctctatctgttgttggatatgggctccggaggaattaaactacgtgcctccagcagaaaagtgaacgacggtgagtggtgtcatgtggactttcaaagggatggaagaaaagggtccatctccgtcaactcccgaagcacacctttcctggccactggcgattccgaaattctcgaccttgagtcagaactgtatctgggcgggctgccagagggaggtcgagtagatctgcctctccctcctgaggtctggaccgccgcgctgcgagcaggatatgtagggtgcgtgcgcgatctgttcatagatggccgaagtcgtgatctccgaggcctcgctgaggctcagggcgcagtcggagtagcaccgttctgtagcagggagactctaaaacagtgtgcaagcgcgccatgcagaaacggtggagtgtgtagagaaggatggaatcggttcatttgcgactgtatagggactggtttcctgggacgcgtatgtgaaagagaggctaccgtgctttcttatgatggctccatgtacatgaaaattatgctgcccaacgctatgcatactgaggccgaggatgtgtccctccggttcatgtctcagagagcgtacggcctgatgatggccaccacctctcgcgaatctgctgataccttgagactggagctggacggtggtcagatgaaactgacggtgaatctcgactgtctccgggtggggtgcgcccctagtaaaggtcctgagactctgtttgcaggccacaaactgaatgacaacgagtggcacacagtgagagtagtgaggaggggcaaatctttacagcttagtgtcgacaacgtaaccgttgaggggcagatggctggcgcccacatgcggttagaattccacaatatagagacaggcatcatgactgaaagaaggttcatttccgtcgtcccatctaatttcattgggcacctcagtggtctcgtcttcaacggccagccctacatggaccagtgcaaggacggggacattacctattgtgagctgaacgcaagattcggccttagagcaatagtggcagatccagtgaccttcaaaagcaggagctcttaccttgccttggcaactctgcaagcatacgcctctatgcatctattcttccagtttaaaacaaccgcccctgacggactcttgcttttcaactcgggcaatggtaatgacttcattgtcatcgagctggtcaaaggatacatccactatgtctttgacctaggcaatggaccctctctcatgaaagggaattcggataaaccagtcaatgataaccagtggcacaacgtggtggtatcgcgtgaccctggcaacgtgcataccctgaagattgattcacgaaccgtgacgcaacactctaatggggctcgtaatctggatctgaagggcgaactttacattggtggtctgtccaaaaacatgttcagcaatcttcctaaattggttgcctctcgcgacggcttccagggttgcctggcctccgtggacctgaatggcaggctgccagatctcattgcagacgccctccacagaatcggccaggtggaacgaggctgcgacggaccatcaacgacttgcacggaagagtcatgtgccaaccaaggggtgtgcctacagcaatgggatggttttacctgcgattgcaccatgacgtcctacggtggacccgtgtgtaatgacccagggacaacttatatctttggaaagggcggagctttgatcacatacacgtggcctccaaatgatcggcctagtaccaggatggatagactggctgtagggttctctacgcatcagcgttctgcagttcttgtgcgtgtcgattctgcatccgggctcggggactatttacagttgcacatcgaccaaggaacggtcggagtaatcttcaatgtcggaacagacgatatcacgatcgatgaaccaaacgccatcgtaagtgacggcaagtatcatgtcgtccgttttaccagatccggtggcaacgcaaccttgcaggtggattcctggcccgttaacgagaggtacccagccgggaattttgataatgagaggctggcaattgctagacaaagaatcccctataggctggggcgcgtcgtggacgaatggctcctggacaagggccgccagctgaccatctttaactcgcaggccgctataaagataggcggccgtgatcagggaaggcctttccaaggccaggtgtctgggctgtattataacggcctgaaggttctggcccttgctgctgagtctgatcccaatgtgcgcacagaaggacacttacggctggtcggcgagggcccgagcgtgcttctgagtgctgagaccacggccaccactcttctcgcagatatggctactactattatggagacgacaacgaccatggccaccacgaccacacggagggggcggtcccccaccctgagagactcaactacccagaatactgatgatcttctcgtggcatctgctgagtgcccttctgacgacgaggatctggaggagtgtgagccttcaactgggggcgagctaattttgcccatcattactgaggacagcctggatcccccgcctgtggctacacggtcgccctttgttccccctcctcctaccttctatccttttctcacaggggttggcgcaacccaggacaccctccccccgcccgcagcgaggcgcccaccatctggcggaccatgccaggccgaacgtgatgatagcgattgcgaggaacccatcgaagccagcggctttgcttccggggaagtattcgactcttcgctgccacccacagacgacgaggacttctacaccacatttcctctggttactgatcgtactaccctgttgtccccaaggaaacctgcacctaggccaaacctgagaaccgacggcgccactggggccccgggtgtgctattcgctcccagcgccccagccccaaatctgccagccgggaagatgaaccatcgcgaccccctacagcctctcctggagaatccccctctcggcccgggcgcccctaccagcttcgagcctaggcgccctcccccacttagaccaggggtgacctctgcaccagggttcccccatctacccactgcgaaccccaccgggcctggtgaacgcgggcccccaggtgccgtggaggtgattagagaatctagctccacaacgggcatggtggttggaattgtggccgcagcagcgctgtgcatactgatcttactctacgctatgtacaaataccgtaacagggatgaaggctcttatcaggtcgatcagagtcggaactacatatccaacagcgctcaaagtaacggggcagtggtgaaggagaaagccccagcagcccccaaaactccgagcaaggccaagaagaataaggataaggagtattatgtgtag

SEQ ID NO: 126109 - DNA, 2001 bp, synthetic construct
  misc_feature 1..2001: note = Description of Artificial Sequence: Synthetic coding sequence
  source 1..2001: mol_type = other DNA
atgcctcccggcggttctggccccggtggatgtcctagaaggcctccagcactggccggtcccctgcctccaccaccacctcccccacctccccctttactgccgttgctgccactccttcttctcctgctgctgggagccgccgagggtgcgcgggtgagctccagcttaagcaccacgcaccacgtccaccatttccattctaagcatggaaccgtgcctatcgcgattaaccgcatgcccttcctgacccgaggcggtcacgcagggactacttatattttcgggaagggcggggccctgattacttacacctggcctcccaatgacaggcctagtactagaatggatcgcctcgcggtgggcttttctacccaccagcgaagcgcggtcttagtccgagtagatagcgccagtgggcttggtgactatctacagctccacatagaccaagggactgtaggcgtgatcttcaacgtgggaacagatgacattacgattgatgaacccaatgcaatcgtgagcgatgggaagtatcatgtggtcagattcacacggtctggaggcaatgccacccttcaggtagattcctggcctgtcaatgaacggtacccagccgggaacttcgacaatgaaaggctggctatcgctcggcaaaggattccttatcgcctgggccgcgtagtggacgaatggttgctggacaaggggagacagttaaccatctttaacagccaggcagccataaagattggcggcagagatcaagggcgaccctttcagggccaggtgtctgggctgtattacaatggccttaaggtcctcgccttagctgcagagagtgatcctaatgtgagaacagaaggccacctcagactggtaggtgagggcccatcagtgttgcttagcgctgagaccacagccactactctcctggccgacatggcaaccacaatcatggaaactaccaccaccatggccacaacaaccacccggcgcgggaggtcccccactctccgcgatagtacaacgcaaaacactgacgatctcctggtcgcttctgccgagtgcccctccgacgacgaggatcttgaagagtgtgagccctctaccgggggggaactgatcctccctatcattacagaagattccctggatcctccccctgtggccaccagatctcccttcgtacctccccccccaaccttctacccttttttgacgggtgtcggcgctacacaagatactctccctccacccgctgccagacggccaccctccgggggaccgtgtcaggctgagcgggacgactccgattgcgaagagccaatcgaagcgagcgggttcgcatcaggagaggtcttcgattcatctcttccgccgactgatgacgaagatttctatacaacctttcctctcgtcactgacagaactacgttactgtctccacgaaaaccagccccacgccctaatctacgcaccgacggggccaccggcgctccaggtgtgctgttcgccccgagcgcaccagcacccaacctccctgcgggtaagatgaatcatagggacccactccagcccttgctggagaaccctccattggggccgggcgctcctacgtcgtttgaacccaggaggcctccaccactccgccccggcgtaacttccgcccccggttttccacacctgccaacagccaaccccacaggtcctggtgaacgcggaccccccggagctgtagaagtcatccgtgaatctagcagtacaactggtatggtcgtaggcattgttgctgcggctgcgctgtgcatattaatcctgctttacgcaatgtacaagtaccggaacagagacgagggaagttaccaggtggaccagagcaggaactatatcagcaactctgctcaatcgaatggagccgtggtgaaagagaaagctcccgctgctcccaagacaccctccaaggccaaaaaaaacaaggacaaagaatactacgtgtag

SEQ ID NO: 126110 - DNA, 1299 bp, synthetic construct
  misc_feature 1..1299: note = Description of Artificial Sequence: Synthetic coding sequence
  source 1..1299: mol_type = other DNA
atgcacctgagaatacacgcccgtaggtctccccctcgaaggccggcgtggaccctcgggatctggtttttgttctgggggtgcatagtctccagtgtgtggagcagctcaaatgtcgcctcctcttcatctacttcttcgtcccctggatcccactcacagcacgaacaccacttccacggctctaagcaccactcagtgcctatctctatctacaggagtcctgtctcgcttaggggcggccatgctggagcaacgtatatcttcggtaagagtggcgggcttattttgtacacctggcctgcgaatgatcgaccgtcgacaaggtcggatagactcgcggtcgggttttccacgaccgttaaagatggcatccttgtccgaattgatagtgcacccggactcggcgacttccttcagctgcacatcgagcaaggaaagatcggagtcgtgttcaatataggtacagtggacatcagtatcaaggaagaaaggaccccagtcaacgacggaaagtaccatgtggttagattcacgagaaacggtggaaatgcgacactgcaggtggacaactggccagtcaacgagcactaccccacggggcgtcagctcacgatatttaacacccaggcacaaatcgccataggcggcaaagacaagggaagactcttccaagggcagctgtccggactgtattacgatggtcttaaagtcctgaacatggccgccgagaataaccctaatatcaagattaacggctcagtgcgtctcgtaggcgaagtcccttctatcctcggcacaacccagacgacatctatgcccccggagatgagcaccactgtcatggaaactaccaccacaatggccaccacaactacgaggaaaaataggagtacagcctctatccaacccacctccgatgatttagtgtcaagcgccgaatgcagctctgacgacgaggattttgtcgagtgtgagcctagcacagggcggtccgcaaatcccaccgaacctggcattagacgcgtccctggggctagcgaggtgatccgtgaaagctcttcaaccactggcatggttgtgggcattgtggcagctgctgctctttgtatcctcatcctcctgtacgccatgtacaagtacagaaatcgcgacgaggggagttaccaggtggacgaaactcgaaactacatatctaacagtgcacaaagcaacgggactctcatgaaagagaagcaacaatcctctaagagcggacacaaaaagcagaaaaacaaagatagagagtactatgtatag

SEQ ID NO: 126111 - DNA, 4932 bp, synthetic construct
  misc_feature 1..4932: note = Description of Artificial Sequence: Synthetic coding sequence
  source 1..4932: mol_type = other DNA
atgtcatcgactttacactccgtattctttaccctgaaagttagtatcttactgggcagtctgctggggttatgtctgggactggagtttatgggacttcccaaccagtgggctcgctatctgcgctgggatgcatctacccgctctgacctatccttccagtttaagaccaatgtgagcacggggctgctgctgtatctcgatgacgggggggtatgcgatttcctctgtctgagtctagtggacgggagggtgcagctgaggttcagcatggactgcgcagagaccgccgtgctgagcaataaacaggtgaatgatagctcctggcactttctcatggtaagtcgggacaggctcagaaccgtgctgatgttagacggcgaagggcagtctggcgaattacaaccccagaggccatatatggacgtggtctcggacttgttcttgggcggagtgccaaccgacattagaccaagcgcccttactcttgacggcgtgcaggcaatgcctggattcaagggcctaattcttgatctgaagtatggcaactccgaacctaggttgcttggcagcagaggagtgcaaatggacgccgagggcccttgcggggagcggccctgcgaaaatggggggatctgttttttgttggacggccaccctacctgcgattgtagtacaaccgggtacggcggtaaactgtgctcagagggcagtagcggcgacccatgcctcagccatcttatgatgtccgagcaggccagagaagaaaacgtggctacattcaggggaagcgaatacttgtgttatgacctgtcccagaaccctatccagagctcctcagacgagatcaccctgagcttcaaaacttggcagcgaaacggtctcatcctgcatacgggtaaatcggcggactatgtaaacctcgccctgaaagacggggccgtcagcctagtgattaacctcggctccggagccttcgaggctatcgttgaacctgtcaatggaaagttcaacgacaacgcttggcacgacgtgaaggtgacacggaacctcaggcaggtcacgatttccgtcgacggtattctcaccacaactgggtacacgcaggaggactatacaatgctcgggtcagacgactttttctacgtgggtggcagcccgtcaacagccgaccttccaggcagcccagtgtccaataactttatgggctgtctgaaagaagtggtttataaaaacaatgatattcggttggagctgagcaggctggctagaatagccgacactaaaatgaaaatctacggcgaggtcgtctttaaatgtgagaatgtggccacactcgatcccatcaacttcgaaactccggaggcgtacatctccctccctaagtggaataccaagcgtatgggttccatcagtttcgatttcaggactaccgagcccaatggacttatattgttcacacacggcaaaccgcaggagcggaaggatgcccgctcacagaaaaataccaaagtggacttctttgccgtggagctcctcgatggaaatctctatctacttctggacatggggtcggggacaatcaaagtaaaggccacgcaaaaaaaggctaacgacggcgaatggtatcacgttgatatccagagagacgggaggtctgggacgatctctgtgaatagccgtcgcacaccatttaccgcatccggtgaatcagaaatcctggatttggaaggagacatgtatctgggcggattgccggagaatagggcgggactcattttgccgaccgagctctggacagcaatgctgaattacggctatgtgggctgtatccgggacttgtttattgacggacggagcaaaaatatcagacaactcgctgaaatgcagaatgccgccggcgtgaaatctagctgcagccgtatgtctgccaaacagtgtgactcatacccttgcaaaaacaacgcggtgtgtaaggacggctggaacaggtttatctgtgactgcacagggaccggctattggggacgtacatgtgagcgagaggcctccatattgagctatgacggctccatgtacatgaagattatcatgccgatggtgatgcacaccgaggcagaggacgtgtcctttcggttcatgagccaacgggcctacggattactcgtggccaccacgtccagggacagcgctgataccctgagactcgagctggatggagggcgggttaagcttatggtgaacctcgattgcattaggatcaactgtaatagcagcaagggccctgaaacactgtatgccggacaaaagctgaatgacaacgagtggcacaccgttagggttgttcggcgcggtaagtctctcaagctcaccgtcgatgatgatgtagcagaagggaccatggtgggagaccacactagactggagttccacaacattgaaaccggcatcatgactgaaaagcgctacatcagtgtggtcccttcatcgttcattgggcacctacagagtctgatgttcaatgggctactgtatatcgatctgtgcaagaacggggacatcgattattgtgaactaaaagctcggtttggccttcgcaacattattgccgatcctgttacattcaaaaccaaaagcagctatctgtcactcgctacgctgcaggcttatactagcatgcacttgttttttcagttcaagaccaccagtccagatggttttattttatttaacagcggcgacggcaacgacttcattgcggttgagctcgttaagggatacatccactacgtttttgacctggggaatggtccaaacgtgattaaagggaactccgaccggccgctgaatgacaaccaatggcataatgtagtaatcaccagggataactcgaatactcatagcttgaaggtggatacgaaggtggtaacccaggttattaatggtgctaagaacttggacctcaaaggcgatctctacatggcaggacttgcccagggcatgtacagcaaccttccaaagctagtggcgagtcgagacggatttcagggctgccttgctagcgtcgacctgaatgggcgtttgcctgatctgataaatgacgccctgcatcggtctggacagattgagcgaggttgcgagggaccctctactacatgccaggaggactcttgcgccaatcagggggtgtgcatgcaacagtgggaaggctttacatgtgactgttccatgacctcttatagcggtaaccagtgtaatgatcccggagccacctatattttcggcaagagcggtggcctgatcctatacacctggcctgcaaacgatcggccttcaactaggagtgaccggctggccgttgggttcagtaccaccgtcaaggacggcatcttagttcgcatagatagcgcgcctggcttaggggactttcttcaactccatatcgaacaagggaaaattggggtcgtcttcaacattggcacagtcgatatctcgatcaaagaagagcgaacacctgtgaatgatgggaaataccacgtggtcaggttcacccgaaacggtgggaacgctacactgcaagtggataactggccagtgaacgagcactaccctactggtcgtcagctcacaatttttaatactcaggcccaaatcgcaataggaggaaaagacaagggccggctgttccagggccagctctctggactgtactacgacggcctgaaggtcttaaatatggctgccgaaaacaatccgaacatcaagatcaacggtagtgtcagacttgttggagaagtcccctccattctggggacaacacagaccacctcaatgccccctgaaatgagtacaacagtgatggagactacaaccactatggccaccaccacaactcgcaagaatcggagtactgcttcaatccagcccaccagcgacgacctcgtgtcaagcgcagagtgcagctccgacgatgaagacttcgttgagtgcgaaccttctaccgccagaggtgagctggttattcccctcctggtagaggaccccctcgcaacgcctccaatcgcgacaagagccccaagcatcacactgccacccacttttaggccactgctcactattatagagacaaccaaggacagcctttcaatgacctcggaagctggccttccttgcctgtcagatcagggctctgacgggtgcgacgatgacggtctggtaatttctggctacgggagcggcgagacattcgacagtaacctgccccctactgacgatgaggacttttatacaacattcagccttgtgactgacaagtctctgagcacgtccatcttcgagggcggctataaggcacatgcacctaaatgggagtctaaggactttcggcctaataaagtttccgaaacctcacgcacaacaaccacgtccttgtcaccagagctcatccgtttcacagcttccagcagtagcgggatggtacccaagctaccggctgggaagatgaacaatagagatctgaaaccacagcccgacatcgtgctgctcccactccctaccgcctatgagttagattcgacaaagctgaagtccccactgatcacatctcctatgtttagaaacgtgcctactgcaaaccctaccgagcctgggatcaggcgagtgcccggagcatctgaggtcattcgggaaagttcaagcaccactggaatggtcgttgggatcgtggcggcggccgccctttgtatcctgattctactttatgccatgtacaaatacagaaaccgcgacgaaggatcataccaggtcgacgagactcgcaactatattagtaattccgcgcagagcaacgggacccttatgaaggaaaagcagcagtccagcaagtccggccataagaagcagaaaaacaaagatcgtgaatactatgtatag

SEQ ID NO: 126112 - DNA, 4179 bp, synthetic construct
  misc_feature 1..4179: note = Description of Artificial Sequence: Synthetic coding sequence
  source 1..4179: mol_type = other DNA
atgagttctacactgcattccgtcttcttcaccctcaaagtgtctattctgcttgggtccttgcttggactgtgcttgggcctcgaattcatgggcttaccaaaccagtgggctaggtatctgagatgggatgcctccacacggagcgatctgtccttccagtttaagaccaatgttagtacaggcttacttctctacttggatgatggcggcgtctgtgacttcttatgccttagtctcgtggacggacgcgtgcagcttcgattctcaatggattgtgctgaaactgccgtactgtccaacaagcaagtcaatgatagctcttggcacttcctaatggtcagtcgagataggctgcgcacagtgctaatgttagatggagaaggtcagtctggggagctccaacctcaacgcccttatatggacgtagtgtccgatttgttcctcggcggtgttcctacagatattcgcccctccgcactcacactcgacggagtgcaggcaatgccaggctttaagggcctcattttggatctgaaatatgggaattccgagcccaggctactgggttctagaggagtccaaatggacgccgagggcccttgcggcgagagaccctgcgagaacggcggtatctgcttcttgctcgacggccacccgacctgcgattgttcgacgactgggtacggcgggaaattgtgctccgagggtctgtcccatttgatgatgtcggagcaggggaggtggaaggctcgtgaagagaatgtcgcgacttttcgcggttccgaatatctgtgttatgacctgtcccagaacccaatacagtccagttctgatgagatcacattgagtttcaagacctggcagagaaacggccttattttgcatacaggaaaaagcgctgactacgttaatttagccttaaaagacggagccgtttccttagtcataaatctgggatctggagcttttgaggctattgtggagcccgtgaatggcaaatttaacgacaatgcatggcatgacgtaaaagtaactcggaacttgcgacaagttaccatttccgtcgacggtatcttgacaacaaccggctacacgcaagaagattatacgatgctgggtagtgacgacttcttctacgtaggtggctctccatccaccgcagatctccctggctcccccgtctccaacaactttatgggttgtttgaaggaggtcgtgtataagaacaatgatataaggctggaattaagccgactcgctcgaatcgcggatacaaagatgaaaatctacggagaggtggtcttcaaatgtgagaacgttgcgacccttgatcccatcaattttgaaacccccgaggcatatatctctctgcccaaatggaacacgaaacgtatgggttctatctcttttgactttcgcacgactgagccaaacggcctaattctcttcactcatggcaaaccccaggagcgtaaggacgcccggtcccagaagaacacaaaagttgatttttttgcggtggaactgcttgatggcaacttgtatctgttgctcgacatgggctccggcacgatcaaggtgaaggcaacccagaaaaaggccaatgacggagaatggtatcacgtcgatattcaaagggatggccgcagcggtaccatcagcgtgaattcgaggcggactccctttacagcaagcggcgagagcgaaattctcgaccttgagggggatatgtacctgggtgggctgccagaaaacagggcagggctgattctaccaaccgagttgtggaccgcaatgctcaactatggctacgtaggctgcattagagatcttttcatagacggccgttctaagaatattaggcaacttgcagaaatgcagaacgccgcaggggtgaagagttcatgttccaggatgagcgccaaacagtgtgactcatatccgtgcaagaataatgccgtgtgcaaggacggctggaatagatttatctgcgactgtacaggtacaggctactgggggagaacatgcgaacgcgaggcgtctatccttagttatgacggctccatgtatatgaagatcattatgcccatggtgatgcacaccgaagccgaagatgtgtcttttagattcatgagccaaagagcctacgggctgctggtagcaacaacttccagggactcagccgataccctgcgtctggagctagacggcggacgcgtgaaactgatggtgaaccttggtaaagggcccgaaaccctgtacgccggacagaagctgaacgacaatgaatggcacactgttagggtggtccggcgggggaagagtctgaagctgacagtggacgatgacgtggctgaaggcacgatggtgggagatcatacacgcttggagttccataacattgaaactgggattatgactgaaaagcggtatatctctgttgtacccagctcctttattggtcacctgcagagcctgatgttcaacgggctgctgtacattgacctctgcaagaacggcgatattgactactgcgagctcaaggcaagattcggtctgcgtaatatcatcgctgatcctgtgacctttaaaactaaatcttcctatctgtccctggctaccctgcaggcttacacctccatgcatctgttctttcagtttaagacaacctcaccagatggatttattttatttaacagcggcgacggaaatgatttcatagcagtggagctggtgaagggctatatccattatgtctttgacctgggcaacggccctaacgtgatcaaaggcaatagcgatcgccccctgaacgataaccaatggcataacgtggtcataactcgtgataactccaatacacacagtctcaaggtagatacaaaagtagtaacacaggttattaacggcgccaaaaatctggacctgaaaggcgacctctacatggcaggattggcccagggcatgtacagtaatttgccaaaactggtagcaagcagagacggattccagggctgcctcgcctcagtggatctgaatggacggcttccagatttgataaacgatgctttgcacaggtctgggcagatcgagagagggtgcgagggaccatcaactacatgccaagaggacagttgtgccaaccagggcgtgtgcatgcagcagtgggaaggctttacttgcgactgttccatgacaagctatagtggcaatcagtgtaacgaccccggagctacatacatattcggaaagtccgggggtttgatcctgtatacatggcctgcaaacgatcggccttccacaagatctgatcgcctagctgtgggattctctacaaccgtgaaagatggcatattggtgcgcatcgacagtgcacccggcctcggagacttcctccagctgcacattgagcagggtaagattggggtggtttttaatatcgggacagtcgacatcagtattaaggaggagcgaactccagtgaacgatggcaaataccatgtcgtgcgcttcacacgtaacgggggtaatgctactctgcaggtcgataactggcccgtgaatgagcattatcccaccgggaatactgataacgagcggttccagatggtgaagcaaaagatcccattcaagtataaccgccccgtggaagagtggttgcaagagaaaggacgccagctgaccattttcaacactcaagcacaaattgccattggtggcaaagacaagggaagattgttccagggccagctgagtggactgtattacgacggtctcaaagtgttaaatatggccgctgagaataaccccaacataaagatcaacggttctgtgcgactggtcggcgaagttccctctatccttggaaccacccagacaacctctatgccacctgaaatgtccactacagtaatggaaaccaccaccacaatggccacaacaactacaagaaagaaccgtagcactgcgtccatccaaccgacttctgatgatctcgtaagcagcgcagagtgctcttctgacgatgaagacttcgtggaatgtgaaccatctactggacgaagcgccaggtccagcaacgcagcccgatctctacgagcagcactcacgtggacctggcgtctcacatacacttttacacccatcatatttatctcctgtgtcgtccattcatag

SEQ ID NO: 126113 - DNA, 3186 bp, synthetic construct
  misc_feature 1..3186: note = Description of Artificial Sequence: Synthetic coding sequence
  source 1..3186: mol_type = other DNA
atgctgggttccgacgacttcttttacgtagggggcagcccctcaacggcagatttgccagggtcacctgtctccaacaatttcatgggatgcctgaaggaggtagtttacaagaataatgatattcgactagagctgtctagattagcgagaattgccgataccaagatgaagatctacggcgaggtagtgttcaagtgtgaaaacgtggcaacattggaccctattaacttcgagactcccgaagcttatatttcactccctaagtggaacaccaagaggatgggctccatatcttttgattttcgcacaactgagcctaatggactgattctctttactcacggcaaacctcaggagcgcaaagatgcacgctctcagaagaataccaaggtggacttcttcgctgttgaactgctggacgggaatctgtatctccttctagatatgggctccggtaccatcaaagtgaaagcaacacaaaagaaggccaatgacggcgaatggtatcatgttgacatacagagggatggccggagcggcacaatcagtgtcaactcaaggagaacccctttcactgcctccggggagtccgagattttggacttagaaggggacatgtatctggggggattgcctgagaatcgggctggcctcattctcccaactgagctttggaccgctatgctgaactacggctatgtcggctgtattcgtgacctcttcatcgacggacgaagtaagaatatccggcagctggctgaaatgcagaatgccgccggcgttaaatcatcctgttctagaatgtccgcgaagcagtgtgattcatacccctgtaagaacaacgctgtttgcaaggatggttggaaccgtttcatttgcgactgcaccggtaccggttactggggtagaacctgcgagagggaggcctccattcttagttacgacggtagcatgtacatgaagattatcatgccgatggtgatgcataccgaggctgaggatgtttctttcaggtttatgtctcaacgggcatacggactactcgtggcaacaacatctagggactctgcagacactcttagactcgagctggatggggggcgtgttaagttgatggtgaatctggactgtattcgcattaactgtaactcatccaaaggacctgaaacactgtacgcgggccagaagcttaatgataacgagtggcatacagtccgagtggtgcgccgcgggaagtctctgaagctcaccgtcgacgacgatgtggcagaaggtacgatggttggggaccacacacgactagagttccacaatatcgaaaccggcatcatgactgaaaaacggtatatttcggtcgtaccttcatcgtttattgggcacttgcagtcccttatgttcaatgggctcctctatatcgacctgtgcaaaaatggtgatatagactactgcgagctaaaagctaggtttgggctcaggaacatcatcgccgaccccgtgaccttcaaaacaaaatcaagttacctgagcttggcaacactacaggcctatacctctatgcacctgttcttccaattcaaaacaacgagtcctgacggatttattctgtttaattccggagacggcaatgattttatcgccgtggaactcgtgaaaggatacatccattatgtcttcgacttaggcaacggccctaacgtcatcaaaggaaatagcgacagaccgctaaacgataatcagtggcataacgtggtgatcactagggataattcgaacactcactctctgaaagttgatacaaaagtagtcacccaggtgattaatggggccaaaaatctggatctgaaaggcgacttgtatatggctggcctcgcccagggtatgtactcaaatctacctaaacttgtggctagtcgagacggcttccaagggtgcctcgcctctgtagacttaaatggtagactgccagacctgatcaatgatgctctgcaccgctctggccagattgagcgcggctgcgaaggaccaagtaccacctgccaggaggattcttgtgccaatcaaggggtgtgtatgcagcaatgggaggggttcacttgcgattgttcgatgactagctatagtgggaaccagtgtaacgatcccggggctacctatattttcggcaagagcggagggcttattctttacacctggccagccaacgatcggccatccactcgcagtgacagactggccgtgggcttctctacaaccgttaaggacggcatcctcgtgcgcattgacagcgctcccggacttggcgattttttgcaactgcatatcgagcagggaaagatcggagtggtttttaatatcggcacggttgatatatccattaaagaggaacggacccccgtaaatgacggcaagtaccacgtggtccgtttcacacgcaatggcgggaatgcaacgctgcaggtggataactggcctgtcaatgaacattatcccacaggcaggcagctgaccattttcaacacccaggctcagattgctatcggggggaaagataagggccggctttttcaaggacaactgagcggcctttattatgatggcctgaaggtcctcaatatggctgctgaaaacaacccgaatatcaaaattaatggtagcgtcagactggtcggggaagtgcccagtatactgggtactacccagacaacaagcatgccccccgagatgtccacaaccgtcatggagaccacgaccacaatggcaacaaccaccacgaggaagaacaggagcacagcgagtatccagccaaccagcgacgatctggtgtcttcagctgagtgtagctccgacgatgaggacttcgttgagtgcgaaccaagtactgccaatccaaccgaaccaggaatacgtagagttccaggtgcgagtgaagttatccgggagagttcctcaactacgggcatggtggtcggaatcgtcgctgccgccgcactttgcatcctgattctgctgtatgctatgtataagtacagaaatcgcgatgaaggatcataccaagttgatgagacccggaactacatctcaaattccgcgcagagcaatggaaccctgatgaaggagaagcagcaaagcagcaaatcaggtcacaagaagcagaaaaacaaagatagagagtactatgtgtag

SEQ ID NO: 126114 - DNA, 1380 bp, synthetic construct
  misc_feature 1..1380: note = Description of Artificial Sequence: Synthetic coding sequence
  source 1..1380: mol_type = other DNA
atgcaccttagaattcacgcacggcgctcaccccctaggcgccccgcttggaccctgggcatttggtttcttttctggggctgcatagtatcatcagtgtggtcatccagtaacgtggcctcctctagctcgaccagcagttctcccgggtcccactcgcaacacgaacatcatttccacgggtccaaacatcactctgtcccgatctcgatataccggtctcccgtttccctacgtggaggccacgctggagccacgtatattttcggcaaatccgggggccttattctgtacacgtggcccgcaaatgaccggccctccacacgctcagatcgcctggcagtcggattttcaaccaccgttaaggacggaattctcgttcgtatagatagcgcgccggggctgggcgactttcttcagttacacatcgaacagggtaagatcggtgtggtcttcaatatcgggacagttgacatttccattaaggaggagaggactcctgttaatgatgggaaataccatgtcgtcaggtttacgagaaacgggggaaacgctacgctgcaggtcgataattggcccgttaatgaacactatccaaccggtaataccgacaatgaaagattccagatggttaaacagaagattcccttcaagtacaatcgtcccgtagaagagtggctccaggaaaagggcaggcaactgaccatcttcaatacgcaggcccagatcgccattggagggaaagataagggacggctgtttcagggccaattgtctggtctgtattacgacggcctcaaggtgctgaacatggccgccgaaaataatccaaatattaaaattaacggatccgttagactcgtcggcgaggtcccatctattctcggtacgacgcagaccacgtcaatgccaccagaaatgtcaaccaccgtgatggagaccaccacaaccatggccacgacaaccacacgaaagaacagaagtaccgcgagtatccagccaacctccgatgacctcgtctctagtgccgaatgcagctctgacgatgaagattttgttgagtgcgagccttctacagctaatcctactgaacctgggatccggcgagtgcccggagccagtgaggtgataagagagtcctcctccaccaccggcatggtcgtagggatcgtcgcagcagccgctctgtgtatacttatcctgctgtacgcaatgtacaaatacagaaaccgagacgagggctcttatcaggtggacgaaacgcgcaattacattagtaactccgcgcagtctaatgggaccctgatgaaggaaaagcagcaatcatctaaatctggtcataagaagcagaagaataaggatcgcgaatattatgtttag

SEQ ID NO: 126115 - DNA, 3186 bp, synthetic construct
  misc_feature 1..3186: note = Description of Artificial Sequence: Synthetic coding sequence
  source 1..3186: mol_type = other DNA
atgctgggtagcgatgacttcttctacgtgggaggttcgccatccactgccgacctgcccggctcccccgtgagcaacaatttcatggggtgtctgaaagaagttgtgtataaaaataatgacattcggcttgagctctcccgtctcgcgagaatcgcagacaccaaaatgaaaatttatggagaggtggtctttaagtgcgagaacgtagccaccttagacccgattaatttcgagacaccagaggcatatatctccttgccaaagtggaacacgaaacgaatgggcagtattagtttcgatttccggaccactgagccgaatgggctaatcttatttactcatggcaagcctcaagaacgtaaagacgccagatctcagaaaaacacgaaggtggatttcttcgccgtcgagctgctggacggcaacctgtacttgcttcttgatatgggatcgggtaccatcaaagttaaggctacccagaaaaaagctaacgacggcgagtggtatcacgtggacattcaacgggatgggcggtctggaacaatttcagtgaactccagacgtacaccttttactgcgagcggtgagtctgagattctcgatctggagggtgacatgtatctcggtgggctgccggaaaatagggcaggactcatcttacccaccgagctgtggacagcaatgcttaactatggttatgtcggatgtatcagggacctgttcatagacggacggtctaagaatatcaggcagctggccgagatgcagaatgccgcaggcgtaaagtcctcttgctctcgcatgtccgccaaacaatgcgactcttatccgtgtaagaataacgccgtttgtaaggacgggtggaatcgttttatctgtgattgtacgggcacggggtactggggcagaacctgtgagcgcgaagctagtattctgtcttacgatggtagcatgtacatgaaaattattatgccaatggtgatgcacacagaagcagaggacgtcagcttcaggtttatgagccagagagcatatggactcttggtggcgacaacctcccgcgattccgcagacacactgcgactggaactagatgggggtcgtgtgaagttgatggtgaacctggattgcatcagaatcaattgtaattcatcaaaggggccagagacactctatgctggccagaaactgaatgacaacgagtggcatactgtgcgcgtggttcgccgggggaagtccctgaagctgacagtcgacgacgatgtggcagaaggcacaatggtcggcgatcacacgcgccttgaatttcataacatagagacgggtattatgacggaaaagaggtacatatccgttgtgccatcatcttttattggtcacctgcaatcccttatgtttaatggtctgctttacattgacctctgcaagaacggggatatcgattactgcgagctgaaggcaaggttcgggctgcggaatataattgcagaccccgtgacatttaagaccaagtccagctatctttctctggctaccctgcaggcgtacacaagcatgcatctcttttttcaattcaaaactacctccccagatggatttattctgttcaatagtggtgatggcaacgacttcatcgccgttgagctggtgaagggatacattcactacgtcttcgatctgggcaatggcccaaatgtgataaaaggaaatagtgacagacctttgaacgataaccagtggcataatgtggttatcactcgggacaactcaaatacacacagtctgaaggtcgatacgaaggttgttactcaggttatcaacggggccaagaacctggatttgaaaggcgacctctacatggctgggttggcacagggcatgtattccaatcttccaaagctcgtcgcgtccagagatggcttccagggctgcttggcaagcgtggacttgaatggtcggcttccagacttgatcaacgacgctttgcatcggtcagggcagatcgagcgcggatgtgaaggtcccagcacaacgtgccaggaggatagctgtgcaaaccagggtgtctgtatgcagcagtgggaaggttttacgtgtgattgctctatgacctcttatagtgggaaccaatgtaatgaccccggcgctacctatatcttcggcaagagcggcgggctgatcctgtatacctggccagcaaacgaccgacccagcactcgcagcgaccggctggccgtcggattctcgacgacagtgaaggatggtatcctggtgagaattgacagcgcccctgggctcggcgacttcctgcagctccacatagaacaaggaaagataggggtagtgtttaacatcgggaccgtggacataagtataaaggaagagcgcacaccagttaacgacgggaagtaccacgttgtgcggttcactcggaatggggggaatgccacgctgcaggtggataattggccagtgaacgagcactatccgactggaagacagctaactatctttaacactcaggctcaaatcgcaattggcgggaaagataagggcagattgttccagggtcagctatccggactttactacgatggtttgaaggtgctgaatatggcggccgagaataatccaaatattaagattaacggctctgtgagactggtcggggaagtcccatccattttaggcactacacagaccacctccatgcccccagaaatgtccacgacggtgatggaaacgactactacaatggcaaccactacaacaaggaagaatagaagcaccgcctctatacagccgacttccgatgacctcgtgtctagcgctgaatgctctagcgatgatgaggattttgtggagtgtgagccgagcactgccaatcccactgagcctggaatccggcgtgtgcccggcgccagcgaggtaattcgggagtcgagcagcactacaggaatggttgttggcattgtcgccgccgcagctctgtgcattctcattctcctctatgccatgtataaatatcggaaccgcgacgaaggtagttatcaggttgacgagacaagaaactacatcagcaatagcgcacagtcaaatggtacacttatgaaggagaagcagcagagctcaaaaagcggccataaaaagcaaaagaataaggaccgcgagtattacgtctag

SEQ ID NO: 126116 - DNA, 1914 bp, synthetic construct
  misc_feature 1..1914: note = Description of Artificial Sequence: Synthetic coding sequence
  source 1..1914: mol_type = other DNA
atgcacctgagaattcacgccagaaggagtcctccccggcgacccgcttggaccttggggatatggtttctgttttggggttgcatagtctcctccgtgtggagttcctctaatgtggcgtccagcagcagcacaagctctagtcctgggtcgcattcccagcacgaacaccacttccacggctcgaagcaccattccgtgcccatttcaatctatagaagtcctgtctccctgaggggtggccatgccggggcaacatacattttcggaaaaagcgggggcctcattctatatacttggcccgcaaacgatcgaccctctacacgatcagatcgcctggctgtcggctttagtacaaccgtcaaggacggaattctggtccgaatcgactcagcccccggactcggcgattttctgcaacttcatattgagcagggcaagatcggcgtggttttcaacattggaactgtcgatatctcaatcaaggaggaacgaacacctgtcaatgatggcaaataccatgtggtcagattcaccaggaatgggggcaacgcgacccttcaggtcgataattggccagtcaatgagcactatccaacagggcggcaactaacaatcttcaatacacaggcacagattgccatcggtgggaaggacaagggacggctattccaaggccagctgagtggcttgtattatgacggtctgaaggtgttgaacatggctgctgagaacaacccaaacatcaagatcaacggctcggtgcggctcgtcggagaggtgccctctatacttggcactacccaaaccacaagtatgccccctgaaatgtctactactgtgatggaaacgaccacaacaatggctactactaccacccgtaagaacagatctacagcaagcatccagcccacctctgacgacctcgttagcagtgctgagtgcagctcagatgacgaagatttcgtggaatgcgagccttccactgggggcgagctggtgatccccctgctagttgaagaccctctggccactcctccaatcgccacgcgggccccgagtatcactctaccacccactttccgaccactgctgactataatcgagaccaccaaggattccttgtccatgaccagtgaagccggcctgccatgcctgtctgaccaaggttctgacggctgcgatgacgatggattggtgatcagcggctacggatccggcgagacctttgactccaatctgccacccacggacgatgaagacttttacaccaccttctccctggtcaccgataagtcgctgagtaccagcatctttgagggaggctataaagcccacgctcccaaatgggaatccaaggactttagaccaaacaaagtgtctgaaacttctcgaacaactacgacaagcctatcgccagaactcatacggtttacagcatcatcatcgtctggcatggtccccaagttacctgccgggaaaatgaataatagagatctgaagccacagccggatatcgtcctcctcccactccccaccgcatacgagctggactctaccaaactgaagagccccctaataacctcaccaatgttcagaaacgtgcctaccgctaacccaaccgagcctgggattaggagagtgcccggcgcctctgaggtgatccgggaaagtagctctacaacagggatggtggtgggcatcgtcgctgcagcagccctctgcattctcatcctgctatacgcaatgtataaatataggaaccgggacgaagggagctaccaagtggatgaaacccggaattacatctcaaactccgcacaaagcaacggaacgctgatgaaagaaaaacaacagagtagcaagagtggtcataagaagcagaaaaataaggatcgcgaatattacgtctag

SEQ ID NO: 126117 - DNA, 429 bp, synthetic construct
  misc_feature 1..429: note = Description of Artificial Sequence: Synthetic coding sequence
  source 1..429: mol_type = other DNA
atgggtcttaagctaaacggtaggtatatcagcttaatcctggcagtgcagattgcctatttagtccaggcagtccgagccgcaggtaaatgcgacgctgtgttcaaggggttttctgattgcctgctcaaattgggagactccatggccaattatcctcaggggctggacgataaaactaatattaaaacggtgtgcacctattgggaagactttcactcctgtactgttaccgccttaacggattgccaagaaggtgcgaaggatatgtgggataagctgcggaaggagtctaagaatctcaacatccagggctctctgtttgaactgtgcggctccggcaatggcgccgccgggtccctgctgccagctttccctgtactgcttgtcagcctgagtgccgcattagcaacctggttatcattttag

SEQ ID NO: 126118 - DNA, 8841 bp, synthetic construct
  misc_feature 1..8841: note = Description of Artificial Sequence: Synthetic coding sequence
  source 1..8841: mol_type = other DNA
atggcctcagaaaaacctgggcccggccccgggcttgagccccagcccgtgggtctgatcgcggtcggagcagccgggggcggtggcgggggctctgggggcgggggtactggcggctctggaatgggggaactgaggggcgcaagtggttccggaagcgtgatgctgccagcaggcatgatcaatcccagcgtgccaattaggaacatacggatgaagttcgccgtgttgatcggcctcattcaggtgggggaggtgagtaatcgggatatagtggaaacagtcctgaacctccttgtcggcggcgaattcgatctagaaatgaacttcattatccaagacgccgaatccataacatgtatgacagaactcttggagcactgtgatgtgacttgtcaggcggagatttggagtatgtttactgctatcctacgtaagagcgtgcggaacctgcagacctctacagaggtcgggcttatcgagcaggtcctcctgaagatgtccgctgtcgacgacatgatcgccgatcttttggtggacatgttgggcgtgctggcaagttattccatcactgttaaggaattgaagcttcttttctcaatgctccgcggagaatcaggcatctggcctcggcatgcagtgaagcttctgtcagtcctgaatcaaatgcctcagaggcacggtccagatactttcttcaattttccagggtgtagtgccgcagcaatcgctctgccgcctattgctaaatggccgtaccagaacggattcaccttaaatacttggtttcggatggatcctctgaacaacatcaacgtagataaggataaaccatatctttattgcttcaggacctctaagggtgtcgggtacagtgcacacttcgtggggaactgcctgatcgtgacctccctgaaaagtaagggcaaaggtttccagcactgcgtcaagtacgatttccagccaaggaaatggtatatgatttccattgtccatatctacaaccgatggcgcaatagcgagatcaggtgctacgtgaacggacaactagtgagctacggcgatatggcatggcatgtaaatactaacgacagctatgataagtgcttccttggcagtagcgaaacagctgatgcgaatagggtgttttgcgggcagcttggagcagtgtatgtgttttccgaggcattaaatcctgcccagattttcgcaattcatcagctgggccctggatataagtctacattcaagttcaagtctgagagcgacatccacctggcggagcatcataagcaggtcctatacgacggcaagctggcctcttctattgctttcacgtacaatgctaaggccaccgatgcacagctctgcctcgaatcttctccaaaagaaaatgctagcatatttgtgcatagcccgcatgccctgatgcttcaggacgtcaaagccattgtgacacattcaatacattcagcaattcacagcataggagggatccaagtcctcttcccactgtttgcccagttggacaatcggcagttgaatgattctcaggttgaaaccaccgtatgcgccactcttttagcttttctcgtggagctacttaagagctcagtggcgatgcaagagcagatgttggggggtaaaggatttctggtgatcggctacctcttggaaaagtcatccagggtccatataaccagggcagtgctagaacagttcctcagtttcgcaaagtacctggacggcctgagccacggcgcaccactgctaaagcagttgtgtgaccatattttatttaaccctgcaatatggattcataccccggccaaggtccaattgagtttgtacacctacctgtcggcagaattcattgggacggccaccatttatacgacaattaggagggtaggaactgtattacaattaatgcacaccctgaaatactactattgggtgattaatcctgccgactcatccgggatcactccaaagggtctggatggcccaaggccttctcaaaaggagatcatttcccttcgggccttcatgctattgtttctcaaacagctgatccttaaggacagaggagtcaaagaggacgaactgcagtctatccttaattatctgcttactatgcacgaagacgagaacatccacgatgtcctgcagctacttgtggccttgatgtctgagcacccagcctctatgattcccgccttcgatcagcgcaacggcatcagagttatctacaagctgttggccagcaagtctgaaagcatctgggtccaagccttaaaagtgctgggttattttctgaaacatctgggtcacaaacgcaaagtggaaatcatgcacactcattcccttttcacactcctgggtgagcggctcatgttgcacacaaatacggtgaccgtcacaacctacaacaccttgtatgaaattttgactgaacaggtgtgtacccaggtagtccacaagccacatcccgagccggattcaactgtaaagattcaaaacccgatgatcctgaaggtggtggcaaccctcttaaagaattccaccccgagcgctgagcttatggaagtgcggcgacttttcctatcagacatgattaaactcttctcaaacagcagggaaaaccgtcgctgtctcctgcaatgttccgtttggcaagactggatgttctctctcggctatattaatccaaaaaacagtgaggagcagaaaattacggagatggtctacaacattttcaggatcctgctctatcacgcaattaaatacgaatgggggggttggagagtgtgggttgataccttaagcatcgctcacagcaaggtaacatacgaggcccataaggagtacttggcgaaaatgtatgaagaataccagcgacaagaagaagagaatatcaaaaaaggaaagaaggggaatgtctcaactattagtggtttatcttctcagaccaccggcgccaaaggtgggatggaaatcagggagattgaggacctcagccagtctcagagcccagagtccgaaaccgactatcccgtgagcactgacacacgggatttgttaatgtctactaaggtgagtgatgatatactgggcaatagcgaccgccctgggagcggagtacacgttgaggtgcatgacttgcttgtggacatcaaggcagaaaaggtcgaggccacagaggtcaagctggatgacatggatctgtcgcccgaaacattggtagggggcgagaacggggccctagtcgaagtggagtctttgctcgacaacgtgtactcagcagccgtggaaaaacttcagaataacgtgcacggctccgtaggcattatcaagaagaatgaggagaaggataacgggcctctgatcactctagccgacgagaaagaggacttgccaaactcctccacctcgttcctgtttgataagatcccgaagcaagaggagaaactccttcccgaactctcaagtaatcatatcatcccaaacatacaggatacccaggttcacctcggggtcagtgatgacctagggctgctggcgcatatgaccgggtcggtggatctgacttgcactagctctattattgaagaaaaggagttcaaaatccacactacgtccgatggtatgagttctatctcggagcgggacctggccagctcaactaaaggtctggaatatgctgagatgacggccaccaccctggagactgagagttcaagcagtaaaattgtcccaaatatcgacgccggttccataatctccgatacagaacgctctgatgacggcaaagaaagcggcaaggagatccgcaaaattcaaaccactacaaccacccaggctgtgcagggacgtagcatcacacagcaggatagagatctccgcgtcgaccttgggtttcgaggaatgcccatgaccgaggagcagaggagacagttttcccccgggccacggaccaccatgttccgtattcccgaattcaaatggagccctatgcatcagagactcctgaccgatctgttgttcgcactggagactgatgtgcacgtgtggcgctctcattcgacaaagtccgttatggattttgtgaatagcaacgaaaatataatcttcgtacataatactattcacctcatttcccagatggtcgacaacatcattattgcctgtggaggcatactgccacttctgtccgctgccacctctcctactgtgagcaaaacagaattggaaaatatcgaggtcacccaaggaatgtcagctgaaaccgccgttacctttctatccagacttatggccatggtcgatgtgctggtattcgcctcctccctcaatttttcagagatcgaggcagaaaagaacatgtcttctggcgggctgatgcgccagtgcctgaggctcgtgtgttgtgtggccgttaggaattgtcttgagtgcagacagagacagcgcgaccgtgggaacaagagctcacacggctcctctaaaccacaagaggtcccacagtcggtgactgccactgccgcaagcaaaacaccccttgagaacgtgcctggtaacctgagtcctattaaggaccctgataggctcctgcaggatgttgatatcaacagattacgagcagtagtttttcgcgacgtggatgatagtaaacaggcacagtttctggccctcgcagttgtgtattttatttccgttctgatggtcagcaagtaccgcgacattttggagccacaaagagagaccacccgcacggggagccagccaggccgcaatatcagacaagagatcaattcaccaacgtcaaccgtcgtcgtcataccctctattccccacccctcattgaatcatggcttcctggcaaaactcattcccgaacagagcttcggacattctttctacaaagaaacccccgccgcgttcccagataccatcaaggagaaggagactccaactccaggagaagacatacaagtggagtcaagcattccacacacggacagtggtattggggaggaacaggtggcaagcatactcaacggagcagagttggaaaccagcacaggtccagatgccatgagcgagcttttgagcaccttaagtagtgaagtgaaaaagtctcaagagagtctgactgagaaccccagcgagacccttaagcccgccacctccatatcttccatctcacagactaaagggattaacgtaaaggaaattcttaagtcactagttgctgcaccggtggagattgccgagtgcggtcctgagccaataccatatcccgatcccgcactgaagcgagaaactcaggctatactacctatgcaattccactcctttgacagaagcgttgtggtgcctgttaaaaaacctccccctggctccctggctgttactactgtgggagccaccactgcaggtagtggactgcctaccggtagtacgagcaacatctttgcagccacgggagccacccccaaatcgatgatcaatacaacgggcgcagtggatagtggaagctctagctctagcagcagtagttcttttgtaaatggagctacttctaagaatttgcccgctgtacagacagtggcacctatgcccgaagactcggcagagaatatgtccatcaccgctaaattggaacgcgccctggaaaaggtggctccattgctgagagaaatcttcgtcgattttgctccattcctctcgcgcactctactcggctctcacggccaggagttgcttattgagggtctggtgtgtatgaagtccagtacgtcagtggtcgagctggttatgctgttgtgctcacaggaatggcagaatagcatccagaagaatgccggtctggcattcatagaacttattaacgagggcaggctcctttgccatgctatgaaagaccacattgttcgggtggccaacgaagccgagttcattctcaacaggcagagggcagaagatgtgcacaagcatgccgagttcgaaagtcagtgtgctcaatatgccgccgatcgtcgggaggaggagaagatgtgcgatcacttaattagtgcagcgaagcatcgggatcacgtcacggcaaaccagttgaaacagaagatcttgaacatattgactaacaagcatggggcctggggcgctgtgtcccactctcaactccatgatttttggagactcgattactgggaggacgacttaagaaggaggagaagattcgttcgtaatgccttcggctcaacgcacgctgaggctctgcttaaggccgcaatcgaatacggaaccgaagaggacgtggtgaaatctaagaagacattccggagccaggccatagtgaatcagaatgctgagacagagctgatgttagagggggacgatgacgccgtgtctcttttacaagaaaaggaaatcgacaacttagcggggcctgtggtgttgtctactccagcccagctcatagctccggtagtcgtcgctaaaggaactttgagcataacaactacagaaatctacttcgaagtcgacgaggatgatagcgccttcaagaagattgacaccaaagttctcgcatacactgaagggttacacgggaagtggatgttctcggagatcagggcagttttctcaaggagatatttgctgcaaaatacggccctggaggtatttatggctaatcgcacaagcgttatgtttaactttccagatcaagccaccgtgaagaaggtagtgtatagcttgcctcgggtaggagttgggacaagctacggccttcctcaggcccgccgcataagcctagccacgcccagacagctgtacaagtcatctaacatgacacagcgctggcaacggagggagatttccaacttcgaatacctgatgtttctgaatacaatcgccggcaggacatataacgacctgaatcagtatcctgtgtttccctgggtgctgaccaactacgagtctgaggaactggatctgacactgccagggaattttcgggacctttctaagccgattggcgcattaaatcctaagagggcagtcttttacgctgaacgctacgagacatgggaggatgaccaatccccgccctaccactacaatacacattattcaaccgcgacctcgacactttcttggctggtgagaattgaacctttcactacctttttcctgaatgccaacgatggaaaatttgatcacccagacagaaccttctcttcagtggcaaggtcttggcgcacgtctcaacgcgatacatccgacgttaaggagctgattccagaattctactacttgcccgagatgtttgtgaattccaatggctataacctcggggtacgcgaagacgaagttgtggtgaatgacgtcgatctcccaccatgggcaaaaaaaccagaggactttgtgcgcatcaatcgcatggctctcgaatctgaattcgtgtcatgccaactgcatcagtggatagatctcatctttggctacaaacagcgcggacctgaggcagtcagagccttaaatgtgttccattatctaacatatgaaggttctgtcaatctagattctatcacggaccccgtgctgagggaggctatggaggctcagattcagaacttcggccagacacccagccagttgctcattgaaccccacccaccacggtcgagcgccatgcacctgtgttttctgccccaaagtccattgatgtttaaggaccagatgcagcaggatgtgatcatggtgctaaaatttccatccaactccccggtgacccacgtcgcggctaatactttaccccacttaaccataccagcagtcgtgaccgtgacgtgttctcgattgtttgccgtgaaccgttggcacaatactgtcggactcagaggcgccccaggatatagccttgaccaagcccatcatctgcctattgagatggaccccttgatcgcaaataattcaggcgtgaacaaacggcagatcactgacctcgttgaccaatcgattcagattaacgctcactgctttgtggtgacagcagataatcggtacatcttgatctgcggattttgggataagagttttcgggtgtactcgaccgagactgggaagctcacacaaatcgtctttggacactgggacgtcgtgacgtgcctcgcgaggagtgagtcttatattgggggagactgctacatcgtatccggatcccgcgacgccacactactactgtggtactggagcggccggcatcacattataggggataatccaaactcatccgattatcctgctcccagagccgttcttacaggacacgaccatgaggtagtttgtgtctctgtctgcgccgagctcggacttgtgatctcaggtgctaaggagggtccctgccttgtgcatacaatcactggagacctgttgcgggcgctggaagggcctgagaattgccttttccctagactgatttctgtgtcctctgaggggcactgcatcatttattacgagcggggtcgcttctccaacttctcaatcaacggtaagctcctggcacagatggaaatcaatgattctacacgagccatccttctgtcttccgatggacagaacttagtgaccggcggtgataacggagtggtcgaggtgtggcaggcttgcgattttaaacagctgtatatctatccggggtgtgacgccggcatccgggccatggacctctctcatgaccagcggactctaattaccggcatggcttcagggagtatcgtggcttttaacatagacttcaacagatggcactatgaacaccagaaccgctattag

SEQ ID NO: 126119 - DNA, 1575 bp, synthetic construct
  misc_feature 1..1575: note = Description of Artificial Sequence: Synthetic coding sequence
  source 1..1575: mol_type = other DNA
atgttcgttaattccaacgggtacaatctcggcgtgagggaagacgaagtggtggtcaacgacgtggatctgcccccatgggcaaaaaaacccgaggattttgtccggatcaatcgcatggctcttgaaagcgaattcgtcagctgccagctccaccagtggattgacctgatttttgggtacaagcagcgcggcccagaagctgtccgcgcgctgaacgtgtttcattatctcacttatgagggctctgtaaatctcgactccatcactgatcctgtgctgcgggaaattcctgaagcctattttattagggatccccataccttcctcttaactaaagacttcatcaaagccatggaggcccagattcaaaactttggacagaccccttcacaactgcttatagagccccatccaccccgaagttccgccatgcacctgtgctttctcccacagtctccactgatgttcaaggatcaaatgcaacaggatgtcatcatggtgctcaagtttccctccaatagcccagtaacacacgtcgccgctaacacactgccacacctaactatccccgccgtcgtgacagtgacgtgctctagattatttgcagtcaatcggtggcacaatacagttggccttcgaggggcgcccggctatagtcttgaccaggctcaccacctgccaattgaaatggaccccctcatagccaataacagcggcgtgaataaaagacagattaccgacctcgttgatcagtccattcagatcaatgcacactgttttgtcgtcactgccgacaatagatatattctgatttgcggcttttgggataagagttttagggtgtattcgaccgagactggaaaactgactcaaatcgtatttgggcactgggatgtagtcacttgtttggcacggtcagaatcttacatcggcggcgactgctatattgtatccggatctcgggatgccacactgcttctttggtactggagcggccggcatcacattattggcgataacccgaactctagcgattaccctgctcctcgcgctgtgcttacgggacatgatcatgaagtagtgtgtgtatcggtgtgcgcagaattgggcctcgtgatctctggggcaaaggagggcccatgcctggtacatactattactggtgacctcctgcgcgcgcttgaaggccccgaaaattgtttgtttcccaggcttatcagtgtttcatccgaggggcactgtatcatctattacgagagaggcagattttctaacttctctatcaacggcaagctgcttgcacaaatggaaattaacgactccacccgcgccatcctcctgagcagtgacggacagaacctagtgactgggggagacaacggcgttgttgaagtgtggcaggcatgtgactttaagcagctttacatttatccaggctgtgatgctggcattagggctatggatttgtcgcacgatcaacgtacactgattactggcatggccagcgggtcgattgtggccttcaacatcgatttcaaccgctggcattatgaacaccaaaaccgatactag

SEQ ID NO: 126120 - DNA, 8832 bp, synthetic construct
  misc_feature 1..8832: note = Description of Artificial Sequence: Synthetic coding sequence
  source 1..8832: mol_type = other DNA
atggcttcggaaaaaccggggcccgggccaggtcttgaaccgcaacctgtgggccttatcgccgtgggcgccgccgggggagggggcggcggttcaggtggcgggggaaccgggggctccggcatgggggaattgagaggggcgagcggaagtggatctgtgatgctgcctgcgggcatgatcaaccccagcgtgccaatcaggaatatcaggatgaagttcgccgtgctcatcggcctcatacaagttggagaagtgtccaatagggatatagtcgagaccgtgctgaatcttctagttggtggtgagttcgacctcgaaatgaatttcattatacaagatgctgagtcaatcacgtgcatgacggagttactggagcactgcgatgtcacttgccaggccgagatctggtccatgtttacggccatcctgcggaagtccgtccgaaatctgcaaacttcaaccgaagtgggactgatcgaacaggtgttattgaagatgagcgcagtcgatgatatgattgccgatctgctcgtagatatgctgggggtgcttgccagctattcaattacagttaaggaactcaagctgcttttttccatgctgaggggggaatctggcatttggcctagacatgccgtcaaactgctgtcagtactgaaccaaatgccccagcgccacggtcccgacaccttcttcaacttccccggctgcagcgccgccgccatcgccctaccccctatcgccaagtggccataccagaacggattcactttgaacacctggtttagaatggatcctctgaacaatatcaacgttgataaagataaaccatacctgtattgcttccgcacgagtaaaggagtcggatattccgcccacttcgtggggaattgcctcattgtgactagtctcaagtctaagggcaagggcttccaacactgtgtgaaatatgatttccagccccgcaagtggtacatgattagtatagtgcacatttacaatagatggaggaatagcgagatccgatgctacgtgaacggtcagctggtatcctatggcgacatggcctggcatgtgaacacaaacgatagttatgacaagtgttttctcggcagctccgagaccgccgacgcaaacagggtcttttgtggacaactcggggccgtctacgtcttttcagaggctttgaaccccgcacagatttttgctatccaccagcttggtcctggctataaaagcacctttaaattcaagtcggaatccgatattcacttggctgagcatcataagcaggtgctgtacgacggcaaattggcctcttccatcgcattcacatacaacgccaaggccactgatgcccagctttgtctcgaatcttctccaaaagaaaatgctagcatatttgtccactccccccatgcgttgatgttacaagatgtgaaggctattgtgacccatagcatccacagcgccatacacagcatcggcggaatccaggttctctttcctctgtttgcgcagctcgacaataggcagctgaacgactcccaagtggagactaccgtttgtgccactctgcttgctttcctcgtggaattgctgaagtcatctgtagctatgcaggaacagatgttgggcggtaagggctttctggtcatcgggtatttgctcgaaaagtcctctagagttcatattacccgggctgtgttggaacaattcctgagttttgctaaatacttagatggcctttcccacggagcgccactcctgaaacaattatgcgaccatattctgttcaatcccgccatctggatccacacccctgcaaaagtgcagcttagcctgtatacatacctgtctgcggaattcataggtaccgcaactatctacacaaccatcagacgtgtgggaactgtgctgcagctgatgcacacgctgaagtattattattgggtaattaatcctgcagactcctccggcatcaccccaaaagggctcgacggccctcggccttcacagaaggaaatcataagcttacgggctttcatgctgctgttcctcaaacaactgatcctcaaggacaggggggtgaaggaggatgaactgcagtcaatactgaattatcttcttactatgcacgaggatgagaacatccatgacgtgctgcagcttttggtcgcactgatgagcgaacaccctgccagcatgattcctgctttcgatcaaagaaacggaatccgtgtcatttataagttgttggcatctaaaagcgaatccatttgggtccaggcactgaaagttctcggctattttcttaaacatctgggccacaagcgaaaggtggagattatgcatacacatagcctctttaccttacttggtgaaaggcttatgctgcacacgaacaccgtgacagtgaccacctacaacaccctgtatgaaattctcaccgaacaagtttgtactcaggttgtacacaaaccccatcccgagcccgattcaacggtcaaaatccagaatcctatgatactgaaagtcgttgccactctcttgaaaaactctactcctagcgcggagctcatggaggtgaggcgtcttttcttatccgacatgatcaaacttttctcaaactcccgggagaataggcgctgcctcctgcagtgtagcgtgtggcaagattggatgttcagcctgggctacattaaccccaagaattctgaagaacagaagatcaccgagatggtgtacaatatctttagaattttgctttatcatgcgattaagtatgagtgggggggttggagagtttgggtggatacactttctatagcccactcaaaggtaacttatgaggcccacaaggagtacctagcgaagatgtatgaagaataccagcgccaggaggaagaaaacattaagaagggaaagaaagggaatgtgtcaactatctccggactgtctagccaaacaacgggagctaaaggaggcatggaaatccgggaaatcgaagatctcagccagtcacagtcacccgaatccgagaccgattaccctgtgtctacagatacacgggatctgttaatgagcactaaggtcagcgacgacattcttggcaattcagaccgacctgggtctggcgtacacgtggaagtgcacgatctgctggtcgacattaaggcggagaaggttgaagccaccgaggtgaaactggatgacatggatctatcacctgagacactggtgggcggcgagaatggggctcttgtcgaggttgaatcgcttttggacaacgtgtacagtgccgcagttgaaaaactgcagaataatgtgcatggctcagtcggtattataaagaaaaatgaagagaaagacaatggacctcttattacactggctgacgaaaaggaagacctacccaatagttcgacctcatttctattcgacaagatccccaagcaggaggagaaactcctgcctgagctttccagcaatcacattattcccaacattcaggatacccaagttcacctaggcgtgtctgatgatctgggcctactggctcacatgactggctcagtagatctgacatgtacctcaagcataattgaggagaaagagtttaagattcacacgaccagcgatggtatgtccagcatcagcgagagggatctcgcaagctccacaaagggactggagtacgcagagatgacggcgactacactggaaactgaatcctcgtcgtccaagatcgtgcccaatatcgatgcaggctccatcatcagtgatacggagcggagtgacgacggaaaggaatccggcaaagagataaggaagattcagacaaccacgaccacccaagctgtgcagggaagatccattacgcagcaggatagggacctgcgggttgatctaggttttaggggcatgcccatgacagaggaacagcgaaggcaattttccccaggtccacggacaactatgtttagaatacccgagtttaagtggagtcccatgcatcaaaggctgctcacagatctgttgttcgcactggagacagatgttcacgtgtggcgcagtcacagcaccaaaagtgtgatggatttcgtgaacagcaacgaaaacattatcttcgtgcataataccattcatctgatcagtcagatggtcgacaacattatcatcgcgtgcggagggatcctgccactgctgtccgcagcaacaagcccgaccactgaactggagaacatcgaggtgactcagggtatgtctgcggagaccgcagtgaccttcttaagtaggcttatggccatggtggacgtgctcgtgtttgcctccagtctcaacttttccgagatagaggccgagaagaacatgtccagcggcggcctgatgaggcagtgtttgcgccttgtgtgctgtgtggctgttcgcaactgtctggaatgccgccagagacagcgggatcgtgggaataaatccagtcacggatcaagcaagcctcaggaagtcccacagtctgttacagcaacagccgctagcaaaactcctctggaaaacgttcccggcaacctgtccccaatcaaagaccccgaccgcttgttacaggacgttgacatcaatagactccgagcagtagttttccgcgatgtggacgacagcaaacaggctcaatttttggcattagctgtagtgtattttatctccgtgcttatggtgtctaagtaccgcgacatcctggaacctcagcgcgagacgaccagaaccggcagtcagcccggccgcaacatacgccaagagattaattctcctacttctacagttgtggtaattccaagcatacctcacccatcattgaatcatgggttcctggccaaactgatacctgaacaaagctttgggcactcattctataaagagaccccagccgcctttccagatacaattaaggaaaaagaaacccccacccctggcgaggacatccaagtggagagttcgatcccacacaccgatagtggtatcggcgaagaacaagtcgcttccatcctgaatggtgctgagttggagacaagcaccggtccagacgcaatgtcagaactgctgtccaccttgtcaagtgaagtgaaaaaaagtcaggagtccctgacggaaaatccaagcgagactctcaagcccgccactagcatttcgtccatctctcaaaccaaaggaatcaacgtgaaggagatcttaaaaagtctcgtcgctgcgcctgtggaaatagccgaatgtggtcccgagccgataccctacccagatcctgccctgaagagagaaactcaagccattctcccaatgcagttccattcattcgatcggtctgtggtcgtaccagtaaagaagcctcctcctggatccctcgcagttaccacagtgggagccaccacggcagggtctggactgcccacgggatcaaccagtaatatctttgctgccactggagctacacctaaaagcatgatcaacacaactggggccgtagacagcgggtcttcatcttcgtctagtagcagttcctttgtgaatggcgccacgtctaaaaacttacccgccgtgcagaccgtggctcctatgcctgaggacagcgcggaaaacatgagtatcaccgctaaactggagcgggctctggagaaggttgcacctttgcttagggagatcttcgttgactttgctcccttcctctctcggactctacttgggtcccatggacaggaactcttgattgaaggcctggtgtgtatgaagtcgtctacatccgtggtagaattggttatgttactgtgtagccaggaatggcagaactcaatccaaaaaaacgcagggctggccttcatcgagctcataaatgaagggcgcttgctgtgtcacgccatgaaagaccacattgtgagagtcgcgaacgaagctgaatttattctgaatcgtcagcgggccgaagatgtgcataaacatgccgaattcgagtctcaatgtgcccagtatgcagctgaccgacgcgaagaggaaaaaatgtgcgatcatctgatttccgccgcaaaacacagggaccatgtcactgcgaaccagctgaagcagaaaattttgaacatcctaactaacaagcatggggcatggggcgctgtcagccattctcagttacatgatttctggcggcttgactactgggaggacgacttgagaagacgaagaagatttgtccgaaacgcttttgggtcgacacatgcggaggctctgctaaaggccgcaatagaatacggaaccgaagaggacgtggtgaaatcaaaaaaaaccttccgaagccaggctattgtaaatcagaacgcagagacagagttgatgctagagggcgacgacgacgcagtgtctctgctgcaggagaaagaaatcgacaacctcgcgggtccagtggttttgtccacacccgcccaattaatcgcacctgtggttgtagccaaagggactctatctatcaccaccaccgaaatctacttcgaagttgacgaagacgactcagcatttaaaaagatcgacacaaaagttctggcgtacaccgagggacttcacggcaaatggatgttctccgagattcgtgctgtgtttagtcgccgctatttgcttcaaaacactgccctggaggtgtttatggctaaccgcacatccgtaatgtttaacttcccggatcaggctactgtgaaaaaggtggtctattcactgccccgcgtgggggttggtacctcatatgggctgcctcaggctcgcagaatctcactcgcaacaccaaggcagctgtataaaagctcgaatatgacccaacggtggcagaggagagaaatctcaaactttgaatacttgatgttcctgaataccatagctggccgaacatacaatgatttgaaccagtatcctgtgtttccatgggtgcttacgaattatgagtctgaggagctggatcttacattacccggaaactttcgcgacttaagtaaaccaattggtgcactaaaccctaagcgagccgtcttttatgcagaacggtacgaaacatgggaggatgaccagtcccccccttatcactacaatacccactatagcactgcgacgtctacactgagttggctagttaggatcgaacccttcaccacttttttcctgaatgcaaacgatggaaaattcgatcacccagataggacctttagctccgtggccaggagctggaggacatctcagcgggataccagcgacgtcaaggaacttattccagagttttactacctgccagagatgttcgtgaacagtaatgggtataacttaggggtaagagaggacgaagtggtggtcaacgatgttgatctccccccctgggcaaaaaaacctgaagactttgtacggataaatcgcatggctcttgagtcggagttcgtatcatgccaactgcatcaatggatcgacctgatatttggatacaagcagcgtggacctgaagcagtacgggctttaaacgtttttcattacttaacctatgaaggatccgtcaatctagatagcattaccgatccagtgctacgagaagcaatggaagctcagatccagaactttggccagacaccaagccaactgctcatcgaaccacacccccccagaagctcagccatgcatctctgtttcctgccccagtcccccctgatgtttaaggaccagatgcagcaggatgtgatcatggtcctgaaattccccagcaattcccccgtgactcatgttgctgctaatactctgcctcatcttaccattccagcagtggtgacggtgacttgctcccgtctgttcgcagtgaatcgatggcataataccgtgggcctgcgtggggcccctggatactcattggaccaggctcaccaccttccaatcgagatggatccactcatcgcaaacaattccggcgtcaacaagcgtcagatcacagacctggtggaccagtccatccagataaatgcacactgctttgtggtgacagcggataaccgatacatccttatctgcggattttgggacaagtcttttagagtgtacagcactgagaccggtaagctcacacaaattgtattcggtcactgggatgtcgtcacttgtctggctcgtagcgagtcctatatcgggggcgactgttacattgttagcgggtctcgtgatgccacactgctactgtggtactggtctggaagacaccacatcatcggagataatcctaactctagtgattaccctgctcccagagccgtactcacaggccatgaccacgaagttgtgtgtgtatctgtctgtgcggagcttggactggtaatctcaggcgctaaggaggggccctgcttggtgcacactattacgggtgatctacttagagccctcgagggacctgagaactgtttattccctcggttgatctctgtgagcagcgagggacactgcataatttattacgaaagaggcagattcagtaatttctccattaatggcaagcttcttgcgcagatggaaattaacgactcaacccgagccatacttcttagcagtgacggacaaaatctggtgaccgggggggataatggagtcgtagaggtctggcaggcctgcgacttcaaacagctctatatctacccgggttgtgatgcggggatccgggccatggatctctctcacgaccagaggacgctgatcaccggcatggcctcaggctcaatcgtcgcctttaacattgatttcaacagatggcactatgaacatcagaatagatactag

SEQ ID NO: 126121 - DNA, 8841 bp, synthetic construct
  misc_feature 1..8841: note = Description of Artificial Sequence: Synthetic coding sequence
  source 1..8841: mol_type = other DNA
atggcaagcgagaaaccggggccgggccccgggttggagccacagcctgtcgggctcattgccgtcggggcggccgggggaggaggaggagggagcggaggcggcggaacaggcggttcaggaatgggagaattgcggggagcaagcgggtccgggtccgtaatgcttccagcagggatgattaacccatcagtccctatccggaatataaggatgaaatttgccgttctaatcggactgatccaggttggagaagtgtctaaccgggatatcgtggaaacagttcttaacttgctggtgggaggcgagtttgacctggagatgaatttcataatccaggatgctgagagtatcacgtgtatgactgaattgttagagcattgtgacgtgacatgccaggccgaaatatggtcgatgtttacagcaattctgcggaaatccgtgcggaatctacagacctccacggaggtggggctgattgagcaagtcctgctcaaaatgtcggccgtggacgatatgattgctgatcttctcgtcgatatgctaggggtgctggcctcatacagtattacggtgaaggaacttaagctattgttttcgatgttgaggggagaatcagggatttggcccaggcatgctgtgaaattactgtccgtcttgaaccagatgcctcagcgacatggccccgatacttttttcaatttccctggatgctcagctgcagccattgcactacctcctattgcaaagtggccctatcaaaatggctttacccttaatacttggtttaggatggatcccctgaacaacatcaacgtggataaagataagccctatctgtattgttttcgcacctcaaaaggggtgggctattctgcgcattttgtgggcaactgtctgatcgtgacctccttgaagagcaaggggaaggggttccagcactgcgtgaagtacgatttccagcctcggaaatggtacatgataagcattgtccatatttataaccggtggcgcaattctgaaattagatgctatgtaaatggacaactcgtaagctatggggacatggcatggcacgtcaacacaaatgatagctatgacaagtgttttctggggagtagtgaaaccgcagatgctaaccgggtgttctgtggtcaacttggtgctgtctacgtcttcagtgaagctttgaacccagcccagatttttgccatccaccagcttggtcccgggtacaagtccaccttcaaattcaagtctgagtccgacatccaccttgcggagcatcacaagcaggtgctttacgatggtaagctggcaagcagcatagcatttacctacaacgccaaggcgacagatgctcagctgtgcctggagagttctccaaaggagaacgcatctatcttcgtgcacagtcctcatgcactgatgctacaggacgttaaggcgatcgtcactcacagcattcactctgcgatccattctatcggcggcattcaggttctctttccactatttgcccaattggacaatcgccagttaaacgacagccaggtcgagaccaccgtgtgtgctacccttttagcattcttagtggagctgctgaagagctctgtagccatgcaagaacaaatgctgggagggaagggttttctcgtgatcggctaccttcttgagaagagcagtagagtgcacatcacacgggccgtgttagaacaattcctgagcttcgcaaaatatctcgatggcttgtcccacggggccccactgttaaaacagctgtgtgatcatatcctttttaaccccgctatttggattcacactccggcgaaagtgcagctgtcgctctatacctatttaagtgctgagtttatcggcaccgctaccatttacacaactatcagacgtgtgggtaccgttctccagttaatgcatactttaaaatactattattgggtgataaatcccgctgacagttcaggaatcacacccaaaggactagacgggccccggccaagtcaaaaagagatcatctcactgcgcgcgttcatgctgttattcctgaagcagctcatcctgaaggaccgtggggtgaaagaggacgagctgcagagcatcctgaattacctcctgactatgcatgaagatgaaaatatacacgatgtcctccagctcctagtggctctgatgtcggaacaccccgcaagcatgattcccgcctttgaccagcgtaacgggattagggttatctacaaactcctggcatccaaatcagaatctatctgggttcaggcactcaaagtgctcggatactttctaaagcatttgggccataaaagaaaggtggaaatcatgcacactcactcactcttcacactcctgggcgaacgactgatgctccacactaacactgtaactgttacgacatacaataccctttacgagatactcactgagcaggtatgtacccaggtggtgcataaacctcatcccgagccggattccactgtgaagatacagaatccaatgatccttaaggtggttgctaccctactcaagaacagtacccctagtgcagagctgatggaggttcgcagactgttcctaagcgacatgattaagctattttccaactctcgtgagaatagacggtgcctacttcaatgctctgtctggcaggactggatgttttcgctgggctacataaatccgaagaactctgaagagcaaaagataaccgagatggtgtataatatctttcggattctgttatatcatgcaattaagtatgagtggggggggtggagagtgtgggtggacactttgtcaattgcgcatagcaaggtgacctacgaggcccacaaagagtacctggctaagatgtacgaagagtatcagaggcaggaagaagagaacatcaagaagggaaagaaaggcaacgtcagcaccatttctggcttgtcatcccagacgaccggggccaaaggtggtatggaaatccgcgaaatcgaggatctttcccaaagccagtcccctgagtctgaaaccgactaccctgtgagcaccgacacaagagatctcctcatgtcgaccaaagtcagtgacgatatcctgggtaattccgatcggccaggaagcggcgtacatgtcgaagtgcacgaccttcttgtggacattaaggctgaaaaggtggaggccaccgaagtgaagctggacgacatggatctaagcccggagaccctagtgggaggtgagaacggcgccctggtggaggtggaaagcttgctggataacgtatatagcgccgccgtggagaagctccagaacaacgtgcacggaagtgtgggcattataaagaagaatgaggagaaggataacggacctttaatcactctggccgacgagaaggaggacctgcctaattcttctacaagttttctgttcgacaagattccgaagcaagaggaaaagttgctgcccgaactcagtagcaatcatatcatccctaatattcaggacactcaggtacatctgggggtgtccgacgatctgggcctgcttgcccacatgaccgggagcgtggacttaacatgcacaagttcgataattgaggaaaaagaatttaagattcataccacctctgacggaatgtcgagcatctcagagcgcgacttggcaagttcgaccaaaggcctcgagtatgccgagatgactgctacaaccctggagacggagtcgtccagttcaaagattgtgccaaatatcgacgccggaagtatcatctcagacacggagcgcagcgatgatggtaaagagtcagggaaggaaatccgaaagattcagactacaaccactacccaagcagtgcagggacgctctattacacaacaggatcgcgatctccgcgtggatttgggatttcgcgggatgcccatgactgaggagcagaggcggcagttttcgccaggcccacgcacaacaatgttcagaattccagagtttaaatggtcgcctatgcatcagaggttgctgaccgatctcctttttgctcttgaaaccgacgtccacgtatggagatcacattccacaaagagtgtcatggacttcgtgaacagcaacgaaaacatcatcttcgtgcataacacaatccatctcatctcccaaatggtcgataacatcattatcgcatgcggggggattttgcccctacttagtgctgctacaagtccaactggatcgaagaccgagctggagaacatcgaggtcacgcaggggatgagcgcagagaccgcagtgaccttcttatctcgtctcatggctatggtcgacgtcctcgttttcgctagtagtctgaattttagcgaaattgaagccgagaagaacatgtccagtggtgggttgatgcgccagtgcctccgactggtctgttgcgttgcagtccgcaattgcctcgaatgtagacagaggcagcgggacagaggcaacaagtcttcccacggatcgagcaaaccacaggaggtcccgcaatccgtgaccgctactgcagcctccaaaaccccgttagaaaatgttcctggcaacctctctccaatcaaagatccggatcgcctgctgcaggatgtggatatcaacaggcttcgggcagtcgtgtttcgagacgtggacgattctaaacaggcacaatttctagcattggccgtggtgtactttatctctgtgttgatggtgagcaaatatagagatatcctggagccacaaagagaaaccactagaacagggtcccagccaggccgaaatattcggcaagaaatcaatagccccacttctaccgtcgtggtcatccctagcattccgcacccgagccttaatcacgggtttttggctaagttgatccctgaacagagctttgggcacagtttctataaagaaacccctgctgctttccccgacacgatcaaggagaaagaaacgcctactccgggagaggatattcaggtagagtcctccatcccacatactgattcaggaatcggagaagagcaagttgcgtctatcctgaatggtgcagagctggaaacatctactggtccagacgcaatgagcgagctgctgtctaccctgtcctctgaggttaagaaatcccaggaatctttaactgagaacccctctgagacactgaagccggcaacatccattagcagtatatctcagacaaagggaattaatgtgaaagaaatcctgaagtctctcgttgcagcccctgtagaaatcgcggagtgtggccctgaaccaatcccctaccctgacccagcccttaagcgcgagacccaagccattcttcctatgcaattccatagtttcgacagatccgtggtggtgcctgttaagaagccccccccaggatccctcgccgttaccaccgtgggggctaccacagctggttctgggttaccaactggctcaacttcaaatatttttgccgccaccggcgcgaccccaaaatcaatgatcaatacaactggcgccgtagactctgggtcttcaagctcatccagtagctccagcttcgtcaatggggctacttctaagaatctgccagcagtgcagaccgtcgcacccatgccagaggactcagcagagaacatgtctattactgcaaaactggagcgggctttggaaaaagtcgccccactgctaagggaaatcttcgtagacttcgcccctttcttgtcacgcaccttgttggggtctcacgggcaggagctgctgatcgaaggtttggtgtgcatgaagtcctcaacaagcgtggtggaactcgtgatgttgctctgttcccaggagtggcagaactccattcagaaaaatgctggactggcatttatcgaactcatcaacgagggccgactgctgtgtcatgcgatgaaagaccatatcgttcgcgtggctaacgaggctgagttcatattaaacaggcagagggctgaagacgttcacaagcacgccgagttcgaatctcaatgcgcccagtacgcagctgatcgtcgcgaggaggaaaaaatgtgcgaccatttgattagtgccgcgaagcacagagatcacgtgactgctaatcaactcaagcagaagattcttaacattcttacaaacaaacacggcgcctggggggccgtgagccactctcagttgcatgatttttggagactggattactgggaggacgatctgagacgcagacgtcggttcgtcaggaacgcctttggctccacacacgcagaggctctgctgaaagcagctattgagtatgggactgaggaagatgttgtgaaaagcaaaaagacctttagaagtcaggccattgtcaaccaaaacgcagagactgaactgatgttagagggcgacgatgatgcggtgagcctgctacaggagaaggaaatcgacaatctagcaggaccagtggtcctgagcacccctgctcaattgatagcccccgttgtggtggcgaaaggaacactgagcatcaccactaccgaaatatattttgaggtggatgaggacgattctgcgtttaaaaagattgatacaaaagtgttggcatacacggagggtttgcacggcaagtggatgttttctgagatccgagctgtgttctcacggcggtacctcctccagaatacggcgctggaggtgttcatggcgaacaggactagcgtgatgttcaacttcccagatcaggctaccgtgaagaaggtagtttattccctgccgcgagtgggtgtgggcacaagctatggccttccccaggcacgcagaatctcactagcaacaccacgacagctttataagtcatcaaatatgacccagcgctggcaacgacgggaaatatcaaatttcgaatacctgatgtttctcaacactattgcaggacgcacttacaatgacttaaatcaatatccagtgtttccatgggttctgacgaactacgagagcgaggagctggatctgactctaccaggtaactttagagacttgtcaaagcctattggggcactcaatccaaagagggcagtcttctatgccgagaggtacgaaacatgggaggacgaccaatcccccccttatcactacaatacccactactccactgccacctctacgttgtcatggctggtccgcatcgagccctttactaccttctttctgaatgcaaatgacgggaaattcgatcatcccgacagaaccttctcttcagtagctcgctcttggagaactagtcagcgcgatacctcagacgttaaagagctgataccagaattttactatctccccgagatgtttgtgaacagcaacggctataatctcggcgttcgggaagatgaggtggtggtgaacgatgtggacctccctccatgggccaaaaagcctgaagatttcgttcgcatcaaccgcatggcgctggaaagtgaattcgtatcttgccagctacaccagtggattgacctgatcttcgggtataagcaacgcggcccggaagccgtgcgcgcactgaacgtgttccactatctgacatatgagggatcggtcaacctcgattccatcacagaccctgttcttagagaggcaatggaggctcagatacaaaattttggccaaacccccagccagctcctgatagaaccgcatcctccacggagctcagctatgcacctgtgctttttgccacagtcaccacttatgtttaaggaccaaatgcagcaggacgtaataatggtcttaaaatttccttccaactcacctgtgacccatgtggcagctaacacacttccacacctgacgatcccagcggtggtgaccgtcacctgcagccgtctgttcgccgtcaacaggtggcataataccgtgggactccggggtgctccgggctacagccttgaccaggcccaccacctgccaatcgagatggatccattaatcgccaataattccggcgtcaataagagacagatcacggatctcgttgaccagtccattcagataaacgcccattgcttcgtggtgactgctgataacaggtatatcctgatttgtgggttctgggacaaaagctttagggtttattcgacggaaaccggcaaactgacacaaatcgtgttcggtcactgggacgtagtaacttgtttagcgcgcagcgagagctacataggtggggattgctacattgtctctggtagccgagacgcaacactcctcctttggtattggtcaggtagacatcacattattggcgacaacccaaatagcagtgactatcccgccccaagggcggtcctgactggccacgaccacgaggtggtttgtgtgtctgtctgtgcagagttgggcctcgtgataagtggcgccaaagagggcccctgcttggtacacacgatcaccggagatctgctgcgcgccctggagggccccgagaattgcctattcccccgtctcataagcgtcagcagtgaaggacattgcatcatatactatgaacggggcaggttcagtaatttctccatcaatggaaagctcttagcccagatggaaataaacgactctaccagagccattctcttgtcttcagacgggcagaatctggtcaccggcggagataatggggttgttgaagtgtggcaggcatgcgatttcaagcagctgtatatctatcctggatgcgatgctggtatccgcgcaatggacttaagccacgatcagaggactctaatcaccggtatggcctctggctcgatcgtagcatttaatatagatttcaaccgctggcactacgaacaccagaacagatactag

SEQ ID NO: 126122 - DNA, 1575 bp, synthetic construct
  misc_feature 1..1575: note = Description of Artificial Sequence: Synthetic coding sequence
  source 1..1575: mol_type = other DNA
atgttcgtcaattccaacggttacaatctgggcgttagagaggatgaggtggttgtgaacgacgtagatcttccaccgtgggcaaagaaaccggaggacttcgtgcggatcaatcggatggccctggagtcagagtttgttagttgtcagctgcaccaatggatagacctgatcttcggttacaagcagcgcgggccagaggccgttagggcccttaatgtttttcattacttgacgtacgagggctccgtcaacctggatagtattacagaccccgtcctccgggagatccctgaagcctattttatccgcgatccgcacacctttttactcactaaagatttcatcaaggccatggaggcgcaaatacagaattttggacagacacctagccagctgctcatcgaaccacatccaccgcggtctagtgccatgcacctgtgctttctgccccaaagccccctgatgttcaaagaccaaatgcaacaagacgtgattatggttttgaagttcccatccaatagccctgtgactcacgttgctgcaaatacactaccgcacctgactatcccagcagtggtcacggtaacctgctcaagattattcgccgtcaacagatggcacaacaccgtcgggctaagaggggccccagggtactctctcgaccaggctcaccacctgccaatagagatggatcccctgatcgcaaacaactccggagtgaacaaacgccagataacagacctggtcgatcagtccatacagataaacgcccactgttttgtcgtgaccgcagataaccgatatatcctgatttgcggattctgggacaagtctttccgtgtttattcaacggagacggggaagcttactcagatagtgttcggccattgggatgttgtgacttgcctggcacgctccgaaagttacatcggaggagattgttacatcgtctctggtagtagagacgccacactgctactgtggtactggagcggcagacatcatatcatcggggataatcctaacagctccgattacccagcccctcgcgccgtcctgacaggtcacgatcacgaggtcgtatgtgtatcagtgtgcgcagaactcggattggtgatcagcggagccaaggagggtccatgtctagtgcatacaataaccggggatctgctgagagctcttgagggcccagagaactgcctttttccacggctaatctccgtctcttccgagggccactgtatcatctactacgagcgcgggaggttctcaaacttttctataaacggcaaactcctcgctcagatggagatcaatgattcaaccagagccatactcctcagttctgatggccagaacttagtaaccggcggggacaacggggtggttgaggtatggcaagcctgcgattttaagcagctgtatatttatcctggctgcgacgctggcattcgggccatggatcttagccacgatcagcgcaccctgatcactggcatggcctcagggtccatcgtggcctttaacattgactttaatcgctggcactacgagcaccaaaatcgctactag

SEQ ID NO: 126123 - DNA, 4728 bp, synthetic construct
  misc_feature 1..4728: note = Description of Artificial Sequence: Synthetic coding sequence
  source 1..4728: mol_type = other DNA
atgcatcaaagactcctaaccgatctgttgtttgcactagaaactgacgtgcatgtctggcggtctcactccaccaaatccgtcatggactttgtaaatagtaatgagaatattatcttcgtgcacaacactattcatctgatttctcagatggttgacaacatcatcatagcttgtggcggtatcctccctctgctgagcgctgctacctctccaactacagagctggaaaatatcgaggtgacacagggcatgagcgccgaaacagctgtgactttcttgtcccggctgatggccatggtggacgtgttggtatttgctagttcgctgaatttttcagagatagaagccgagaagaatatgtcatccggcggtctcatgagacagtgcctcaggttggtgtgctgcgtggctgttcgaaattgtcttgagtgtaggcagcgccagagggaccgtgggaacaaatcgtcccatggaagtagtaagccccaggaagtaccacagtctgtcacagctacagctgcatctaaaacccctctggagaacgtcccaggaaatctgagtccgataaaggatccggaccgcttattgcaggatgtggatatcaacaggctccgcgctgttgtttttcgggacgtagacgactccaaacaagcacagttcttggccttggccgtagtttatttcatctccgtgcttatggtgtccaagtaccgcgatatcttagaacctcagcgcgaaactacacgcacaggtagtcagccaggccgtaacattcgccaggagatcaattctcccacttctaccgagacgccagctgccttcccagacactattaaggagaaagagacccccacgccaggagaagacatccaagtggaaagctcaattcctcataccgacagcggcatcggggaagaacaggtggcaagtattctcaatggcgcagaacttgagactagcacaggccctgacgccatgtccgaattactgtcaacccttagctccgaagttaagaaaagccaggaaagcttgaccgagaatccctctgagactctgaaacccgcaacttccatctcctcaatatcccaaacaaaggggattaatgttaaagaaattctcaagtccttggtggctgcccctgtcgaaattgctgaatgtgggcccgagcccatcccatatcctgacccagctctaaaaagggagacccaggccatcctgccaatgcagttccactcatttgatcgctcggtcgtggtcccagttaagaaacctccaccgggatcattggccgtgacaaccgttggggccaccaccgctgggtccggcctccctacaggctcaaccagcaacattttcgctgccacaggggctactcccaaatccatgatcaatacaactggagccgtggattctggctcaagttcttcatcatctagtagtagttttgtgaatggtgccaccagtaaaaatctgcccgcggtgcagactgtagcaccgatgccagaggattcagctgagaatatgagcatcacagctaaactggagagggcactggaaaaagtcgcgcctctcctgagggaaatttttgtggactttgcaccttttctctcgcgcaccttacttgggtctcatggccaagagcttctgatcgagggattggtgtgcatgaaatccagcacatccgttgtggagcttgttatgctgctatgttcccaggagtggcagaatagcatccagaaaaatgccgggctcgctttcatcgagcttataaatgaaggtcggctactatgtcacgcaatgaaggaccatattgtgagagtcgcgaatgaggcagagttcattctgaatagacagcgagcggaggacgtgcataagcatgcggaattcgagtcccagtgcgcacagtatgctgccgaccggcgggaggaggaaaagatgtgcgaccacctgatatccgctgccaaacacagagaccacgtaaccgccaaccagctgaaacagaaaatacttaacatactgactaataagcatggagcctggggggccgtcagtcatagccagctacacgacttttggagactcgattactgggaggacgatctgcgcagacgcagaaggttcgtgcgcaatgcttttgggtccacccacgctgaagctctgttgaaggccgctatcgagtatggaactgaagaggacgtcgtgaagtccaaaaaaacatttcggagccaggctatcgtcaaccagaacgccgaaaccgagctgatgctggaaggtgatgacgatgcagtgagcctgttgcaagaaaaagaaatagataatttggctgggcccgtagtgctgtctacacccgcacagttgatagcccccgtggttgtggcgaaaggcaccctgagcatcaccacgactgaaatttactttgaggtcgacgaggatgacagcgccttcaagaagatcgataccaaagtgcttgcctatacagaaggcctgcatggcaaatggatgtttagcgaaattagagcagtattttccaggagatatttgctgcagaataccgctcttgaggtgtttatggcgaacaggacctccgttatgttcaattttccagaccaagctactgtgaagaaggtagtctactcattgccacgcgtgggcgtgggtacttcatacgggctccctcaagctcggcgcatttctctggccacgccccgtcagctgtataaatccagtaacatgacacaacgctggcagaggcgagagatcagcaatttcgagtatctgatgttcctgaacaccattgccgggcgaacatacaacgatcttaatcagtatcccgtgttcccatgggtcctcactaattacgagtcagaggagctggatctcactctcccaggcaactttagagacctttctaaaccaataggcgccctgaatccgaagcgggcagtgttttacgccgagagatacgaaacttgggaggatgaccaatctcccccttaccactacaacacacattatagcaccgcgacctccaccctctcctggctggtacgcattgagcccttcaccactttcttcctcaatgccaacgacggaaaattcgaccacccagacaggaccttttcatctgtggccaggtcatggcgaacctcccagagggatactagcgacgtgaaagagctgatacccgaattctactacctgcctgaaatgtttgtcaactctaatgggtacaatctgggcgttcgcgaggacgaggtggtggtgaacgatgtagatttgcctccttgggcaaagaagcctgaagactttgtcagaataaaccgcatggccttggagtcagagttcgtatcttgccagctacaccagtggatagacctaattttcggctataaacagcgaggaccagaggcagtccgcgccttgaatgtgtttcactacctcacttacgaaggcagtgtcaatctggacagcataacagatcctgtattacgggaggccatggaagctcagatccagaactttggccagacaccttcccaactcctgattgagccgcatcctcctcgatcttctgcgatgcatctgtgctttctgccacaatctcccctgatgttcaaggaccaaatgcagcaagatgtcataatggttttgaaattcccctctaacagcccggtaacacatgtggccgccaatacgctcccccatctgacaatccccgccgtagtcaccgtcacctgcagcaggttgtttgccgtgaacagatggcataataccgtgggactgaggggggcccctggctattccctggaccaagcgcatcatctaccaattgagatggaccctctgatcgccaacaatagtggggttaataaaaggcagattaccgaccttgtagaccaaagcattcagatcaacgctcactgcttcgttgtgactgccgacaacaggtacatcctcatatgcggattttgggacaagtctttcagagtctactccaccgagaccgggaaactcacccagatcgtgttcggacactgggacgtggtgacctgcctagcaagaagtgaatcttatatcggcggcgattgttatatcgtctctggttcaagggatgccactctcctgttgtggtattggagcggccgccaccacattataggtgacaacccaaactctagtgaatgcgactaccccgcgcctcgagccgtgctgacaggacatgatcatgaggtggtttgtgtttctgtgtgcgccgagctggggttggtaatttccggcgctaaagagggcccatgtctggtgcacacaatcaccggcgatttgttgcgagcccttgagggcccagagaattgcttatttcctcgtctaatttcagtgagctccgaagggcactgcatcatctactatgagcgtggccgtttctctaacttcagtatcaatggcaagctgctggcgcaaatggaaattaacgactctacccgtgcaatcctgctgagcagtgacgggcaaaaccttgttaccgggggcgataatggtgtggtggaggtgtggcaagcgtgcgactttaaacagctgtacatttaccccgggtgtgacgctggcatacgcgccatggacctgtcccatgatcagaggaccctgattaccggtatggcctccggatcaatcgttgcttttaacattgacttcaataggtggcattatgagcaccagaacagatactag

SEQ ID NO: 126124 - DNA, 2220 bp, synthetic construct
  misc_feature 1..2220: note = Description of Artificial Sequence: Synthetic coding sequence
  source 1..2220: mol_type = other DNA
atgttttcagaaataagggcggtatttagcagaaggtacctcctgcagaatacggcgctcgaggtgttcatggccaaccgcactagcgtcatgttcaacttccccgatcaggctacggtaaagaaggtcgtgtattctctgccaagggtaggagtaggaacttcttacggactgccgcaagcccggaggatctctctggcaaccccacgccagctctataaatctagtaatatgacccagaggtggcagcggagggaaattagcaacttcgaatatctgatgtttctgaatacgatcgcggggcgtacgtacaacgatctgaaccagtaccctgtcttcccatgggttttgacgaactatgagtcagaagagctggatctaacacttcccggaaactttagagatctgtctaagcctattggggcactgaaccccaagcgggcggtgttctacgctgagagatacgaaacttgggaggatgaccaaagccccccttaccactataacacccactactcaacagcaactagtactcttagttggttagtccgaatcgagcctttcaccactttttttctgaacgcaaatgatgggaagtttgatcacccagatagaaccttctcaagtgtggctcgcagctggagaacctctcagagagataccagcgatgtgaaagagttgattccagagttctattacctgccagagatgttcgtgaactccaatggctacaacctgggagttcgggaagatgaggttgtggtgaatgatgttgacctccccccttgggcaaaaaagcctgaggacttcgtgaggattaatcgcatggccctggaatccgagttcgtcagctgccagttacaccaatggattgatctaatcttcggctacaaacagaggggcccagaggccgtgcgggctttgaacgtttttcactacttgacatatgaaggaagtgtcaatctggattcgattacggaccccgtgcttcgggaagcaatggaagctcagattcagaacttcggccagactccgtcccagctcctgatagagccacacccccctagaagcagtgccatgcacctctgtttcctgcctcagtccccactaatgtttaaagaccaaatgcagcaggatgtgattatggtactcaagttccctagcaactctccggtgacccacgttgcagctaacaccctcccgcacctaacaatacccgctgtcgtcaccgtcacctgctccaggttgttcgccgtaaatcggtggcataacaccgtgggactcagaggggccccagggtactcgctcgatcaggcccaccatcttccaatcgagatggacccactgatcgccaataattctggcgttaataagaggcagatcaccgatctagtggaccagagcatacaaatcaacgcacattgttttgtggttacggccgataacaggtatattctgatctgtggtttctgggacaagtccttcagagtctactccaccgagacaggcaagctgacccaaatcgtgtttggacactgggacgtcgttacctgtcttgctagaagtgagtcatatatcggaggggattgttatattgtgagtggaagtcgggatgctaccctgctcctgtggtactggtccggcagacatcacattataggagacaatccgaactcctccgactaccccgcaccacgcgccgtcctgactggacacgaccacgaggttgtatgtgtgtccgtatgcgcagaactgggcctcgtcattagcggagccaaggagggcccgtgtctcgttcataccatcacaggggaccttcttcgggcccttgaaggcccggaaaattgtctcttcccccgccttatctccgtcagctcggagggccattgcattatctactacgagcgaggccgctttagcaacttcagtatcaatggtaagttgctggctcaaatggagatcaacgattccactagagcgattctcctgtctagtgacgggcagaatttagtaactggcggcgacaatggagtagtcgaggtgtggcaggcttgcgacttcaagcaactatatatatatcctgggtgtgatgccgggattcgtgccatggacctttcccatgaccagcgcactctgataacagggatggcatccggcagcatagttgcctttaatattgactttaaccgatggcattacgaacatcagaatcgttactag

SEQ ID NO: 126125 - DNA, 8841 bp, synthetic construct
  misc_feature 1..8841: note = Description of Artificial Sequence: Synthetic coding sequence
  source 1..8841: mol_type = other DNA
atggctagcgaaaagccaggaccaggacccggactggagccgcagcctgtgggtctgattgcagttggagcagctggtggtggtggcggcggttccggcggtggcgggacaggagggagtgggatgggcgaactaaggggggcctctgggtctggttctgtgatgcttccagcaggaatgataaacccatcagtccctattcgtaacattaggatgaagttcgcagtgttaatcggcctcattcaagtgggagaggttagtaatagggacatcgtcgagacggtgctcaacctgctggtgggtggcgaatttgatctggagatgaactttattattcaagacgccgaaagtattacatgtatgacggaattgctggaacactgcgacgtcacttgccaggccgaaatatggagcatgtttaccgcgatattgaggaagtcagtacgtaacttgcagacgtcaaccgaagtcgggctcatcgagcaggtgctgctgaaaatgagcgccgttgacgacatgatcgctgatctcttagtcgatatgctcggggtccttgcttcctactccatcaccgtgaaagaattgaagctgctgttttcaatgctgagaggcgaaagcggtatttggccgcggcacgccgtcaagttgctatctgtgctcaaccagatgccacagcggcacggtccagatactttcttcaactttccagggtgtagtgcggctgcaatcgccttgccacccattgctaagtggccatatcaaaatggctttacgctcaacacatggtttcgaatggatccactcaacaacatcaatgtagacaaagacaaaccctacttgtactgttttagaactagcaaaggagtcggatactcagcacactttgtaggaaactgcttaattgtcacgagtctcaaaagtaaggggaaaggtttccaacactgtgtgaaatatgattttcagccaaggaaatggtatatgatttccatcgtacatatctataacaggtggagaaatagcgaaatacgatgctacgtgaatggacaactggtgtcctatggtgacatggcatggcacgttaatacgaacgacagctacgacaaatgttttctggggagttccgagacagcggacgcaaatcgagtgttctgtggtcaactgggggccgtgtacgttttctccgaagcactgaatccggcacaaattttcgccattcaccagctgggcccgggatataagtccacctttaaatttaagtcggagagtgatatccacctggcagaacaccataagcaggtgctgtacgatggaaagttggcatccagcatcgcttttacgtacaatgcaaaagccacagatgcacagttatgtctggaatcgagccccaaagagaatgctagcatctttgtgcactcaccgcacgcactcatgttgcaagatgtgaaggccatcgtgacacattctatccacagcgccattcactctattgggggcatccaggtcctcttcccacttttcgcccagcttgataacaggcagctcaacgacagtcaagtagagaccactgtatgtgcgactcttctggccttccttgtggaattgctcaaaagctccgtggccatgcaagagcaaatgctggggggcaaaggcttcttggtgatcgggtacctgcttgagaagagttcacgcgtccacatcacccgagccgttcttgaacaatttttaagtttcgctaagtacttggatgggctctctcacggggctccactgctcaagcaactttgtgatcacatcctctttaaccccgccatctggatccatacgccagcaaaagtgcaactctcactttatacgtatctgtcagccgaatttattggcacagccaccatttacacaactattcgacgcgtgggcacagtgctgcagcttatgcacactctgaaatactattattgggtgatcaatccagccgacagtagcggcattaccccaaagggactagacggcccacgcccttctcagaaagagattatctctctgagagcctttatgctgctttttctgaaacagctcattctgaaggaccgaggagttaaggaagatgaactgcagtccatcctgaactatttgttaaccatgcatgaggacgagaatatccacgatgtattgcagctcttagtcgccttaatgtctgagcacccagcaagcatgatccctgccttcgatcagcgaaacggtatcagggttatctataagcttctagctagtaagtctgagagcatttgggttcaggccttgaaggtgctgggatattttcttaagcatttggggcataagaggaaggtggaaattatgcacacccactctttgttcaccctgctgggcgagcggctcatgctgcatacaaacacggtcactgtgacaacctacaatacgttatacgaaattctgaccgaacaggtttgcacccaagtggtgcacaagccccacccggaaccggactccactgtgaagattcaaaatcccatgatccttaaagtcgtggccacactcctgaaaaatagcactccctctgcagagctcatggaagttagacgactcttcctcagcgatatgatcaagctcttttccaactcccgcgagaacagacgatgtctgttacagtgttccgtctggcaggactggatgtttagtctcggatatatcaacccaaaaaattcggaagaacaaaagattactgagatggtttataacatcttccgaatactactgtaccacgccattaagtatgagtgggggggctggcgcgtgtgggtggacaccttgagcatcgcccatagcaaagttacatatgaagcccataaagaatatcttgccaaaatgtatgaagaataccagcggcaggaagaggagaacataaaaaaaggcaaaaaggggaacgtgagtacaatatcagggctttcatcccaaacaactggtgcaaaaggagggatggaaattcgtgaaatcgaggatctgtcacagtcccagtcgcctgaatccgaaaccgactacccagtctccactgacacccgagatcttctcatgtctaccaaggtgagtgacgatatcctaggcaattccgaccgacctggaagcggagtacatgtggaggtgcatgacctgctggtagacataaaagcagaaaaggttgaggccaccgaagttaagttagatgacatggaccttagccctgagacacttgtgggtggcgagaacggcgcacttgtggaggtagagtctctcttggataatgtatattcggcagccgtggagaagctgcagaacaacgtacacggctccgtgggtatcatcaagaaaaatgaagagaaggacaatggcccgctgattactctggctgacgagaaggaggatctgcctaactcttccaccagttttctgtttgataaaatcccaaaacaggaagaaaagctcctgcccgaactgtcttctaatcacatcataccaaatattcaagatacgcaggtgcacctgggggtgagtgacgatctaggcctattagcacatatgacaggatcggtggacctcacctgcacctcctctatcattgaggaaaaggagttcaagattcacaccacgtctgacgggatgagttctatttcggagcgggatctggcctctagcaccaagggcttggagtacgccgagatgaccgcaactacactggagacagagtcttcatctagtaaaatcgtgccaaatatcgacgccgggtccatcatcagtgacactgagcggtcggatgatggaaaagagtccggaaaggagatacgcaaaatacagactacaactacaacccaagcggtccagggtagaagtataacacagcaggacagagacctgcgagtcgacctggggttccgcgggatgcctatgaccgaggagcagaggcgccagtttagtcccgggccaagaacaactatgttccgcatccctgagtttaagtggtccccaatgcaccagcgactgctcaccgacctgctgtttgccctggagacagacgtgcacgtttggcgtagccatagcacaaaatcagttatggacttcgtgaactctaacgagaatatcatcttcgtccacaatactatccacctcatctctcagatggtagataatattatcatcgcttgcggcggcatccttccgctgctctctgctgcgacctccccaaccgtctctaaaactgaactggagaacatcgaggtgacccaaggcatgagcgcagaaacagcagtgaccttcctgagcaggctaatggcaatggtcgacgtgttggtgttcgcatcaagtctgaactttagcgagatcgaagctgaaaaaaatatgtcttccggcgggctcatgcgacagtgtttgaggctcgtgtgttgtgtcgctgtccgcaattgcctagagtgtcgtcagagacagagggaccggggaaataagtcctcacacggctcctccaagccccaagaggtgccacagtcagtgaccgccaccgccgcctccaaaacgcccttagagaacgtcccaggtaacctgtcacccatcaaggacccagatcggcttttgcaggatgttgacattaaccgcctgagagcagttgtgttcagagacgtggatgacagcaagcaggcacaatttcttgcactggctgtcgtgtattttatatcagtcctgatggtgtccaagtaccgagatatcttagagccccagcgtgagactaccagaactggatcgcagcctggtcggaacatccgccaggagattaattcaccaacctccaccgtggtggtgattccgtcaataccgcacccgagcttaaatcatgggtttttagctaagttaatccctgagcaatcatttgggcacagcttctataaggagaccccggcagcttttcctgacacaatcaaagagaaagagacccccacgccaggcgaggatattcaggtagagtccagtattccccatacagactcgggtatcggagaagaacaggttgcttcaattctcaacggcgcggagctcgagacatctactggaccggacgccatgtcagagttgctttcaaccctgagcagtgaagtgaagaagtcccaggagtctcttaccgagaacccatctgagacactaaaacccgccacctctatttcttctatttcacagacaaagggtattaatgtcaaagagattctgaagtcactggtcgccgctcccgtggagatagccgagtgcggcccggaacctattccatacccagatcctgctctcaagagagagacacaggctatactgcccatgcaatttcactcgttcgatcggtcagtggtggtaccagtgaagaagcccccacccggctcactggcggtcaccacagtcggggcgaccaccgccggtagcggcctgcccactggcagtacttccaacatctttgccgccaccggagcaactcctaagagtatgatcaatacaacaggcgccgttgacagcggtagctcctcctcatctagttctagctctttcgtaaatggcgcaacctctaagaacttaccagcggttcagactgtcgctccaatgccagaggattcagccgaaaatatgagcatcactgcaaagctagaaagggcgctcgagaaggttgcacctctgcttcgggagatctttgtggactttgcaccctttctcagtaggacactgttagggtcccatgggcaggagctcctgattgaaggtctggtgtgtatgaaatccagtacctcagtggtggaactggtcatgctcctctgcagtcaggaatggcagaactctatccagaaaaacgccggcttagcgttcatagaactcatcaacgaaggtagactactgtgccacgctatgaaagatcatatcgtgcgggtggctaatgaggccgaatttatcttgaatcgccagagagctgaagatgtgcataagcatgccgagttcgagtcccagtgcgcccagtacgctgcagaccgacgggaagaggaaaagatgtgtgatcatttgatctcagcagctaaacatcgggaccatgtaactgcaaaccagctgaaacagaagattctcaacattctgaccaataagcacggggcctggggggcggtatcccatagccagttgcacgacttttggcggctcgattactgggaggatgatctccgccggcgccggagatttgtgaggaacgcattcgggtctacacacgctgaggcattacttaaggctgcaatcgagtacggtacggaagaggatgtcgtgaaaagtaagaagacctttaggagccaagccatagtgaatcaaaacgccgagacagaactgatgttagagggcgatgatgacgcggtaagcctgctgcaggagaaagagattgacaacctggcagggcccgtcgttttgagcacaccagcacagttgatcgctccggtggttgttgcaaagggaaccctgagcattacaaccacggagatctacttcgaggtggatgaagacgattcagcatttaagaagatcgatacaaaggtgctcgcctatacagaagggctgcatgggaagtggatgttttctgagattcgcgcagtcttctccaggcgatatttgctccagaacacagctttggaagtcttcatggctaatcgcacttccgtcatgtttaacttccctgaccaggcaaccgtcaagaaagtggtatatagcctcccgcgtgtgggcgttggtacgtcctacggcctacctcaagcccggaggatcagccttgctactcctcggcagctgtataagtccagtaatatgacacagcgatggcagcgaagagaaatttccaacttcgagtatcttatgttcctgaacactatagccggacgtacctacaacgacctgaatcagtatcccgtgttcccctgggtcttgactaattatgagtcagaagagcttgatcttaccttaccaggcaattttagagatttgagtaagccaattggggcactgaatcccaagcgagcggttttttatgcggagaggtatgaaacctgggaggacgatcaaagtccaccttaccattacaatacccactattctactgctacttccaccctgagttggctggtgagaattgagccttttacgacattcttccttaatgccaatgatggtaagttcgatcatcccgataggactttttcttccgtggcaaggtcctggaggactagtcaaagggatacaagcgatgtgaaggaactcatccctgagttctactacctgccggagatgttcgtgaattcaaatggatacaatctgggcgtgcgtgaggatgaagtggtggtcaacgatgtggatctcccgccttgggccaaaaaacctgaggacttcgtgagaatcaacaggatggcgctggagtctgagttcgtctcttgccagctgcatcagtggatcgatcttatcttcggctacaagcagcgtggtccagaagcagtgagggcactgaatgtttttcactacctaacctatgagggctccgtcaacttggatagcattacggacccagtgcttagagaggcaatggaggcccagattcagaatttcggccaaactccgagccagttattgattgagccccaccccccaaggtcatccgctatgcatctctgctttctgccgcagtcacctctcatgttcaaagaccagatgcagcaggatgtgattatggtcctgaagtttccatcaaattcacccgttactcatgtggccgccaatactctaccacatttgacgattcctgccgtagtgacggtaacgtgttctcggctgtttgccgttaacaggtggcataacaccgtggggctcaggggagcccccgggtattctctggatcaggctcaccatctccctatcgagatggaccctctcattgcgaataacagcggggtgaacaagagacaaattaccgatttggtagaccagtccatccagattaatgcccactgcttcgttgtaaccgctgacaaccgatatatactgatctgcgggttctgggataagagcttcagggtttactccacagagacaggtaaactgacgcagatcgtgttcggccattgggatgtggtcacctgtctcgcccggagcgagtcatacataggcggcgattgttacatcgtctctggttcccgggatgctacacttctcctgtggtactggagtggccgtcatcacatcattggagacaacccaaacagttccgactatccggcgcctcgtgcggtcttgactggtcatgatcacgaggtggtctgcgtcagcgtgtgcgcggagctcggccttgtgatttccggcgccaaggaggggccatgcttggtgcataccataacgggagacctcctgcgtgccctggaagggcctgagaactgcctgtttccaaggctgataagcgtcagttcagaagggcactgtattatctactatgagagagggcgcttttccaacttctctataaacggcaagctgttagctcagatggagatcaatgactccactcgagccatcctgttatcttccgatggacagaacctagtcacgggcggcgacaatggagtcgtcgaggtctggcaggcctgcgacttcaagcagctgtacatctacccaggctgtgacgcagggatcagggccatggacctgtcacacgaccagagaactttgataacaggaatggcgtccgggtccatcgtggcctttaatatcgatttcaatagatggcattatgagcaccagaacagatattag

SEQ ID NO: 126126 - DNA, 834 bp, synthetic construct
  misc_feature 1..834: note = Description of Artificial Sequence: Synthetic coding sequence
  source 1..834: mol_type = other DNA
atgtttagcgagattagagcagtcttctcaaggagatatctgctgcagaacacagcgctcgaagtgtttatggctaatcgcacaagcgttatgtttaactttcccgatcaggccacagtgaagaaagtggtctattcactacccagagttggtgtcggtaccagctacggcctgccacaggccagaagaatctcccttgcaacccccaggcagctgtacaaatcatccaacatgacacagagatggcagaggagggaaatttccaacttcgaatacttgatgtttcttaatacaatcgcggggcgcacatataacgatctgaaccagtatccagtcttcccatgggtgctaaccaattacgagtctgaagagcttgatctgacgctacccggaaatttccgggacttgagcaagccgatcggcgcacttaaccccaaacgtgctgtgttctatgcggagagatacgaaacgtgggaggatgaccagagccctccttatcactataatacccactactccaccgctacctctaccttatcttggttagtgcggatcgaaccttttactaccttcttccttaatgcaaatgatggtaagttcgatcaccctgaccgcaccttctcctccgtggcccggagttggcgcacctcacagcgcgatacatctgacgtcaaagaattgattccagaattctactaccttccagagatgtttgttaactccaacggttataaccttggcgtgagagaagatgaggtggtggttaatgacgtagacctgcccccttgggcaaaaaaccttaagacactttgtgggtcaacggggtggccatag

SEQ ID NO: 126127 - DNA, 7815 bp, synthetic construct
  misc_feature 1..7815: note = Description of Artificial Sequence: Synthetic coding sequence
  source 1..7815: mol_type = other DNA
atggcaagtcgggagcgactgtttgagctgtggatgctctactgtacaaagaaggaccctgattacttgaagctgtggctggacactttcgtgtccagttatgaacagtttttagacgtggacttcgagaaactaccgactagggtcgatgatatgccacctggcatctctttgctacccgacaatattcttcaggtgttacggattcaactgctacagtgtgttcaaaagatggctgacggcctggaagagcagcaacaggccttgtccattttgttggtcaaattttttattattctgtgtaggaatttgagcaacgtcgaagaaattgggacatgctcctatataaactatgtgattacaatgacaactctatacattcagcagttgaagtcgaaaaaaaaggagaaggaaatggccgatcagacttgtatagaagaattcgtcatccacgcacttgccttttgcgagagcctctacgatccctatagaaattggagacacagaatctccggaagaatcctatccactgtcgaaaaatcgcgccaaaaatataagccagcaagcctaacagtcgagtttgtcccgtttttctaccagtgttttcaggagtcggaacacttaaaggagagcttgaagtgttgcctacttcatctgtttggggctatcgttgcaggaggccagaggaacgcacttcaggccatatctccagccacgatggaggttctgatgcgggtcctggctgactgcgactcttgggaggacggcgatccggaggaggtcggtcggaaagccgagcttaccctgaagtgcttgacagaggtcgtgcatattttattgtcaagcaactcagatcagcggcaggtggaaacctctactattttagaaaactatttcaaactactgaacagtgaccattctgctcttccaaaccagcggagatcacggcagtgggaaaatcgcttcattgcactacagatcaaaatgcttaatacaatcactgcaatgttggactgtaccgacaggcccgtgctccaggctatctttcttaattcaaactgctttgagcacttaattaggctactgcagaattgcaaagtgttccagggccagctggactgcctagccatttccactatacaggcactgacagcagtcatgaacaagtcaccagccgccaaggaagttttcaaggagagaatcggttacacccacatgctcgaggtgctgaagtctcttggacagccaccactggagctgctcaaggaactcatgaatatggctgtcgaaggagaccacacaagtgttgggattctaggcatttccaatgtgcaaccgctgcttttgctgattcagtggctgcccgaattgcaatcccatgatctgcagatctttatcagtgattggctgaagcgcatttgctgtattaaccgacagagccgcaccacttgcgttaatgctaacatgggaattaggattatcgagacactggacctccactccagcctccatcagacatgtgccgagaatctgatcgcgatccacgggtccctaggatcgcaatcagtctcctcagaggaaatccggcgcctgttgcgtcttctccgcgtggacgagtcagaatccgtgcacccctatgtgacgcctgtaacccgcgccattttaactatggcgcgaaagctgtccctagaatccgctctacagtatttcaatctgtcccatagcatggccgggatcagcgtgccccctatccagaagtggccaggctctgctttctcattctctgcttggttctgtctggaccaggatcagctgaccctcgggatcgctaacaaagggggaaaacgaaagcagctatatagttttttcactggaagcggtatggggttcgaagcctttataactcacagcggcatgctcgtggtggctgtttgtaccaagcgcgagtatgccactgtgatgctccccgatcattccttttgcgactccctgtggcacaatatcacggtggtgcatatgcctggaaagcggcccttcggtcaatcctttgtatacatctacgataacgggcagcagaaggtcagtgctccgctccgtttccctgccatgaatgaacctttcacctcctgttgtattggcagcgccggccagagaaccacaaccccccctccctcacagatcccagacccaccatttagctctccaataacaccacaccgaacgtcctttggtggcatcctaagctccgcttcttggggtggcactattgagaagagtaagttaattactaaactgatctctgcaggtactcaagactcagagtggggctgcccaacgtcactcgagggacagttaggctccgtgatcatcttctatgagcctcttcaaccaccccaggtgaaagctctttacctggcaggtcccaactgcctttctccgtggaagtgtcaggaatccgatatggccgacctgcctggtaacatccttttatactataccgccaaagcctgcaagaactccatttgtttagacctgtcaacaaactgtttgcatgggaggctgaccggaaataaggtcgtgaactgggatattaaagacatcatcaactgcattgggggccttaacgtgttattccccttgcttgaacagatcagccatttctctgaaggccaaattcctgaggagaagaacgagtctactgttccagagagtgtgaccccggtggaaggcgattggttagtatggaccagtacgaaggcatcggagagccggctagaacggaatctggttgccacgttcatacttatcgtgaagcatttcatccaaagacatccaatcaaccaagggaacctaatccactcacacggcgtcgcaacgctgggggccttgcttcagaaagtacctagcaccctgatggacgtgaatgtgctcatggctgtgcaactgctgatagagcaggtgagcctggagaagaatatgcagcttcttcagcagatgtaccaatacttactcttcgatttcaggatatggaaccgtggcgatttcccattccgtattggacatattcagtatctgagcaccataattaaagactcaagacgcgtgtttcgtaaaaaatacggagtgcagtttttgctcgacacccttcgtatctactacggtaatggttgtaaatataacgagctctctttggacgacattcggacaattaggacaagcctctacggcctgatcaaatattttctctgtaagggcgggtctcatgaagaaattcagtcgataatgggctacatcgcagctaccaatgaggaggagcagctctttggcatattggacgtccttttcagccttttacgaactagcccgacgagaggccagctgttcttactgctcttcgaaccaggaaatgctgatatcctgtacgccctgcttctcaaccagaagtactcagatagactacgagaaatcatatttaaaatcatggagcaaatgctgaagtgcactaacgtgtacgagaggtccaagcagcacattcggctaagagaggtgggatactcggggttggggcttctcctgaatgaagctctcgtcaacacttctttgatcaagaatctcactcatcagataattaatactgaccctgtgatcaacttcaaagatctcttgagcgtggtatacatttcccacagagcccacatcaatgtgcgagttgccatatgcagaaaagtcttacagatcttgcagttccagcccgatgcagcccatcaaatcagccagcaggttgggtggcaggacacccttgtgcgactgttcctgaaggccaagtttgaaaatgggaatactcttcataagcacagccgcgccgtgctcatgaaggataatgacaaaaacatgtctacagaggacacgaagaaaaattctgacgagaaaactgacgaagaaaagattacttcgttcgcttcagcgaacgtgtccagcgaccagtggtcactggaggatcggcactctctggactccaacactcctctgttcccagaagattcatcagtgggcgaactgagtttcaaaagtgagaaccaggaagaattctggcattctaacccttctcacctgagcctagacttatccggcattgactcctgtgaaatgagcgattctggatcccaggtgccagactcgcttcctagtacacctagcccagtcgaaagcactaagtcctttagtgtgcatagtgaccgagaaagttctatcacaaacgacatgggcttttctgacgatttctcactgctcgagagccaagagcggtgtgaggaggagctgttacaactgcttactcacatcttgaattatgtgatgtgtaagggcctggaaaaatctgacgacgatacctggatcgagcggggtcaagtgttctccgcactgagtaagccaggaatctcaagcgagctcttgaggccatctgatgagatcaagctgacactgttgcagaaaatgcttgaatgggccataagtgagaatagagaggccaaaacaaacccggtaaccgccgaaaacgcttttcgcttggtgctcattatacaagactttctgcagagcgagggactggtcaacagtaatatgtggacagagaaactgttagaagacatgatgctgctcttcgactgtctgagcgtgtgttattccgagtctcccgtttgggttaaactgagccaaatacagattcagttgctgttaggattcattggtaggggcaacctccaggtatgtgccatggctagcgcaaaactgaacacgctcctccagacgaaagttatagagaatcaggacgaggcctgttatatactgggcaaactcgagcacgtgttgagccagtctattaaagagcagacggagatatacagctttctgattccactagtgcggacgctcgtcagcaaaatttacgagctcttattcatgaatctacatctgccaagcctgccctttaccaacggcagttcatctttcttcgaggacttccaggaatactgtaattccaacgagtggcaagtctatattgagaagtacattgtgccatacatgaaacagtacgaggcacacacattctacgatggacatgagaacatggctctttactggaaagactgttatgaagctctgatggtgaacatgcataaaagggatagagagggcggcgaaagcaaattgaagttccaggaattgtttgtcgaaccatttaatagaaaggcaagacaggaaaatctccgttacaataatatgctgaagcagctcagttcccaacagcttgccactctacggaggtggaaggccatccagctgtacctgacctgtgagcggggcccttgggccaaaagaaagcagaacccaattcactggaagttggccaacgtggagaactattcacggatgagactcaagctcgtgccaaactataatttcaaaacacacgaggaagcctccgcccttcgagataacctgggcatccagcatagccaacctagcagcgacacattacttttagaggtcgtcaagcaggtgaaagtgtctgacatggtcgaggataagctggacctccccgaagaagatattaccgccagggtaaacgtcgacgaaaaggaagaacaggatcagaaagaaaagctcgtactcatggaagattgtgagctgatcacaattattgacgtcatccccgggagactggagataacgacacaacatatatacttctatgacggatctattgaaaaagaagatggagtgggcttcgacttcaagtggccccacagccaaattagggagatccatctgagaaggtataatctacgtaggtcagccctcgagattttccacgttgaccagtcaaactacttcctgaattttaaaaaggaagtccggaataaaatatactcgaggctgctgtccctgcattctccgaacagttattacggatcgaggtccccccaggagctatttaaagcctccggattgacgcagaaatgggtgaatagagaaatttcaaacttcgattatcttattcagattaacaccatggccggcaggacatataacgacctggcccaataccccgtgtttccttggattcttcaggactatacatccgaggagcttgatctgaataatcctgccgtcttcagagacctgtcaaaaccaattggcgttgtaaatgaaaaaaatgcaaaggcaatgcgggagaagtatgagaatttcgaagaccctatggggaccattgataagttccactacggtacgcattactctaacagtgctggcgtgatgcactatctcatccgcgtcgaaccgtttaccactctgcatatacagctccagagcgggaggtttgactgcgcagatagacagttccactctatccctgccacatggcaggccctcatggataatccatacgacgtgaaagaattaatccctgaattcttttacttcccggagtttctagagaaccagaaccagttcaatttggggcgcctgcagatttccaaggaacttgtcaatgacgtgatattgcccaagtgggcaaagtccgcagaggactttatttacaaacacagaaaggcactggagtccgaatatgtttccgctcacctgcacgaatggattgacctgattttcggttacaagcagaggggccccgccgccgtggaagccctcaatgtcttttactactgttcctacgagggagccgtcgacctggacgcgctgacggatgagaaagaacgaaaggcattggagggcatgattaacaatttcggccaaacaccctgccagctgctcaagattaccattagcatgaactatgtgattggcacacacggatggctgccctatgaccgaaatatcagcaattatttcactttcatcaaggaccagaccgtgacgaaccccaagacccagcgtagcattaacgggtcctttgctcccggtctggagatcacgtcaaaacttttcgttgtctctcacgatgctaaactacttttcagcgccgggtactgggacaactccatccaggtcatgagtctgaccaaaggcaaaattatttcgcacattatacgccacatggacattgtgacttgccttgccactgattactgcggcatccacttaattagcggaagccgcgacaccacgtgcatgatctggcagatcacccagcagggtggagtccctgtgggccttgctagcaagccatttcaaatactctatgggcacactaatgaggtactgagcgtaggtatatctactgaactggacatggccgtctccggatcccgcgacgggactgtgatcatacatacgatccctaacttagctataagctgggagggccacatagtggtgtactcatctacagaggagaagaccacccttaaagacaaaaatgccttgcacttatttagtatcaacggtaagtacctgggctcacaaattttaaaggagcaagtctctgacatctgcattattggcgagcacattgtgactggctccattcagggtttcctgagcattagggatctgcattccctgaatctaagtatcaaccctttagctatgcggttacctattcactgcgtgtgtgttacaaaggagtattcccacattctggtggggctcgaggatggcaaattgatcgtagtgggagtggggaagccggccgaaatgagaagcgggcagctgagcaggaaattttggggctcatctaagaggttaagccagatctccgccggtgagactgagtacaacacgcaggactcgaagtag

SEQ ID NO: 126128 - DNA, 8085 bp, synthetic construct
  misc_feature 1..8085: note = Description of Artificial Sequence: Synthetic coding sequence
  source 1..8085: mol_type = other DNA
atggcatctagagagcgcctgtttgagttgtggatgctgtattgcacaaagaaggatcctgattatctgaaactctggctagatacctttgtcagttcttacgaacagtttctggacgtggacttcgagaaactacccacacgagttgacgatatgccaccaggaattagcctgctgcccgataatattctgcaagttctccgaatccagttactccagtgtgtccagaagatggcagacggcctcgaggagcagcaacaagctctgtccattctgcttgtgaagttctttatcatcctgtgcagaaatctgagcaacgtggaagagattggtacatgcagctacataaactatgtgattaccatgaccactctgtacattcaacagcttaagtcaaaaaaaaaagagaaagaaatggctgaccaaacgtgtatagaagaatttgtaatccacgctttggccttttgcgagtccctgtatgacccttatcgaaactggcggcatagaatttctggtcgcatcttgtctacggttgaaaagtcacgacagaagtacaaaccagccagccttaccgtggaattcgttccgtttttctaccaatgctttcaggagagcgaacaccttaaggagtccctgaagtgctgcttactgcatctgtttggcgcaatcgtggcaggtggccagcgaaacgctctacaggcaataagccctgcaactatggaagtcctgatgagggtgctggccgattgtgattcttgggaagacggggatccagaggaggtgggcaggaaagccgagctaactctcaaatgccttaccgaggtggtacacatactactcagttcaaatagcgaccaaaggcaggtggagacatccacaattttagagaattacttcaagctactgaattctgaccactctgccctccccaatcagcgcagaagcaggcagtgggagaaccggtttatcgctctgcagataaagatgctaaacactattacagcgatgctggactgtaccgataggcccgtacttcaagccatcttcctgaactctaactgttttgagcacttgataaggctgctccaaaattgcaaggttttccagggccaactggactgcctggcgatatctactattcaggccctgaccgcggttatgaacaagtctcccgcagcaaaagaggtattcaaagaacggattggatatacccacatgctcgaggtgttgaaaagcttgggccagcccccactggaactgctaaaggagctcatgaatatggctgtggaaggtgatcacacgtccgtcggcatcttgggcatctctaacgttcaaccactcctgctcctgattcagtggctgccggagttgcagtcacatgacctgcagatattcatctctgactggctcaaacggatctgctgtatcaataggcaatcacgaacgacctgcgtcaatgcgaacatggggattcggattatcgagacattggatttacattcctccctccatcagacctgtgctgagaacctgattgcaatacatggatctctgggaagccagtccgtaagtagcgaggagattaggcggctgctccggctgctgagagttgacgaatcagagtcagttcacccttacgtaacacccgtgacaagggctatcttgactatggcgcggaagctgtcactcgagtctgccctgcagtattttaacctttcccacagcatggccggtatctcagtgccacctattcagaaatggccaggcagtgccttcagtttctccgcttggttttgtctggatcaggatcagctgacacttggaattgctaacaaggggggcaaacggaagcaactgtactccttttttaccggcagcgggatgggttttgaggcatttatcacccattcgggcatgctcgtggtagctgtctgcactaaaagggagtatgccacggtgatgctccctgaccattcattctgcgactccctctggcacaatattaccgttgtccacatgcccggaaaaagaccatttggccaatcatttgtgtacatatacgacaatggacagcagaaagtctctgcaccattgaggttccctgccatgaacgagccttttacctcttgctgtatcggctcagcagggcaaagaactactactccacctcctagccaaatacccgacccaccgttttcttctccaatcactccacatcgcaccagtttcggcggaatactgtcgtcagcctcatggggaggaacaatcgagaagtctaaactaatcacgaagctgatatctgcgggtacccaagatagtgagtggggttgccccacctccttggagggccaacttggaagcgtcattatcttttatgagccgctacagccccctcaggtgaaagccttatatctggccggccctaattgcttgtcaccctggaaatgtcaggaaagtgatatggctgaccttccgggaaatatcttgctgtattataccgcaaaagcctgtaaaaatagcatatgtctggacctgtccacaaattgtctccacggccggttgactggcaacaaggtggtgaattgggacattaaagacatcatcaattgcataggcggacttaacgtgcttttcccacttttagagcaaatcagtcatttctctgagggacagattccagaggaaaaaaacgagagcacggtgccagagagcgtcacacccgtcgaaggggattggttggtctggacttctactaaagcgagcgagtcaaggctggagagaaatctggttgcgacctttatcctgatcgtgaaacactttatccagagacaccccattaaccagggtaatttaatccatagtcacggagtcgctacgttgggagcactgctgcagaaagtcccaagcactctgatggacgttaatgtcctcatggcggtgcagttgctcattgaacaggtgtccctcgaaaaaaacatgcagcttctgcaacagatgtaccagtacttattattcgatttccgcatatggaataggggcgacttcccattccgcataggccacattcaatacttgagcacaattatcaaggattcaaggagggttttccggaagaagtacggagtccagttcctccttgacaccctccgcatttactatggcaatggatgcaaatataacgagctatcgttggatgacatccgcacaatacgcacgagtttgtacggcttaattaagtatttcctatgcaaggggggcagtcacgaggaaatacagtcaataatggggtatattgcggctaccaatgaggaggaacagttatttggcatcctcgacgtgctgttcagtcttctgcgaaccagcccaaccaggggacagctctttcttttactgtttgagccaggcaatgcagatattctgtatgccctcctgttgaatcagaaatatagcgaccggctgcgcgagatcatatttaagatcatggaacagatgctgaagtgtacaaatgtttacgagcggagcaaacaacacatccggttgcgggaagttggctactcaggactgggcctgctgctgaatgaggcgctggtgaacacgtcccttataaagaacctcactcatcagattatcaacaccgatcccgtgatcaactttaaggacctgctctctgtagtgtacataagccaccgtgcccacatcaacgttagagtggctatctgtaggaaagtgttacagatcctccagttccagcccgatgcagcacaccagatctcacaacaggttggatggcaggataccctcgtgcgactgtttttgaaggcaaaatttgagaacggtaataccctccacaaacatagccgagcagtcctcatgaaggacaacgacaagaacatgtccaccgaagatactaagaaaaatagtgatgagaagaccgacgaggagaaaatcacgtcattcgcctccgccaatgtgtcctccgatcagtggagtctcgaagatagacactccttagacagcaacacacccctctttcctgaggactctagtgttggcgaactttcttttaagtctgaaaaccaagaagagttctggcactctaaccccagtcacctttctctggacctttctggtatcgactcctgcgagatgagcgactccggatcacaagtgcccgattctttaccatcaactccctcaccggtcgagtcaactaaatccttttctgtccattcagaccgcgagagtagcatcacaaatgatatgggcttttctgatgacttttccttgctggagtcgcaggaacggtgtgaggaggagttgttacaactgctcacgcatatccttaattatgtgatgtgcaagggcctggagaagtccgatgatgacacatggatcgagagaggccaggtgttcagcgccctgtccaaaccagggatatcgagcgaattgctccgacctagtgacgaaattaagctgaccttgctccagaagatgctggaatgggctatctcagaaaacagggaagccaaaactaaccctgtcaccgccgagaacgccttccggcttgtactcataatccaggattttctccagtctgaaggactggttaactcaaacatgtggacagaaaaactcctggaggatatgatgctgctgtttgattgtttaagcgtgtgttatagcgagtcgcccgtctgggtgaaactgtcacagatccagattcagttgctcctgggcttcattgggaggggcaacctgcaggtgtgcgctatggcctcggctaagctcaatactctgctgcagacgaaagtgattgaaaatcaggatgaggcctgttatatcctgggaaagttggaacacgtgctgtcacagtcaataaaagagcagacagagatctattcattcttgattcccctggtcaggactctggtgtctaagatctatgagctcttgtttatgaacctgcatcttccctctctcccctttaccaatggtagctctagcttcttcgaggattttcaggagtactgcaacagtaatgagtggcaggtttatatcgaaaaatacatcgtgccctacatgaagcagtatgaggcccacaccttttacgacgggcacgaaaacatggccttgtactggaaggactgttatgaagctcttatggtgaacatgcacaaacgtgatagagaaggcggagagtccaagttgaaatttcaggagctctttgtggagccctttaaccgcaaagcccggcaagagaatttgcggtacaacaacatgctcaagcagctttcttctcagcagctcgccacccttcgtagatggaaagccatacagctctacctgacttgcgagcgcggcccctgggccaaacggaagcagaatcctatccactggaaattggccaatgtggaaaactatagtcgaatgcgcctgaaactcgtcccaaactataactttaagacccatgaagaggcctccgctctccgggacaaccttggtatccaacattcccagccctcgtctgataccctgctgctggaggtcgtgaaacaggtaaaggtttctgacatggttgaagataaactcgacctgcccgaagaggacatcactgcccgtgtaaacgtggatgaaaaagaggaacaggatcagaaggaaaaactggtgttgatggaggactgcgagctcatcacaatcatcgatgtaatacccgggcgcttggagatcactacccagcatatctacttttacgatggtagcatcgaaaaggaggatggcgtcggtttcgatttcaagtggcctcacagccagataagagaaattcatctcagacgctataatttgcgacggtccgcattagaaatctttcacgttgaccagagtaattactttctgaactttaaaaaagaagtcaggaataaaatctactccaggctgctctctctgcattctccaaacagctattacggatcacgctccccacaggaactgtttaaagcgagtggattgacacagaagtgggtcaatagggaaatcagcaactttgactatctgattcaaattaacaccatggcgggtagaacctataacgacctggcacagtaccccgtgtttccctggatactgcaagattacacttctgaagagttggaccttaataatccagccgtattcagagatttgtccaaacctataggcgtcgttaacgagaagaatgcaaaggctatgagagagaagtacgaaaattttgaggatcccatgggaaccattgataagttccattatgggacacattacagcaatagcgcaggggtgatgcattacttaataagagtcgaaccatttaccactctccacatccagctgcaaagtgggagattcgattgcgctgataggcagttccactcaattcccgctacatggcaggccctgatggataacccttatgatgtgaaggaactgatcccggagttcttctatttccccgagtttctggaaaaccaaaaccaatttaacctagggaggctccagatttccaaggaactcgtgaacgatgtgatactgccgaaatgggccaaaagcgcagaagactttatctacaagcatagaaaagcactggagtctgagtatgttagcgcacacctacacgagtggattgatttaatcttcggttataaacaaagaggcccagctgccgttgaggctctgaatgtgttttactactgtagctacgagggcgcagtggatctggacgcgctaaccgatgagaaggaacgaaaggctctcgagggtatgatcaacaacttcggccaaacgccttgtcaactgctaaaggagcctcaccccccacggctgtcggctgaggaggccgttcagaagccaactaagattgacacttctaccctgaatttattccagcacctgcccgagctgaagtcttttttcattgaaggaatcagcgacggaattcccctactcaaggccacgatccctaagaatcagtaccggagtttcatgagtcaaggatcaccggagctcctgatcacaatttccatgaactatgtgattgggacccatggatggcttccttatgacagaaatatatctaactactttacttttatcaaagaccagacggtcacaaacccaaaaacacagcgatccattaatggctccttcgcacccggcctggaaatcacctctaagttattcgtggtgtcccatgatgctaaactactcttctctgctggatattgggacaattcgatccaggtcatgtccctgactaagggcaaaatcatcagccacattatccggcacatggacattgtgacgtgtttggccaccgactactgcggcattcaccttataagtggatcccgcgacactacttgcatgatctggcagatcactcagcagggcggcgtgcctgtgggtctggcgagcaaacctttccaaattttatacggccatactaatgaagtgttgagtgtaggtattagcaccgaactggacatggccgtttcagggagtagggatgggacagtgatcatccatactattcagaaaggccaatacatgcgcacgctccgccccccctgtgagtccagtctgttccttacaatcccaaatttagccatttcctgggaaggacacatagtggtctactcatcaacagaagaaaagacaacactcaaggacaaaaatgccctccatttgtttagcatcaacgggaaatatctggggtctcagattctcaaggagcaggtgagtgacatatgcatcattggtgagcatatcgtgaccggtagtatccaaggatttctttccatacgggacctgcactccctcaacttgagtatcaatcctctggcaatgaggctgccaatccactgtgtgtgcgtgacaaaagaatatagccacatcctcgtcgggcttgaagatggcaaactgatcgtggtgggggtcggtaagccagcagagatgaggtctgggcagctttccagaaaattctggggaagctctaagaggttatctcagatctccgcgggagaaacagaatacaatacccaagattccaaatag

SEQ ID NO: 126129 - DNA, 7713 bp, synthetic construct
  misc_feature 1..7713: note = Description of Artificial Sequence: Synthetic coding sequence
  source 1..7713: mol_type = other DNA
atggccgcttcagagaggttgtatgagctgtggttgctgtattatgctcagaaggacctgggttatctgcagcagtggctgaaagcctttgtcggcgcctttaaaaagtccatcagcctgagctctctcgaacctagaagacctgaagaggcgggggcagaagtccccctcttgcccctggatgagttgcacgtactggcagaacagctccaccaggccgatttagagcaagccctgctcctgttaaagctcttcattattctttgcagaaacctggaaaatatcgaggctggccgaggtcaagtgttggtacctcgcgtgctagcactcctaacaaagctagtggcggagctgaaaggatgtccacctccccaggggcggggcacgcagctggagaacgtggcccttcatgcactcctgttatgcgagggcttgtttgacccctatcagacctggcgcagacaaaggtccggagaagtgatttcttcgaaagaaaaaagcaagtacaaatttcccccagctgccctcccccaggagttctcagcgttttttcaggagtctctgcaaaatgcggaccacctcccacctattctgctactccggctgatccacctgttttgtgccgtactggctggcggtaaagaaaacgggcagatggctgtgagtgatggaagcgtcaagggcctcctgtcagtcgtgcgaggctggtctcgaggaccagctcccgacccgtgcctggttcccttggccttagaagccctcgtcggagccgtgcatgttctacatgcctcgagggctccaccacggggccctgagctgagggcactgctggaatcctattttcacgtgctgaacgcagattggcctgccggcttatcttccggacccgaagaagctctcgtgacccttcgcgtgtcgatgttggatgccattcctatgatgctggcctgtgaagacaggccagtgctccaggcaaccttcctcagtaataactgttttgaacatctaactcgcctgattcagaattctaaactctacctccagagccgggcacctcctgaaggcgattcagacctggctacacgcctgctcacggagccagacgttcagaaagtgttggaccaggacactgatgctattgcagtgcacgttgtgagggtgctgacgtgcatcatgagtgattctcccagtgccaaggaagtctttaaagaaagaattggttatccgcatctccaagaagtgctgcaatcccatggcccacctacgcataggctgctgcaagaactgctgaatatggctgtggagggcgaccacagtatgtgcccaccaccgccgatcaggaatgagcagccagttttggtcctcgctcagtggcttccctcattgcccacggcagagttacggcttttcttggctcagaggctgcgctggctgtgcgacagctgccccgccagccgggcaacctgtgtccaagcaggcctggtaggctgcctcttagagacactgagcacgggcctggctctggaagcccggtgccaggaacagctcttagccttgttgcaggcgttggggcgggtttcaatccgcccaatggagcttcggcacctactgagaccaagacctggtctcgacagcgaaccaggcggtgcggaggccgggaaggccaggcatgctggtgctgtcattagaactctgagcggcatggcaaggcaccagggccctgcgcgggctttgcgctattttgatctcactccgtcaatggccggcatcatggtcccacccgtgcagcggtggcctggccccggcttcacattccacgcttggctttgcctccatcctatggacactgctccaacccctgccccgactcgacctctgcagaggaaacaactctatagtttcttcacatcctcagggtccggttttgaggctttcttcactgcagcaggtaccctggtggtggccgtgtgcactaggaaggaatatctgactatgtcactaccagaagtctctttcgcagactccgcttggcactgcgtggcaatcgtgcacgtgcccgggcgcaggccgttcagtcagaatctcgttcacgtttataaggacggacatttggttaagaccgcaccacttcgctgcccctctctatccgaacccttttctagctgttgcattggttcggcaggataccgaaccactacgaccacaacaggacttccaacaccccctgtgccagcgaccctcgcttacacgcatcctgccctgacacgtagccagagtgttcccgcttcaacgggcctgggctggggatcggggctggtggcccctcttcaggaaggtagtatcgactccacgctagcggggacccaggacactaggtggggcagcccaaccagcctcgagggggagcttggagcagtggctatttttcatgaggccctgcaggccaccgcactgcgtaccctgtgtaccctcggcccaaacgaaaccgcgcctttcaagccggagggtgagctgcacgaattgagtacacgcctgctgctgcattactcccctcaggcttgtaaaaacaacatctgtctggatctgagtccatcacatggtctggatggtcgtttgaccggacatcgcgtggagacctgggacgtgaaggacgtggtcaactgcgtcggaggcatgggggctttattaccgcttctcgaacgcgtggccgcccaacctaaagaagcagaggctggtcccgccgagacccacgacctggtcggccctgaactcacgagcggacacaacacacagggtctagtgctccccctggggaagagtagcgaagagcggatggaacgaaatgccgtggcagcctttctgctaatgctgagaaactttctacagggccacatggtgaatcaggagtctctggtgcagtgtcagggccctgccatcataggtgctctgctgagaaaagtcccctcctgggccatggacatgaacgtgttaatgtccgctcagctactgatggagcaagtggcggccgaaggctccggcccattgctgtatctcctgtaccagcacctgctatttaacttccatttgtggacactgagtgattttgccgtgagactcggccatatacagtatatgagcagcatcgtgcgagaacacagacagaagcttcggaagaagtatggggtgcagttcattctggacgcgctgaggacacattattcaccacagagggagcgaccgttagctgccgatgatctacgaactgtccagacctcactcctgggactggcaagagagttcctggtcaggtcactgagcgcggatgacgtccaggtcactcagacgatgctgtctttcctggcagccaccggagacgatgggcagatcctccgacgcctgcagcaaaacgagcggctgcccgaaaggagtcgacagcgcctgcgcctcagagagtgtggtttacagggactcgtcgcctgtctgcccgaaggaaccgtttcaccccagctctgccaagggctctacaagctattcttgggtgctggaagcggtaacaccgccggaggaggaggatcctcaggcaccctcaccccagccagccaacccgggaccccaagccctctcgatggacccaggcctttccctgccgcccctgggcgacacagctcctccctgagcaacgtgctggaggacggaagcctgccagaaccgaccatttctggcgacgataccagcaacactagtaatccacagcaaacaagtgaggaagaactgtgtaacctcctaacaaacgtcctcttttcggttacttggcgcggcgtggagggctctgacgaggccgcttggagggagcgtggccaagtttttagtgtgcttacccagctcggggcttccgccacgttagtccggccaccagattgcataaagagaagcctgctggaaatgatgcttgaatcagccctcacagatattaaggaggccccagttggggtgctggccagccttactcagcaggcactgtggctgctgcggctgcttcaggatttcttatgcgccgaaggacacgggaaccaggagctgtggtcagaaaaactgttcgaaggggtgtgtagcctcctggatcggctgggagcctggcctcatctcgctaatgggaccgcagatcttcgcgaaatggcccagatcgggctcagactggtactggggtacatcttgctggaagacccacaactgcacgctcaggcatacgtacgactccatatgttgctgcagacggccgtccctgccagacgagaggaggcttgttatgtgcttagtaagttggaggctgcattaggccgtgtgctgaacacaagctccctggaatctgcaaccgatgaggccgggagtccgctcgccgctgccgctgcagctgccgcggctgaacggtgttcctggctggtccctctggttcgcactctgctcgaccgagcttacgagcctttggggttgcagtgggggctgccctctttgccacccacaaatggtagtcctaccttttttgaagatttccaggccttctgcgccacgcctgaatggaggcactttatcgataaacaggtgcaacctaccatgagtcagtttgagatggatacatacgccaaatcccacgacctgatgagcggcttctggaatgcctgctacgatatgttgatgtccagtgggcagagaagacagtgggagcgagcccaatcacggagagccttccaagagctcgtactggaacctgcccagagaagggcccgtctggaagggctccgttacactgcggtgcttaaacaacaggccacccagcactccatggctctgttgcactggggggccctgtggcggcagctggcatctccctgcggggcctgggccctcagggatactcctatcccacgttggaaactaagttccgcggagacgtattcacgaatgagacttaagctcgtccctaatcatcatttcgatccccatcttgaggcatcagcccttagagacaacctgggcgaggtccctttgacgcctacagaagaggcaagtttacccctggccgttactaaagaagcaaaagtgagtacaccacccgagttgctgcaggaggaccagctgggggaagacgagctcgctgaactcgagacccctatggaggcagctgagctcgacgaacagcgagagaaactggtcctctccgcggagtgtcagcttgtcactgttgttgccgtggttcccggcctcttggaggtgaccacacagaacgtgtacttctatgacggctccactgaacgggtcgaaacagaggaaggaattggatacgacttccgtagaccattagcccaactgcgcgaggttcacctgcggcgtttcaatctccgcaggtccgccctggagctgttttttattgaccaggcaaattacttcctgaatttcccttgcaaagtgggaacaacaccagtgtcctctcccagccagaccccgagaccccagcctgggccaataccacctcatacacaggtgagaaaccaggtgtactcctggttactcaggctgcgtccaccttcacagggttacctgagttctcggtcaccccaggaaatgctgagagctagcggcctgacacagaaatgggtgcaaagggagatttccaatttcgaatacttaatgcagctgaatactatcgctggcagaacttataacgacttatctcagtaccctgtctttccttgggtcctccaagattatgtcagtccgactttggatttgtccaatcccgctgtcttccgcgacctgtccaagccaatcggcgtggtgaatccgaagcacgctcaactggtgcgagaaaaatatgagtctttcgaggaccctgcaggaacgatagacaagtttcactacgggactcactactccaatgcggccggagtcatgcattaccttatccgcgtcgaaccttttacctccctgcacgttcaacttcaatctggacgatttgattgttctgatcggcaattccacagtgtcgcggccgcttggcaggcgagactagagagccctgccgacgtcaaggagttgatccccgagtttttctattttcctgattttctggaaaatcagaatgggtttgacctcgggtgcttgcaactgactaacgaaaaagtgggtgatgtcgtcctaccaccctgggcctcatcaccagaagatttcattcagcaacacaggcaggcactcgagagcgaatatgtttcggcacacctccatgaatggatcgacctcattttcggatataagcaacgtggcccagctgcagaggaggctttaaacgtattctactactgtacctatgagggcgctgtcgacttagaccatgtcacagatgagagagagagaaaagctttagaggggataatctcgaatttcggacagaccccctgtcaactcctgaaggagccccacccaacacgcctcagtgcagaggaggccgctcaccgtctggctagactcgacactaacagcccatctatctttcagcatttggacgagctgaaggcattcttcgccgaagtggtaagtgatggagtccccttggtacttgcactggtgccacataggcagccgcactcatttataactcagggctccccagacctgctggtgacagtctcagcaagtgggttgctgggcacccattcgtggctcccctacgaccggaatatctccaattattttagcttcagtaaggatcctaccatgggatcccacaagacccaaagattattgtctggtccctgggtccccggctcaggagtttccggccaagccttagcagttgcgcctgacggaaaactgctcttctctggcggccactgggacggctcgctgcgagtgacggcccttccaagaggcaaattgctgtcccagcttagttgccacctagacgtggttacatgcctggccttggatacctgcggcatctatctgatctctggatctcgggatacgacctgcatggtgtggagattgctccaccaggggggtctgtccgtagggctagcaccgaaacctgttcaggtattgtacgggcacggagcagccgtgtcctgtgtagcaatctccactgagttagacatggctgtgtccggctccgaggacggaactgtgatcattcacactgtgcgacgtggacagtttgttgccgccttgaggcccctgggagcaacctttcctggacccatcttccatcttgctctcggcagcgagggtcagattgtcgtccagagctccgcatgggagcgcccgggcgcccaagtgacgtattctctccacctatacagtgtcaacggcaagctacgcgcatcactcccactcgcagaacagcctacagccttgaccgtcaccgaggactttgtgcttcttggcactgctcaatgtgcactgcacatcctccagctgaacaccctccttcccgctgctcctcctttaccgatgaaagtggccatccgatctgttgccgttactaaagagcgatcgcacgtgctggttgggctggaggacgggaaactgattgttgtggtggccgggcagccgagtgaagtaagaagcagtcaattcgctaggaagctgtggaggagtagtcgccgaatatcgcaggtctccagcggcgagacggaatacaatcctacagaagccagatag

SEQ ID NO: 126130 - DNA, 1848 bp, synthetic construct
  misc_feature 1..1848: note = Description of Artificial Sequence: Synthetic coding sequence
  source 1..1848: mol_type = other DNA
atggaaccagctttaggaccaggcgttcagaaagacctcggatacctgcagcaatggctgaaagcgtttgttggagcatttaagaagtcaatttcgctttctagtctcgagccaagaaggccggaagaggctggggcggaggtacccttgttgccactggacgagttacacgtactggctgagcagctgcaccaagctgatctggaacaggctctgcttctgttgaaattattcattatattatgtaggaatcttgagaacatcgaggccgggcgaggtcaggtattagttcctcgcgtcctggccttgctaactaagttggttgcggaactgaaggggtgccctccaccccagggcaggggtacccagctagaaaatgtggcacttcacgctcttttactgtgcgaagggctgttcgacccataccagacatggagacgacagcggagcggagaggtgatctcctcaaaagagaaatctaaatacaagtttcccccagcagccctcccacaggagttctcagccttcttccaggagtctttgcaaaacgctgaccacttgccaccgatattacttctgcgactcattcacctgttctgcgccgtcctcgccgggggcaaggaaaacggccagatggccgtgtccgacgggtcagtgaaagggctactgtccgtggtacggggctggtcccgcggcccagccccggatccttgcctcgttcctctggccctcgaggctcttgttggggctgtgcacgtgctgcacgcctcccgggcccctcccagaggccctgaactgcgggctctgctggaatcttactttcacgtgcttaacgcagattggccagcaggactgtcttccggcccagaggaagcgttggtgacactgcgcgtgtcgatgctcgatgccattccaatgatgctggcctgtgaagacaggccagtgctacaagcaaccttcctaagtaacaactgttttgaacacctgacccggctcatccagaactccaaagttctggatcaggacactgacgctattgccgttcatgtcgtcagagtactgacctgtatcatgtcagacagcccgtccgctaaagaggtgttcaaagagcgcattggttatccccatttgcaggaggttctgcagtcgcacggcccccccacccatcgacttcttcaagaactactcaacatggcagtggaaggagatcactcaatgtgtcctcctcccccaataagaaacgaacagccggtgctggtcctggcccagtggttaccatctttacccacagccgaactgcgtctattcctcgctcagcgcttgcgctggttatgtgacagttgtcctgcatcacgcgcgacgtgtgtccaggcaggcctagtaggctgcctgttagaaaccctgtcgaccggactcgcgctagaggccagatgtcaggagcagcttctggcactactccaagccctgggaagagttagcatccgcccgatggaactgaggcatctgctacgacctaggcccggcctcgacagcgagcccggtggagctgaggcaggcaaagctagacatgcaggtgccgttatccgtaccttgtctggaatggcacgacaccagggccctgcgcgggctttacgctattttgaccttacacccagcatggccggcattatggtgcccccggtccagaggtggccaggtccgggatttacttttcacgcttggttatgcctccatcctatggatacagcacccacgccagcccctcccactctgccatcttccgggataggcggtcggtgctaccctctacgggactggcgagcagaagtgccacctctagcaggctag

SEQ ID NO: 126131 - DNA, 3012 bp, synthetic construct
  misc_feature 1..3012: note = Description of Artificial Sequence: Synthetic coding sequence
  source 1..3012: mol_type = other DNA
atgtcacagttcgagatggatacctatgctaagtctcatgaccttatgtccggattttggaacgcttgttacgacatgctcatgagtagtggccaacgtcgacagtgggaacgggcacaatcgcggcgggcatttcaggagctcgtgctggaacctgcacagcggcgggctcgcctcgaaggcctgcggtataccgccgtgctgaagcagcaggccacccagcactccatggcacttcttcattggggggccttatggcggcagttggcctctccttgtggtgcgtgggctctgagagacacacccatcccccgctggaagctgtcatccgccgagacctacagccgcatgagactcaagctggttcctaaccatcactttgatccccatttagaggcttcagctctaagagacaacctgggggaggtaccgttgacacctaccgaggaggccagcttgccattggcggtgactaaggaagcgaaggtcagcaccccccctgagttgcttcaggaagatcagctgggcgaggatgagctggcggaactggagacacccatggaagcagccgagctagatgaacagcgcgagaagctagtgctatcagccgaatgtcagttggtgaccgtcgtggccgttgttccaggcttgcttgaggtcaccactcagaacgtctatttctacgacggaagtacagaaagagttgagacagaagagggcattgggtatgactttaggcgacctttagcgcagctgcgcgaagtacacttgagacgattcaacttgcgccgatctgcccttgagctcttttttatagatcaggcgaactattttctcaattttccctgcaaagtcggaaccactcccgtctcctcccccagtcagacgcctcgcccgcagccgggtccgattccccctcacacccaggtaaggaatcaggtgtatagctggcttctgaggctgcgacccccgtcacagggatacctgtccagcaggtccccccaggagatgcttcgggcaagcggcctgacccagaaatgggtgcaacgcgaaatttcaaacttcgagtacttaatgcagctcaacaccatagccgggaggacctataacgatctttctcagtatcccgtgttcccctgggttctgcaggattacgtgagtcctaccctcgatctgagcaaccccgcagtcttccgtgatttgtccaaacctattggcgtggtcaaccctaagcatgcacagctggtgcgagaaaagtatgaaagttttgaagatccagccggtactatcgacaaattccactacggcacacattattctaatgctgccggtgtgatgcattatctgattcgggtcgaaccatttacctcattgcacgtgcagctacagtctggcaggttcgactgctctgataggcagtttcattctgtggccgcagcctggcaggccaggctggagtcccccgctgacgttaaagagctcattccagaattcttctacttccctgactttctcgagaaccaaaatggcttcgatctcgggtgtctgcaactgaccaacgaaaaggtgggagatgtcgtgttgcccccctgggcctcctcccctgaggactttattcaacagcaccgacaagcgctagaatctgaatacgtgtccgcacacttgcacgagtggattgacctaattttcgggtacaaacagcgagggcccgctgccgaagaggcactcaatgtattctactattgtacctatgagggcgccgtcgatttagatcacgtcactgacgaacgagagcgcaaggcgctcgaggggataatttccaattttggccagaccccatgtcaactgctgaaagaaccccatcccacgagactttctgccgaggaagctgcccacagactggcaagactggacaccaattcccccagcatctttcaacacttagacgaactgaaagcctttttcgctgaagtgacagtgtcggcgtccgggctcctggggactcatagttggctgccttatgaccgtaacatctccaactatttctcatttagcaaggatcctacaatgggcagccacaagacccaaaggctgttaagcggcccgtgggttcctggtagcggcgtttctggccaggccctcgccgtcgcccccgatgggaaactcctctttagcggaggccactgggacgggagcctgcgcgtcaccgctttaccacgaggaaagttgctgagccagctcagctgtcatctggacgtggtaacatgtctggccctagatacatgcggcatctacctgataagtgggagtcgcgatacgacttgtatggtgtggcgtcttctgcaccaaggcgggctctcagtcggattggcacccaaaccagttcaggtgctgtatggccatggcgctgccgtatcctgtgtagctatatcgacggaactggatatggctgtttccggaagtgaggacggcacagtaatcattcacaccgtcaggaggggacaatttgttgccgctctcagacccctgggcgctacctttcctggcccaattttccatttagccctggggtcggaaggtcaaatcgttgtacaatcttcggcgtgggaaaggcctggggctcaggtgacttattctttacacctatattccgtcaacggtaaactgagagccagcctcccattagctgagcagcctacggccctgactgttactgaagattttgttctccttgggacagcacaatgcgcccttcacatcctgcagttgaatacactactcccggcagctccccctttgccaatgaaggtggcaattaggtcggtggcagttacaaaggaacggtctcacgtgctggttggtctggaagacggtaagttaatcgttgtggttgccggacaaccgtctgaggtgcgatcctcccagttcgctcggaagctatggaggagcagcagaaggataagccaggtctcttctggtgaaactgaatataatccgacggaggcaagatag

SEQ ID NO: 126132 - DNA, 2094 bp, synthetic construct
  misc_feature 1..2094: note = Description of Artificial Sequence: Synthetic coding sequence
  source 1..2094: mol_type = other DNA
atgcttcgggcctcgggcctgacgcaaaagtgggtgcaacgggagatctcaaactttgagtatctcatgcagctgaacactatcgccggacggacatataacgaccttagccagtaccccgtttttccttgggtgcttcaggactacgtgtccccaacactcgatctatctaacccagctgtgtttcgagacttaagtaagccaattggggtcgtgaaccctaaacatgcacagctggtgcgggagaagtacgagtccttcgaggatcccgcaggcacaatagacaaattccactatggcacccattacagcaatgcggcaggggttatgcattatctgattagggtcgagccattcacaagtctccatgtgcagctccaaagtggacgttttgattgtagtgacaggcagtttcatagcgtggctgccgcctggcaggcacgactcgaatcgcctgcggatgtcaaggagcttatcccagaattcttctatttccctgactttctcgagaaccagaacggtttcgacctaggatgccttcaactaaccaacgaaaaagtgggcgacgttgtccttcccccctgggcaagttctcctgaagactttattcagcagcacagacaggctcttgagtctgagtacgtttcggcacacctgcatgaatggattgatctgatcttcggctacaagcaacgcgggcccgcagccgaggaggctctgaatgtgttctattattgcacttacgagggtgccgtggacttagaccacgtcactgacgagagagagcggaaagctctggaggggatcatatccaacttcggacagactccgtgccagttactgaaggagccacatcctacgcggctctctgcagaggaggccgcacatcgactggccaggctcgatacaaattctccatcaatcttccagcacttggacgagttaaaagcttttttcgccgaggtggtttctgacggagtgccactagttctggccctggtcccgcatcgccagccacacagtttcatcactcaggggtcgccggacctactggttactgtatcagcatctggcttactaggcactcatagctggcttccttatgacagaaatatttcgaactacttttcattctcaaaggatcctacaatgggatcacacaaaacccaacggctgttgagcggcccgtgggtgccgggaagtggagtgagcggtcaggcactagccgttgcgccagacgggaagttactcttttcgggcgggcactgggatggttcactgcgagtgactgccctacccagaggaaagctcctatcacaactttcatgccacctggacgttgtgacatgtctggcactggatacctgtggaatctaccttatctcgggatcacgggacaccacatgcatggtctggcgactcttgcatcagggcggcctgtctgttggattagccccgaaacctgtccaagtgctctacgggcacggcgcagccgtaagctgcgtcgcaatttccacagaactggatatggccgtgtcaggctccgaggacggtactgtcattatacacaccgtcaggcggggtcagtttgtggctgccctgaggccgctcggcgccacatttccgggaccaattttccacttggcattagggtctgagggacagattgtcgttcagtcttccgcatgggaaagacccggagctcaggtaacatattcactgcatctgtacagcgtgaatggtaagttacgagcctcactgcctcttgccgaacagcccaccgctttaaccgtgacagaagacttcgtactgctcgggacagctcaatgtgccctgcacatcctgcaacttaacacgttgcttcctgcagcgcctccactgccaatgaaggtcgccattaggtccgtggctgttactaaggagagatcccatgtcttagtggggctcgaagacggaaagctcatcgtggtggttgcaggccagccgagcgaagtgaggagttcacagtttgctcggaagctctggcgctccagcaggaggataagccaagtgagctccggcgagactgaatacaatccaacagaggccagatag

SEQ ID NO: 126133 - DNA, 8265 bp, synthetic construct
  misc_feature 1..8265: note = Description of Artificial Sequence: Synthetic coding sequence
  source 1..8265: mol_type = other DNA
atggcggcatccgagcggctctacgagttgtggctgctctactatgcacagaaggatctcggttatctacagcaatggctgaaggccttcgtgggcgcttttaaaaagagcattagcctttcatccttggaaccaagacgcccagaagaagccggcgctgaagtgcctctcttacccctggatgagctgcatgtcctcgccgagcaattgcaccaggctgatctggagcaggctctcctgctactcaaactcttcatcattttgtgtagaaacctggagaacatagaagcaggccgggggcaggtgttggttccacgggtgttggctctcttgacaaagctggtggccgaactgaaaggctgtcctccaccccaaggcagaggtacccaattagagaacgtggctctccacgcactgctcctgtgtgaaggtctgtttgacccataccaaacctggcggcggcagcgtagtggtgaggtgatttcgtccaaggagaagtccaaatacaaatttccccccgctgccctcccccaagaattttcggccttttttcaagagagcttgcaaaatgccgatcatctgccccccattctcttacttcggttgattcatctattctgcgcggtgttagcaggtggcaaggaaaatggacagatggctgtgtcagatgggtccgtcaagggcctgctttccgtggtccgcggctggagtaggggacccgcaccagacccttgccttgttcctctggctctggaggccctggttggagcagttcatgtgctgcatgcttcaagagccccccctcgggggccagaattgagggctctgcttgaatcatacttccacgtgctcaatgctgactggcccgccgggttgagctcaggacctgaggaggcgctggtgaccctgcgggttagtatgctagacgccatacccatgatgctggcctgcgaggatagacccgttctccaggctacattcctatctaataattgctttgaacatctcacgagattaattcagaactcaaagttgtatctccagagtagggcaccacccgagggggacagcgacctcgccactaggttactcaccgagcccgacgtgcagaaggtgctggatcaggatacagacgcgattgcagttcacgtggtacgggttctgacctgtattatgtctgacagcccaagtgcaaaggaagtctttaaggaacggattggataccctcaccttcaggaggttctgcaatcccacggcccacccacgcaccgcctgctgcaggagctgttaaacatggcagttgaaggtgaccattctatgtgccctcctcctcccattcgcaatgagcagccggtgttggtcttagcccaatggcttccgtccttaccaactgccgaactgagactctttttggctcagaggctccgctggctctgcgacagctgtccggcatcccgtgccacatgcgttcaagctggcctggtgggctgccttctggaaaccctgtcgactggccttgcacttgaggccagatgtcaggaacaactcctggctttgctccaagcgcttggacgcgtgtcaattcgacctatggagttgcggcatctgttgaggccaaggcccggccttgactccgagccaggaggggctgaggcggggaaggcccgacacgcaggagctgtgattcggacattatccggaatggcgcggcaccagggacccgcgagggccctccggtactttgacctgaccccctccatggcaggaatcatggtccctcctgtccagcggtggcccggacccggctttaccttccacgcatggttgtgtctgcacccaatggataccgccccaacgccagccccaactcggcccctgcaacgcaagcagttatactcctttttcacttcttctgggagcggctttgaggcgttttttacggcggccgggacactcgttgtcgctgtgtgcacaagaaaggaatacctgaccatgagcctacccgaggtttctttcgcagatagtgcatggcattgcgtggctatcgtccacgtaccgggtagaagaccgttttctcaaaacctggtgcatgtgtataaagatggacacttagtgaaaaccgctcccctcaggtgccccagcctgtccgaaccttttagtagctgttgtatcggtagcgcaggttataggaccaccactacaacgaccggactccctacacccccggtgcccgccacattggcctacacccatccagccctaactaggtctcagtccgtccccgcatccacaggcctaggatggggatccggactagtggcacctctgcaggagggatctatcgattctactctggccggaacacaagacacccgatgggggagccccacctcactggaaggggagctgggcgctgtggctatttttcacgaagccctgcaggccacagctctgagaactctgtgtacattaggaccaaatgaaaccgctccctttaaacctgagggggagctgcacgaattgtctacgagacttttgctgcattatagccctcaggcgtgcaagaataatatttgcctcgatctgagcccctctcacggactagatgggcgcctcacaggccatcgagttgaaacatgggacgtgaaggacgtggtgaactgcgttggaggcatgggagccctcctccctttacttgagagggtagctgcccaacctaaagaggcggaggcagggcctgctgagactcatgatctggtggggcccgaactgacaagtggacataatactcaggggctagtgctgccactgggcaaaagcagcgaagagcggatggaacgcaacgcagttgccgcattccttcttatgctccgcaactttctacaaggtcacatggtgaatcaggaaagcctggttcagtgtcaggggcctgcaattatcggggcgcttctgcgaaaggtcccttcctgggccatggatatgaatgtgctaatgtccgcccaactgctcatggagcaagtcgccgcagagggctctggaccactgctgtatctgctgtaccaacatcttcttttcaatttccatctgtggacacttagcgacttcgccgtgcgcctgggccatatccagtacatgtcctctattgtgcgcgaacacaggcagaaactgcgcaagaaatacggagtgcagttcatccttgacgccttgcggacccactattccccccagcgggagcggccgcttgcagccgacgatcttagaaccgttcagacttcactgctggggttagcacgggagtttctggtaaggtctctgagcgccgatgatgtgcaggtcacgcagactatgctgagcttcctggccgctacaggagatgacggccaggctgtcggtgccctcgacttactgctagcgctgctgcatgggtcgctcgttcaggagtccctcgccgtttttttgctcgagcctgggaatctcgaagtgttgctcgcgctccttgtgcgccccggctcccttcccctattgcccgacagagtgtgtaagatccttcgccgactccaacagaacgaacggcttccggagcgctccagacagagacttcgcctgcgggagtgcgggctgcagggtcttgttgcttgtctaccagaaggtactgtgtctcctcaactgtgccagggactgtacaaactgttcctcggtgccgactgcctgaatctctccgatctcctggccgtggttcagttgtctctgcaggccgaccttagtgtccggctggacatttgccgccagttattccatctcatctacggccagccagacgtggtacgtcttctggcccgccaagccggctggcaggatgttctgactagactgtacgtgcttgaagccgcaacggccggctccccccccccttccagtcccgagagtcccacctcccctaagcctgcaccacccaaacctcccaccgagagtcccgcagagccttctgacgtgtttttaccaagcgaggctccttgccccgaccccgatggcttttaccatgccctgagtccattctgcactccctttgaccttggactcgagcgaagtagcgtaggatccggaaatactgccggaggcggtggatcttcaggcacactgacacccgcctcacagcccggcacccctagccctctagacggccccagacccttcccagcggcccctggccggcactccagctccctgtctaacgtgctggaagatggctccctgcccgagcccactatttcaggagacgacaccagcaataccagcaacccacagcaaacgtctgaggaggagctctgtaacctcctgaccaatgtgcttttttcagtgacctggcgcggagtcgagggaagcgatgaagccgcctggagagagcggggacaagtgttcagtgttctgacccagcttggggcatccgccacattagttaggccgccagactgtatcaagaggtccctgttggaaatgatgttagaatcagccctgactgacatcaaggaggcccccgtcggagtcttagcttcactgacccagcaagctctctggctcctgagattactccaagacttcctatgtgccgaaggccacgggaaccaggaactatggtcggaaaagttattcgaaggcgtctgcagcttgttagatagactcggcgcctggccgcatttggctaatgggaccgcagatctgcgagagatggcacagattggccttcggctggtgctcggctatatccttctggaagaccctcaactccacgcccaggcctacgttcgcctgcatatgctgcttcagaccgccgtgccggcaagacgggaggaagcttgctatgtgctgtcaaagttggaggccgcgctcgggcgcgtgttaaacacctccagcctcgagagtgctaccgatgaggccgggtcacctttagccgctgcggccgcagctgccgctgccgaacgctgcagctggttggtgccgttagtgcgaactctgctcgacagagcctatgaacccctggggctacagtggggacttccatctctcccccctacaaacggttcccctacctttttcgaagacttccaagccttctgcgctacaccagaatggcggcactttattgataagcaagtgcaaccaacaatgagccagtttgagatggatacctatgcgaaatcgcatgacctgatgagtggtttttggaacgcgtgctatgatatgctcatgtcctcaggccagcgacgacaatgggaaagagctcagtcgagaagggcattccaggaactcgttctggagccagctcaacggagagctaggcttgaggggctgagatatacggccgtactcaaacagcaggcaacacagcattctatggcactcctccactggggggctctttggcgtcagttggcctctccatgtggtgcatgggccctgcgtgatacacccatacctaggtggaaactgagctccgctgagacctactcacggatgaggctgaaactggtccccaaccatcactttgacccccaccttgaggcctcagccttacgagacaacctgggcgaggtaccacttacccccaccgaggaggcgagtttgcccctggctgtgacaaaggaggccaaggtgagcaccccgccggaattacttcaggaagatcaattgggtgaagacgaactggccgaactcgaaaccccaatggaggcagcagaactggatgaacagcgagagaagctggtgctttctgccgagtgtcagctagtgaccgtggtggctgtggtgccaggacttcttgaagtaacaacacagaacgtctacttctatgacggttctaccgagagagtggaaactgaggagggaattggctacgattttcgacggcccctcgcccagctgcgggaagtccatctgaggaggttcaaccttcgtaggagcgcgttggaacttttcttcattgaccaggccaactattttcttaacttcccctgcaaagttggaactacccctgtatcaagcccatcacagactccaagacctcagcctggccccattccacctcatactcaggttcggaaccaagtgtatagctggcttctcaggctgcggcccccaagccaggggtatctctcctctcgatccccccaggagatgttgagggccagcgggctcacccagaagtgggtgcagcgagaaatctcgaacttcgaatacctcatgcagctgaacaccatagctgggagaacctacaacgatctttcacagtacccagtgttcccttgggtgctgcaggactacgtctcccccactctcgacctgtctaatcccgccgtgtttcgagatctgagtaagcccatcggtgtggttaatcccaagcacgcgcagttagtgcgcgagaaatacgagagttttgaagaccccgctggaaccattgataagtttcactatggtacgcattactctaatgctgcaggagtgatgcattatctaatccgcgtcgagccattcacctcgttgcacgttcagttgcagagcggccgcttcgattgcagcgatagacagtttcacagtgtagctgcggcttggcaggcgcggctggaatcgccagcagacgtgaaagaactaattccagaatttttttatttcccagacttccttgaaaatcagaacggatttgacctgggctgtctacagctgacaaatgagaaagttggtgatgttgtgctacccccttgggcatcaagccccgaagacttcatacaacagcaccgccaggccctcgagagcgagtatgtgtccgcgcacctccacgaatggattgatctgatttttggctataagcagcgagggcctgccgctgaggaggcgctaaacgtattctattattgcacttacgagggtgccgtcgatttagaccacgtgactgacgagagagagagaaaagcattggagggtataattagcaactttggccaaacaccttgccagctcctgaaggagccacacccaacccgtctgtccgccgaggaggcagctcatcgcctggcccgactggacactaattctccctcgatttttcagcatctcgatgaactgaaggccttcttcgcagaagtcgtctcggacggggtgccactggtgctagccctcgtgccccataggcagccccattcattcattactcagggctctcctgacctgttagtcaccgtctctgcctccggattacttggtacccacagttggctaccctacgaccgcaacatctccaattacttcagtttttcaaaggacccaacaatgggctcccataagacccagcgactgctgagtgggccatgggtgcccggtagcggagtcagtggccaggcactggcggtagctcccgatggtaagctgctgtttagcggagggcactgggacgggagcctgagggtaaccgccctgcctaggggaaaattgctaagtcagttgtcctgccatttggatgtggtaacttgcctggcattagacacgtgcggaatttacctgatttcgggctcccgggacacaacctgcatggtgtggaggttgttgcaccaaggaggcctctccgtcggcttggcacccaaacccgtgcaggtcctctacggccatggagccgcggtgagttgcgtggcaatctcaactgagctggatatggctgtttctggatcagaggatgggaccgtgatcatacataccgtacgtcgcgggcagtttgtggccgccctgagaccactgggcgcaacatttccaggacccatcttccatcttgccctcggcagtgagggacaaatcgtggttcaaagtagtgcctgggagcgcccgggcgctcaagtgacctactccctgcatctgtacagcgtgaacgggaaactgcgggcaagtttgcccttagctgagcagccaactgcactgaccgtaaccgaggacttcgtgctattaggcaccgctcagtgcgcactgcacatcctgcaactgaataccttgctgccggccgccccaccactgccgatgaaggtcgcaatccgatccgtagcggtgactaaggaaaggtctcatgtgctcgtcggactggaggatggtaagctgatagtcgtcgttgctgggcagcccagtgaggtgcggtcctcacaatttgcccggaagctgtggaggtcttctcgccggatctctcaagtttccagcggagagacagaatacaaccctacagaggcacggtag

SEQ ID NO: 126134 - DNA, 7116 bp, synthetic construct
  misc_feature 1..7116: note = Description of Artificial Sequence: Synthetic coding sequence
  source 1..7116: mol_type = other DNA
atggccgcacccgagtcgggtccagccctctctccagggacagccgagggggaggaagagacaattctttatgatttgctggttaacaccgaatggcccccagagactgaggtgcagccaagagggaatcagaagcacggggcttccttcattattacaaaggctatccgcgatcggttgctgtttttgcgccagtatatatggtacagcccggctcccttcctcctgcccgatggtctggtccgcctcgttaacaaacaaattaattggcacctggttctggccagcaatggcaaactgctcgcagccgtccaggaccaatgcgtggagatccgatccgccaaggacgattttacaagtatcattggaaaatgtcaggttcccaaagatccaaagccacaatggcgccgtgtagcctggagttatgactgtacactgcttgcctatgccgagtctacgggaaccgtgcgggtatttgatctgatgggttcagagctgttcgtaatttccccagcatcgtcattcattggcgacttaagctacgcgatcgccggactgatattcttggagtataaggcaagcgcccaatggagcgctgagctactggtgattaattataggggggaactcagatcctatcttgtatcagtgggaacgaatcagagctatcaagagtcccactgcttctcattctctagtcattacccacatggcatcaacaccgcgatctaccacccgggccatcggctgctgctcgtaggagggtgcgaaaccgctgaggtgggcatgtcgaaagcatccagttgtgggttgtccgcttggcgagtgctaagcgggtcaccgtattataagcaggttaccaacggtggggacggtgtgactgccgtgcccaaaactttgggtctactgaggatgctaagcgtcaagttttattctcgccagggacaagagcaggatggtatattcaaaatgtctctttccccagatggaatgctgttggctgcaattcatttcagcgggaaactgagtatttgggctatcccctctctgaaacagcagggggagtggggccagaatgagcaacccgggtacgacgacctgaacccagattggcggttaagcaccgagaagaggaaaaagattaaggataaggagtcattttaccccttgatcgacgtgaactggtgggccgacagcgcggtgacactcgcaaggtgctcaggggccctgaccgtgagttctgttaaaacattaaaaaacctcctggggaagagctgtgagtggttcgaacccagccctcaagtgacagcaacgcacgatggcgggttcctgtcactggagtgcgagatcaaactcgcgcctaaaaggagcaggcttgagaccagagcgggtgaagaggatgaaggagaggaggattctgattccgactacgaaatcagcgccaaggccaggtattttggttatatcaagcaaggcctgtacctggtcacggaaatggagaggtttgctccgccccgtaagcggccgaggacaatcacaaaaaattacaggctcgtgtccctccgtagcaccactcctgaggaattgtaccaaagaaagatagaaagcgaggagtatgaagaggctctaagcctggcccatacatacgggttggataccgatctcgtgtatcagagacaatggagaaagagcgctgttaatgtggctagcatacagaattacttgagtaaaatcaagaagagaagctgggtgctgcacgaatgcttagagcgggtgcctgaaaatgtcgatgcagcaaaggagctgcttcagtacggactgaaagggaccgacctcgaagcacttctcgctataggcaaaggggcggatgatggtagattcactctgcccggcgagatagatatcgacagtatctcttatgaagaactgagtccccctgacgaggaacccgcaaagaacaaaaaggagaaagaactgaaaaaaagacaggagctgctcaagctggtgaacttttcaaaactcacgctggaacagaaagaactttgccgctgtcgccggaagctcctgacatacctggataggcttgctacatatgaggaaatactgggcgtcccacacgctagcgagcagcggtacgacgccgagtttttcaagaaattcaggaaccagaatatcgtgctaagtgcaaggacctatgctcaggagagtaacgtgcaagccctcgagatattgtttacctaccatgggtccgacctgctcccacatcgtctggctattctctccaactttcctgagacaacttctccccacgaatattcggtactgctgccagaggcctgttttaacggcgactctctgatgatcatcccatggcatgagcacaagcatcgggcaaaagactggtgcgaggaactagcgtgccggatggtggtggagcctaatctccaagatgagagcgagttcctctacgctgcccagcctgaactgcttagattcaggatgacacagctcactgttgagaaggtgatggattggtaccagacgcgcgccgaggagattgagcattacgccaggcaggtcgactgcgccctttctcttatacgcctcggcatggagaggaacatcccaggcttgctggtgttatgtgataacctggtcaccctggaaactctggtctacgaggcacgttgtgacgtgacccttacattgaaggagctccagcagatgaaggacattgagaaactgcggcttctcatgaatagctgttcagaggacaagtacgtgacgtccgcataccagtggatggtgccttttcttcataggtgcgagaagcagtctcccggtgtagctaacgaacttctgaaggagtatttagtgactttggctaaaggcgatcttaagtttcctctcaagatatttcagcatagcaagccagacctgcaacagaaaatcattcccgatcaggaccagctaatggcaatcgcgctggagtgcatttacacctgtgaaagaaacgatcagttgtgcctgtgttacgatctgctggaatgtcttccggaacgggggtatggagacaagacggaggcaacaactaaacttcacgacatggtggaccagcttgagcagatcctgtctgtttccgaattactcgaaaaacacggcctggagaaacccatatctttcgttaagaatacacagtcatcctccgaggaagccaggaagttgatggttagactgaccagacacactggaaggaaacagcctcccgtcagtgagagccattggcgcacgctcctccaggatatgctgactatgcagcagaatgtctacacttgcctggacagtgacgcctgttacgaaatattcacagaatcactgctatgtagtagccggctcgagaatatccacctggccggccaaatgatgcattgtagcgcttgctccgagaatcctccagccggtattgcccacaagggcaagccacactaccgtgtcagctatgaaaagtcaattgacctggtcctggcagcaagcagagaatatttcaactctagcactaatctgaccgattcatgcatggacctagcacgttgctgtctgcaactgatcaccgaccgaccaccagcaatacaggaggaacttgatctgatccaggccgtgggctgtcttgaggaattcggggtgaagattttgccattgcaggtaagactctgccctgatagaatctcgctgattaaagaatgcatctcccagagtcctacatgctataaacaatccaccaaattgctgggattagctgaactgctgcgggtagcgggcgaaaatcctgaggagaggaggggacaggtcctgattctgctggtcgaacaggccttgcgctttcatgactacaaagctgccagcatgcactgtcaggagttgatggccacgggctacccaaagagctgggacgtgtgttctcaactcgggcagagcgagggatatcaggatttggctacgcgacaagagttgatggctttcgccttgacccactgtccaccaagtagcattgaactgttgctggctgctagcagctcactccagacagaaatcctttaccaacgggtgaattttcagatacaccacgaaggcggggagaacataagtgccagccccttaacttccaaggcagttcaggaggacgaggtcggtgtgccaggaagcaacagtgccgatctcctccgttggaccactgctaccacaatgaaagtattatccaataccacaaccacaacaaaagccgttcttcaagccgtgagcgatggtcagtggtggaaaaagtcgttgacttacctgcgtcctctccaaggacagaaatgcggtggcgcgtatcagatcggcacgacagcaaacgaggacctggaaaagcagggctgtcaccccttctacgaaagcgtgatctcaaacccattcgtggccgagagcgaggggacttacgatacttatcagcacgtgcccgtggaaagttttgcagaggtgcttttgaggaccgggaagctcgctgaagccaagaataaaggcgaggtattcccaactacggaagtcctgctccagctggcctctgaggctcttccaaatgacatgactttagccctcgcctatctgctggccctcccacaagttctcgatgctaatcgatgttttgaaaagcagagccccagcgcactgtcactgcaactggccgcttattattactctctgcaaatttatgcacgtctcgccccatgctttcgcgacaagtgccacccgctttaccgcgccgatccaaaggagctaattaaaatggtgacacggcatgtcacaagacatgagcatgaagcttggccagaggacctgatctctctaacaaaacagttacattgttacaatgaacggcttctagatttcactcaggcgcagatacttcagggtctgaggaaaggcgtggacgtgcagagattcactgccgacgaccagtataaaagagaaaccattttgggactggcagagaccctggaagagtcggtttacagcatcgcgattagcctagcacagaggtactcagtgtctcgctgggaggtcttcatgacccacttggaattcttgtttacggacagcggtctcagtaccctggagatcgaaaatagagcccaggatctgcacttgttcgagacactcaagactgaccctgaggcattccatcagcatatggtcaaatacatctaccctactattggtgggttcgaccatgaacgcttacagtactactttacactcctcgagaactgcgggtgtgccgatctgggtaactgcgctattaaaccggagacccatataagactccttaagaaatttaaggtggtcgccagcggattgaattacaaaaagctaactgacgaaaacatgagtcctcttgaggctttagagccggtcctgagcagccagaatatcctgagtatttcaaaacttgtgcccaaaatccccgagaaagacggacagatgctctctcccagtagcttgtacaccatttggctgcagaaactgttttggaccggcgatccgcatcttataaaacaagtgcccggaagtagcccagagtggctgcacgcctatgacgtatgcatgaagtattttgaccgcctgcacccaggtgatttgatcactgttgttgatgccgtgaccttctctcccaaggcagtgacaaagctctcggtggaagcacgaaaggagatgacacggaaagcaatcaaaactgtgaagcatttcatcgaaaagccaagaaaaagaaattctgaggacgaggcacaggaagccaaggattctaaagtcacctatgcggacacacttaatcacctggaaaaatcactcgcccacctcgagacgttgtcccacagcttcatcctgagtttaaaaaacagtgagcaggagacactccagaaatattcacatctatatgacctgagtcggtccgaaaaggagaaacttcatgatgaagccgtcgccatttgcttggacggtcagcccctcgcgatgatccagcagctgctggaggtggccgtcggaccactcgacatctccccaaaggatatagtgcagtctgccattatgaaaattatctcagcgctgagcggaggctcagctgacttaggtggccccagggacccactgaaggttttggagggagtggtggccgctgttcatgcttccgtcgacaagggcgaggagctggtgtcgcctgaagacttacttgagtggttaagaccgttttgtgcagatgacgcttggcctgtgcggccacggattcatgtgctgcagatcctgggccagtctttccacctcacagaggaggactccaaattactggtttttttccggaccgaggctattctcaaggcctcatggccccagagacaggtcgatatcgccgatatagaaaacgaagaaaaccgctattgtttgttcatggagctgctagaatccagtcatcacgaggcggagtttcaacatctcgtcctactccttcaggcttggccaccaatgaagtcagaatacgtcatcacaaataatccttgggtacgcctcgcaaccgtgatgttgacccgctgtacaatggagaataaagagggtctggggaatgaggtgctcaaaatgtgccgaagcctctataatactaagcagatgctccccgccgagggagtcaaagagctgtgtttattactcctcaaccagagtttgctcttgccatctctgaagctcctactcgaatcccgcgacgagcatctgcacgaaatggccctcgaacagatcactgccgtaacgactgtgaacgattctaactgcgaccaagagctgctgagtttgcttctcgacgcaaaattgctggtgaaatgcgtttctactcctttctacccccgcatcgtagatcacctcctggcatctttgcagcaggggaggtgggacgctgaggaactgggcagacacctgagagaagctggccacgaagctgaggcgggaagtctcttgcttgccgtccgtggcacacatcaggccttccgcactttcagcacagcattgcgagctgctcagcactgggtttag

SEQ ID NO: 126135 - DNA, 6756 bp, synthetic construct
  misc_feature 1..6756: note = Description of Artificial Sequence: Synthetic coding sequence
  source 1..6756: mol_type = other DNA
atggccgcccctgagtctggcccagccttgtctcccggaacggccgaaggcgaggaagaaactattctttacgatctactggtcaacactgagtggccgcccgagacagaagtgcagcctcgagggaatcaaaaacacggggcatcttttatcataactaaggcaatcagggaccgcctcctgttcttgaggcagtatatttggtatagcccagctcccttccttctccctgatggactcgtgagactcgtgaataaacaaataaactggcatctggtactagcatccaacggaaaacttctggcagctgtgcaggatcagtgtgtcgaaattaggagcgcaaaagacgactttacttctataattggaaaatgtcaggtccccaaagatcctaaaccccaatggaggcgcgtggcatggtcttatgactgcactctcctcgcatacgccgagagcacaggaacagtgcgtgtattcgatctgatgggaagcgagctgttcgtcattagtccagcctctagtttcatcggcgacctcagctacgccatcgctggcttgatctttttggagtacaaggcaagtgctcaatggagcgccgagcttcttgtaatcaactataggggtgaactgcgcagctacctggtctcagtgggcacaaaccagtcataccaggagagtcactgtttttcattctccagtcactatccccatggaattaacaccgcaatttaccacccgggccaccgactgctgctcgtcggcgggtgcgaaaccgccgaagtgggcatgtcgaaagcctccagctgcgggctgagcgcctggcgtgtgcttagcggctccccctactacaagcaggtcaccaatggaggtgacggggtgaccgcagtccccaaaaccttggggctgctacgcatgctctccgtcaaattttacagcagacaggggcaagagcaagatggcatcttcaagatgtccctatctcctgacggcatgctgttggctgcaattcacttttcaggcaagctgtccatttgggccattccatctcttaaacagcagggtgaatggggccagaatgaacagcccggatacgatgatctcaatcctgattggaggttatctactgaaaagcggaaaaagattaaagataaggagtctttctatcctttgatagatgtaaactggtgggctgacagcgcagtgactctggcaagatgcagtggggcactcaccgtttctagcgttaaaactctcaaaaacttgctcggcaagagctgtgaatggtttgaacctagccctcaggtgacagctactcacgacgggggattcctcagcctggaatgcgaaatcaaactcgccccgaaacgcagtaggctggagacccgtgccggtgaagaggatgagggagaagaagattctgattcagactacgagattagcgccaaagcgcgatactttggctatattaaacaagggctttatctcgtcacagagatggagcgctttgcccctccccgaaagagaccgcgcaccatcaccaagaattaccggctagtcagcctgaggagcacaacgcctgaagaattgtaccagagaaaaattgaaagcgaagaatacgaggaagcccttagtttggcacacacatatggcctggatacggatctggtataccaaaggcaatggcgtaagagtgcggtgaatgtggcctctatccagaactatctgtccaaaatcaagaagcgcagttgggtgctgcatgagtgcctggagcgcgtcccagagaacgtcgacgccgcaaaggaactgctgcaatacgggctgaaaggcaccgatctggaggcgttacttgcaataggcaaaggagcagacgatggtagattcacactgcctggcgagatcgatatcgattcaatctcatatgaggaactgtccccccccgacgaggaacccgccaaaaacaagaaagaaaaagagctgaagaagcgtcaagagctgctaaaactggtgaatttttcaaaactaacactggagcaaaaagagttatgtcgttgcagaagaaaactgctaacgtatctggatagactggccacatatgaagagatcctcggcgtgccccacgcatccgaacaacgatacgatgctgaatttttcaagaagttccgaaaccagaacatcgtcttgtcagcgagaacctatgcacaggaaagtaacgtacaggccctggagatcctgtttacctaccatggctcagacctactcccacaccgcttggctatcttgagcaacttccccgagactacctctccccacgagtattcggtcttgcttccagaagcctgcttcaatggcgatagcctgatgataataccatggcacgaacacaagcacagagccaaggattggtgtgaagagttagcctgccgaatggtggtggagcctaacctgcaagacgaatcggagtttctgtatgccgctcaaccggagctgctccgattccgtatgacgcagctcacggtggaaaaagtgatggactggtaccagaccagggcggaggagatagagcattacgcacggcaactacaacagaagattattcctgatcaggaccaactgatggcaatcgcccttgagtgcatctacacgtgcgagcgcaacgatcagctgtgtctatgctatgatcttctcgaatgtctccccgagcgcgggtatggagataagacagaagccactacaaaactgcatgacatggtggatcaattggagcagattctatccgtctctgagctcctggagaagcacggacttgagaaaccaatttccttcgtcaaaaacacgcagtcctcaagcgaggaggccagaaagctgatggttaggcttacaagacacacagggcggaaacagcccccagtcagcgaaagtcactggcgtactctgttgcaggatatgcttaccatgcagcagaacgtgtatacctgcctcgattcagacgcctgttatgaaatttttaccgagagtcttctgtgtagtagccggctggagaatatccacctggccggccagatgatgcattgctctgcatgcagcgagaatccaccggctgggatagcccacaaaggtaagcctcactatcgcgtctcatatgagaaatccatcgacctagtgctggccgcgtcccgcgaatacttcaattcctcaacaaacctcaccgactcctgtatggacctcgccagatgctgcctgcagttaattaccgatcgtcccccagccattcaggaggagctggacctcatccaggcagtcggatgcctagaggaatttggagtcaagatcctgcctctgcaagtacggctctgcccggatcgcatttctctgatcaaagaatgtatctcccagagccctacttgttataaacagtctacaaaactgctgggcctggccgagttactgcgagtggccggagagaatcctgaggaaagacgcggccaggtcctcatcctgctcgttgaacaggccctaagattccatgactacaaagctgcatccatgcactgccaggagctgatggccacaggctaccctaaaagttgggatgtatgctcacagttgggacagtcggagggctatcaggatctcgcgacgagacaggagctgatggccttcgccttgacgcattgccctccctcatctattgaactcctgctcgccgcctcctcctcactacagactgaaattctctatcagcgagttaactttcagattcatcatgaggggggagaaaacatctctgcctccccacttacaagcaaggctgtgcaggaggatgaggttggggtccccggcagcaactccgctgatctgttgcgatggacaactgccacgactatgaaggtgttgagtaataccactacaactaccaaggctgttttgcaggcagtgtccgatggacagtggtggaagaagagtctgacttatcttagacctttgcagggccagaagtgcggtggcgcgtaccaaatcggaaccacagctaacgaagacctcgaaaaacagggatgtcaccccttctatgaatctgtgatatctaaccccttcgttgccgagagtgaaggtacctatgatacttaccaacatgtgccagtagaatctttcgcagaggtcttgctgagaactggcaagctagctgaggctaaaaacaaaggtgaagtgttcccaactacagaggttcttctgcagctggccagtgaagccctgccaaatgatatgaccctcgccctcgcttacctccttgcactgccacaagtgttggatgcaaaccgatgtttcgagaaacagtcgccgtcagctctatctctacaactggctgcctattactactcactgcagatctacgcccggttagcaccctgtttcagagacaagtgccatcccctgtacagggcagatccgaaagagttaattaaaatggtaacacgccacgtgacgaggcatgagcacgaagcctggccggaagatctgatatctttgactaagcaattgcactgctataatgagcggcttttagatttcacgcaggcacaaatactgcaagggctgcgtaagggcgtcgacgtacagagattcaccgcggatgatcagtacaaaagagaaacaatcttaggactggcagagacactagaggagtccgtttattcaatcgcgatctcactcgcgcagaggtactccgtttcccgatgggaggtattcatgacccacctcgaatttctgttcactgacagtggactgtcgaccctggaaattgagaacagggctcaagatctgcacctatttgagactcttaaaactgaccccgaggcttttcatcagcacatggtaaaatacatctatcccacaatcggtggtttcgatcacgaaagacttcagtattacttcaccctccttgagaattgtggatgtgcggacttgggaaactgtgccataaaaccggaaacccatatcaggctactgaagaagtttaaggtggtggcatccgggttgaattataagaagctgaccgatgaaaatatgtccccgttggaagccttggagccagtcctcagtagccagaacatcctctccatctctaagttggtcccaaagatccctgaaaaagacggccagatgttgtcgcctagctctctttataccatctggcttcagaaattattctggaccggggatccccacctgatcaaacaggttcctggctctagtccagagtggctgcacgcttacgatgtgtgcatgaaatacttcgacagactgcatccaggcgatctgatcaccgtcgttgatgcggtgaccttttcacctaaggccgtcaccaaactgagcgttgaggctcggaaagaaatgacacgtaaggcgattaagacagtgaaacattttattgaaaagccacgaaagcgtaactcagaagatgaagctcaggaggccaaggattccaaagttacatacgcggatacactgaatcatctggagaaatccctcgcacacttggaaaccctgtcccattcgtttattctgtccctgaagaatagtgagcaggagactctgcagaaatattctcatctttacgatttatctagatccgaaaaagaaaaattgcatgatgaggcagtggcgatctgcctggacggccagcctcttgcaatgattcagcagttactggaggtggctgtcggtccattagacattagtcccaaagacatcgtccagtctgcaatcatgaaaattatttcagctctgtccggaggttcagcggatctgggtggtccccgcgacccacttaaagtgttggagggggtcgttgctgctgttcacgcatccgtggataagggggaggagttggtgtcacccgaagacctactagaatggctccgacccttctgtgccgatgacgcttggccagttcgcccccggatacacgtgcttcagattctcgggcaatccttccacctgactgaagaggatagcaaactcctcgtgttcttcagaaccgaggccatcttgaaagctagctggccccaacgacaggttgacattgctgacatcgagaatgaagagaaccgatattgcctttttatggaacttctggagtcttctcatcacgaggcagaattccagcacttggtgctccttctacaggcttggcccccgatgaagagcgaatacgtcataaccaacaacccatgggtacgcctggctacagtcatgctgacaaggtgcacgatggagaacaaagagggccttggcaacgaagtgttgaagatgtgtcggagtctctacaacaccaagcagatgctgcccgctgaaggggttaaagagctgtgtctcctgctgctgaaccagagcttacttctgcccagtctgaagctgttgctagaatccagagatgaacatctgcacgagatggcccttgagcaaattaccgctgtgactaccgtgaacgacagtaactgtgatcaggagctcctgagtctgctccttgacgctaagctgctggtaaagtgtgtttccacccctttctaccctcggattgtcgatcatttactcgctagcttgcagcaaggtaggtgggacgcggaggaactggggcgtcatctcagagaagcaggccacgaagccgaagctggatctctgctgctggccgtgcgcggaacccatcaggccttcaggaccttctccaccgctttgcgcgctgcccaacactgggtctag

SEQ ID NO: 126136 - DNA, 10662 bp, synthetic construct
  misc_feature 1..10662: note = Description of Artificial Sequence: Synthetic coding sequence
  source 1..10662: mol_type = other DNA
atggtggtcagcgctggaccttggagtagcgagaaggccgagatgaacattctagagattaacgagactctcagaccacagcttgctgagaaaaagcaacagttcaggaatctaaaggaaaagtgctttctgacacagctcgctggttttttagctaatagacagaagaagtataaatatgaggagtgcaaggatttgattaagttcatgctgcgtaacgaaaggcagttcaaagaagaaaaactggcagagcagctgaaacaggcagaggaactgaggcaatataaggtcctggtgcacagccaggagagggaactcacgcaactacgcgagaaactgagagaaggtcgagacgctagtagaagcctgtatgaacaccttcaggctctgctaactccagatgaacccgacaagtctcaggggcaggatctgcaggagcagttggccgaggggtgtaggctcgcccagcacctggtgcaaaaactctctcccgagaacgatgaagacgaggacgaggatgtgcaagtagaagaagctgaaaaggtgttggaatcttccgccccaagagaggtgcagaaagctgaggaatcaaaggtgccagaagactccctggaggagtgcgcgataacatgctcgaacagtcatggtccctgcgactccaatcagccacataaaaatattaagatcacatttgaggaggatgaagttaactcaacgctcgtcgttgatcgcgaatccagtcatgatgaatgccaggacgcactcaacatcctgccagtcccagggccgactagctccgccacaaacgtgtcaatggtcgtctctgcggggccattgagttccgaaaaagccgaaatgaatatccttgagatcaacgaaaaactgcggccacaattggcagagaaaaaacagcagttccggaatctgaaggagaagtgttttctgacccaactttctgggttcctggctaaccagcaaaagaaatacaaatacgaagaatgcaaagacctgattaagtttatgttgcgtaatgagagacaatttaaggaggagaaactcgccgaacaacttaagcaagcggaagaattacggcagtacaaagtcctcgttcacgcacaagagcgtgagctgactcagctgaaggagaagctaagggagggcagggacgcgtcgcggtctctcaatgagcaccttcaggccttgctgaccccctatgaacctgacaagtctcaaggccaagacctgcaggagcagctggctgagggctgtcgactggctcaacatcttgttcagaagctctcaccagagaacgacaatgatgatgacgaggatgtgcaggttgaagtggctgaaaaggtgcaaaagtcctcagcccctcgcgaaatgcagaaggctgaggaaaaggaggtgcctgaagatagcctagaagagtgtgcgatcacatactccaattcacacggttcgtacgactcaaaccagcctcataggaagaccaagattacattcgaagaggataaggtcgactcaacactgattggcagctcgtcccatgtggaatgggaagatgccgtgcatattatccccgagaacgaaagcgatgacgaagaggaagaggagaaaggaccagtgtcaccgcgcaatctacaggagagcgaagaggaggaggttccccaggaatcatgggacgaggggtatagtacactgagcatccccccagaaatgctggcttcgtatcagtcctacagcagcacattccattctctggaggaacagcaggtttgtatggccgtggacatcggacggcataggtgggatcaggtcaagaaggaggaccaggaagccacaggcccaaggttgtccagggagcttctggacgagaaagaacccgaggtgttacaggattcactggacaggtgctactctaccccatcgggctatttggaattaccggatctgggccaaccatactcgtccgccgtgtacagcctcgaggagcagtaccttggactggcgctggacgtggaccgaattaaaaaggaccaagaggaggaggaggatcaggggcccccctgtcctagactttctagagagctgctcgaggtcgtcgagcctgaggttctgcaggatagcctggaccgctgttactccaccccatcctcttgcctcgagcagcctgacagctgtcagccatatggcagcagcttctacgcactggaagagaagcacgtaggattttctttagatgtgggagagatcgaaaagaaaggtaaaggcaagaagagacgcggacgtaggtctaagaaggagcggcgaaggggaaggaaggagggcgaagaggatcagaacccaccttgtccaagattgtcccgtgagctgctggacgagaaggggcccgaggtacttcaggactcgctcgatagatgttacagcactccatcggggtgtctggaacttaccgactcctgccagccgtataggagcgcattttatgtcctagagcaacaacgcgtgggctttgctgtagacatggatgaaatcgaaaaataccaggaggtcgaggaagatcaggatccttcctgtcccaggctgtcccgggaattactagatgaaaaggaacccgaagtccttcaggattctctggataggtgctacagcaccccttccggctacctcgaactcccagacctgggacagccatattcttccgcagtgtacagtctcgaagagcaatatttggggcttgccctggatgtggaccgcattaagaaggatcaggaggaagaagaggaccaggggcccccttgccctcgcctgtctcgcgagttgttggaggttgttgagcccgaggtgttacaggattccctcgatagatgctactccactccctctagctgtttggaacagccagactcctgccaaccttacggctcgtctttctatgcgctggaggagaagcacgtgggtttttctctggacgtgggcgaaattgaaaagaagggcaaggggaagaaacggcggggcagaaggagcaaaaaggagcgtagacgtggacgcaaggagggggaagaagatcaaaaccctccttgtccacgcctgagcagggaactgctggacgagaagggacccgaggtccttcaggatagcctcgacaggtgttattctactcccagcggctgcctggaactcaccgactcctgtcagccctatcgatcagctttctacgtgttggaacagcaaagagtcggcttcgccgtggacatggacgaaatcgagaagtaccaagaggttgaggaagaccaggatccctcatgccctagactcagtagagaattgcttgacgagaaagaacctgaggtgcttcaggactccttggacagatgctattccaccccctccgggtacctcgagctgcccgacctcgggcagccctacagctccgcagtatattctttagaggaacagtacctcgggttagccttggatgtcgacaggattaagaaggatgaagaggaagaggaggatcaggatccgccttgtcctcgactaagccgtgaattattagaggtagtagctcctgaggttctccaggattcccttgataggtgctattccaccccatcatcatgtctggaacagccggacagttgtcagccctacggaagttccttctacgcacttgaggagaaacatgtaggcttctctctcgatgttggggagatcgagaaaaaagggaaaggcaaaaagcgacgtggaaggaggtctaagaaagagaggcggcggggcagaaaagagggcgaggaagatcaaaaccccccctgcccaagactgagccgcgagctcctggatgagaaaggccccgaggttctccaggactctctagatcgttgctacagcactccctctggttgtcttgaacttacggattcatgccagccctacagaagcgcattctacgtgttagaacagcagcgagttggtatggcggtggacatggatgaaattgagaaatatcaggaagtcgaagaggatcaagatccatcctgcccccgactgtctcgcgagctgctggacgagaaggagcccgaagtgctccaagattcgctcaacaggtgttattcaaccccatcaggctatctagagctgcctgatctcgggcaaccctactcgtccgcagtctacagtttggaggagcagtatctggggctcgcactcgatgtggacaggatcaagaaggaccaggaagaggaagaagatgaggatcaggatcctccgtgtcccaggctcagcagagagctgctcgaggtcgtggaaccagaagtcctgcaggattccttggatagatgctattctactccctctagttgtctagagcagccggattcttgtcagccatacggctcatcgttctacgcgctagaggagaaccacgtcgggttctccctcgatgtcggcgagattgagaaaaagggcaaaggaaagaagcgcagagggcggcgctccaagaaggagcgccgcagagggagaaaggaaggggaggaggaccaaaacccgccgtgcccacgcctctccagggaactgctggacgagaagggacctgaagtcttgcaggattcactagaccgttgttattctaccccaagtggttgccttgagctgaccgattcttgtcagccataccgatccgctttctatgtgctggaacagcagcacgtgggcttagctgtggacatggatgaaatagaaaaataccaagaggtggaggaggaccaggacccttcttgtcctagactgtcacgtgaattactagatgagaaagagccagaggtcctgcaggattccctggaccggtgctattcaacaccgagcggatacttggaactgccggatctcggccagccttattcttcggctgtgtattcattggaggagcagtacctgggcttagccctggatgtggaccgaataaagaaggatcaggaggaggaggaagaccagggtccaccttgtccacggctgtcccgggagcttcttgaagtggtcgagcctgaagtgctgcaggactccctcgataggtgctattctactcccagttcatgtctggaacaacccgattcttgccaaccatatgggtcaagcttttatgctctggaggagaaccatgtcggcttcagcctggacgtgggagagatcgaaaaaaaaggcaagggcaaaaagcgaaggggcagacggtccaaaaaggagagacggagaggccggaaagagggtgaggaggatcaaaatccaccctgcccaagactgagtcgcgaactcctagacgaaaagggtcccgaggttctgcaggattctctcgacagatgctacagtaccccttccggatgcctcgagttaaccgactcttgccagccttatcggagcgccttctatgtcctcgagcagcagcacgtcggacttgccgtggacatggatgagatcgagaagtaccaggaagttgaggaagatcaagacccttcctgccctcgactgtcacgcgagctcctggatgaaaaggaacccgaggtgctgcaggactcattagacagatgttactccaccccaagtggatatctggagcttccagacttggggcaaccctattcctcagctgtgtatagcctggaagaacagtatctcggactggcactggatgtggaccggatcaaaaaggatcaagaagaggaagaagatcaggggcccccttgtcctcggttaagcagggaattactggaggtcgtggagcctgaagtgctccaagacagtttggaccgctgctacagtacgccttcttcttgtttagagcagcctgactcctgtcagccgtacgggagcagcttttatgctctggaggaaaaccacgtgggcttttccctggacgtaggtgaaattgaaaagaaagggaaagggaagaaacgtcgcggccggcgctcgaaaaaagagcgtcggcgcggcaggaaggaaggcgaggaggaccagaatcccccttgcccgagattatccagagagctcctggacgaaaagggccctgaggttctgcaggattcacttgacagatgctatagtactccatccggttgtcttgaactgaccgactcatgtcaaccctaccgcagcgctttctacgtcttggaacagcagcatgtaggactcgccgtcgatatggacgaaatagagaagtaccaggaggtggaagaggatcaggacccatcttgtccacgactgagtagagaacttctggacgaaaaggagccggaggtgttacaggatagcctggatcgctgctattcgacaccgagcggctacctggagctgccagatctagggcagccttactcctctgcagtctacagccttgaggaacaatacctgggcctcgccctggatgtagatcgtataaagaaggaccaggaagaagaggaagatcaaggtccgccctgtcctcggttgtcacgggaattactggaggtcgtggagcccgaggttttacaggacagtctggaccggtgttatagtacacctagcagttgcctcgaacaaccagacagctgccaaccctacggatcctcattttacgctctggaagagaatcacgtaggatttagtctggacgtgggtgaaatcgagaaaaaggggaaaggcaagaagagacggggtcggcggtctaagaaggaaagaaggagggggcgcaaggagggcgaggaggatcaaaatcctccctgtcctcgcttatccagagagctcctggatgaaaagggccctgaggtcctgcaggactctctagataggtgttatagcaccccaagcggttgccttgagctgacagacagttgccaaccttacaggtctgcattctatgtgctcgaacagcaacatgtgggcctcgcagtggatatggatgaaatcgagaagtatcaggaagttgaagaggatcaggaccctagttgtcctcggctgagccgcgagctactcgacgagaaggaaccggaggtcctacaggatagcctagaccgttgttacagtacccccagcggttatctggagctccccgatcttggccagccttactctagtgcggtgtattctctggaggagcagtacttgggtttggccttggatgtcgacagaatcaaaaaggaccaagaggaggaggaggaccagggaccaccgtgtcccagactctcacgcgagctgctggaagtggtcgaacccgaagtgctacaggattccctggacaggtgttactcaacaccttcatcatgtcttgaacagccagattcttgtcagccttatggctcgtctttctacgctctggaagaaaatcatgtcggcttttccctggacgtcggggaaatcgagaaaaaaggcaagggcaagaagagacggggaagacggtctaaaaaggagaggagacgaggaaggaaggaaggggaagaggaccagaatcccccgtgcccccgcttgtcccgagagcttctggatgaaaaaggccccgaggtgctccaggattctctggaccggtgctactcaaccccttcaggctgccttgagctgaccgatagttgtcaaccgtaccgaagcgctttttatgtgctggaacagcagcatgtcgggctcgccgtggatatggacgagattgagaaataccaggaggtggaagaggatcaagacccatcctgcccaagattgagccgcgaactcctggatgaaaaggagccagaggtcctgcaggacagtctggacaggtgttacagtaccccaagtggctacctggagttgccagatctgggccaaccttactcatcagccgtgtatagcctcgaagagcagtatctgggcttagctctggacgtcgacaggattaagaaggaccaagaagaggaggaggatcagggcccaccctgccctcgcttgtcccgagaattgttggaagtcgttgagccggaggttcttcaggattcccttgaccgttgctatagtactccatccagctgtctagaacagcctgatagctgccagccctacggcagttccttctacgccctggaagaaaagcatgtgggcttcagtctggatgtgggagaaatcgagaaaaagggcaagggtaaaaagcgacgaggacgcaggagcaaaaaggaacgccgccggggccgcaaagagggcgaagaagatcagaatcctccttgccctcggctcagtcgcgaacttctggacgagaaaggtcctgaagtgctccaggacagcctcgaccgatgttactcaaccccatcaggttgcttagagctaaccgacagttgccagccctaccggagtgctttctacgtcctggagcaacagcacgtaggtctggcagtggatatggacgagattgaaaaatatcaggaggtcgaggaggatcaggacccaagttgtccgcggttgtcacgggagttactggacgaaaaggagcctgaggttctgcaagattcactagatcgatgctactctacaccctctgggtatctggagctccccgatctaggccagccctactcctccgccgtgtatagtctcgaggaacagtatctgggattggcgttggacgttgatagaattaaaaaagatcaggaagaagaggaagatcagggcccgccttgtcccaggcttagtcgagagctcctggaggttgttgagccagaagtgcttcaagactcattggacaggtgctacagtacccctagtagctgtctggagcagccagattcttgtcaaccttacgggtcctccttttacgccctggaggaaaagcacgtgggcttctccctagacgtgggggaaattgagaagaagggaaaggggaagaagaggcgagggcgtcgctcgaaaaaagagcggagacgcggtcgcaaggaaggagaggaggatcagaaccctccttgcccaaggctttcccgagagcttctcgacgagaagggaccgaaggtgctccaggatagcctggatcgctgctacagcactccctctggttgtcttgagctgtgtgacagctgtcagccctaccggtctgccttttacgtactggagcagcagcgggtggggctggctgtggacatggacgaaatcgagaaatatcaggaagttgaggaagaccaggacccaagctgtccaaggctgagtcgcgagctgcttgatgagaagggccccgaggtgctccaggacagcctcgatcgctgctacagtaccccaagcggctgcctcgaactctgcgactcttgtcagccctataggtcagcattctatatcctggagcagcagcgcgtaggcctggccgtcgacatggacgaaatcgagaagtaccaagaggttgaagaagatcaggacccatcctgtccaaggcttagcagagagctgctggacgagaaggaacctgaggttctgcaggactccctggacaggtgctacagcacaccatctggatacctcgaactccctgatttgggccaaccatactcaagcgccgtatacagtctcgaagagcagtatctggggttagccctcgatgtggaccgcataaaaaaggaccaagaagaagaggaggatcaggggcccccctgccctcgcctttccagggaactactggaggtcgtggaaccggaagtcctccaggattcgctcgatcggtgttacagtacccctagcagttgtttagagcagcctgactcgtgtcaaccttatgggtcctctttctatgctctcgaggagaaacacgtgggtttctccttggatgtgggagagatcgaaaaaaaggggaagggtaagaagcgccggggaaggcgatctaaaaaggagcgacgacgcggtcgaaaggaaggcgaggaggaccagaatcctccctgtcctcgcctgtcacgggaactgcttgacgagaaaggtccagaggtccttcaagacagtcttgaccgttgctattctacccccagtggttgccttgaactctgcgactcctgccagccataccgttcggcattttatgtcctcgagcagcagcacgtggggctcgcagtagatatggatgagatcgagaaataccaggaagtggaagaggaccaggatccttcctgcccgcgactaagccgcgaactcctggacgaaaaggagcctgaagtgctccaggatagcttagaccggtgctacagcacaccttccggctacctcgaactccccgatctggggcagccttattcaagcgccgtgtactctctcgaagagcagtacctaggtctggctctcgacgtggacaagatcgagaaaaaaggcaaaggcaaaaaaaggcgcggtaggaggagtaagaaggagaggcggcgtggacgaaaggagggagaggaggatcagaatcctccatgtccccgtctaaacggagtactaatggaggttgaggaaagagaagtgctccaggattcactggatcgatgctacagtaccccgtctatgtattttgagctacctgactcttttcagcattataggtccgtgttctattccttcgaagagcagcacatcagctttgcactctatgtagataaccgatttttcaccctaactgtgactagcctgcacctggtctttcagatgggggtgatatttcctcagtag

SEQ ID NO: 126137 - DNA, 900 bp, synthetic construct
  misc_feature 1..900: note = Description of Artificial Sequence: Synthetic coding sequence
  source 1..900: mol_type = other DNA
atggtggtgtccgccggcccactaagcagcgaaaaagctgaaatgaatatactcgagatcaatgagaagctgaggcctcagcttgccgaaaagaagcagcaattccgaaacctgaaagagaaatgttttttaacacaactttcaggctttttggccaaccagcagaagaagtacaagtatgaagaatgtaaggatctcatcaagttcatgttgagaaacgaaagacagtttaaagaggagaaacttgctgaacagcttaaacaagccgaagaattaaggcaatacaaagttcttgtccatgcgcaggagcgtgagctgacccagctgaaagagaagctccgtgagggaagagatgcttcacgctcgctcaatgagcacctccaggcactgcttaccccgtatgagcctgataaaagccaggggcaggacttgcaagagcagctggccgaaggatgtcgcctggcacaacacctggtccagaagttgagccctgagaacgataacgatgacgacgaggatgtgcaagtagaagtggcagagaaggtgcagaaaagctcagccccccgagagatgcaaaaggccgaggagaaggaggtccctgaagactcgttagaagaatgtgcaatcacatactccaactcccatggaagctatgattcaaaccagcctcaccgcaagacaaaaattacatttgaagaggataaggtggactctaccctgatcggatcttcatcacatgtggaatgggaggacgcagtccacatcattcctgagaatgagtccgatgacgaagaggaggaggagaaaggcccagttagcccacgcacctctgtgggatcatccgaaaaggggggtccccggggtaatcgctcacaagctcagcagggcgccgcaggatag

SEQ ID NO: 126138 - DNA, 2010 bp, synthetic construct
  misc_feature 1..2010: note = Description of Artificial Sequence: Synthetic coding sequence
  source 1..2010: mol_type = other DNA
atggttgtgagtgccggacctctatcctcagagaaggccgagatgaacatactagagatcaacgaaaagcttcggcctcagttggctgagaaaaaacagcagtttagaaatctcaaagagaaatgcttcctgacgcagctctccgggttcctggccaaccagcagaaaaagtacaagtatgaggagtgtaaagacttaataaaattcatgctgagaaacgagaggcagttcaaggaagaaaaactagctgaacagctgaaacaagccgaggagctgaggcaatacaaggtgctcgtgcacgcacaagaaagagaacttacccagctcaaagagaagttgcgagagggtcgagacgcaagcagatccctgaatgagcatttgcaggcccttctgaccccttacgaacctgacaaatcccagggacaggaccttcaggaacaattggccgagggctgcagacttgcccaacacctggtgcagaagctctctcccgaaaacgacaacgacgacgatgaagatgtccaggttgaggtcgcggagaaagttcagaagtcatctgcacctcgcgagatgcagaaagcagaggagaaggaggtcccagaggacagtctcgaagagtgcgccataacctacagcaactctcacggaagctacgactccaaccagcctcatcgcaagactaagatcacctttgaggaggacaaggttgactctaccttaatcggatcttcttctcacgttgagtgggaggatgccgtgcacattattcccgaaaatgaatctgacgacgaggaggaggaagagaaaggacccgtaagccccagaaacctgcaagagtcggaagaagaagaggtacctcaggagtcctgggacgaggggtacagtaccctctccatccccccagagatgttagcttcttatcagtcgtactcatcaaccttccactcactggaggaacagcaagtgtgtatggctgtggacatcgggcggcatcggtgggaccaagtgaaaaaagaggatcaggaagccacggggccatccagggagctgctcgatgaaaagggacccgaagttttccaagacagccaggatcgttgttactctactccctctggctgtttagaactcaccgacagctgccaaccctatcgcagcgcgttttatatactggaacagcagagggtaggcctggccattgacatggacgagatcgagaagtaccaagaagtagaggaagaccaggacccatcttgccctaggttgtcccgggaattgctagacgagaaggaacccgaggtcttgcaggacagcctcgaccggtgttactccaccccttctggctaccttgaactgcctgatctgggccagccctactcatctgccgtgtatagtttggaagagcaatacctgggactggccttggacgtagatcggatcaagaaggatcaggaggaagaggaagaccaaggtccgccttgcccacgcctgagccgcgagctccttgacgaaaaaggacctgaagtgcttcaggatagtctagataggtgttacagcaccccgtcaggttgcttagagttaaccgatagctgccagccttatcgatcagcattttacgttctggagcagcaacacgtgggactcgcagtggatatggatgagatagagaagaagggtaaagggaaaaagcggaggggcagacgttccaaaaaggagcggaggcgggggaggaaggagggcgaagaggaccaaaatccaccgtgtcctcgcctcaacggtgttcttatggaggtcgaggagagggaggtgctgcaagattcactagatagatgttacagcactccaagcatgtatttcgaattgcccgacagcttccagcactatcgatctgtgttctactcattcgaagagcagcatatttccttcgccttatatgtcgacaataggttttttactctgacagttacctctctgcatctcgtcttccaaatgggtgtgatttttccccaatag

SEQ ID NO: 126139 - DNA, 2022 bp, synthetic construct
  misc_feature 1..2022: note = Description of Artificial Sequence: Synthetic coding sequence
  source 1..2022: mol_type = other DNA
atggtagtttccgccggcccctggtcctccgaaaaggcagaaatgaatatcttagaaatcaacgagacgctccggccccagcttgctgagaagaaacagcagttcagaaacctgaaggaaaaatgctttcttacccagctggccggcttccttgccaaccggcagaagaagtataaatacgaagaatgcaaggatctgatcaaatttatgcttcggaacgagcgccagtttaaggaggaaaagcttgccgagcagcttaaacaggccgaagaactcaggcagtataaggtgctcgtccactcacaagagcgcgaactgacccagttgcgggaaaaactgagagaaggacgtgatgccagtcgttctctgtatgagcacttgcaggccctgcttacgcctgacgagccagacaagtcacaggggcaggatctgcaggaacagctcgctgaggggtgccgcctggcccagcacttagtgcagaaactgtcccctgagaatgatgaggacgaagatgaagatgtgcaggtagaagaggctgagaaagtgctggagtcctctgcaccacgggaagtgcagaaggctgaagaaagcaaagtccccgaagacagtttggaggaatgtgccatcacatgttcaaacagccatggaccttgcgattccaaccaaccccacaagaatattaagattacatttgaggaagacgaagttaactcaacactagtggttgatagggagtcctcccacgatgaatgtcaagacgccctgaatatcctccctgaaaatgagagcgatgacgaggaggaggaggagaagggaccagtgtctcccagaaatttgcaggaatcagaagaagaggaggttccgcaggagtcttgggatgaaggctattccaccctttccatcccccctgaaatgctggcttcatatcagtcttacagcagcacctttcatagcctggaagaacaacaagtctgtatggctgttgatatcggcaggcaccgttgggatcaggtgaagaaggaagaccaggaggccacagggcctagactgagtagagaactgctggatgagaagggacccgaggtcttacaagattcactcgaccgctgttattccacccctagcggatgcttggagctcaccgattcttgtcagccttatagatcggcgttctacgtgttagagcagcagcgcgttggatttgccgttgatatggacgagatcgagaaatatcaggaggtggaggaggatcaggacccgtcttgtccacggctaagtcgagaactgctggacgaaaaggagcctgaggtcctgcaggattcactcgaccgctgttactcgacaccttccggatacctggaactacctgatcttgggcaaccgtatagtagtgctgtctattcccttgaagagcagtatcttgggcttgcgctggatgtggaccgtatcaagaaagatcaggaggaagaagaggaccagggcccaccctgcccccgtctaagcagagagctcttagaagtcgtggaaccggaggtattgcaggacagtctggatcggtgctactctaccccctctagctgtctcgagcagcctgactcttgtcaaccatacggatcttcgttctacgctcttgaggagaagcatgtgggctttagtctagacgtcggggagattgagaaaaaaggaaaaggaaagaagcggagagggagacgctctaaaaaggagagaaggagaggccggaaggagggcgaggaagaccagaatcccccatgccctcggctgaacggggtacttatggaagtagaggagcgggaagtcctgcaggactccctcgacagatgctattccacccccagtatgtattttgagctgcccgacagtttccagcactataggtccgtgttttacagtttcgaagaacagcacatttcttttgcattatacgtcgataacagattctttaccctgacagtcacctccctgcatctggtgttccaaatgggcgtgatctttcctcagtag

SEQ ID NO: 126140 - DNA, 519 bp, synthetic construct
  misc_feature 1..519: note = Description of Artificial Sequence: Synthetic coding sequence
  source 1..519: mol_type = other DNA
atggccgttgacatcggtcggcacaggtgggatcaagtaaaaaaggaggaccaggaagccacaggcccaagccgtgagcttttggacgagaaaggaccggaggttttccaggatagccaggacagatgctactctaccccctctggctgtttggagctcacggacagttgtcaaccatacagatccgctttctacattctagagcagcaacgggtgggactcgcgatcgatatggacgagattgagaagtatcaagaggtggaggaggatcaagatcccagctgcccacggttgtctcgtgagttgctagacgagaaagagccggaggtgctccaagattccctggatcgttgttatagtactccatcagggtatctggaactccccgacttgggccagccctactccagtgctgtgtactctctcgaagagcagtacctgggactcgccctggacgtggatagaatcaaaaaggaccaggaggaggaagaggatcaaggccccccttgtccaaggtag

SEQ ID NO: 126141 - DNA, 2295 bp, synthetic construct
  misc_feature 1..2295: note = Description of Artificial Sequence: Synthetic coding sequence
  source 1..2295: mol_type = other DNA
atgttcagcaactctactggtcgattacctggccagcctaccgaagaaatccaacagtacaaagtgcttgtgcattctcaggagcgggaacttactcagttgcgggaaaagctcagagaaggaagggacgcctcccggtcactgtacgaacacctgcaggctctgctgacacctgacgaacccgacaagtcacagggccaggacctccaggagcagctggcggagggctgccgcctggcgcagcacttggttcagaagctgtcgccagagaacgacgaagatgaagacgaggacgtccaggttgaagaagctgagaaagttcttgagagtagcgctcccagggaagttcagaaggctgaggaatctaaggtgcctgaggattccttggaggaatgcgccatcacatgttcaaatagccatggcccttgtgattccaaccagcctcacaagaatattaagataaccttcgaagaagacgaggtcaattctacactggtcgtggacagggagagctctcatgacgagtgccaggatgccttgaacatcctgccggtgcctggacctactagcagcgccaccaacgtgtccatggtcgtgtcagctggccctctgagttcagagaaagcagaaatgaatatcctggagattaatgaaaaactgcgtcctcagctggcggagaaaaagcagcagtttaggaatctgaaggagaagtgttttctcactcagctaagcggctttctggccaaccagcaaaaaaagtacaagtacgaggagtgtaaagatctaatcaaattcatgttgcgcaacgagaggcagttcaaagaggagaagctggccgagcagttaaagcaggcagaggaactccgtcagtataaagtgctcgtacatgcccaggaaagggagcttacacagctcaaagagaaactgcgtgaaggaagggatgcctctaggagtttgaacgagcacctgcaggccctacttacgccctacgaacctgacaaaagtcaggggcaggacctgcaggaacagttggcagaaggatgccgactggcacaacacctcgtgcaaaagcttagtcccgagaacgacaacgatgacgacgaagacgtgcaagtggaagtggccgaaaaggtccaaaagtctagtgctccaagggaaatgcagaaagccgaagagaaggaggtgcccgaagattctctcgaagagtgcgcaatcacctacagtaacagtcatggatcctacgacagcaatcagccgcatcgtaagacgaagattacctttgaagaggataaagtggattctaccctaattggcagctccagccacgtggagtgggaagacgctgttcacataatacccgagaacgaaagcgacgatgaagaggaggaagagaaaggtccagttagtccaagaaatctgcaggagagtgaagaggaagaggtcccgcaggagagttgggacgagggttacagtacactatctattccccccgaaatgcttgcttcctaccagagctacagttctactttccattctcttgaagaacagcaggtgtgcatggccgtcgatatcggcagacaccggtgggaccaagttaaaaaagaagatcaggaagccactggtccgagactctcccgtgaattgctggatgagaaaggcccagaggtgctccaggacagtttggacaggtgctacagtacaccaagtggttgcttggaactaacagattcctgccagccgtaccgctctgcattctacgttctcgagcaacagcacgtaggattggctgtggatatggacgaaatcgaaaagtaccaagaagtagaggaagatcaagacccctcctgtcctaggttgtcgcgggagttactcgatgaaaaggagcctgaggtgctacaggactcactcgatcggtgttacagtaccccttccggctacctggaactgccagatctggggcagccatatagctcagcggtttactcgttggaagaacagtacctcgggttagcattggacgtcgacagaatcaagaaagaccaggaggaagaagaggaccaaggccccccgtgtcctagattgtctagggaactgttggaggtggtagagcccgaggtcttacaagactcgctagataggtgctattctactcctagctcctgcctcgagcaacctgattcatgccaaccatatggatccagcttttacgcgctggaggaaaaacacgtcggcttctctctggatgtgggagagatcgaaaaaaagggtaaaggaaaaaagcgacgaggacgatag

SEQ ID NO: 126142 - DNA, 105 bp, synthetic construct
  misc_feature 1..105: note = Description of Artificial Sequence: Synthetic coding sequence
  source 1..105: mol_type = other DNA
atcggtagcagtagccatgttgagtgggaggacgcggttcatatcattccagagaatgaatcagacgacgaggaagaggaagagaaaggaccagtcagcccgtag

SEQ ID NO: 126143 - DNA, 2517 bp, synthetic construct
  misc_feature 1..2517: note = Description of Artificial Sequence: Synthetic coding sequence
  source 1..2517: mol_type = other DNA
atggtggtttcagccggaccttggtcctccgagaaagcagaaatgaacattctggagataaacgaaaagctgagaccacagttggctgagaataaacaacagtttcgcaacctgaaggagcgatgtttcctaacccagttggctggttttctagccaacagacagaagaagtacaaatacgaggaatgcaaagatctgatcaaattcatgcttcgcaatgaaaggcaatttaaagaagagaaacttgctgagcagttaaagcaggccgaggagctgaggcagtacaaggtcttggtacactcccaggaaagagaacttacacagctgcgagaaaaacttcgggagggacgggatgcttccaggtcgctcaacgagcacttacaggcccttttaactccagatgagcctgataaaagtcagggacaggatcttcaggagcagctggctgaggggtgccggctggcacagcatctcgtgcaaaagctctccccggagaatgacgaagacgaagatgaggacgtgcaggtcgaggaagacgagaaggtcctggaaagcagcgcccccagagaagtacagaaagccgaggaaagcaaggtccctgaggacagtctggaggaatgcgcaatcacatgctctaactctcacggaccctgtgacagcatccagccacataaaaatattaaaataaccttcgaggaggacaaggttaactcgtctcttgttgtcgacagggaatcctcccacgatggttgccaggacgcgttaaatatactcccagtgccaggaccaacaagttccgctactaatgtctctatggtcgtcagtgctggccctttgtcttcagagaaggccgagatgaacatactcgagattaatgagaagctgtgccctcagctcgcggaaaagaagcagcaattccggtcattgaaagagaagtgtttcgtgacccaggtcgcttgttttctggccaagcagcagaacaagtataagtacgaagagtgtaaggaccttataaaatccatgctgagaaatgaacgccaattcaaggaggagaaattggccgagcagctgaagcaggcagaggagttgcggcagtacaaagtactagtccactctcaggagcgcgagttaactcagctacgcgaaaagcttagggaagggcgggatgcctcccggtcattgaacgagcacttacaagctctcctcaccccagacgaacccgacaaaagtcaaggtcaagaccttcaggagcagcttgctgaaggctgccggctggcccaacatctggtccagaagctgtctccggagaacgataacgacgacgatgaagacgtacaggtggaggtggccgagaaggtccagaaaagttcgtctccacgcgagatgcagaaagcagaagaaaaggaagttccagaagattctctcgaagagtgcgctatcacatgttcaaatagtcacggcccttacgactctaatcagccgcatcggaagcctaagtcacacctgaggaaaacaaagagcacccagctctccttggctcaccccctgatgctgaatgggaggatgttgtatacgctgtctcagaagatgaaagttatgatgcggaagagaaaaaagaaaggtcaatgcctgccggggatctgtagaagtcttaagcggcggaaatcccctcggtcgcccgggatgaaagtgattcgcttgtctcagttccttctgaaaggccacaggtgggatcaggtgaaaaaggaagatcaggaagccaccggaccaaggctgtccagagaacttttagacgaaaaggagcccgaggtgctacaggattccctggaccggtgttattcgacccctagcgtttacctgggtttaaccgacagttgccaaccctacaggtctgcattctacgtattggaacaacaacgcatcggcctggcagtggatatggatgaaatagagaaatatcaagaggtcgaagaagatcaggatccctcatgtcctaggctgagtcgggagttattggccgaaaaggaacctgaagtcttgcaggactccctggatcggtgttacagcactccttccggatatttagaattacctgatcttgggcagccgtaccggtccgctgtctactcccttgaggaacagtacctaggcctggccttagacgtggaccgcatcaaaaaggaccaggaagaggaagaagaccagggcccaccttgccctcggctcagcagggagttgctggaggtcgtcgaaccggaagtcctccaggattcccttgatgttatccaactcctgcccgtcgtcctgaacagcctgactcctgcaagtcccacggaagtgcctttcatgcattggcgaaaaaacatgctggcatttctactgacttgggaaaagctgaagcggcgaggacgtgggcgcaaagagggcgaagaggaccagaggagaaaggaagaaggagaggaaaagaagggaaagaaaatcaagacacaccacgctccaggctccgctgcatgctag

SEQ ID NO: 126144 - DNA, 2373 bp, synthetic construct
  misc_feature 1..2373: note = Description of Artificial Sequence: Synthetic coding sequence
  source 1..2373: mol_type = other DNA
atgttcagcaattccaccggcagactgccaggccagcccactgaagagatccagcagtacaaggttctggtgcacagtcaggaaagggaactaactcaattgagagagaagctccgcgaaggtcgagatgcatcccgttccctaaacgaacatctgcaagctctgttgacccctgacgaaccagataaatcccagggccaggatctccaggagcaactggccgaaggctgtcgcctggcccagcatctggtccagaaactgtctcctgagaatgacgaggatgaggacgaggatgtgcaggttgaggaagacgaaaaagttttggaaagcagtgcccccagagaggttcagaaagccgaggagtcgaaggtacccgaggacagtctggaagaatgcgcgatcacttgctcaaactcccacggtccttgtgattcgatccagccacataagaacataaagatcacatttgaagaggacaaggtgaactcctcgctggtggtagatagggagtcctcacatgacggatgtcaggatgcactcaacattctgcctgtgcccggaccgacttcttccgctaccaatgttagtatggttgtgtcagccggacccctgagcagtgaaaaggccgagatgaatattctggagatcaacgaaaaactgtgccctcagttggcggagaagaagcaacaatttcgttcgctgaaagagaagtgcttcgtgactcaggtggcctgttttttagccaagcagcagaacaaatacaaatacgaagaatgtaaagaccttatcaaatccatgctgaggaacgagaggcaatttaaggaggagaagcttgctgagcagctgaaacaagctgaggaactcagacagtataaagtgctagtgcattcccaggagagggaattgacccagcttcgggagaagctcagagaaggaagagacgcatcccggtcgctgaatgagcatcttcaggctctgctcactcctgacgagcctgacaagtctcaggggcaagacttgcaggaacaactcgccgaaggatgtcgactggcccagcaccttgtgcagaagttgtctcctgaaaacgataacgacgatgatgaggacgtgcaagttgaggttgcagagaaagtgcagaaatcctcatctcctcgggagatgcaaaaagccgaggaaaaagaggtgcccgaggatagtcttgaagagtgcgctataacctgttctaactcacacggtccatacgattcaaaccagcctcaccgcaagacgaagataaccttcgaggaagacaaggtcgacagcaccctgattggatcttcctcgcacgtcgaatgggaggacgccgtacatatcattccagaaaacgaatctgacgacgaggaagaggaggaaaaaggtcccgtgtcaccccggaacctgcaggagtctgaggaggaagaagttccacaggaatcatgggacgagggttattccacactgagcatcccacccgagcgcctcgcttcgtaccaaagttatagctctaccttccacagcctcgaggaacaacaggtgtgcatggccgtcgatatcggaaggcatcggtgggatcaggtcaaaaaggaggaccaggaagctactggtccacgtctgtccagagaactgctggacgagaaggagcctgaagtgttacaggacagcctggacaggtgttattcaaccccatcagtatatctggggctcacagattcttgccaaccataccggagtgctttttatgttttggaacagcagagaatcgggctggctgttgatatggatgaaatcgagaagtatcaagaagtggaggaggaccaggatccctcgtgtccacgcctgtccagagagcttcttgcggaaaaggaacctgaggtgctgcaggatagtctcgatagatgctactcaactcccagtggatatttggagttgccagacctcggccaaccatacagatctgcagtgtacagcctcgaggagcagtatctcggacttgcgctcgatgtagaccgtataaaaaaggatcaggaggaggaagaagatcaggggcccccatgtcccagactgagccgagaactgctggaggtcgttgagcccgaagtgttacaagattccctggatgtcattcagttactgcctgtggttctgaatagcctcactcctgcctcccccacggaagtgcctttcatgcactggaggaaaaacatgcttgccttccttctcacctgggagaagctcaagagacggggtcgaggccgcaaggaaggagaggaggaccagaggcgaaaggaagagggcgaggaaaaaaaagggaagaaaattaaaacccaccacgccccaggatccgccgcgtgttag

SEQ ID NO: 126145 - DNA, 258 bp, synthetic construct
  misc_feature 1..258: note = Description of Artificial Sequence: Synthetic coding sequence
  source 1..258: mol_type = other DNA
gaaatgcaaaaagctgaagagaaagaggtacccgaagacagccttgaagaatgcgccatcacctgtagcaactcccacggcccatacgattctaaccaaccccacagaaaaacgaagataacctttgaggaggataaggtcgactccaccctgattgggtctagctctcatgtagagtgggaggacgccgtgcacatcattcccgaaaatgaatctgacgacgaagaagaagaagagaaaggaccagtgagcccctag

SEQ ID NO: 126146 - DNA, 1101 bp, synthetic construct
  misc_feature 1..1101: note = Description of Artificial Sequence: Synthetic coding sequence
  source 1..1101: mol_type = other DNA
ctagcttcataccagagctatagctctacattccactcgttggaggaacaacaggtatgtatggccgtagacatcggccgacataggtgggaccaagtgaagaaagaggatcaggaggccaccggacctcgattgtctagagagcttcttgacgagaaagagcccgaagtattgcaggactcacttgacagatgttactccaccccaagcgtatatctgggcctgacagattcatgccagccttaccgttcggcattctatgtactggaacagcaacgcatcggactagctgtggacatggatgagatcgagaaataccaggaggtggaagaagaccaagatccatcttgcccccgccttagccgtgagctcttagccgaaaaagagccggaggtactccaggatagcctggatagatgttactcgaccccaagcggctatcttgagctgccggaccttggtcagccgtaccggagcgcagtgtatagccttgaggaacaatacctcggactcgcactggatgttgatagaattaagaaggaccaggaagaagaggaagaccaaggaccaccttgcccccggctttcacgcgagctgctagaggttgtggagcctgaagtgctccaggactccctctgttactctactccaagcagctgtttggagcagcctgactcctgtcagccctatggcagctcattctacgcattggaggagaaacacgttggattttcactcgacgtgggcgagattgagaagaaaggaaagggcaaaaagaggaggggaagaagatctaaaaaaaagcgtcgacgtggccgtaaggagggggaggaagaccagaatcccccctgcccacggctgagctccgtgcttatggaagtagaagtgccagaggtgctgcaggattccctcgatcgctactacagtacaccttctatgtactttgaacttccagattcttttcagcattaccgaagcgtcttctactccttcgaagagcagcatattagctttgctctcgacatggacaaccgattcttcacccttaccgtaagatcccttcacctggtgttccaaatgggggtcatttttccccaatag

SEQ ID NO: 126147 - DNA, 2598 bp, synthetic construct
  misc_feature 1..2598: note = Description of Artificial Sequence: Synthetic coding sequence
  source 1..2598: mol_type = other DNA
atggttgtgtcagccggcccatggtcctcagagaaggcagagatgaacatcctggagattaacgagaagttgagaccgcagctggctgaaaataagcagcagttccgcaacctgaaggaacggtgttttttaacccaactggctggatttctggccaaccggcagaagaaatacaagtatgaggaatgcaaggacctcattaaatttatgctacgtaacgaaaggcagttcaaagaggagaaactggctgagcaactcaaacaggctgaggaattgcgacagtacaaagtactggtgcacagtcaggaacgcgaactgacgcaactgagagagaaactgcgtgaaggaagagacgccagcagatccctgaatgaacacctgcaggccctccttaccccagatgagcctgataagagccaaggacaggatttacaggagcagctggccgagggttgccgattggctcaacacttagtacagaagctgagccctgaaaatgatgaggatgaagatgaggacgtccaagtggaggaagacgagaaagtgctcgaatcatctgccccacgtgaagtgcagaaggccgaggaatctaaggtgcctgaggactcccttgaggaatgcgccatcacgtgttcaaactctcacggtccatgtgatagcatacaaccacataagaacatcaagatcacgttcgaggaagacaaagtgaattcgagtttagtcgttgatcgagaaagtagccacgacggatgtcaagacgccctgaatatcttgcccgtaccgggccctaccagcagtgctactaacgtgtctatggtcgtttccgccgggccacttagctccgaaaaggccgagatgaatattctcgagatcaacgaaaagctctgtcctcagctggctgaaaagaaacagcagtttagaagcctcaaggagaaatgtttcgtcacacaggtcgcctgctttcttgcgaaacagcaaaacaagtacaaatacgaggagtgtaaggacctgataaaatcaatgctgagaaatgagagacagtttaaggaggagaaacttgccgaacagctgaagcaagcggaagaattgcgacagtacaaagtcctagttcactcacaggagagggaactcacccagctgagggaaaaactacgggaaggtcgggacgcctccagatcactgaacgagcacttacaggccctcttgacgcccgacgagcccgacaagtcacaaggtcaggatttacaggagcaacttgccgagggctgtcgtcttgcacagcacctcgttcagaagctgtccccagagaacgacaatgatgacgacgaggacgtgcaggtggaagtggcggaaaaggtacaaaagtccagctcaccccgagagatgcagaaagccgaagagaaggaggtcccagaagacagcctggaagaatgtgccatcacatgcagtaattcgcatggaccttacgattcaaaccagccccatcgtaagaccaagataaccttcgaggaagataaggtggactccacgctaattggatcttcttcacacgtcgagtgggaggatgctgtgcacataattccagagaacgagagcgacgacgaggaagaggaggagaaggggcccgtatccccccgaaatctgcaggagtctgaagaggaagaggtgccccaggagagctgggatgagggttattccactctgagtatcccccccgagaggctggcgtcctaccagagttactcctctacattccactcactcgaggagcagcaggtatgcatggctgttgacattggccgtcacagatgggaccaagtgaagaaggaagatcaagaggctacgggcccgcgcctgtcaagggaacttttggatgaaaaggagcctgaagtccttcaagactccctggaccgctgttactccaccccctccgtttacctcggactgactgatagctgccagccttatagatcggccttttacgtgctggagcagcagaggatcggcctggcagtcgatatggatgaaatcgagaaataccaggaagtagaggaggatcaagatccctcatgccctcgtcttagtcgagaacttttggccgagaaggaaccagaagtgctccaagattctctggatcggtgctacagtaccccttcaggatacctggagctgcctgacttaggccagccctaccgctccgcagtctacagcctagaagaacagtatctgggccttgctcttgatgtggatagaattaagaaagatcaggaggaggaggaagatcaggggccaccctgccctcggctgtcccgggagctattagaggtcgttgagccggaagtactgcaggactcactggacgtgatacagctgttaccagtcgtgcttaatagcctgactcctgcaagtccgacagaggttccattcatgcactggaggaaaaacatgttggccttcctgttgacctgggagaagctaaagcgccgcgggcgcgggcggaaagaaggtgaagaagatcagcggcggaaagaggagggggaagagaagaaggggaagaaaattaagactcaccacgcccccggtagtgccgcctgctag

SEQ ID NO: 126148 - DNA, 2373 bp, synthetic construct
  misc_feature 1..2373: note = Description of Artificial Sequence: Synthetic coding sequence
  source 1..2373: mol_type = other DNA
atgttttcaaattcaactgggcgcctcccggggcagcccaccgaagaaattcagcagtacaaggtgctagtgcatagccaggaacgagaattaacccagctgagagagaagctccgtgaaggaagggatgcaagccggtccttaaacgaacacttgcaggctctgctgaccccagacgagcccgacaagtcacaggggcaggatttgcaagaacagttggccgaaggttgcagattggcccagcagctggtacagaaactctccccggaaaatgatgaagacgaggacgaagatgttcaggtagaagaagacgagaaggtcttggagtcctccgcgccaagagaagtgcaaaaggccgaagagtccaaagtgccagaagattccttggaagagtgcgctattacttgcagtaattcccacgggccttgcgattccaaccagccacataaaaacatcaagatcaccttcgaggaagacaaggtgaatagcagtttggtagtggaccgtgaatacagtcatgacgagtgccaggatgctctgaacatactccctgttcccggcccaactagtagcgccactaatgtcagtatggtggtgtcagcagggcccttgtcctctgagaaagccgagatgaatatcctagaaatcaatgagaagctaaggcctcaactggccgaaaaaaaacaacagtttcggtctctgaaggagaaatgttttgtgacacaagtggcttgctttcttgccaagcagcagaacaagtacaagtacgaggagtgtaaagatctcattaaatctatgctccgaaatgaactgcaatttaaagaagaaaaattagccgagcaacttaaacaggcggaagagttgcgacagtacaaggtgcttgttcattctcaggaaagggagctaacccagttgcgcgaaaagctgagagagggacgtgatgcatccagatccctgaatgaacacctgcaggccctgctgaccccagacgagccagataagagccagggacaggacctgcaagaacagctggctgagggctgccgcttggcccaacacctggtccaaaagctatctccggagaatgacaatgatgatgacgaggacgtgcaggttgaggttgctgaaaaagtgcagaagagctcaagcccacgggaaatgcagaaggctgaggagaaggaggtaccagaggactccctggaagaatgcgccatcacctgcagcaatagccatgggccctatgacagcaatcagcctcaccgtaagaccaaaattacatttgaagaagacaaagtggactctacactcatcggctcctcttcccacgtggagtgggaagacgcggtgcacattattcctgaaaacgaatctgatgatgaggaagaagaagagaaggggcctgtttcaccccggaaccttcaggaaagcgaggaggaagaagtgccccaggagtcttgggatgagggctactccacactgagtatacctccagagagactcgcctcctaccagagctattctagcacttttcattccctggaggagcagcaggtctgcatggcagtggatataggacggcataggtgggatcaggtcaagaaggaagatcaagaggccactgggcctagactttcacgtgagctactggctgagaaagaacccgaggtgctgcaagacagcctagatcgctgttattcaacaccgtccgtctacctagggcttacagacagctgtcagccataccggtcagcattctacgtactcgagcagcagagagtgggtctggcagtggacatggacgaaatagagaaatatcaggaggtggaagaagaccaagatccgtcttgtccgaggctcagtagggaactgctggccgagaaggaacctgaagtcttacaggattcccttgaccgatgctacagcacaccttccggatatctagaattacctgacctgggacaaccttaccgtagtgccgtgtatagcctggaggaacagtatctgggcttagctcttgacgtggaccgcataaagaaagaccaggaggaagaagaggaccagggaccgccttgtcccagactcagcagagaactgttagaagttgttgaacctgaggtcctacaagatagtctggacgtgatccagctcttacctgtggtgctgaatagcctcacccctgcctctcctaccgaagtgcctttcatgcattggcggaaaaacatgttggctttcctgctgacctgggaaaagttaaaaagaagaggccgcggacggaaggaaggcgaggaggatcagcgacgcaaagaggaaggagaggaaaaaaaaggaaaaaaaattaagacacaccatgccccaggctcaacggcttgctag

SEQ ID NO: 126149 - DNA, 234 bp, synthetic construct
  misc_feature 1..234: note = Description of Artificial Sequence: Synthetic coding sequence
  source 1..234: mol_type = other DNA
atggatgagatagagaagtatcaagaagtcgaggaggatcaggacccttcctgcccaagactctcacgcgagctacttgccgaaaaggagcctgaagttctccaggactcgctggatcgttgctattccacgccatcaggttacctggagctgcctgatctggggcagccctatcgttccgccgtctatagtctggaggagcagtacctgggcctggcgctcgacgttgactag

SEQ ID NO: 126150 - DNA, 234 bp, synthetic construct
  misc_feature 1..234: note = Description of Artificial Sequence: Synthetic coding sequence
  source 1..234: mol_type = other DNA
atggacgaaatcgaaaagtatcaagaggttgaagaagatcaggatccttcgtgtcctcgccttagccgcgaattgctggctgagaaagagccagaggtgcttcaggattcacttgaccgttggtatagcactcccagcggatacctggaactacccgatttgggccaaccttaccgttcagccgtttatagcctggaagaacagtatcttggccttgcactggacgtggactag

SEQ ID NO: 126151 - DNA, 234 bp, synthetic construct
  misc_feature 1..234: note = Description of Artificial Sequence: Synthetic coding sequence
  source 1..234: mol_type = other DNA
atggacgagatcgagaagtaccaagaagttgaggaagatcaggacccgagctgccctcgcctgagtagagagttattggcagaaaaggaaccggaggtgctccaggacagtctggatcgatgctactcgaccccatccgggtaccttgagctcccggacctgggccaaccttataggtcagcagtgtactccctcgaagagcagtacctgggtctcgccttagacgtcgattag

SEQ ID NO: 126152 - DNA, 207 bp, synthetic construct
  misc_feature 1..207: note = Description of Artificial Sequence: Synthetic coding sequence
  source 1..207: mol_type = other DNA
gaaatgcagaaggcagaggagaaagaagtgccagaagactcgttggaagaatgcgcgatcacgtgctctaattcacacggcccatatgatagtaaccagcctcatcgtaaaacaaagatcacctttgaggaagataaagtcgattccacactcattggatcaagctcacatgtggagtgggaagacgctgtgcatatcattccatag

SEQ ID NO: 126153 - DNA, 9996 bp, synthetic construct
  misc_feature 1..9996: note = Description of Artificial Sequence: Synthetic coding sequence
  source 1..9996: mol_type = other DNA
atggtcgtgtcagccggcccttggtcatccgagaaggcagaaatgaacattttggagattaacgaaaagctgaggcctcagctggccgaaaacaagcaacagttccgcaatcttaaagaaaggtgttttttgacgcagctagccggttttctcgcaaatagacagaagaaatacaagtacgaggaatgcaaagacctgatcaaatttatgctgcgcaatgagcgacaatttaaggaggagaagctagcagaacagctgaagcaagctgaagaactgaggcaatacaaagtgctcgtccactctcaggagcgcgagttgactcagctaagagagaagctgcgtgagggaagggatgcgagcagatcgttgaacgagcacctccaggcattgctgacacctgacgagcccgataagtcgcaaggacaagacctccaggaacagttggccgagggctgcaggcttgctcagcagttggtccagaaactgtcaccagagaacgatgaggacgaagacgaagacgtccaggttgaggaggatgagaaagttttagagtcatctgcccctagagaggtgcagaaagccgaagagagtaaggtgcctgaagactctctggaggagtgcgctatcacatgcagcaacagccatggcccttgtgattccaatcagccacacaaaaacataaaaataacattcgaagaggacaaggtcaattccactgtcgtggtggaccggaaatcaagccacgacgagtgtcaggatgcgctcaatattctgcccgtaccagggccaacctccagcgccaccaacgttagcatggttgtgtccgctggacccctgtcctctgagaaggcagaaatgaacatcctcgagattaacgagaaactgcggccacagctggcagagaagaaacagcagtttaggtccctgaaggaaaagtgctttgtgacccagctggcgggtttcctcgcaaaacagcaaaacaaatacaaatacgaagagtgcaaggacctgattaaaagcatgctgcgcaatgaactccagttcaaagaagaaaagctggccgagcaattgaaacaggcagaagaactgcgtcagtacaaagtgctagtgcacagccaggaacgggaacttacacaactgcgcgagaaattgagggagggccgggatgcttcgagatcccttaacgagcacctccaagctctgttgaccccagatgaaccagataaaagccaagggcaggatctgcaagaacaactggctgaaggatgccgcctcgcacagcatctagttcagaagctctcccccgaaaacgacgaggacgaagacgaagatgtgcaggttgaagaagatgagaaagtcctagaaagcagttctcctcgagagatgcagaaggccgaagagtccaaagtgcctgaagatagcctggaagagtgcgcaattacttgctcaaatagccacggcccatgtgactcgaatcagcctcacaaaaatatcaaaataactttcgaggaggacaaggttaattcgtctctggtggttgaccgcgagtatagccacgatgaatgtcaagatgcactcaatatacttccagttcccgggcctacctcctccgccacaaatgtctccatggtggtatcagcaggcccactctcatccgagaaagctgagatgaatatcctggaaatcaacgaaaagctccggccgcagctggcagaaaaaaagcagcagttccggagcctaaaagaaaaatgcttcgtgactcaggtggcctgtttcctggctaaacagcagaacaagtataagtacgaggaatgcaaggacctgattaagagtatgttgcgtaatgaattgcagttcaaagaggagaaattagctgaacagctaaaacaggcggaagagttacgccaatataaagtcctggtccattcacaggagcgggaattgacacagctgagagaaaaactgcgggagggtagggatgcttctaggagcttgaatgaacacctgcaggccttgctgacacccgatgagcctgataaatcacagggccaggatttgcaggagcagctggctgaagggtgccgcctagcccagcatctcgtgcaaaaattaagcccagagaacgataacgacgacgacgaggacgtgcaggtggaggtggctgaaaaagtccagaagagtagttcccctcgcgagatgcagaaggctgaggagaaggaagtgcctgaagacagcctggaagagtgtgccatcacctgcagcaatagccatgggccatatgactccaatcagcctcaccgcaaaaccaagattaccttcgaggaagacaaggtggactctactctgattgggagctcctctcatgttgagtgggaagacgcagtccacatcatccccgaaaacgagagtgatgatgaagaggaagaagagaaaggtcctgtaagtccacgcaacctgcaggagtccgaggaagaggaggtgccgcaggaatcctgggatgagggttattctaccctgagtataccccccgaaaggctggcctcttatcagtcatactcaagtactttccactcactcgaggaacagcaggtgtgtatggccgtggatataggctctgagtactcaattgtgaaggtcatcaagctacagttcatggctcagtcccaggcaatgcccgtgcccacatggacggactgccatgatatcgagctcaaggcaggacatcggtgggatcaggtgaagaaggaagatcaggaagctaccgggcctaggctgtcccgggagcttttagctgagaaggaaccggaggtgttacaggattctctggaccgatgctactctacacccagcgtgtacttgggattgactgactcgtgccagccatatcgttctgctttttatgtgctggaacagcagcgcgttggcttagccgtggatatggatgagatcgaaaagtatcaagaagtcgaggaggaccaagatccatcctgcccccggctatctagagaactacttgcggagaaggagccagaggtgcttcaggacagtcttgaccgttggtatagcactccgtcgggctatcttgagctgcccgacctcggtcagccataccgatctgcagtgtacagcctagaggaacagtacctggggctggccctcgacgtcgatcgcattaagaaggaccaggaggaggaggaggatcagggcccaccgtgccctcgcctatccagggagctactcgaggtcgtcgaacctgaagtgctccaggattccctcgaccggtgctactccacgcctagctcctgcttggagcagccagattcctgccagccatatcggtccagcttttatgcactggaggaaaagcacgtgggattttcactggacgtgggggagatcgaaaagaaggggaagggcaagaagcgaagaggtagaagaagcaaaaaaaaaagaagacggggcaggaaggagggagaagaagaccagaatccaccctgtccaagactctctagagaactcctcgctgaaaaggaacccgaggtgctacaggattccctcgataggtggtactccaccccatctgtttacctgggcttgactgatccttgtcagccctatcggagtgccttttatgtgttggagcagcagagagtgggactggccgtcgacatggacgagattgagaagtatcaggaagtggaagaagatcaggatccttcctgcccaagactgtctagggagttgctggcagaaaaagagcccgaagtcttacaggactctctcgataggtggtacagcaccccttccgggtacctggaactcccggacttggggcagccttatcggagcgctgtatactcactggaagaacaatatttaggcctggcactggacgtggatcggattaagaaggatcaagaagaggaggaagatcagggcccgccctgtccaagacttagcagggagctcctcgaggtggttgagcccgaagtcctgcaagactctctagaccgctgctactctacaccatcttcttgcctggaacagccggactcctgtcaaccgtacaggagctccttttacgcactcgaggagaagcatgtgggatttagcctggatgtcggcgagattgaaaagaaggggaaaggcaagaaacgcagaggacgccgtagcaaaaagaaaaggagacggggcaggaaggagggagaagaggatcaaaaccccccatgcccaaggctgtcccgggagctattagccgaaaaagaacccgaggtcttgcaggactccctggatcggtggtacagcaccccgtccgtctacctggggcttactgacccgtgccagccttatcgttcggctttctacgttctggaacaacagcgtgtgggactagccgtggatatggatgaaattgaaaaatatcaagaagttgaagaggatcaggacccatcttgtcctaggctttccagagaactgcttgccgaaaaggagcctgaagtgctccaagattcactagaccggtggtactcgactcccagtgggtatctggagttacctgaccttgggcagccttaccgcagcgcagtgtacagcctcgaggaacagtacttaggcctggccctggacgtggatcgaataaagaaagaccaggaagaggaggaggaccagggtcctccttgcccaaggctcagccgcgagttacttgaggtggtggaacctgaagttctgcaggactctttggataggtgttactcaactccttcatcttgtttagagcagcccgactcctgccagccctatcggtcctctttctacgcactagaggagaaacatgtgggattctccttggacgttggggaaatcgagaagaaagggaagggaaaaaaaaggcgcgggcgtcgaagcaaaaagaaacgtagaagaggtcgcaaggagggcgaggaagatcagaaccccccatgtcctcggctgagccgggaacttctggcggagaaagagcctgaggttctccaggattctctggatcgatggtattctacaccttccgtctatctcggactgactgatccttgccagccgtatcgatccgctttctatgtcctggagcagcagagagtggggttagccgtagatatggatgagatcgagaagtaccaggaagtagaagaggatcaggaccccagctgccctagactcagtagagaactactggccgagaaggagccagaggtcttgcaagattcccttgaccggtggtacagtacgccatctgggtatctggagcttcctgacttaggtcagccataccgttccgccgtatattctctggaagagcagtacctcggcctggctctagatgtggacagaatcaagaaagatcaagaggaagaagaagaccaaggccctccatgtcctcgcctgtcacgggaactgctcgaagtcgtggagccagaggtgctgcaggacagtctggaccgatgctactctaccccttcttcctgtcttgagcagcctgatagctgccagccatatcgtagttccttctacgctctcgaagagaagcacgtaggcttctcactggacgttggggaaattgaaaagaaaggtaagggcaaaaagcggaggggtcggcgaagtaagaaaaaacggcggcgaggcagaaaagaaggggaggaggatcagaacccaccatgcccacgactaagcagagagcttctggctgaaaaggaaccagaggtgctgcaggattctttggaccgatggtatagcactcccagtgtctacttgggacttaccgacccatgccaaccctatcgaagcgccttctacgtcctcgagcagcagagggtcgggctcgccgtagacatggatgaaatcgagaagtaccaggaggttgaggaagatcaggacccatcttgtccccggctgtccagggaactgttggcagagaaagaacccgaggtccttcaagatagcctggataggtggtatagcacaccatctggctacttggaactaccagatctgggtcaaccgtaccggtccgcagtgtattccctcgaggaacaatatctcgggctggcattggacgtggataaaattgaaaaataccaggaagtagaagaggatcaggaccctagctgccccagactgagccgggagcttctagcagagaaagagccagaggtacttcaggactctcttgaccgctggtatagcactccgtccgtgtacttaggcctcacggacccatgccagccttatcggagtgctttctatgtgttagagcagcagagggttggactcgctgtggacatggacgagatcgagaagtaccaggaggtagaggaggatcaagatccctcatgtccgcggctttctcgagagctgcttgccgagaaagagccagaggtactccaggattccctcgaccgctgttacagcacacccagcgggtacctggaactacctgatctgggccagccctatcgaagcgcagtttactcactcgaggaacagtacttggggctggcattggatgtagaccggatcaagaaagatcaagaagaggaggaggaccaaggtcccccttgcccccggttatcgagagaactactggaagtagtcgagcctgaggtgctgcaggattcactggaccgttgctattcaacaccttccagctgtctggagcagccagatagttgtcagccctaccgatcctccttttacgctcttgaggagaagcatgtgggcttcagcctggacgtgggcgaaatcgaaaaataccaagaggtggaagaagaccaagacccctcgtgcccacgattgtctagggagctccttgccgaaaaggagccagaagtcctccaggatagtctcgaccggtggtactctacacccagtgtgtatctgggcctgaccgatccatgccagccttataggtccgctttctacgtgctggagcagcagcgagtgggattggcggtcgatatggacgagatagaaaagtatcaggaagtcgaagaagatcaggacccctcctgtcctaggctctccagggagctcctggccgagaaggaacccgaagtactgcaagatagcctcgatcggtgctattcaaccccaagcggctatctggaattacccgacctgggacaaccttaccggtcagctgtgtacagtctggaggaacagtatctgggcctggctctagacgtcgatcgaattaaaaaggatcaggaggaagaagaagatcagggcccaccctgtccccggctcagtagagagctcctcgaggtggtagaacccgaagtgctgcaggactcgcttgaccgctgttactctactccctcctcctgcctggagcagcccgatagctgccagccatacaggtcctccttctatgcgttggaggagaaacatgttgggttttcgctcgatgttggggagattgagaaaaaaggtaagggcaaaaagagaagggggcggcggagcaagaagaaaagacgtcggggtcggaaagaaggcgaagaagaccagaatccaccgtgccctcgcttgtctcgggaacttctagctgagaaggagccagaagtactgcaggacagtctcgataggtggtacagcaccccgtccgtttacctgggcctgacagatccctgtcagccatacagatcagccttttatgtgctggagcagcagagagtggggctcgccgttgatatggacgaaatagaaaagtatcaggaggtagaggaggatcaggatccctcgtgtccccggttatctcgcgaactgttggccgagaaggagcccgaagtgctgcaggattcactcgatcgttggtactccacgccctccggctaccttgagcttcccgatctcggacagccataccgtagtgctgtctatagcctggaggagcagtatcttggcctggccttggatgtggataggattaagaaggaccaagaagaggaagaagaccaggggccaccttgccctcgcctgtctcgcgagctgttggaagtggtcgaacctgaggtgctacaggacagcctggatcggtgctacagcacaccctctagctgcttggaacaacctgactcatgtcagccataccgatcgtccttttatgccctcgaagagaaacatgtgggattcagcctcgacgtgggcgagatcgagaagaaagggaaaggtaaaaaaaggagaggtcgacggtccaagaagaagcgaagacgtggccgcaaagaaggggaggaggaccagaacccaccctgcccacgcctatcgcgagagcttttagccgaaaaggaaccagaggtcctccaggattcattggaccgctggtactctactcctagtgtctaccttggactgaccgacccttgccagccctatcgttctgccttttatgtgcttgagcagcagagagtaggtctcgccgtggacatggacgagattgaaaaatatcaggaggtggaagaagaccaagacccatcttgtccccggctaagcagggagctgctggcggagaaggagccggaggtgctccaagacagccttgatagatgttacagcaccccatctggatacctggaactgcccgatctggggcaaccttaccgatcggccgtatactctttagaagagcaatacttgggcctggccctcgacgtcgatcgaataaagaaagatcaggaagaggaggaagaccagggaccaccatgtcctcgcctctcccgagaacttctcgaagtggttgagcctgaggtgctgcaggattcccttgataggtgctacagcacccccagtagctgtctggagcaaccagatagctgtcagccctaccggagttccttctacgctctcgaagagaagcacgtgggatttagcctcgacgtgggagaaatcgaaaaaaaaggaaaagggaagaagcggcgtggccgccgctccaaaaaaaagcgcagaagggggaggaaagaaggtgaggaagatcagaacccaccttgcccccggctctctcgcgaactgctcgccgaaaaggagcctgaggttctgcaggattcgctcgaccgttggtatagcacccctagtgtctacctcggtttgaccgatccttgtcagccctgcaggagcgccttttacgttctggagcagcagagagtggggctagctgtggatatggacgaaatcgaaaagtatcaggaggtcgaagaagatcaggacccatcatgcccacgtctgtcacgcgagcttctggccgagaaagaacccgaagttctgcaggattcccttgatcgatgttattccactcctagtggctacctggaacttccagatttggggcaaccttaccggtctgccgtttattcgctggaagagcaatacctcggactggctttagacgttgatcgcatcaaaaaggatcaagaggaagaagaagaccagggccccccctgcccacgcctgtccagggaactcttggaggtggttgaacccgaagtcctccaagatagcttagaccgctgttactctacacctagcagctgcctcgagcagccagattcttgccagccatacaggtcaagtttttacgccttggaggagaagcacgtgggctttagcctcgacgtgggggagattgaaaaaaagggcaaaggcaagaagagacgcgggcgcaggtcaaagaaaaaacgcagacgcggaagaaaagaaggtgaggaggatcaaaaccctccctgtcctcggttgaacagcgtgctgatggaggtagaagagcctgaagtgctgcaggattccctcgataggtgctactcgacaccttccatgtacttcgaactgcccgactccttccagcactatcgaagcgtgttttattcattcgaagagcagcacatcacattcgccctggacatggacaattcctttttcaccctaaccgttaccagccttcacctggtgtttcaaatgggggtgatctttccgcagtag

SEQ ID NO: 126154 - DNA, 234 bp, synthetic construct
  misc_feature 1..234: note = Description of Artificial Sequence: Synthetic coding sequence
  source 1..234: mol_type = other DNA
atggatgaaatcgaaaagtaccaggaagtggaagaggatcaggatccctcttgtcccagactctcgagggagctgttggctgaaaaggagccagaagtattgcaagatagtctcgatcgttgttacagcaccccttctggatacctggaactgccagatttggggcagccctatcggtccgccgtgtactcacttgaggaacaatatctagggctcgccctcgacgtagactag

SEQ ID NO: 126155 - DNA, 2517 bp, synthetic construct
  misc_feature 1..2517: note = Description of Artificial Sequence: Synthetic coding sequence
  source 1..2517: mol_type = other DNA
atggtggtgagtgcaggcccctggagtagcgaaaaggctgaaatgaatattctcgaaataaacgaaaagctgcgcccccaacttgcagagaataaacagcaatttcggaacctgaaggaacggtgtttcttgacacagcttgcagggttcttggctaaccgacagaagaagtataagtatgaagaatgtaaagacctaatcaaattcatgctgcgcaacgagcgccagttcaaagaagaaaaactggccgaacaattgaagcaggccgaggaattgaggcagtacaaagtccttgtccacagccaggagcgcgaattaacccagcttcgcgagaagctgcgggagggacgggacgcttcacgctctctgaacgagcatttgcaagccctgctcactcccgatgagcccgacaagtcccagggacaagacctgcaggaacagctggcggagggatgccggcttgcacagcagctcgtgcagaaactgtctccagaaaatgacgaagatgaagatgaagatgtgcaggtggaagaggatgagaaagtgctcgagagctccgcccctagggaagtccaaaaggcggaagagtctaaagtccccgaggattcacttgaggagtgtgctatcacttgcagtaattcccatggaccctgcgactccaatcagccacacaaaaacatcaagatcacgtttgaagaggataaagtgaattcaagtttagtcgtggatcgcgaatattctcacgatgaatgtcaggatgcgctgaatattctgcccgtgccaggtcctacttcaagcgccaccaatgtaagcatggtcgtgtccgccggccctctgagctcagagaaagccgagatgaatatcttggaaatcaacgagaagctccgtccccaactcgctgagaaaaagcagcaatttcgtagtttgaaggagaaatgttttgtaacccaggtcgcttgcttcctggccaaacagcaaaacaaatacaagtatgaggagtgtaaagacttaatcaaaagtatgcttagaaacgaactgcaatttaaagaagaaaagctggctgaacagctcaagcaggcagaagagctgcgccaatacaaagtcctggtgcattcccaggagcgtgaattgactcaactgagagaaaagctgagggaaggacgcgatgctagccggagtctgaacgaacatctgcaggcactgttgactcccgacgagccagacaagtctcagggacaggatttgcaagaacagctggcagagggttgtcggttggcccagcaccttgttcaaaaacttagtcccgagaatgataacgacgatgacgaggatgtccaggtagaagtagcagagaaggtgcagaaatcctctagtcccagggagatgcagaaggccgaagaaaaggaggttcccgaagattccctggaggaatgtgccataacttgctcaaatagtcatggaccctacgactcgaatcagcctcaccggaagcctaagagccacttgcggaaaacaaaaagcacccagctgagcctggcccaccccttgatgctcaacggtcggatgctgtatacactaagtcaaaaaatgaaagtgatgatgcgcaagcgcaagaaaaaggggcagtgcctgcccgggatctgccgctctctcaagcgtcggaagtcccctcgctcccccggaatgaaggtgatccgcctctcgcagtttctgctcaagggccatcgctgggaccaggtgaaaaaggaggaccaggaggctacaggaccgcggctaagcagagaactcttggccgaaaaagagcccgaagtacttcaggactccttggacagatgttacagcactccatctgtgtacctagggttgactgatagctgtcagccctacaggtcagccttctacgtgttggagcagcagagagtgggattggctgtggatatggacgagattgagaaataccaggaagtggaggaggatcaagacccgagctgcccacggctatcccgtgaactgctagctgagaaggaaccagaagtactccaagacagccttgaccggtgctattcaaccccctccggctacctcgaactcccagatctaggacagccctatagaagtgccgtttactctctggaggagcaataccttggcctcgccctagatgtggatagaatcaaaaaggaccaggaagaagaagaagatcagggtccaccctgccctcgattgtctcgtgaattgctggaggtggtagagcccgaggttctccaagacagcctggacgttatccagctgctacccgtcgtgctgaactcgctcacgcctgcttctccaacggaagtaccttttatgcactggaggaaaaacatgttagcatttttactcacctgggaaaagctaaaaagaaggggtagaggacggaaagaaggcgaggaggaccagaggagaaaagaagagggggaggagaaaaaaggtaagaagataaagacccatcacgcccccgggtcaacagcatgttag

SEQ ID NO: 126156 - DNA, 288 bp, synthetic construct
  misc_feature 1..288: note = Description of Artificial Sequence: Synthetic coding sequence
  source 1..288: mol_type = other DNA
atcgctgaaatcgagaagtatcaagaggtagaggaagaccaggacccctcatgtccacgtctctccagagaactactcgctgagaaggaaccagaggtgcttcaggatagcttggatcgctggtattccaccccctcgggatacctggagctgccagacctcgggcaaccttaccggtctgcagtatactcactggaggagcagtatttagggctcgctctggatgtggataagattgaaaagtatcaggaagtagaggaagatcaggatcctagctgtcctaggtag

SEQ ID NO: 126157 - DNA, 234 bp, synthetic construct
  misc_feature 1..234: note = Description of Artificial Sequence: Synthetic coding sequence
  source 1..234: mol_type = other DNA
atggacgaaatcgaaaagtaccaagaagtagaggaggaccaggacccttcttgccctcgattaagccgggagttgctcgcagagaaagagcccgaggttttgcaggatagcctcgacagatgctatagtaccccgagtggctaccttgaattgcccgatctgggtcagccctaccgctcagcagtgtatagtctggaagagcagtatctgggcctggccctcgatgtagattag

SEQ ID NO: 126158 - DNA, 2784 bp, synthetic construct
  misc_feature 1..2784: note = Description of Artificial Sequence: Synthetic coding sequence
  source 1..2784: mol_type = other DNA
taagacctgattaaatccatgctgaggaatgaaagacagttcaaggaagagaagttggccgagcagttaaagcaggctgaggaactccgacagtacaaagtgttagtgcacgcccaagagcgagagctgacccagcttcgcgagaagctgcgcgagggtcgcgacgctagtcggagcctgaatgaacatctgcaagccctcctgacacctgacgaacccgataagtctcaaggacaagatctccaggaacagctcgcagagggctgccgcttagcacagcaccttgtccagaagctctctccagagaacgataatgacgatgacgaggacgtacaagtggaagtggcagagaaagtacaaaaatcatccgctccaagagagatgcaaaaagctgaggagaaggaagtgccagaagatagccttgaggagtgtgcaatcacctgcagtaactcacacggaccatatgattccaaccagccgcaccgcaagacaaagatcacatttgaggaggataaggtggacagcacacttattggatctagcagccacgtggagtgggaggatgccgtgcacatcatccctgaaaatgaatcagatgacgaagaagaagaggagaaaggaccggtcagtcccaggaacctgcaggagagtgaagaggaagaggtacctcaagagagttgggatgaggggtacagcacgctgtctattcctcccgagatgctcgcgagttataaatcatattccagcaccttccacagcctcgaggaacagcaggtgtgtatggccgttgacatcgggcggcaccggtgggatcaggttaaaaaggaggatcacgaagcaactggaccgcggctctcccgagaacttctcgatgagaagggcccagaggtgctccaagacagcctcgataggtgttattcaacaccatcgggctgtcttgagctcactgactcttgccagccatacaggagcgccttctatgttttagagcagcagcgggtgggtctcgcagtgaatatggatgaaatagaaaaataccaggaggtggaggaggaccaggatccgtcctgtcctcgccttagccgggagctgctggatgaaaaggaacccgaagttctacaggatagtctggggagatgctactccaccccatcaggttatttagaactcccagatttaggacagccttactcatccgccgtgtactctctcgaggagcagtacctgggtctggcattggacgtcgacagaattaaaaaagatcaggaggaggaggaggatcagggacccccctgcccgcgcttaagtcgggaactccttgaggttgtagagcccgaggtcctccaagatagtctggacagatgctatagcacaccctctagttgcctggagcaaccagactcatgccagccatacggctctagcttctacgcactggaggaaaagcatgtgggcttctctctcgacgtgggcgaaatagagaagaagggaaagggtaaaaaacggagaggccggagatcaaagaaggagcggcggagaggcaggaaggaaggcgaagaagaccagaacccaccgtgccctcggctgagtagggagttgctggatgagaaggggccagaagtcttgcaagattctttggacagatgctacagcacccccagtggatgtcttgaacttaccgactcatgccagccttatcgcagcgccttttatatactcgagcagcagcgcgtcggccttgctgttgatatggacgagatcgaaaagtaccaggaggtggaggaggaccaggatccctcttgccctagattatccggcgaactcctagatgaaaaagagcccgaggtgctgcaggaatcactggatagatgctactccaccccaagcggctgcctcgaactgacagattcctgccagccctatcgaagtgctttctacattctcgaacagcagcgggttggcctggccgtcgacatggatgagatcgaaaagtatcaggaggtggaggaggatcaagatcctagctgcccacgtctcagcagggagctccttgacgagaaagagcccgaagtactccaggattcgctgggccgctgttactcaactcctagtgggtatttagagctgcctgatctgggacaaccctacagttccgcagtatactccctggaggagcagtacctgggactggctcttgacgtcgatagaatcaagaaggaccaggaggaggaagaagatcaagggcccccttgtccaagactctccagggaactgctcgaggttgtggagcccgaggtgcttcaagacagcctggacagatgctacagtacccccagctcatgcctggagcagccggactcttgccaaccatacggaagtagtttttatgccctagaagaaaaacacgtaggtttctccctcgatgttggtgaaattgagaaaaagggcaaaggtaagaaacgtcgaggccgacggagcaaaaaggaaagaaggcggggacgcaaagaaggcgaggaggaccagaatccgccatgtcctaggctgaatagtatgctgatggaggtggaggagcccgaggtccttcaggactcacttgacatctgctattctacaccatcaatgtatttcgagctgcccgacagttttcagcactatagaagcgtattctatagtttcgaagaagagcacattagcttcgccctgtatgttgataatagatttttcacgctgactgtcactagcctgcacctggtgtttcagatgggcgtgattttcccacagtag

SEQ ID NO: 126159 - DNA, 2766 bp, synthetic construct
  misc_feature 1..2766: note = Description of Artificial Sequence: Synthetic coding sequence
  source 1..2766: mol_type = other DNA
atgctgcggaatgaacgtcaattcaaagaggaaaagctggccgaacaacttaaacaggccgaggagttgcgccaatacaaggttctggtgcatgcccaggaaagggaactgacgcaattgcgggagaaactcagagaaggtagggacgcttcccgttccctaaacgaacacctccaagctttgctaacacctgacgagccagacaagtcacaaggacaagaccttcaggagcagctcgctgaagggtgtagactggcacagcatcttgtgcagaaactgagccccgaaaatgacaatgatgatgacgaggacgtgcaagtcgaagtcgcagagaaggtacagaaatccagcgcaccaagagaaatgcagaaggccgaagagaaggaagtacccgaggacagcctggaggagtgcgccattacttgcagcaacagccacggaccctatgacagcaatcagccacacaggaaaaccaagataacattcgaggaagacaaagtggactctaccctaatcggatcgtccagccatgtcgaatgggaggatgccgttcacatcattccagagaacgagagtgacgacgaagaagaggaagaaaaggggcctgtgtctccccggaatcttcaggagtcggaagaagaggaagtaccacaggaatcctgggacgagggctattcaacgctctccataccacctgaaatgctggcatcgtacaagagttacagcagtacatttcactctctggaggagcaacaggtctgtatggccgtagacataggacgccacagatgggatcaggtcaagaaggaggaccatgaggccacaggccccagactgtcaagggaactgcttgatgagaaggggcccgaagtgttacaggattccttggacagatgctactcaacaccatctggttgcctggaactcaccgattcttgtcagccataccggagtgctttctatgttctggagcagcagcgggttggcttagcagtgaatatggatgagattgagaagtatcaggaagtcgaggaggaccaggatccttcgtgcccgcgtctatctcgggagttattagacgagaaagaaccggaggtgctgcaagatagtcttgggcggtgctattcaacccctagcggctatctcgagcttcctgatctggggcagccatatagctctgccgtgtactctctggaagaacaatacctgggcctggccctcgatgttgataggattaaaaaggatcaagaggaggaggaggaccaaggaccaccttgtcccaggctcagccgagaattgctcgaagtcgtcgaaccagaagttctacaagattctctggacagatgttactcgaccccttctagctgcttagaacagcccgactcctgccaaccatatggctcaagcttctacgctctggaagaaaagcacgtgggcttttctcttgatgtgggcgaaatcgagaaaaagggaaaaggcaagaaacgcaggggaagacgatcaaagaaagaacgccggaggggccgaaaggaaggagaagaggatcagaaccctccctgccccaggctcagccgcgagttgcttgacgagaaggggccagaagtcctgcaggacagcttggatagatgctacagcactccatctggctgcctcgaactgaccgattcctgccagccctacagaagtgctttctacattcttgagcaacagagggtgggtctcgccgtggatatggatgagattgaaaagtatcaagaggtggaggaagatcaagacccaagttgtccacgtctcagtggggagctgctggacgaaaaagagcctgaagtcctgcaggaaagtctcgacaggtgctattcaacccccagtggctgtctggagctgactgattcatgccagccataccggtcggctttttacattttggaacagcaacgggtaggcttagcagtggacatggacgaaatcgagaaatatcaggaggttgaagaagaccaggatccaagctgccctcggctctctagagagttattggacgagaaagagcccgaagtgctgcaggattctctgggtaggtgttattctactccgtctggatacctggaactccctgacttggggcagccctattcaagtgctgtgtactccctggaggagcagtatctcggattagccctggacgtggaccgcatcaaaaaggatcaggaggaggaggaagaccagggccctccctgcccccgcctttcccgcgagcttcttgaagtggtggagcctgaggtacttcaggactcgctggatagatgctactcaactcccagcagttgtttagagcagcccgacagctgccaaccttatggtagcagtttttatgccttagaggagaagcatgttgggttctctctagatgtgggcgaaattgagaagaaaggaaaaggaaagaaacgccgagggcgccgttcaaagaaggagcgaaggcgggggagaaaagagggcgaagaagaccagaaccccccttgccctagacttaactccatgctgatggaggtcgaggagccggaagtcttgcaggattctcttgacatctgttattctaccccatcaatgtatttcgagctgcccgatagttttcagcattaccgatcagtgttctattctttcgaggaagagcatatcagcttcgcactgtatgttgacaatagattttttaccctgacagtgactagtcttcaccttgtgttccagatgggagtgatatttccgcagtag

SEQ ID NO: 126160 - DNA, 810 bp, synthetic construct
  misc_feature 1..810: note = Description of Artificial Sequence: Synthetic coding sequence
  source 1..810: mol_type = other DNA
atggatgagatcgaaaaataccaggaggtcgaagaagatcaggacccctcttgccctagactctctcgggagctcttagatgaaaaggaacccgaagttctacaagactcattgggcaggtgctacagcacaccgagcgggtacctggagttaccagacctgggacagccttactcctccgcagtatattccttggaggagcaatatctgggcctcgcccttgacgtcgacaggataaaaaaggatcaggaggaggaggaagaccaagggccaccgtgcccccgcctgtcccgggagctgctggaggtggttgaacctgaggtcctgcaggactccctcgacagatgctactccaccccgagctcttgcctggagcagcccgactcttgccagccctacgggagttcattctacgccctcgaggaaaaacacgtggggttctccctggacgtgggtgaaatcgaaaagaagggaaagggcaaaaagcgcagaggacgtaggagcaagaaggagagaaggcgcggcaggaaggagggagaggaggaccaaaaccccccatgtccacgattgaatagcatgctgatggaagtggaagaaccagaggtactccaggatagcctggacatatgctatagcacccctagtatgtacttcgagttgcccgactcttttcagcattacaggagcgtgttctatagctttgaagaggaacatattagtttcgcactctacgtggataacagatttttcactctgactgtaacatcattgcacctggtgttccaaatgggggtgatcttcccacagtag

SEQ ID NO: 126161 - DNA, 1539 bp, synthetic construct
  misc_feature 1..1539: note = Description of Artificial Sequence: Synthetic coding sequence
  source 1..1539: mol_type = other DNA
taatacgaggaatgtaaagacttgattaaatccatgttgagaaatgagaggcagtttaaagaggagaagttagcagagcaactaaagcaggccgaagagttgagacagtataaagttctggtccacgcccaggagagagaacttacacaactgagagaaaagctgagggagggaagagatgcgagcagatcactgaacgaacatctccaagccctgctcactcccgatgaaccagacaaaagtcaggggcaggatctgcaagagcaattggctgaggggtgccggcttgcccagcacctggtgcagaagctctcccccgagaacgacaacgatgacgacgaggatgtgcaggtggaagtcgccgagaaggtgcagaaaagctctgccccccgggaaatgcagaaggctgaggagaaggaggtccctgaagactccctcgaagaatgcgctatcacatgcagtaactctcacggcccttatgactccaatcaaccacaccgtaaaactaaaataacctttgaggaggataaggtggacagtacgctgattggcagcagttcacatgtggagtgggaggacgccgtgcatataattccagagaatgagagtgatgatgaggaggaagaagaaaagggtcctgtctccccacgcaatctgcaagagtctgaagaagaggaggtgcctcaggagtcttgggacgagggatactctaccctttctatccctcccgagatgcttgcatcttacaaatcttacagctcaaccttccactctctcgaggagcagcaggtgtgcatggctgtggatattggtagacatcggtgggatcaggtgaaaaaagaagaccatgaggccacagggccacgcctctcacgcgagctgctggatgaaaaggggccagaagtcttacaagactcactggatagatgctattccactccctccggctgcctggaattgaccgattcctgccaaccttaccgatccgccttctacgtgctggagcagcagagagttgggctcgccgtgaacatggatgagatagagaaataccaggaagtggaggaggatcaagatccgagctgtccacggttgtcccgcgagttactggacgagaaggagcctgaagtgttgcaggattccctggggagatgttacagcacgccatccggctacttggagttgcctgacctgggtcagccctacagttccgctgtctactccctcgaagaacagtatctcgggctcgctctagacgtggataggatcaagaaggaccaggaggaagaggaagaccaggggcccccctgcccacggctgagccgggaactgctggaggttgtcgaacctgaagtcctccaggattccctagaccgctgctactccactccgagcagctgtcttgaacaaccagattcttgtcagccttacggaagtagtttctatgccctagaggaaaagcacgtggggttttcattggatgttggcgaaatcgagaagaaggggaagggtaagaagagaagaggacgccggtcttag

SEQ ID NO: 126162 - DNA, 567 bp, synthetic construct
  misc_feature 1..567: note = Description of Artificial Sequence: Synthetic coding sequence
  source 1..567: mol_type = other DNA
atggacgagatcgaaaagtatcaggaggtggaggaggatcaggatccctcctgtccaagactatcgcgggagcttctggacgaaaaggagcctgaagtgctgcaggatagcctggggcggtgttattcaactccctccggatatcttgaattacctgatttgggccagccctacagctctgcagtgtatagcctggaggaacagtaccttggactggcactcgacgtggatagaatcaaaaaggatcaggaggaggaagaagatcaggggcccccctgtccacggctgagtcgtgaactgctcgaagtcgttgagccagaagtgctgcaggactcattggataggtgctattccactcctagcagctgtctggagcagcctgacagttgtcagccttacggatcttcattctatgcccttgaggaaaaacatgtgggcttcagtttggatgtgggcgaaattgaaaagaaaggaaagggaaagaaaagacgtgggcgaaggtcaaagaaagagaggcggcggggccggaaagagggcgaggaagaccagaaccccccctgcccctag

SEQ ID NO: 126163 - DNA, 1539 bp, synthetic construct
  misc_feature 1..1539: note = Description of Artificial Sequence: Synthetic coding sequence
  source 1..1539: mol_type = other DNA
taatacgaggagtgtaaagatcttattaagagtatgttgcggaacgagcggcagtttaaggaagaaaagctggccgaacagttgaaacaggccgaggaactccggcagtataaggtactcgtgcatgctcaggagcgcgagctgacccagctgagggagaagctgcgtgaaggtagagatgcatctagatccctgaatgagcacctgcaggcattactcacgccagacgagcccgataaatcacaggggcaggacctccaggaacaactggcagaaggttgccggctcgcacagcacctggtgcagaaactctcaccagagaacgacaacgatgacgacgaagacgttcaggtggaggtggcagaaaaggtgcagaagagcagcgcccctcgagagatgcagaaagccgaagagaaggaggttcccgaggattccctggaggagtgcgcaatcacctgcagtaattcccacggaccatacgactcaaaccagcctcaccgaaaaacaaagataacattcgaggaggataaagttgattcgactctgattggcagttcaagtcacgttgagtgggaagatgccgtgcacatcatacccgaaaacgaatccgacgacgaagaagaggaggaaaaggggcccgtttccccgcggaaccttcaggaaagtgaagaggaggaggtcccccaggaatcttgggacgagggatactccaccctatctattccacctgagatgctcgcatcctacaaatcctattcctcgaccttccacagtctcgaggagcagcaggtgtgcatggctgtggacattggccgacacaggtgggaccaggtgaagaaggaggatcacgaggctaccgggcctcgcttgagtcgggagctgttagatgaaaagggtcctgaggtgctccaggatagcctggatcggtgttatagtactcccagcgggtgcctggagctcactgatagttgtcagccttatcgaagtgccttctacgtgctcgagcagcagagagtgggacttgccgtgaacatggacgagattgaaaaataccaagaggtcgaggaagatcaggatcctagctgcccaagactgagtcgggagctgctagacgaaaaggaacccgaggtgctgcaagatagtctgggacggtgttattccactccatctgggtacctggagctgcctgaccttggccagccttactcctcagccgtgtattctctcgaggagcagtatctgggattggcactcgacgttgaccgcatcaagaaggaccaggaagaggaagaagaccagggacccccatgccctagattgagcagggagctgctggaagtcgtggaaccagaggttcttcaagattctctggaccgctgctactcaacacccagctcctgcctggagcagcctgactcctgccagccttatggttcatctttctacgcgttggaagaaaaacacgttgggttttctctggacgtaggcgagattgagaaaaaggggaagggaaagaagagacgaggccgacggtcgtag

SEQ ID NO: 126164 - DNA, 1539 bp, synthetic construct
  misc_feature 1..1539: note = Description of Artificial Sequence: Synthetic coding sequence
  source 1..1539: mol_type = other DNA
taatacgaggaatgcaaggacctaataaaatccatgctgcgcaatgaacggcaatttaaggaagaaaagttggcagaacagctgaagcaagccgaagagctccgtcagtataaagtacttgtgcacgcccaagaacgggaactaactcaattgcgggaaaaacttagggagggccgagacgcgagccgcagcttaaacgagcacctgcaggccttacttaccccagatgaacctgacaagagtcagggccaggatctgcaggaacaacttgctgagggttgccgcctcgcacagcatttggtacaaaagctttccccagagaacgacaacgatgatgacgaggatgtgcaggtggaagtggctgaaaaggttcagaagagttctgctcctcgggagatgcaaaaggccgaggagaaggaggtgccagaggattccctagaggagtgtgcaatcacctgcagcaacagccacggcccatacgattcaaatcagcctcaccggaaaactaaaattacatttgaggaggacaaggtggacagcacactgataggctccagcagccacgtggaatgggaggacgctgtgcatatcattccagaaaatgaaagcgatgacgaagaggaggaggagaaaggtcctgtatccccaaggaatctgcaagagtcagaggaggaagaggtaccccaggagagctgggatgaggggtatagtactctcagtattccgccagaaatgctcgcgagctacaagtcttattctagcaccttccactctctcgaagaacagcaggtgtgtatggcagtggacatcggccgtcatcgctgggaccaggtgaagaaagaagatcacgaggcaacgggcccacgtcttagccgggaactgctggatgagaaaggcccagaggtgctccaggatagcctagataggtgctactccacccccagtgggtgcctggagttgacagatagttgtcaaccctatcgcagtgcattttacgtcctcgaacagcaacgagttgggctggcagtgaacatggacgagatcgagaagtaccaggaggtggaagaggaccaagacccaagctgtccacggctcagccgagaacttctggatgaaaaggaacctgaggtcttgcaggactcactcggtcggtgctatagtaccccatccgggtacctggaactcccggacctaggccagccctactcaagcgcagtttattcactcgaggagcagtacttaggtttggctttggacgtggatcggatcaagaaagaccaggaagaagaggaggaccagggccctccatgtcccagactctccagagagctgctggaagtggtggagccagaagtgctgcaggatagccttgatcgttgttactccaccccgagttcgtgcctagagcagccagattcgtgccagccatatgggtcctctttctatgctctggaggagaagcacgtaggctttagcctcgatgtgggtgagatcgagaagaaggggaagggaaagaagagaagagggcgtagatcatag

SEQ ID NO: 126165 - DNA, 753 bp, synthetic construct
  misc_feature 1..753: note = Description of Artificial Sequence: Synthetic coding sequence
  source 1..753: mol_type = other DNA
gaaattgaaaagtatcaagaagtggaggaggatcaggatccatcctgtccaagactgtcgcgtgagctcctagatgagaaagagcctgaggtgctgcaggatagccttggccggtgttatagcactccgagcgggtacttggaattaccagatctcgggcagccttacagcagcgccgtctactccctcgaagaacagtatctaggactagccctggacgttgatagaatcaagaaagatcaggaagaggaagaagaccagggaccgccttgtccgaggctatccagagagcttctcgaagtggtggagcctgaagtcctacaagacagtctggataggtgctattccactccttctagctgtctggaacagcctgattcctgccagccatatggctcctccttctatgctctggaagaaaagcatgtaggatttagcctggacgtaggcgagattgagaagaaggggaagggcaagaagaggagagggcgccgatccaaaaaagagcgtcgcaggggacgcaaggaaggagaggaagaccagaatccaccttgcccccgcttgagtggagaattgttggacgagaaggagccggaggtcctgcaggagtccctcgacagatgctactccaccccctctggatgtctggagttaactgatagctgccagccatatcgatcagctttttatatattggaacagcaaagggtgggcctagccgtggatatggatggagaatatttgtccatgtag

SEQ ID NO: 126166 - DNA, 1539 bp, synthetic construct
  misc_feature 1..1539: note = Description of Artificial Sequence: Synthetic coding sequence
  source 1..1539: mol_type = other DNA
tgatatgaggaatgtaaggatctgattaagtcgatgttaaggaatgagaggcagtttaaggaggagaaactggccgaacagttaaaacaagccgaggaactacggcagtacaaggtgctggtccacgcacaggagagagagctgacccagcttagggaaaagttacgggaggggcgggacgctagcaggagtctcaacgaacatctgcaagccctgctgactcctgacgaacctgacaagtcacagggccaggacctccaggaacagctggctgagggctgcagactcgcacagcatcttgtacaaaagctctcacctgagaatgacaatgacgatgacgaagacgtccaggtcgaggtggcggaaaaagtgcagaaaagtagtgctccgcgcgaaatgcagaaagctgaggagaaggaagtgcccgaagatagcttagaagagtgtgcaattacatgttcaaacagccatgggccttacgatagtaaccagccgcatcgaaaaacaaaaatcacttttgaagaggataaggttgacagtaccctaattggctcaagcagtcacgtggagtgggaagatgctgtgcatatcatcccagagaacgaaagcgacgacgaggaggaggaagagaaggggcccgtcagtccgcgcaatcttcaggagtcggaagaggaagaagtgccccaagaatcttgggacgagggatacagcacattgtctatcccacctgaaatgttagcttcatataaatcctactcatcaaccttccacagtttggaagaacagcaagtatgtatggctgtagatatcgggcggcacagatgggaccaggtcaagaaagaagatcacgaggctaccggtcctagactgtccagggagctgctggacgagaagggccccgaagtgttgcaggacagtctagatcgatgctactcaacacccagtggctgtctggagctaacagattcctgccaaccctatcggtccgcattctatgttcttgaacagcaacgagtcggcctagctgtcaatatggatgaaattgagaaataccaggaagtggaagaggaccaggacccctcctgcccacggctgtcccgtgaactgcttgatgagaaagaacccgaggtcctgcaagactcactgggaagatgctattctacaccttctggctacctggaattacccgacctcggccagccctactcctcagccgtgtatagtctggaagaacagtatctagggcttgctcttgacgtcgatcgcattaaaaaagatcaagaggaagaagaagatcaaggccctccatgcccccgattgagtcgcgaactgctggaggttgtcgagccagaagtgctgcaggactcccttgaccgctgctactcaactccctcttcctgtctggagcaacctgattcttgtcaaccctatggatcctcattctacgcattggaagaaaaacacgtagggttttccctcgatgtcggggaaatcgagaagaagggaaaaggtaagaagaggaggggccggagaagctag

SEQ ID NO: 126167 - DNA, 1539 bp, synthetic construct
  misc_feature 1..1539: note = Description of Artificial Sequence: Synthetic coding sequence
  source 1..1539: mol_type = other DNA
taatacgaagagtgtaaggatctcatcaaaagcatgttacggaatgagcgccagtttaaagaggagaagcttgctgagcagctaaagcaagcagaagagctacgccagtacaaagtgctagtgcacgcacaggagcgtgaactaactcaactcagggaaaagctgcgggagggtagggacgcaagccgttcccttaatgagcacttgcaggcactgctaaccccagatgaacctgataagtcacagggccaagacttgcaagaacagttggcagagggatgcagattggcccaacatcttgtgcagaaactgagccccgagaacgacaatgatgacgacgaagacgtgcaggtggaggtagccgagaaggtccagaagagtagcgctcctagagagatgcaaaaagcggaagagaaagaggtgcccgaggatagtctagaagagtgtgccattacgtgcagtaactcccacggtccgtacgacagtaatcagccccacaggaagacgaagatcacctttgaggaggataaggttgatagtactctgatcggatcttcaagccacgttgagtgggaagatgctgtgcatataattcctgagaatgaaagcgacgacgaagaggaggaggaaaaggggcctgtgagtcccagaaacctgcaggagagcgaagaggaggaggtaccacaagaatcatgggatgaggggtactccaccctctctataccaccggagatgcttgctagctataaatcttattcaagtaccttccatagcttagaggaacagcaggtgtgtatggcagtcgatataggtagacataggtgggatcaggtaaagaaagaggatcacgaggctacaggccccagactttcccgggagctgcttgatgaaaaggggcccgaggtgcttcaggatagcctggacaggtgttattccacaccctctggttgtttagagctcacagactcctgccaaccttaccgttccgctttctatgtgttggagcagcaaagggtcggtctggccgtaaacatggacgaaatcgagaagtaccaagaggtagaagaggaccaggatccctcctgcccgcgcctatcccgagaactcctagatgaaaaggaacccgaggtgcttcaggacagcctcggccgctgctactctaccccaagcggctacctggagctgccggatctgggccagccctactcttctgccgtgtatagtctcgaggagcagtatctcggactggctctggatgtggaccgcatcaaaaaggaccaggaagaagaagaggaccaaggccctccttgtccaagactgtctcgtgaattgctcgaggtggttgagcccgaggtgttacaggatagtctcgacaggtgctactccacaccttctagctgtctggagcagccggatagttgccagccctacggttctagcttctacgcattggaggagaagcacgtggggtttagcctggacgtcggtgaaatagaaaagaaaggcaaaggcaagaagaggagaggacggcggagctag

SEQ ID NO: 126168 - DNA, 1539 bp, synthetic construct
  misc_feature 1..1539: note = Description of Artificial Sequence: Synthetic coding sequence
  source 1..1539: mol_type = other DNA
tgatacgaagagtgtaaagatctgattaaatcaatgttgcggaacgaaagacagttcaaagaggagaaacttgccgaacaacttaaacaggccgaggagttgcggcaatataaagtgctagtgcatgcgcaggagcgagagcttacccagctgcgtgagaaactgcgtgaaggacgcgacgcctccagatctttgaatgaacaccttcaggccctgcttacacccgatgagcctgacaaatctcagggccaggatctccaggagcaactggcggagggatgcagacttgctcagcacctcgtacaaaagctgtcccccgaaaacgacaatgacgacgacgaggacgtgcaggtggaagtggccgagaaggtacagaaaagttcagcgcctagggaaatgcaaaaagccgaggaaaaggaggtgccagaagatagcttggaggaatgtgctatcacttgtagcaactcccacgggccctacgactccaaccagcctcatcgcaaaacaaagatcacatttgaagaagacaaggtcgactctacgctcatcggctcctcgtcccacgtcgagtgggaggatgcggtgcacattataccggaaaacgaatccgacgacgaagaggaagaggagaaaggacctgtcagccctcggaatctccaagaatctgaggaggaagaagttccccaagaatcctgggatgagggctactccacattatctatccctcccgagatgctggcttcctacaagtcgtactctagcactttccactctctggaggaacagcaggtttgtatggcagtagacatcggtagacataggtgggaccaggtgaagaaagaggaccatgaggccacgggaccgaggttgtcccgggagctgctggacgagaaaggccccgaagtcctacaggactccctggaccggtgctactctactccgtctggatgtcttgagctgaccgattcatgtcagccatacaggagcgctttttatgtgctggagcagcagagggtgggcctcgccgtcaacatggacgagatcgaaaaataccaagaggtggaggaagaccaggacccatcttgccctcgactttccagggaactgctggatgagaaagagcccgaggtgctgcaggactccttgggtcgttgctacagtacccctagcggatacttggagctgcccgatctggggcaaccatattcctcagccgtttattccctggaggagcagtacttgggtctcgccctggatgtcgataggatcaagaaggaccaggaagaggaagaggaccaaggccccccttgtccccggctatcacgcgagctgctggaagtggttgaacccgaggtgttgcaggactccctggatcgatgctactccactcctagcagttgtctggagcagccggactcatgtcagccctatggcagctcattctacgctctggaggagaaacatgttggtttctccctcgacgtgggtgagatagagaaaaagggcaaagggaagaagcgaagggggagaaggagctag

SEQ ID NO: 126169 - DNA, 1539 bp, synthetic construct
  misc_feature 1..1539: note = Description of Artificial Sequence: Synthetic coding sequence
  source 1..1539: mol_type = other DNA
taatacgaggagtgcaaagatctaattaaatccatgctacgcaacgagagacagttcaaggaggagaagctcgccgaacaactcaaacaggccgaggaactccggcaatacaaagtcctagtgcatgcacaggagcgcgaactgacacagttgcgcgaaaagctgagagagggaagagatgcatcacggtcgctcaacgagcatctgcaagcactactgaccccagacgagcccgataaatcccagggtcaggacctccaggagcagctcgctgagggatgcagattagcgcagcacctggtgcagaagttaagccctgaaaacgacaatgatgacgacgaggatgtgcaggtcgaggtagctgaaaaagtgcagaagtcctccgcacctagggaaatgcaaaaggccgaagagaaagaggtgccagaggattccctagaggaatgcgccatcacgtgctctaacagccacgggccctacgattctaatcaaccccataggaagactaagattacctttgaggaagataaagtcgacagtaccctgatcggatcatcgagtcacgtagaatgggaagatgcagtgcatattatccctgagaatgaatcagatgacgaggaggaagaggagaagggccccgtgtcacctcgcaacctgcaggagtcagaggaagaggaggtcccgcaggaaagctgggacgaggggtattccacactctcgatcccccctgaaatgttggcatcctacaagtcttatagctcaacattccatagtctggaagagcagcaagtctgtatggctgtggacattggcagacaccgatgggaccaagtcaaaaaagaagatcatgaggccactggaccacgtctcagtagggagctcctcgatgagaaggggcctgaagtcctgcaggactcactggaccgctgctatagtacaccttctggctgcctcgaacttacagactcatgtcagccctaccgtagcgccttctacgtgcttgagcaacaacgggtcggccttgctgtaaacatggatgaaattgaaaagtaccaagaagtcgaagaagatcaagatcccagctgtccccgactctctcgggagctccttgatgagaaggagcccgaagtgctgcaggattcgttgggcaggtgttattctaccccatctggatacctggaattgcctgacctgggccagccttactcatcagcggtatacagtctcgaggaacaatatctgggcctggccctggacgtggaccggattaagaaggaccaggaggaagaagaggaccagggccctccatgccctcggctcagccgtgaactgttggaggtggtggaacccgaggtgcttcaggactccctagatcgttgttacagcacgcctagcagctgcctagagcagccagattcctgtcagccctacggcagttccttctatgctctggaggagaagcacgtaggtttctctctggacgtgggggaaatagagaagaaaggaaaaggaaagaagcgcagaggacgaagatcctag

SEQ ID NO: 126170 - DNA, 2013 bp, synthetic construct
  misc_feature 1..2013: note = Description of Artificial Sequence: Synthetic coding sequence
  source 1..2013: mol_type = other DNA
atggtggtttctgccgggcccctgtcaagcgaaaaagccgagatgaacatcctggaaattaacgagaagttacggccacaactggcggagaaaaaacagcaatttcgcaacctgaaagaaaaatgcttcctgacacagttagccggcttcctggccaatcgacaaaagaaatataaatacgaggagtgcaaggaccttatcaagttcatgcttcgtaacgagcgacagtttaaagaggagaaactcgccgaacagctcaagcaggcagaggaactgcgccagtacaaagtactcgtgcacgctcaggagagagaactgacccagcttagggagaagttgcgagaagggagggatgcgtccagaagtctgaatgaacacctgcaagctttgcttaccccagacgagccagataaaagtcaagggcaggaccttcaggaacagttagccgagggctgcagactgactcagcacctggtccagaagctcagtccggagaatgacaacgacgacgatgaggacgtccaggtggaggttgccgagaaggttcagaagtcctctgcccccagggaaatgcagaaagctgaggaaaaggaggtgcctgaggattcgctggaagaatgcgccattacatgttcaaactctcacggcccctatgacagcaaccagcctcacaagaaaaccaaaatcacattcgaggaagataaagtcgactccactctgatcggaagctctagtcatgtggaatgggaagatgccgttcatattatacccgaaaatgagtcagacgacgaagaagaagaagagaagggccccgtaagcccgcggaatttgcaggaatcagaggaagaggaggtgccccaggagagctgggatgaaggatactcaacactgtccatccctcccgaaatgctggcttcttatcaatcgtactcttctacttttcacagcctcgaggagcagcaggtctgtatggccgtagacatcgggagacatagatgggaccaagtaaaaaaagaagatcaggaggcaaccggccccagactctccagagagctgctggacgaaaaggagccagaagtcctccaagacagtttggatcggtgctatagtacaccgagcggatgcctcgagctgaccgatagctgtcagccataccgatccgctttttacgtcctcgagcagcaacgggttggacttgccatagatatggacgaaatcgaaaaataccaggaggtcgaggaggaccaggacccctcctgtccccgcctctcacgcgaattgctggacgagaaggagccggaggtgctccaggactccctggatcggtgttacagtactccctctgactatctcgagctgccagatcttggccagccatacagctccgccgtgtactccctggaagaacagtacctgggactagcactggatgtagataggatcaaaaaagaccaagaggaggaagaggatcagggaccaccgtgcccacgtctgagtagggaattgcttgaagtggttgagcctgaggtgctgcaggattctctcgaccgatgctattcaacaccctcttcctgcctggaacagccggattcctgtcagccttatggatccagcttctacgcactggaagagaaacacgtgggcttctccctggacgtgggcgagatcgagaagaaaggcaaggggaaaaagcgccgggggaggagatccaagaaaaagcggagaagaggaagaaaagaaggcgaagacgacaacccgccttgccctaggctatacggagtgctaatggaagtggaagaaccggaggttttgcaagacagtttggatcgttgttattccaccccttccatgtactttgagcagcccgactcctttcagcactaccgctctgttttctactcctttgaggaagagcatattagttttgcgctctatgtggacaatcgcttcttcactctaactgtcacctcactacatctcgtattccagatgggggtgatctttccacagtag

SEQ ID NO: 126171 - DNA, 2013 bp, synthetic construct
  misc_feature 1..2013: note = Description of Artificial Sequence: Synthetic coding sequence
  source 1..2013: mol_type = other DNA
atggttgtctcagccggcccattatcatctgagaaggctgaaatgaatatcctggaaatcaacgagaagttaaggccacagctggctgaaaagaagcagcagttccgcaatctgaaggaaaaatgcttcctgacacagctggctgggtttttggcaaataggcagaaaaaatacaagtacgaagaatgcaaagatctcatcaagttcatgctgcgaaatgagcgacagttcaaagaggagaaattggccgaacagctcaaacaggccgaggagcttcggcagtataaagtgctggtccacgcacaggaacgcgaattgacccagcttcgcgagaaacttcgagagggaagggacgcctccaggtcactcaacgaacatttacaggcattactgacacctgatgaacccgacaagtcacagggccaggatctgcaagagcagcttgccgagggttgcaggctgacgcaacacttggttcagaaactttcccctgagaacgacaatgatgatgacgaagacgtccaggtggaagtcgctgagaaggttcagaagtcttcggccccacgagagatgcagaaggccgaagagaaagaagtcccagaagacagtctggaagagtgtgccatcacatgcagcaacagccacgggccctacgattcaaatcaacctcacaaaaaaacaaagatcacctttgaggaagataaggtagacagcactctgatcggatctagttcccacgtggaatgggaggacgcagttcatattatccctgagaatgaaagcgatgacgaagaagaggaggagaagggacctgtttcaccacggaatctccaagagagcgaagaggaggaagtaccgcaggaatcctgggacgaaggctattccactctatctattccacccgaaatgctagcttcttatcagagttactcatcaacgttccattctcttgaagagcaacaagtgtgtatggccgtcgatatcggtagacacagatgggaccaggtaaagaaggaagaccaggaggcgacagggccacgactgagccgtgaactgttagacgagaaggagccagaagtccttcaggactcccttgaccgctgctactccactccctccgggtgcttagaactgacagactcttgtcagccttacaggtccgcattctacgttttggagcagcagcgtgtcggactggccatcgacatggatgagattgagaagtaccaagaagtggaggaagatcaggacccaagttgtccccgcttatccagagaactcctggacgagaaagagcctgaggtcctccaagactcactggacaggtgctacagcactccctccgactaccttgaattgccagatctcggacagccatatagctcggctgtttactctctagaggagcaatacctagggttagccttggatgtggacagaattaagaaagaccaagaggaggaagaggaccagggacctccctgccctaggctctcacgagaactgctggaggtggtggagcccgaggtgttgcaagatagtctcgatagatgctattcaaccccaagctcatgcctggaacagcccgactcttgtcagccgtacggatcctcattttacgcattggaagaaaagcatgtaggattcagcctcgatgtgggcgagatcgagaagaagggaaagggcaagaaaaggagaggccgcagaagtaaaaagaagcgcaggaggggtaggaaagaaggcgaggatgataatccgccctgccccaggctgtatggtgtattgatggaggtggaggagccagaagtgctacaggattctttagaccgctgctactccacaccttccatgtacttcgaacaacctgactccttccagcattaccggtcggtgttttactctttcgaagaggagcacatttccttcgccctgtacgttgataaccgcttcttcaccttgacggttacctccctgcacctggtgtttcagatgggagtaatatttcctcaatag

SEQ ID NO: 126172 - DNA, 2013 bp, synthetic construct
  misc_feature 1..2013: note = Description of Artificial Sequence: Synthetic coding sequence
  source 1..2013: mol_type = other DNA
atggtcgtctccgccggtcctttatcatctgaaaaggccgagatgaacatccttgagattaacgaaaagctgcggccccaactcgccgagaagaaacagcagtttcggaatttgaaagagaagtgtttcctcacgcagctcgccggctttttggccaaccgtcagaagaaatacaaatacgaggagtgtaaggacctgattaaatttatgttgaggaatgagagacagtttaaggaggagaagctggcggagcagcttaagcaagctgaagagttgaggcaatataaggtactcgtgcacgcccaggagcgtgagctaacacagctcagagagaagctacgcgagggcagagacgctagccgatcccttaatgagcatctgcaagcactgttaaccccggacgaaccggacaagagccaggggcaggatttacaggaacagctggctgaagggtgccgtcttacacagcatctagtccagaagctgtcgcccgaaaacgataacgacgacgacgaggatgtgcaggtggaagttgccgaaaaggttcagaaatcaagtgcacctagagagatgcagaaggcggaagaaaaggaggtgcctgaagattccctagaagaatgcgccataacctgttctaattcacacggcccttacgactctaaccaaccccacaagaagacaaagattacattcgaggaggataaggtggactcaacgcttataggttcctcgagccacgtggagtgggaggacgccgtgcacataattcctgagaatgagagtgatgacgaggaagaggaggagaagggcccagtgagccctaggaatcttcaggagtcagaggaggaggaggtcccacaggaatcctgggacgagggatactctacacttagcataccgcccgagatgctagcctcataccagtcctactctagcacattccatagtctggaggaacagcaggtttgtatggctgtggatatcggccggcatcggtgggatcaggtaaaaaaagaggatcaggaagccacgggaccaaggttgtcccgggagctgttggacgaaaaggagcctgaagttctgcaggactcattagaccgttgttacagtaccccttccggctgtctggagttgacagacagttgtcagccttacaggagcgcattttatgtcctcgagcagcagcgcgtagggctagcaatcgatatggatgagatcgagaaataccaggaggtggaggaggaccaggatcccagttgtcccaggctaagccgagagctgttagacgaaaaggagccggaagtacttcaagattcactcgacagatgctacagtaccccttctgattatctggaattgcccgatcttggtcagccttacagctcggccgtgtactctctcgaggagcaatacctgggtcttgccctagatgttgatcgtatcaagaaggatcaggaagaagaggaggatcagggccccccatgccctagactttcccgggagctgctggaggtcgtggaaccagaagtccttcaggatagtctggataggtattattccaccccaagcagttgtttagaacagcccgattcttgtcagccttatggatcttcgttctatgcattagaggagaagcatgtgggctttagcctggatgtgggcgaaatcgagaagaagggtaaaggaaaaaagaggcgtggacgccgcagcaagaaaaagaggcggagaggcaggaaagaaggtgaggatgacaatcccccttgtccgaggctgaacggtgtgctcatggaagtggaagagccggaagttctccaggattcactcgacaggtgctatagcactcagtcaatgtactttgagctaccggacagcttccagcactatagaagtgttttctattctttcgaagaggaacatatttctttcgccctctacgtcgataatcgttttttcactctgactgtcacatccctccatctcgtgtttcagatgggtgtgattttcccccagtag

SEQ ID NO: 126173 - DNA, 2013 bp, synthetic construct
  misc_feature 1..2013: note = Description of Artificial Sequence: Synthetic coding sequence
  source 1..2013: mol_type = other DNA
atggtggtctcagcgggcccactttcgagtgagaaggctgagatgaacattttggagatcaatgagaaactgaggccacagttggccgaaaagaaacagcagtttcgcaacctgaaggaaaaatgtttcctcacccagcttgcaggatttttggccaatcggcagaagaaatataagtatgaagagtgtaaagacctgataaaattcatgctccgcaacgaacgccagttcaaagaggaaaagctcgccgagcaacttaaacaggcagaggagctgaggcagtataaagtgctcgtgcatgcccaggaaagggagctgacacagcttcgggagaagcttcgcgaaggtcgtgatgctagtaggtcacttaatgagcatctgcaggcactcttgacgcccgatgagcctgacaagagtcaaggccaggacttacaggaacagttggcggagggttgcagattaacccaacatttagtccagaaactaagtccagagaacgataacgatgacgatgaggatgtgcaggtagaggtcgctgaaaaggtgcagaagtcatctgctcccagagaaatgcagaaagccgaggagaaagaagtcccagaggacagcctggaagaatgtgcgatcacttgtagcaactcacacggcccgtacgactctaaccagccccacaaaaagaccaagatcaccttcgaggaggacaaagtggactcaaccttgattggcagcagtagtcatgttgagtgggaggatgccgtgcacatcatcccagaaaatgagagcgatgatgaagaggaggaggagaagggcccagtgagtcccagaaatctgcaggaaagcgaagaggaagaggtcccccaggagagttgggatgaaggatattctaccctgtcaataccacctgagatgttggcctcttatcaatcatacagttccactttccattctctggaggaacaacaagtttgtatggccgtcgatatcggcaggcaccgttgggaccaagtgaagaaggaagaccaggaagccacaggcccaagacttagccgcgagcttcttgacgagaaggagcccgaggtcctgcaagactccctagacaggtgctattccactccatctggctgccttgaacttacagattcctgccagccctatcggagcgccttttacgtgctcgagcaacagagagtggggctcgccattgacatggacgagattgagaagtaccaagaagtcgaggaagaccaagacccaagctgccccagactatccagggagcttctggacgagaaggaacctgaggtactacaagacagcctggatcggtgctatagtacaccttcagattacttggaactacctgatctgggccaaccatactctagtgcggtgtactccctggaagaacaatatttgggactcgccctggatgttgaccggatcaagaaggaccaggaagaggaggaagaccagggccccccttgtcctaggctgtcccgagagctgctagaagtggtcgagcccgaagtactccaggacagtttggatcggtactacagcacgcctagctcgtgtctggaacagcctgactcctgtcaaccctacggatcctccttttacgccctggaagagaaacacgtgggcttttcactcgacgtgggcgagattgagaaaaagggcaagggaaaaaaacgccgcgggcgtaggtcgaagaagaaacgtagacggggacgcaaggagggagaggacgacaaccctccttgtcctcgccttaacggtgttctgatggaggtcgaagaaccggaggtgctgcaggactccctggaccgttgctactcaacacagtccatgtattttgagttgccggactcattccagcattatagatccgttttctactcatttgaggaagagcacattagttttgcgctgtacgtcgacaatcgatttttcactcttaccgtgacctcccttcatctggtattccagatgggcgtcatcttccctcaatag

SEQ ID NO: 126174 - DNA, 2526 bp, synthetic construct
  misc_feature 1..2526: note = Description of Artificial Sequence: Synthetic coding sequence
  source 1..2526: mol_type = other DNA
atggtggtatccgcgggcccctggtcaagcgagaaagccgagatgaacatactcgaaattaacgagaaactccgaccacagcttgctgaaaacaaacaacaattcggtaatcttaaagaaagatgttttgtgacccagcttgcgggctttcttgcaaaccagcagaaaaaatacaactacgaggaatgtaaggacctaattaagttcatgctgcgcaacgagcggcagttcaaagaggagaagctggcggaacagctcaaacaggctgaagagctgcgacagtacaaggtgttagttcatagtcaggagcgcgaactaacccaacttagggagaagctcagggagggccgagatgcaagccgctcacttaacgaacatctgcaggcgctgcttactttggatgaacctgataaatctcagggccaagacctccaggagcagcttgctgagggatgcagactcgctcagcatctggtgcagaagctgtctcctgagaatgacgaagatgaggatgaggacgtgcaggtcgaggaggctgagaaggtccaaaaatcctctgcccctagggaagtccagaaaacagaagagtctaaggtcccagaagacagcctcgaagagtgcgcaattacttgctccaattcacacggaccatgtgactctaatcaaccccacaaaaacattaagattactttcgaggaagatgaggtgaattctacattggtggtcgatagagaatcaagtcacgatgaatgccaagatgcactgaatattctccccgttcccggccccacatcatctgctacgaatgtaagcatggtagtgtcggctgggccactgagctcagagaaagcggagatgaatatcctggagatcaacgagaagctgcatcctcaactggcagagaagaagcaacagttccgcaatttgaaagaacgttgttttgtgacccagttagctggtttcttggccaaccagcagaagaaatacaagtacgaagagtgtaaggacctgattaagtccatgctccggaacgagcggcagttcaaagaagagaagttagccgagcaacttaagcaggcagaagaactccgccagtacaaggttctagttcacgcgcaggagagggaattgacccagctgagagaaaaactgagggagggtagagacgcgtctcgatctcttaatgaacaccttcaggccctgcttacaccggacgagcccgacaagagtcaaggccaggacctccaggaacagctggcagaggggtgccgtctcgctcagcacctagtccagaagctcagccctgaaaacgataacgacgacgacgaggacgtgcaggttgaactagctgagaaggttcagaagtcttctgctccacgggagatgcagaaggctgaagagaaagaggtccccgaagatagccaagaagagtgcgccattacatactctaactcacacggtccatatgactcgaaccaacctcaccgcaagaccaaaatcaccttcgaggaggataaagtagatagcaccttgatcggcagctcctcccacgtagagtgggaggatgctgtccatattatacctgagaatgaaagtgacgacgaagaggaggaagagaagggcccggtgagtccacggaatttacaagaaagcgaggaagaggaagtcccgcaggagagttgggatgagggctattcaactctgagtatccctcctgagatgctggcaagttaccaaagttattctagcacctttcactcgctggaggagcagcaggtctgcatggcagtggacattggcagacatcgatgggaccaggtaaagaaagaagatcaggaagctaccggacctcgcttgtcacgcgaactcttggatgagaaaggacctgaggtgctgcaggactcactagatcgttgctattccacccctagcggctgcctggagctcacagatagttgccagccatatcgctcagccttttacgtcctggagcagcaacgagttggtttggcagtggacatggatgagatcgaaaaatatcaggaagtggaggaggaccaggacccttcctgtccccgtctcagcagagagctcctggatgaaaaggaaccagaggtgctgcaagactcattggatcgctgctatagcactccttctgggtatctcgagctcccagatttggggcagccctatagcagtgcggtctacagcctcgaagaacagtatctcggactggctctcgatgtcgaccgtactaaaaaagatcaggaggaggaggaggaccagggccccccatgccctcggttgagccgggagctgctggaagtggtcgaaccggaggtgttgcaggattctttggatcgatgctattctaccccatcgtcctgtctggagcagccagactcatgtcagccttatgggtctagtttttacgccctcgaggagaaacatgtgggcttttctctggacgtaggtgagatcgagaagaaaggaaagggcaagaagaggcggggcaggcggtcttag

SEQ ID NO: 126175 - DNA, 13866 bp, synthetic construct
  misc_feature 1..13866: note = Description of Artificial Sequence: Synthetic coding sequence
  source 1..13866: mol_type = other DNA
atggtcgtttcagctggaccttggagcagcgaaaaagccgagatgaacattttggagattaacgaaaagctgagacctcagttagccgagaacaaacagcagttcggtaacctgaaagaaagatgttttgtgacacagctggcaggattcttggctaaccagcagaagaaatataattatgaagagtgtaaggacctgatcaaattcatgctccgaaacgagcgtcagttcaaagaggaaaaacttgcggagcagttaaagcaggctgaggaattgaggcagtacaaggttcttgtccactcccaggagagggaactgacccagctgcgggagaaactccgggagggtagagacgcctcccgttccctgaacgagcatctgcaggcactgctcacgcttgacgagccggacaagtcccagggccaggatctacaggagcaactcgcagagggctgtcgactcgctcagcatctggtacagaagctaagccccgaaaacgacgaagatgaagatgaagatgtgcaggtggaagaggctgagaaggtccaaaagtcatccgcccctagagaagtccagaaaaccgaggaaagcaaagtgccagaagactcgctcgaagagtgcgccataacctgttctaactctcacggaccgtgtgatagcaaccagccccacaaaaatatcaaaatcacattcgaagaggacgaggtcaactccactctggtggtggaccgtgaaagctcacacgacgaatgtcaggacgcacttaatatcctaccagtgcctggccctacctcctcggccaccaatgtctcaatggtagtttctgcaggtccgctgagcagcgaaaaggccgagatgaatattctcgaaatcaacgagaagttgcacccccagctcgcagaaaagaagcaacaatttaggaacctcaaagaacgctgctttgtgacccagctggcgggctttttggccaaccaacaaaagaagtataagtatgaggaatgcaaagacctgataaaatctatgctgcggaacgagcgccagttcaaagaggaaaaacttgcagaacagctgaaacaagccgaagagctcaggcagtacaaggtgctggttcatgctcaggaaagagagttgacccaactcagggaaaagttacgcgagggaagggatgctagcagaagcctcaatgagcacctgcaggcactgctcaccccagacgaaccagacaagtctcagggtcaggacctgcaggaacagctggcagagggctgtcgcctggcacaacatctcgtccagaagctgtcgcctgagaacgacaatgatgatgacgaggacgtgcaggtggagctggcagaaaaggtgcagaaatcttctgctccacgtgagatgcaaaaggccgaggagaaagaagtccctgaagacagccaggaggaatgcgcgataacatactcaaattcacatggaccatacgatagtaaccagccacataggaaaaccaagatcacctttgaagaggataaggtggacagtacgctaatcggctcatcatctcacgtggaatgggaagatgccgtccatatcatccccgaaaatgagagtgacgacgaggaggaggaagaaaaaggtcccgtgtccccaaggaacctacaggaaagcgaagaggaggaggttccacaagagtcatgggatgagggttactctactctgtccattcctcctgagatgctggcatcttatcagtcttattcttctaccttccactctctcgaagagcagcaggtgtgtatggcggtcgacataggtcggcaccgatgggatcaggtcaaaaaggaagatcaagaagcgaccggtccaaggctctcccgggagctgcttgacgaaaagggtcccgaggttctgcaggatagtctggatcgatgttactccacacctagtgggtgtcttgaattaactgactcctgtcagccgtaccgctctgcgttttatgtgctcgagcagcagcgcattggtctagctgtggacatggacgaaattgaaaagtaccaagaagtggaggaggaccaggatccatcgtgccctcgcctgagccgggagctgctggacgagaaggagcccgaagtcctgcaggactctctggatagatgctactccactccatcaggatacttagaattgccagatctaggacagccatattcttctgcagtttattcactggaagagcaatatcttgggttggcactagatgtagacaggactaaaaaagatcaggaagaggaggaggatcagggtccaccctgccccagactgagtagggaattactcgaggtggtcgagcctgaggttttgcaggactcccttgaccgttgctattccaccccctctagttgccttgaacagcctgactcgtgtcagccgtatgggtccagcttttacgccctggaagaaaagcacgtggggttcagccttgatgtgggggagatagagaagaaaggcaagggaaaaaaaaggcgcggcagacggtctaagaaggagaggcggaggggaaggaaggagggggaggaagaccaaaacccaccatgcccaaggcttagtagggaactactggacgaaaagggcccagaggtgctgcaggattctctggaccgcagctacagcacacccagcggatgcttagagctaaccgatagttgtcaaccttacaggagcgctttctatgtcctggaacagcagagggtggggctggctgtggacatggacgagattgaaaagtaccaggaggtagaggaagatcaggatcctagctgtccgagactgtctcgtgaattacttgatgaaaaggaacccgaggtcctgcaagattccctcgaccgttgttactctacgcccagcggatatctggaactgcctgatcttggccaaccctattccagtgcagtatatagcctggaagaacagtatctgggcctggcactcgacgtagatcgtactaagaaagatcaagaagaggaggaagaccagggcccgccttgtccccggctgtcacgggagctgcttgaagtagtggagcccgaagtccttcaggactcattagacagatgttattcaaccccttcctcttgcctggagcaacccgacagttgtcagccctacgggtcgagtttttatgctctggaagaaaagcacgtgggattttccttggatgtgggggagattgagaagaaaggcaaaggcaagaagaggaggggtagacgaagcaaaaaagagcggcgccgaggccgcaaagaaggtgaggaagaccaaaatcctccctgtcctcgactgtcaagagagcttctagatgagaaggggcccgaggttctccaggatagcctcgatcggtgttattccaccccttccggttgtttggaacttaccgattcatgccagccataccgcagcgccttctacgtactggaacagcagcgagtcggactggcagtcgacatggacgagatagaaaagtaccaagaggtggaggaggaccaagacccatcatgccctcggctatcgagggaactgttagacgaaaaagagcccgaagttctacaggacagcctggaccgatgctactccacaccatctgggtatctggaattacccgacctgggacaaccgtattcaagtgccgtttactccctggaggagcagtacttaggtctcgcactggatgtcgacagaactaagaaggaccaggaagaagaagaggatcagggccccccatgtcctaggctttcaagagagctgctggaggtggtggagcctgaggtgctgcaagattctctggataggtgttatagcaccccttcatcttgcctggagcaacctgactcctgtcagccatacgggtcaagtttctacgcactggaggagaaacacgtgggtttcagcttggatgtgggagaaatcgaaaagaaggggaaggggaagaagcggagggggaggagaagtaaaaaggaaaggcggcggggccgaaaggagggggaagaggaccagaatcctccatgtcctagactatcccgggagctcttggatgagaaggggccggaggtgttgcaggacagtttggaccggtcgtactctaccccatcgggctgcttagaactgactgattcttgtcagccttataggagcgctttctacgtattagaacagcagcgggtgggtttagccgtggacatggatgaaatcgaaaaataccaggaagttgaagaagatcaggacccaagctgccctagactgagtagggaacttctggacgaaaaagagccagaggtattacaggatagtctagatcgttgttattccacgcccagcggctacctggaattgcctgatttgggacaaccctatagttcagccgtgtattctctcgaagagcagtacctgggtttagctctggatgtcgaccgtaccaagaaagatcaggaagaggaagaggatcaggggcccccttgtccaaggttaagcagagagttgctcgaagtggtagagccggaggttctgcaggactctctcgacagatgttactccacgccctctagctgccttgaacaacctgacagctgtcagccctacggcagctctttctatgcacttgaggagaagcacgtagggttctctctggatgtgggcgaaatcgaaaaaaaagggaagggcaagaagagacgcggccggagatcaaagaaggaacgccggagagggaggaaggaaggagaagaagaccagaaccctccttgcccaagactgtctagagaactactagatgaaaagggcccagaggtgctgcaggactcactcgatagatgctactctacaccctccggttgcctggagttaaccgatagctgtcagccatatcggagtgccttttacgtgctggagcagcagcgggtcggactcgctgttgatatggatgaaattgagaagtatcaggaagttgaggaagaccaggatccttcttgcccccgcctgagtagagagctgttagatgagaaggagcctgaagtgctgcaggacagtctcgatcgctgttactctacgccctccgggtacctcgaattgcctgatctaggtcagccatacagtagcgctgtgtatagcttggaggaacagtatttgggtctcgccctcgacgttgataggaccaaaaaagaccaagaggaggaggaagatcaaggccccccgtgtccccgactttctcgcgagctcctggaggtggtggaacctgaagtgctgcaggatagcctggacaggtgttactcgacaccatctagctgcctggagcagcccgatagttgtcagccctatggatctagtttctatgccttggaggagaagcacgtgggcttctccctggatgtgggcgaaatcgaaaaaaaggggaaaggcaaaaagaggcgaggccgccggagtaaaaaagagcggcgccgaggacggaaggagggggaggaagaccaaaatcccccttgtccaaggctgtctagagagctgctcgatgagaaagggcctgaagtgctccaagactccctggaccggtcctactcaaccccgagcggatgcctcgaactgactgacagctgtcaaccctacaggtcggccttctatgtgctggaacagcagagggtgggcctggccgtcgatatggacgaaattgagaaatatcaggaagtggaggaagaccaagatccttcttgcccccgactaagtcgggagttgcttgacgaaaaggaaccagaagtgctgcaggatagtttggaccgctgttacagcaccccatccggctatctcgaactaccagacctgggccagccctactcaagcgcagtatattcactggaggagcagtacctcggactggctttagacgtggaccgtacgaaaaaagaccaggaggaagaagaggaccaggggcccccatgcccgagactgtcccgggaactattggaagtggtggaacccgaagtccttcaggacagtcttgatcgatgctacagcacgccttcttcatgtttagaacagcctgactcttgtcagccatacgggtcgagcttctacgccctggaagaaaaacatgtcggcttttcgttggacgtgggagagatcgaaaagaagggcaagggcaaaaagcgtagggggaggaggtcaaaaaaggagagacggcgcggacgcaaggagggtgaagaggaccagaaccctccatgcccccgcctctcccgggagctcctcgatgagaaaggtcccgaggtcctgcaggatagcctcgaccggtcatatagcacaccttccgggtgtctagaactcactgactcctgccagccgtacaggtctgctttctacgttttggagcagcaaagagtcggcctggctgttgacatggacgagatcgagaaataccaggaagttgaagaggaccaggacccatcgtgtccccggttgtcccgggaactgctagatgaaaaggagccggaagtgctacaagacagccttgatcggtgttactctacccctagcggctatcttgagctacccgacctcgggcaaccttacagctctgccgtttatagcctcgaagagcagtatttaggtctggccctggacgtggatcgtacgaaaaaggaccaagaagaagaggaagatcaaggccccccttgtccccgtctcagccgcgaactcttggaggttgtggaaccagaggtattacaggacagcttggacagatgttactcgacgcccagcagctgcctcgagcagcctgatagctgtcagccgtatgggagtagtttctatgcactggaggaaaaacatgtcggcttctcattggatgtcggcgaaatcgaaaaaaaaggcaagggaaagaagagacgcggccgccgcagcaaaaaggagaggcggagaggtcggaaagaaggagaggaggaccagaacccaccgtgtcccagattgtctagagaacttctagatgagaagggaccggaggtgctgcaagatagcctggacaggagttactcaacacctagtggatgtctggaactaaccgacagctgccagccataccgcagcgccttctatgtcctggaacaacagagagtgggattggcagtcgacatggacgagattgaaaagtaccaggaagttgaagaggatcaggatccgagttgtccccggctgagtcgcgagctgctcgatgagaaggagcccgaggtccttcaggacagcctggaccggtgctacagtacaccctcgggctatcttgaattgccagacttgggacagccgtatagctcggccgtgtattcgctcgaagaacaatatctgggcctcgccctcgatgtggatagaactaagaaggaccaggaggaggaagaagaccaaggaccgccctgccccaggttgagtcgcgagctgttggaggtcgtcgaaccagaagtgctgcaagattcactcgatagatgctacagcactccctcctcctgcctggagcagccagactcttgtcaaccgtatggcagcagtttctacgccctggaggagaaacacgtggggttcagtctggatgtgggtgaaatcgagaagaaagggaagggaaagaagcgacggggccgaaggagtaaaaaggagcggcgacgtgggcggaaagaaggggaggaagaccagaatcccccatgtccccggctgtccagagaactcctggacgagaaaggccctgaggtgctgcaggacagcttggacaggtcgtacagcaccccctcaggctgcctggaacttaccgacagttgtcagccctaccggagcgctttctacgtgctcgagcagcagagggtgggcctggctgtcgacatggacgaaattgaaaaataccaggaggtggaagaggatcaggatccctcctgcccacggttgagcagagagctcctcgacgaaaaggagcccgaggtgttacaggacagcttggatcggtgttatagcacaccttctggctacctcgagctgcccgatcttggccagccttactccagcgccgtatacagtctagaagagcagtacctcggtctcgccttggatgtagacagaacaaagaaagaccaagaggaggaagaggatcagggacctccgtgcccaaggctctcacgcgagctgcttgaagtagttgaaccggaggtcctccaggacagtctggaccgatgttactcgactccatcttcatgtctagagcaacctgacagttgccagccctacggctcctctttttacgcactcgaagagaagcacgtggggtttagtttagatgttggcgagattgaaaaaaagggtaagggtaagaagcggagaggccgccgatcaaagaaggagcgtagacgggggcgtaaggagggagaggaagaccagaatccgccctgccctagactctctcgagagctactcgatgaaaaagagccagaggtactgcaggactcactagatcggtgctatagcaccccttcaggctatctcgagcttcccgatctcggccaaccctatagctcggccgtgtactcactcgaagagcaatatcttgggcttgctttggacgtggatcggacaaagaaagatcaggaagaggaggaggaccaggggcctccatgcccaaggctctcacgggagcttcttgaggtcgtggagccagaggtcctccaagacagtctggacaggtgctattccaccccctcttcttgtctggagcaacccgacagttgtcagccctatgggtcctcattctatgctctggaagagaagcatgttggcttcagtctggacgtcggcgagattgagaagaaaggcaagggaaaaaagaggcgcggcagacgctccaagaaggagcggcgaagaggacgcaaggagggggaagaagatcagaaccctccctgtcccaggctgtcaagagagctcctggatgaaaaagagccagaagttctgcaggactctctcgaccgatgctattcaacacccagcggatatttggagttaccagatctgggtcagccgtattcctctgctgtatacagtctcgaggaacaatacctaggcttagccctagacgtagacaggactaagaaagaccaggaggaggaggaagaccagggacccccatgtcctagactgagtcgtgaactgttggaagtggtcgaacccgaagttttgcaggacagcctcgacagatgctacagtaccccgtcttcctgcctggagcaacccgatagttgccagccttatggtagtagcttttatgccctggaggagaagcacgtgggcttttctcttgacgtaggagaaatcgaaaagaagggcaaggggaaaaaaaggaggggacgacggagcaagaaggagcggcggaggggcaggaaagaaggagaagaagatcagaaccctccctgtcctcggttgtctcgcgagttgttggacgagaaggagcccgaagttcttcaggactcgttggaccggtgttattctacgccttctggttacctggagctgccagatctggggcaaccttattcaagcgcagtgtattcactcgaggagcagtaccttgggctggccttagatgtggacaggacaaagaaagaccaggaggaagaggaagaccagggccccccctgcccacggctttctagggagctgctggaagtggtggaacctgaggtcctgcaggactccctggatcgctgctactccacaccctctagctgtctggagcagcccgacagctgtcagccttatggctctagtttctacgcgctcgaagaaaagcacgtgggcttcagcctcgacgtcggggagatcgaaaaaaaaggcaagggtaaaaagaggagaggacgtcggtctaaaaaggagcgcaggcgggggcgcaaagagggcgaggaagaccagaaccccccttgcccacgcttgtctagggaactgctcgacgagaagggccccgaagtgttgcaggatagccttgacaggtgctattccacaccatccggatgtctggagctaaccgattcttgtcaaccatatagatcagctttttacgtgttggaacaacagcgggttggactggccgtggacatggacgagattgaaaagtaccaggaggtcgaggaagatcaggacccttcatgcccacggttatctagggagctgttagacgagaaggaaccagaggtcctgcaggatagtttagaccgttgttattctactccaagcggctatcttgagctcccagatttggggcagccatactctagcgccgtctattctcttgaggaacaatacctcggcctggcgcttgatgtggaccgaacgaagaaggatcaagaagaagaagaggaccagggtcctccgtgtccccgactgtcacgagaactgctggaagtcgtggagccagaggtcttgcaagattccttggataggtgctattctaccccatcttcttgtctcgaacaacccgatagttgtcaaccctatggatcaagtttttatgcactggaagagaaacacgtaggtttcagcctcgatgtaggagaaatcgagaagaagggtaagggaaaaaaaaggaggggcaggaggtctaaaaaagaacgacggcgcggccgaaaggagggtgaagaggaccagaatcccccttgtcctcgactgagccgggaactgctcgacgaaaaaggccctgaggtgttgcaggactcattagatagatgctacagcacccctagcggatgcctggaactgaccgactcttgtcaaccttataggtctgccttctacgtgttggaacagcagcgcgttggcttggccgtggatatggatgagattgaaaagtaccaggaagtagaggaagatcaggatcccagctgtcccaggctctctcgggagctattggacgaaaaagagccagaagtgttgcaggactccctggacaggtgctactctactccttcaggctacctcgagctgcccgatctgggacagccctattcaagtgcggtttactccctggaggaacagtatctggggttggctctcgatgtggatcggacaaaaaaggatcaggaagaggaggaagatcaagggcctccctgtcctcgactgtcacgcgagctgcttgaagtggtggaacccgaggtcctccaggattcattggaccggtgttattcaactcccagttcctgcttggagcagccagacagttgccagccatacggctcctccttttacgcgttggaggagaaacatgtgggtttctcgctcgacgtcggagagatcgagaaaaaaggcaagggaaaaaaaagaaggggccgccggtccaagaaagagagacggagagggcgcaaagagggagaagaggaccagaatcccccttgtcctcggctttcgcgtgagctcttggatgaaaaaggcccagaggtgctccaggactcactggaccggtgttattctacaccctccggctgtctcgaacttacagattcgtgccaaccatacagatccgccttttacgtgttagagcagcaacgcgttggtctggcagttgatatggatgaaattgaaaagtatcaggaggtggaagaggaccaggacccgtcgtgccccaggttgtcccgggagctgctggacgagaaagagccagaagtactgcaggactcactcgatagatgttactccactccctcaggatacttggagctgcctgatctcggacagccctattcaagtgccgtttactcgctggaagaacaatacttgggccttgccctcgatgtggatcgcaccaaaaaggatcaggaggaggaagaagaccaaggcccaccctgcccccggctgtccagagagctgctggaggtggtcgagcccgaggtcttgcaagatagtcttgatcgatgctactccactccctcatcatgcctggagcagcctgacagttgtcaaccctatgggagtagcttctatgcacttgaagagaaacatgttggattctccttggatgtcggggaaatcgagaagaagggtaaaggaaaaaagaggcgcggacggcgctccaaaaaggagcgcagacggggcagaaaggagggtgaagaggatcagaccccgccctgtcctagactgtccagggagctcttggacgagaagggacctgaggttctacaggattctctagacaggtgttattcaacccctagcggatgcctggagctgacagatagctgccagccctaccgctccgcattttacgtacttgaacagcagcgggtcggcctcgccgttgacatggacgaaatagagaaatatcaggaggttgaggaagatcaggatccaagctgcccacggctttctagggagctactggatgaaaaagagccggaagtcctgcaggatagtctcgatcgttgctattctactccaagcggataccttgagttgcccgacctaggtcaaccctacagcagtgccgtctattcactggaggagcaatacctaggtttagcactggacgtagacagaacaaagaaggatcaggaggaggaagaagaccaagggcctccttgtcccaggctgagtagagagctccttgaggtggtcgaacccgaggtgctgcaggattctctggacagatgctactctaccccttccagctgtctggagcaacccgattcttgccagccgtacgggagctctttttatgcactagaagaaaagcatgtgggctttagcctggacgtcggcgaaatagagaaaaaaggtaaaggcaaaaagcgcagaggaagacggagtaagaaagaaagaagacgggggaggaaagaaggtgaagaagaccagaatccgccctgtcctcggttgtcccgtgagctgttagacgagaagggaccagaggtgctgcaggattcgcttgacagatgttactctacaccatctgggtgcctggaactcacggattcttgtcagccttatcgcagtgctttttacgtgctcgaacagcagagagtcggattagcagtggatatggacgagattgaaaaataccaggaggtggaagaggaccaagacccctcttgcccaagactatctcgggagcttctcgacgaaaaggaacccgaggttctgcaggacagtctggatcgctgctactccacccccagcggctatttggagcttcccgatctgggccaaccgtatagcagtgccgtctattctctcgaggagcagtacttagggctggcactcgacgtcgacaggacaaaaaaggatcaggaggaggaagaggaccagggaccaccctgcccccgtctgtctagggagttgctcgaggtggtcgaacccgaagttctccaagacagccttgacaggtgttacagcacaccctcatcttgcctggagcagcctgattcatgtcagccttatggaagtagtttctatgcccttgaagaaaaacatgtaggcttttctctagacgttggggagatcgagaaaaaaggcaagggcaaaaagcgtagagggcgacgttctaagaaaaagcgaagacggggccgcaaagagggggaagaagaccagaacccaccttgccctcgactgaacggcgttctgatggaggtggaggaacctgaagtgctccaggactccctcgacgggtgctatagcaccccatctatgtacttcgaattgcccgacagctttcaacactatcgatcagtattctactcttttgaggagcagcacatctcttttgctctgtatgtggataataggtttttcaccctcacagttacgtctctccacctcgtattccaaatgggggttattttcccccagtag

SEQ ID NO: 126176 - DNA, 780 bp, synthetic construct
  misc_feature 1..780: note = Description of Artificial Sequence: Synthetic coding sequence
  source 1..780: mol_type = other DNA
atggttgtctctgctgggccctggtccagcgagaaggctgaaatgaacatactggaaatcaacgaaaagttaagaccgcagctggccgaaaataaacagcagtttggtaacctgaaggaacggtgctttgtcacacaactcgcaggttttctcgctaatcagcagaagaagtataattatgaggaatgcaaggatctgatcaagttcatgctccggaatgagaggcaatttaaggaagagaaacttgcagagcagcttaaacaggccgaagaactcaggcagtataaggtgctcgtgcatagtcaggagcgagagctgacacagttacgcgaaaagctgcgcgaggggagagacgcttctagaagcctcaacgaacacctccaggccctcctaacactggacgagcccgataagtctcagggccaggatctgcaagagcagctggctgagggatgtaggctcgcccagcacctggtccagaaactgagtcctgaaaatgatgaggacgaggacgaggacgtgcaggtggaggaggctgagaaggtgcagaaaagcagcgcccctagagaagtccagaaaaccgaagagtctaaggtgcctgaagacagtctggaggaatgcgccattacatgtagcaacagtcatgggccttgcgacagcaaccagccccacaaaaatatcaaaattacctttgaggaagatgaagtcaatagtacactcgtggttgatcgggagagctcccatgatgagtgtcaggatgctctaaacatcttgccctag

SEQ ID NO: 126177 - DNA, 456 bp, synthetic construct
  misc_feature 1..456: note = Description of Artificial Sequence: Synthetic coding sequence
  source 1..456: mol_type = other DNA
ctgtccagagaactcttagaagtcgttgaacctgaagtccttcaggattctttagaccggtgttacagtacccctagttcatgcctagaacagcccgattcatgccagccatacggcagctcattttacgctctcgaagagaagcatgtggggttttccctcgacgtgggcgagattgaaaaaaaggggaagggaaagaaacggagaggaaggaggtccaagaaagagagacgccggggccggaaggaaggagaggaagaccagaccccgccatgccctcgcctctccagggaattgctcgacgaaaaggggcccgaggtgttacaagacagcttggataggtgttattccacccccagcggttgtctagaacttacggactcttgccagccctacaggtcagccttctacgtgttagagcagcagagggtgggcctggctgtagacatggactag

SEQ ID NO: 126178 - DNA, 456 bp, synthetic construct
  misc_feature 1..456: note = Description of Artificial Sequence: Synthetic coding sequence
  source 1..456: mol_type = other DNA
ttgtcccgcgagctcttggaagtggtcgaacccgaggtgctccaggacagccttgatagatgctattccaccccttcgtcgtgcctggaacagccagattcgtgtcagccttacgggtcgagtttctacgcgttggaagagaagcacgtgggtttctcactcgatgtgggcgagattgagaaaaaggggaaaggcaaaaaacgacgcggccgcagatcaaaaaaggaacgccggagaggaaggaaggaaggggaggaggatcagaatcctccctgcccccgcctctctcgggagctcctggacgaaaaaggccccgaagtgctccaggacagcctcgatagatgttactctactccaagcggatgtctggagctcaccgattcttgccagccatacagaagtgctttctatgtgctggagcagcagagggtgggattagccgtggacatggattag

SEQ ID NO: 126179 - DNA, 456 bp, synthetic construct
  misc_feature 1..456: note = Description of Artificial Sequence: Synthetic coding sequence
  source 1..456: mol_type = other DNA
ctctcgcgcgaactgctcgaagtggtcgaacccgaggttctccaggatagcctggacaggtgctacagtaccccctcatcctgtctcgagcaaccggattcttgccagccgtatggatcgagcttctatgcgctcgaggaaaagcatgtcgggttttccttagacgtcggggaaatcgagaagaagggaaaggggaaaaaaaggaggggccgaaggagtaagaaggaacggcggcgcgggaggaaggaaggcgaagaagatcagaatccaccatgcccacggctgtcaagagagcttctggatgaaaaggggcccgaagtgttacaggattcacttgataggagctacagtactcccagtggctgcctggagctcacagacagttgtcaaccgtaccggtctgccttctatgtcctggagcaacaacgtgtcggcctcgccgtggacatggattag

SEQ ID NO: 126180 - DNA, 456 bp, synthetic construct
  misc_feature 1..456: note = Description of Artificial Sequence: Synthetic coding sequence
  source 1..456: mol_type = other DNA
ctttctagagaacttctggaggtggtggagcccgaagtcctgcaggattccctggataggtgctattcgaccccatcctcatgtctggagcagccggatagttgccagccttatggcagctccttttacgctctggaggagaagcatgtaggcttcagcctcgacgtgggcgagatagagaagaagggaaagggaaagaagcgtcggggccggcgttctaaaaaggaacggcgcaggggcaggaaagaaggcgaggaggatcagaacccgccctgtccacggctgagtagagaactgttggacgagaagggccccgaggtgctgcaggattccctcgatagatgctactccactccctcaggatgcctagagcttacggactcttgccagccttatcgctctgctttttacgtcctggaacagcagcgggtcggacttgctgtggatatggattag

SEQ ID NO: 126181 - DNA, 2016 bp, synthetic construct
  misc_feature 1..2016: note = Description of Artificial Sequence: Synthetic coding sequence
  source 1..2016: mol_type = other DNA
atggttgtgtctgccggccccctttctagtgaaaaggccgagatgaatatattagagatcaacgagaagttgcatccacaattagccgagaagaagcagcagtttcggaatctgaaggaacgatgttttgttactcaacttgctggattcctggctaaccaacagaagaagtataagtatgaagagtgcaaggacctcatcaaatcaatgctgcgcaatgaacggcagtttaaagaggaaaaacttgccgaacaactgaaacaagcagaagagctcaggcagtataaagtgctagtgcatgcacaggaacgagagctgacacagctgcgggaaaagctacgggaaggacgggatgccagtcggtcccttaacgagcatcttcaggccctcttgacgcccgacgaacccgacaaatcgcagggtcaggatttacaggagcagctcgctgaggggtgccgcctcgctcagcacctagtacagaaattgtctcctgagaacgacaacgacgacgacgaagacgtgcaggtggagctcgctgagaaagtgcagaagtcgtctgcgcccagggaaatgcagaaggcggaggagaaagaagttccggaggacagccaggaggaatgcgccatcacatattcaaactcgcatgggccatacgactctaatcagccacatagaaagacaaaaattacctttgaggaggacaaagttgactccacactgataggctcttcctcacacgtggaatgggaggatgccgtgcacatcattccggaaaacgagtctgacgacgaagaggaggaggaaaagggacctgtcagcccgcgcaacttgcaggaatcagaagaagaggaagttccccaggaaagttgggatgaaggttatagtacattaagcatcccccctgagatgctggcctcctaccagtcctattcctccacctttcattcactcgaagaacagcaggtatgcatggcagtggatatcggccgacataggtgggaccaggtgaagaaggaggatcaggaagccacaggccctcgtctatccagggaactgttagacgagaaaggcccggaagtgctccaggatagccttgataggtgctatagcacccctagcgggtgcctcgagctcacagatagctgccagccatatcggagcgctttttatgtcctggagcaacagcgggtgggtcttgccgtggacatggatgagatcgaaaagtaccaggaagtggaagaggaccaagatccctcctgcccccgactcagcagagagttgctggacgaaaaggagcctgaggtgctgcaagattcactggatcggtgttattcaactccatcagggtacctggaactccccgatctgggccaaccttactcttcagcggtgtatagccttgaggaacaatatctaggccttgccctggacgtcgaccgaacaaagaaggatcaggaggaagaagaagaccagggacctccatgccctcgcctgtcccgggagctgcttgaggtcgtcgagcctgaggtactgcaggacagcctggaccgttgctacagtaccccatcatcgtgtcttgagcagccggacagctgtcagccctacgggtctagtttctacgctcttgaagagaaacacgtcggtttcagtttggacgttggagaaattgagaagaagggtaaagggaagaaacgccgtggccggcggtcgaaaaaaaagagaaggagaggccgcaaagagggagaggaggaccagaaccccccgtgccctagacttaacggcgtgctgatggaggttgaagagccagaggtattacaggactcattggatggatgttattcaactccaagcatgtactttgagctgcccgattccttccagcactaccggtccgtgttctattcgtttgaggagcagcacataagctttgctctctatgttgataaccggttctttaccttgaccgtcacatccctgcatctggtgtttcaaatgggagtgatctttccacagtag

SEQ ID NO: 126182 - DNA, 474 bp, synthetic construct
  misc_feature 1..474: note = Description of Artificial Sequence: Synthetic coding sequence
  source 1..474: mol_type = other DNA
ctgtccagagagctccttgaggttgtggagcccgaggtgctgcaagattcactcgataggtgctacagcacaccttcctcctgtctagaacagcctgacagctgccagccgtacggctcatccttctacgcattggaggaaaaacatgtagggttctctcttgatgtaggtgaaatagaaaagaaaggaaagggcaaaaaaagaagagggaggcgatccaagaaggagcggaggcggggacgaaaggaaggagaagaagaccagaaccctccttgcccgcgcctttcccgggaactgttggacgagaagggccccgaagtgctgcaggacagtttggaccggtgttattccaccccgtcaggatgcctggaactaactgactcctgccagccctaccgctctgcattttacgtattagagcagcagcgcgtgggcctggccgtcgatatggatggtgagtacctaagcatgtag

SEQ ID NO: 126183 - DNA, 681 bp, synthetic construct
  misc_feature 1..681: note = Description of Artificial Sequence: Synthetic coding sequence
  source 1..681: mol_type = other DNA
ctctctcgtgagctactggaggtggtggaaccggaagttctccaggattccttggatcggtgttattccacgccaagttcctgcttagaacaaccagacagttgtcagccctatggatcgtccttttatgccctcgaggagaaacacgtaggcttttctctggatgtgggagaaattgagaagaagggcaaaggtaagaagaggcgaggacgtagaagtaagaaggagagacggcgggggcgcaaagaaggagaggaagaccagaatccgccctgccctcggctttctcgggaactcctggacgaaaagggccccgaagttctgcaagactccctggatagatgttactcaactccaagcgggtgtcttgagctcacagatagctgccagccctatcgctctgccttctacgtccttgagcaacagagagtaggcctcgcagtagacatggacgagatcgagaagtatcaggaggtagaagaagatcaagatcccagctgcccccggctgtctagagaactgctcgacgagaaagaacccgaggtattgcaggattcgctcgatagatgttactctactccaagcggctacctggagcttcccgatttaggacagccatactcgtctgccgtgtactcactggaggagcagtatctgggccttgcgctggatgtagactag

SEQ ID NO: 126184 - DNA, 810 bp, synthetic construct
  misc_feature 1..810: note = Description of Artificial Sequence: Synthetic coding sequence
  source 1..810: mol_type = other DNA
atggatgaaattgagaaatatcaggaggtcgaagaggatcaggacccctcatgtccccggctgagtagggagctgctggatgaaaaggaaccagaggttctccaagattcccttgaccgctgctactcaacaccatctggctacttggagctgcctgaccttggacaaccatactcctccgccgtgtattccctggaggagcagtacctggggctagcgctggatgtagatcgaacaaagaaagaccaagaggaagaggaagatcagggtcctccctgtccacgattatctagggagctcctggaagtggttgaaccagaggtgctgcaagacagtttggatcgctgctactcaaccccatcatcgtgtttggagcagccagattcatgccaaccctacggctcgtcattctacgccctcgaagagaaacacgtcgggtttagtctggatgtcggtgagatagagaagaagggtaagggcaaaaagaggcgaggccggagaagcaagaagaaaaggcgacgtggtaggaaggagggtgaggaggaccagaacccgccctgccctcggcttaatggcgtgctgatggaggtcgaggaaccagaagttctgcaggactcccttgatggctgctactcaactcctagtatgtacttcgagttgcccgatagcttccagcattatcggagtgtcttttactcctttgaggaacaacacatttcattcgccctctatgtcgataacagattcttcaccctgacggtcaccagcttgcatctagtgttccaaatgggcgtgattttccctcagtag

SEQ ID NO: 126185 - DNA, 474 bp, synthetic construct
  misc_feature 1..474: note = Description of Artificial Sequence: Synthetic coding sequence
  source 1..474: mol_type = other DNA
ctgagtcgcgagttactggaggtggtggagccggaggtgctgcaggacagtctggaccgatgttattcgacgccttcttcctgtctggagcaaccagactcctgtcagccctatggttcttctttttatgcgctggaagaaaagcatgtgggattctctttggacgtgggggaaatcgagaagaaaggaaagggaaaaaagaggcgcggaagaagaagtaagaaggaacggagacgggggagaaaagagggtgaagaagatcagaatcccccgtgccctcgtttaagccgagaattactggatgagaagggcccggaagtactgcaggactccttggaccgatgttattccactccatccggttgtttggaactcactgatagctgccagccctatagatctgcattttatgtgttagagcagcagagagtgggcctggcggtggatatggatggcgagtatcttagtatgtag

SEQ ID NO: 126186 - DNA, 525 bp, synthetic construct
  misc_feature 1..525: note = Description of Artificial Sequence: Synthetic coding sequence
  source 1..525: mol_type = other DNA
cttagccgggaactgctggaggtagtggagccagaggtcttgcaagattcactggaccgatgctacagtaccccaagtagctgtctggaacaaccggattcatgccagccttatggaagcagtttttatgctcttgaggaaaagcacgttggattcagtctggacgtgggagagattgagaagaagggtaagggaaaaaaaaggagagggaggcgttctaagaaaaagagacggagaggaaggaaagagggcgaggaggaccagaatcccccatgtccaaggttaaacggcgtcctcatggaagtcgaggaacctgaagtgctgcaggactccttggatggatgctacagtacgcctagcatgtattttgagctgccagatagttttcagcattaccgtagcgtcttttatagtttcgaggagcagcatatctcatttgctctatatgtcgacaaccggttttttacgctgactgtaacctccctgcacctggtttttcagatgggagtgatcttcccccagtag

SEQ ID NO: 126187 - DNA, 456 bp, synthetic construct
  misc_feature 1..456: note = Description of Artificial Sequence: Synthetic coding sequence
  source 1..456: mol_type = other DNA
ctgtctagggagctgttggaggtcgtggaacctgaagtgctgcaggattccctcgaccgctgttatagcacaccaagttcgtgtcttgaacagccagattcctgtcagccatacggatcttctttttacgccctggaggagaagcacgttgggtttagtcttgatgtgggcgagattgagaaaaaaggaaaaggtaaaaaaagacgggggagacgctcaaaaaaagagcgcagacgcggtaggaaagagggggaggaggatcagaacccaccatgcccaagactaagtcgagagctgctggacgaaaaaggtccagaagttctacaggacagtcttgaccggagttacagcactcctagtggatgcttagagctgacagactcttgccagccctataggtcagcattttacgttctggagcagcagcgcgtcggactggcagttgacatggattag

SEQ ID NO: 126188 - DNA, 759 bp, synthetic construct
  misc_feature 1..759: note = Description of Artificial Sequence: Synthetic coding sequence
  source 1..759: mol_type = other DNA
atggatgaaatcgagaagtaccaggaggtcgaagaggaccaggacccatcctgccccagactgtcacgggaattgctggatgagaaagagccggaagttcttcaggactctctggatcgctgctacagcacgccctcaggctatctggaacttccagaccttgggcaaccttactctagcgcagtgtactctctcgaggaacagtacctcggattagctctcgatgttgaccgtactaagaaggaccaggaggaagaggaagatcagggaccaccatgtcctagactttctcgcgagctattagaggtcgtagaacctgaggtgttacaggatagtctggatcggtgttacagtacacccagtagctgcctagagcagccagatagttgccagccctacggatcttccttctatgcactcgaagagaaacatgtaggtttcagccttgacgtaggtgagatcgaaaagaaaggaaaggggaagaagaggcgtggtcggagaagcaagaaagaacggcgaagagggcggaaagagggagaggaagaccaaaatcctccctgccctcggctgagcagggaattgctggacgagaaaggtccagaagttcttcaggatagcctggaccgatgctattctactccttcaggatgtctagagctgacagattcttgccaaccttaccggagtgccttttacgtcctcgagcagcagcgagtggggctcgccgtggatatggacggcgagtatctatcgatgtag

SEQ ID NO: 126189 - DNA, 1734 bp, synthetic construct
  misc_feature 1..1734: note = Description of Artificial Sequence: Synthetic coding sequence
  source 1..1734: mol_type = other DNA
atggtagtctctgctggcccatggagcggagaaaaggccgagatgaacatcttggagataaacaagaagagccgacctcagctcgccgagaataaacagcaattccgtaacctcaaacaaaaatgcttggtgactcaggtcgcttactttctcgctaacaggcagaataactacgactacgaggattgcaaagatctgattaagagcatgctacgcgatgaaaggctccttacagaggagaaactggcagaagagctgggtcaggctgaggagcttcgccagtacaaggtgctggttcactctcaggaacgagagctcacacagctacgggagaaactgcaggaaggcagggatgccagtcgctccctaaaccagcacctgcaggccctgctaactcctgatgagcccgataattcccaagggcgcgacttgagggagcagctggccgagggttgccgcttggcacaacacctggtacaaaagctgtctcccgagaacgacgacgatgaggatgaagacgtgaaggtggaagaggcagagaaggtccaggaactctatgccccccgggaggttcagaaagccgaggagaaagaagtgccagaggattctctggaagagtgtgccataacatgtagcaattcccaccacccctgcgagtccaaccagccctacggtaatacaaggatcacctttgaggaagatcaggtagacagcactctgatcgacagctcttcacatgatgagtggctggatgccgtttgtattattccagagaacgagtccgatcacgagcaagaggaagagaaagggcccgtttcccctcggaatttgcaggaatccgaggaggaggaagcgccacaggaaagttgggatgaaggcgattggactctttcaataccgcccgacatgagcgcgagctatcaatcggataggtcaacctttcattctgttgaggaacagcaagtgggcctggcactggacatcggcaggcattggtgtgaccaggtcaagaaggaggatcaggaggccacaagccctcggctgagcagagagctgctcgatgaaaaggagcccgaggtactgcaggatagcctcgatcgattttattctaccccattcgagtacttggagctgcctgacctctgccaaccctatcgcagcgacttttactctctccaggaacagcacctcgggctcgctctcgatcttgacaggatgaagaaagaccaggaagaagaagaagatcaaggtcccccttgtccgagactctcccgggagctacctgaggtcgtggagccagaggacctgcaggacagtctcgataggtggtactcaactcccttttcctatcccgagctgccagatagctgccaaccctatggcagttgcttctactccttagaggaagaacacgtgggatttagcctggatgtagatgaaatcgagaaataccaggaaggcgaagaagaccaaaaaccgccatgcccacgcctgaatgaggtcttaatggaggccgaagaacccgaggtgctgcaggattccctagatcgttgctactcaacgactagcacctacttccagctgcacgcgtcttttcagcagtaccgcagtgccttctattccttcgaggagcaggatgtttccttggctctcgacgtggacaatcgtttcttcacgttaacggttatccggcaccatttagcgttccagatgggagtaatttttccacactag

SEQ ID NO: 126190 - DNA, 1902 bp, synthetic construct
  misc_feature 1..1902: note = Description of Artificial Sequence: Synthetic coding sequence
  source 1..1902: mol_type = other DNA
atgccattaacccctactgtccagggcttccaatggaccctacgaggccccgatgtggaaacgagccctttcggagcacctagagctgcatcccacggtgtaggcaggcatcaagaattgcgggaccctactgtgcccggtccaaccagcagtgccaccaatgtgagcatggttgtgtctgctggcccctggtcaggggagaaagctgaaatgaacatcttggagataaataagaagtctaggccccagctggctgagaataagcagcagtttcgcaatctgaagcagaagtgtctcgtgacccaggtggcctactttctagccaataggcagaataactatgactatgaggattgcaaggatctgattaagtcgatgctaagggacgagcgcttgcttaccgaggagaaactggctgaggaactgggtcaggcagaagagcttagacaatacaaggtactcgttcacagccaggaacgggagctgacacagctgcgggaaaaactccaggaggggagagacgcaagccgttccctgaaccagcacttgcaagcccttctgacacctgacgagccagacaattcgcaagggcgcgatctgagggaacagctggctgagggatgtcgcttggcacagcacctcgtgcaaaagctgtcccctgagaacgacgatgacgaggatgaagacgttaaggtcgaggaagcagagaaggtgcaggagctgtatgccccccgcgaggttcagaaagcagaggagaaagaggtcccagaagattccctcgaggaatgcgcgatcacttgtagtaactcacatcacccttgtgagagcaaccaaccttacgggaacacccgcatcactttcgaagaggaccaagttgattctaccctaatcgactcaagcagccacgatgagtggctcgatgcggtgtgcataattcctgaaaacgaaagcgatcatgagcaagaggaggaaaaaggccccgtgagccccaggaacctccaagagagtgaggaagaagaggccccacaggagtcatgggacgagggagattggacattgtcgataccacctgatatgtctgcctcctaccaatccgataggtctactttccactctgttgaagagcagcaggttggcttggccttggacatagggagacattggtgtgaccaggtgaaaaaagaggaccaggaagccacatcgcctcggctgtcccgcgagctcctggacgagaaagagcccgaggtcttgcaagattctctagatcgattttactctactcccttcgagtatttagaactgcctgatttgtgtcagccatatcgtagcgacttctattcgcttcaagagcagcatctgggactggctttggacctcgatcgaatgaagaaagatcaggaagaagaagaagaccagggccctccttgtccccggctttcccgcgaacttccagaggtggttgaacccgaagacctgcaggatagtctggataggtggtattctactccctttagctatccagagctccccgattcctgccagccctacggcagttgcttctatagcctggaagaggagcacgtgggttttagtctggacgtggatgaaatcgagaaatatcaggaaggagaggaggatcagaaaccgccctgtccccggctgaatgaggtcttgatggaagcggaagagcctgaggtcctccaggactcattggatagatgctatagcactacatccacctatttccaattgcatgcttcattccagcagtatcgttccgccttctactctttcgaagaacaggacgtgtctctggcactcgacgtggacaataggttcttcactctgactgtgatcaggcatcaccttgcctttcagatgggggtcatcttcccacactag

SEQ ID NO: 126191 - DNA, 1866 bp, synthetic construct
  misc_feature 1..1866: note = Description of Artificial Sequence: Synthetic coding sequence
  source 1..1866: mol_type = other DNA
atgccccttaccccaaccgtgcaaggctttcaatggactctgagaggacctgatgtggagaccagtcctttcggtgcccccagggcagcatcccacggggtgggccggcaccaggaactgcgcgaccccaccgtgccgggcccaacctcgtcagctaccaatgtgagcatggttgtgtccgcagggccgtggtcaggagagaaggctgaaatgaacatccttgaaataaacaaaaaatccagaccccaattggcagagaacaaacagcaatttagaaatctgaaacagaagtgccttgtgacccaggtggcttacttccttgctaaccgacaaaacaattatgattatgaggattgcaaggatctaattaagtccatgctgcgcgatgagaggcttctcacagaggagaaacttgctgaggagttaggtcaagccgaggagcttcggcagtacaaagtgctcgtgcacagccaggagcgcgaacttacgcagctgcgcgagaagctacaagaaggccgggatgcgagccgatctcttaaccagcacttgcaagcgctactgactcctgacgagcctgacaattcacaggggagagatctgcgcgagcagcttgctgaaggatgcaggctcgcacagcatctcgtgcagaagctcagccccgagaatgatgacgatgaggacgaagatgttaaagtcgaagaagcagagaaggtccaggagctctacgcaccccgggaggtgcagaaggccgaggagaaggaggtgccggaggattcactggaggagtgtgcgatcacttgttcaaactcacatcacccatgtgagagcaaccagccttacgggaatactagaattacattcgaggaagaccaagtagacagtacccttattgattcttccagccatgatgaatggctggatgcagtgtgtatcatacctgagaatgagagcgatcacgagcaagaggaggaaaaaggacctgtgtcgcccagatcaagtggacgcttctgctgccttatcagcgtcggctacattttctgtcatccttgccccgcatggctgattaggaatctccaggaaagtgaggaagaggaggctccacaggagtcgtgggatgagggccattggtgcgaccaagtaaagaaggaggatcaagaggccacgtccccccgactgagccgtgaactactcgatgagaaagagccagaagtcctgcaggacagcttggatagattctactccaccccattcgagtacctagagttacccgatctatgccagccatatcgttcagacttctatagcttacaggaacaacatctcggccttgccctcgacctggatagaatgaagaaagatcaggaggaggaggaggaccaaggaccaccatgccccagactatcgcgcgaactaccagaggtggtggaaccagaagatctccaggattcgttagaccggtggtatagcaccccattcagttatcctgagctgcccgacagttgtcaaccatacggctcttgtttctacagcctggaagaggagcacgtcggcttctctctggacgttgacgaaattgagaagtaccaggaaggggaggaggatcagaagcccccgtgcccgcgcctcaatgaagtgctgatggaagccgaggagccagaagtcctccaggactctttagatcgttgttacagcaccacgagtacgtacttccaattacacgcatctttccagcagtacagaagcgcgttctactcttttgaggagcaggacgtttcattggctctggacgtggataatcgtttcttcacgctgaccgttatcaggcatcacctcgccttccagatgggagtgatattcccccattag

SEQ ID NO: 126192 - DNA, 1062 bp, synthetic construct
  misc_feature 1..1062: note = Description of Artificial Sequence: Synthetic coding sequence
  source 1..1062: mol_type = other DNA
atggtagtctcagcaggtccctggagtggggaaaaggcggaaatgaatattctggagatcaataagaagtcccggcctcagctggccgagaataaacagcagtttagaaatctgaagcagaagtgcttagtcactcaggtggcatacttcctggccaatcgccagaataactacgattatgaagactgtaaggatctgatcaagtccatgctgagggatgaaagactgttgaccgaggagaaattagctgaggagttgggccaggctgaggagctgcggcaatataaagttttagtccacagccaagaacgcgagctgactcagttaagggagaagctccaagaaggaagagacgcaagtcgatcattgaaccagcacctgcaagccctgctcacgcctgatgaaccagacaattcacagggacgcgacctccgagaacagctggcggagggctgcagactggctcagcacttagttcagaagctgtccccggaaaatgatgacgatgaggacgaagacgtgaaagtggaggaagccgaaaaggttcaagaattgtatgctccacgagaagtgcagaaagccgaggagaaagaggtgcctgaggactccttagaggaatgcgctataacctgcagtaactcccaccacccgtgcgagtcaaatcagccctacggcaataccagaatcacgtttgaagaggatcaggtggatagcactctgattgacagctcctctcatgacgagtggctggatgcagtgtgtattattccggagaacgagagtgatcatgagcaggaggaggaaaagggtcccgtttctcctaggaatctccaggaatcagaggaggaggaggctccccaggagagttgggatgagggcgattggactctttccatcccgcccgatatgtccgcgtcataccaatcagaccgctctactttccattctgtggaggagcagcaggtgggcctggccctggatattggaaggcactggtgtgaccaggaaaagggtggccctcggggccataagtcacaggcccagcaaggcgcggcgggatag

SEQ ID NO: 126193 - DNA, 1668 bp, synthetic construct
  misc_feature 1..1668: note = Description of Artificial Sequence: Synthetic coding sequence
  source 1..1668: mol_type = other DNA
atggtcgtgagcgctggaccgtggtccggtgagaaagccgagatgaatatactcgaaattaacaagaaatctaggccccagcttgccgaaaataagcagcagttccgaaatttgaaacaaaaatgtctagtaacccaggtcgcttatttcctagccaaccgacagaataactatgactatgaggattgcaaagacttaataaaatccatgcttcgagatgaaagattgctcacagaagaaaaactggccgaggagctaggtcaggccgaggaactgcggcagtacaaagtgctggtgcatagccaggaacgggaactaacccagctgcgggagaagctgcaggaaggaagagacgcatcgcgcagtcttaatcaacatctgcaggccttactgacacctgacgagccagataatagtcagggaagggacctccgagagcaactggctgaaggctgccgactcgctcagcacctggtgcagaagctttcgccagaaaatgatgacgatgaagatgaagacgtcaaagtggaggaggctgaaaaagtgcaggagctctatgcaccacgcgaggtccagaaagccgaagagaaggaggttcccgaggactcactggaagaatgcgcaatcacctgttctaactctcatcacccgtgtgagagtaatcagccttatgggaacactagaataacttttgaggaggaccaggttgactcgactctcatcgattcttcctctcacgacgagtggcttgatgcagtgtgcatcatcccagaaaacgagtccgaccacgaacaggaagaagagaagggtcctgtgtctcctaggaacctccaggaaagcgaagaagaagaggcaccacaggaaagttgggatgaaggagactggacactgagtattccaccggacatgtctgcttcctaccagagcgaccgtagtacattccactctgtcgaggagcagcaggtgggactagccctggacatcggaaggcattggtgtgaccaggtcaaaaaagaagatcaagaggcaacttctccgcggctctctcgggagttgctagatgagaaagagcccgaggttctccaggactcactggatcgcttctactccactccttttgaatacctcgaactgcctgatctgtgtcaaccgtataggagcgatttttacagcttacaagaacagcacttaggcctggccttagatctggatcggatgaagaaagatcaggaggaggaagaggatcaggggcccccttgtccccgactgagcagagagctgccagaggttgtggagcccgaggacctccaagattcactggaccgctggtactcgacaccttttagttacccggagcttcctgattcgtgtcagccctatggctcgtgcttctattcccttgaagaggagcacgtgggcttctctctagacgtcgacgaaatcgaaaaataccaagagggagaggaagaccagaaacctccctgtcctcgacttaacgaagttctgatggaggccgaggaacctgaagtactccaggatagccttgaccgctgctatagtaccaccagtacatattttcagctccacgcatcattccagcagtacaggagcgccttctacagtttcgaggagcaggatgtaagcctggcactagacgtcgacaactag

SEQ ID NO: 126194 - DNA, 1692 bp, synthetic construct
  misc_feature 1..1692: note = Description of Artificial Sequence: Synthetic coding sequence
  source 1..1692: mol_type = other DNA
atgcctctcactcctaccgtgcaggggtttcagtggactctccgggggcccgacgtcgagacatccccctttggagctccacgagccgcttcacatggcgtgggacggcaccaggagcttagagatcccaccgattatgaggattgcaaggacctgatcaaaagtatgctgcgggatgaacgccttttgacagaggagaagctcgcagaggagctagggcaggccgaagagctgcgccagtacaaggtgcttgtgcatagccaggagcgcgagctgactcagttacgcgaaaaactgcaggaggggcgtgacgcaagcaggagtctgaatcagcatttgcaggcgctgctcacgcctgatgaaccggataacagtcaggggagagatttaagagagcagctggccgagggctgccgccttgcccagcacctggttcagaagctgagcccagaaaacgacgatgacgaggacgaggacgttaaggtcgaagaagctgagaaagtgcaagaactctatgccccacgggaggtacagaaagccgaggagaaagaggtgcccgaggactccctggaggagtgtgcgattacatgtagcaactcacaccacccgtgtgaaagtaaccagccctatgggaatacccgcataactttcgaagaggaccaggtcgactccaccctcatagactctagttctcatgacgagtggctggatgccgtgtgcattattcccgagaacgaatcggaccacgagcaggaggaggagaagggccctgtgtcacctcgaaatcttcaggagtctgaggaggaggaggccccccaggaatcttgggacgaaggcgattggacactctccatccctcccgacatgtctgctagctatcagagcgatcggtcaactttccactctgtagaagagcagcaagtcggtctggctttggatatcggtcgacactggtgtgaccaggtgaaaaaggaagaccaggaggctacaagtccacgtctcagtcgcgaactccttgacgaaaaagaacctgaagttctgcaggattccctggatagattctatagtacccctttcgaatacctggagctcccagacctctgtcagccctaccggtcagacttttactccctccaagagcaacacttgggccttgccctggatctcgacagaatgaagaaagatcaggaagaggaagaggaccagggaccaccctgcccaaggctgtctcgggagctgccggaggtagtagagcccgaagacctgcaggactcgctggacagatggtacagcacaccctttagctaccccgagcttccagatagttgccagccttacggctcctgcttctatagcctggaggaagagcacgtaggcttctcattagatgttgacgagattgagaaatatcaggagggggaggaagatcagaaacccccgtgtcctagactgaacgaggtcttgatggaggccgaagagcccgaggtcctgcaggatagtttggacagatgttatagtaccacttcaacatatttccagttacacgccagtttccagcaataccgatccgccttttactcgtttgaagagcaggacgtaagtctcgccttggatgttgataacagattctttaccctgaccgtgattaggcatcatttagcttttcagatgggagtaatctttccccactag

SEQ ID NO: 126195 - DNA, 1917 bp, synthetic construct
  misc_feature 1..1917: note = Description of Artificial Sequence: Synthetic coding sequence
  source 1..1917: mol_type = other DNA
atggtagttagcgcagatcccctgagcagcgagcgcgcagagatgaatatcttagaaattaatcaggagctgcgttcccaactggcagagtcaaaccagcagtttagggatttgaaagaaaaatttctcatcactcaagcgaccgcctacagcttggcaaatcagctgaagaagtataagtgcgaggagtataaagatatcatagattccgttttgcgtgatgagcttcagagcatggaaaagctggctgaaaagttaaggcaagctgaggaactccgccaatacaaggccctggtccactctcaggctaaggagctgacccagctgcgagagaaactgagagaagggcgcgacgccagccggtggcttaacaagcacctgaaaaccctgctgacgccagatgatccggataagtcgcagggacaggatctaagggagcagctggcggaaggccacagattagccgagcacctagtccataaattgagccccgaaaatgacgaggacgaggatgaggatgaggacgataaagatgaggaggtggagaaggttcaggaatctcccgcccctcgagaagtgcagaagacagaggaaaaggaggttcctcaagactcactcgaggagtgtgccgtgacttgctccaacagtcataacccaagtaatagcaaccagcctcacaggtcaaccaagatcaccttcaaggaacatgaagtggactcggctctagtggttgaatcagagcaccctcacgatgaggaggaagaggctttgaacattccccccgagaaccaaaacgatcatgaagaggaggagggcaaggcgccagttcctcctagacaccatgataagagtaattcctatcggcaccgggaggtgtcctttttggctctggacgagcagaaggtgtgcagcgcacaggacgtggcacgggactacagcaacccaaaatgggatgaaaccagcctgggatttctggaaaagcagagtgacctggaggaggtcaagggccaggagaccgtggcaccaaggttgagcagggggcccctcagagttgacaagcacgagatcccgcaggaaagcctggacggctgttgcctgacgcccagcatccttccagatttgacccccagttatcacccatactggtctacgttgtactcttttgaggataagcaggtttcgctggctctggtagataagattaagaaagatcaggaagagatcgaagatcaatctcctccctgccctagactttctcaggagctccccgaagtgaaggagcaggaggttcccgaggactccgtgaacgaagtctacctcacaccatctgtacatcacgatgtgtcagactgccaccagccttactccagcactctttcatccctggaggatcagctggcttgcagcgccctggacgttgctagccccacagaagctgcctgtccacagggaacatggagtggagacctgtcacaccaccagtctgaggttcaggtctctcaggcccagctggagccttcgaccctagtgcccagctgcctgaggctccagctggaccaaggctttcattgtggaaatggcctggctcagagaggcctatcgtcgacaacctgttctttctctgccaatgccgattccggcaaccagtggcctttccaggaacttgtgttagagccttcactcggtatgaagaaccccccacaactcgaagatgatgcactggagggtagcgccagtaatacgcagggacgtcaggtgacggggagaattagagcgagtcttgtgctcattctgaaaactatccgtaggcgactgcctttctccaaatggcggcttgccttccggtttgcaggaccccatgcagaaagtgccgagataccaaataccgcggggcgaactcagagaatggccggttag

SEQ ID NO: 126196 - DNA, 1917 bp, synthetic construct
  misc_feature 1..1917: note = Description of Artificial Sequence: Synthetic coding sequence
  source 1..1917: mol_type = other DNA
atggtagtgtcagcggatccgctgagttccgagcgtgctgagatgaacatcttggagattaaccaggaactgaggagccagttggccgagtccaaccaacagtttcgtgatcttaaagaaaagtttctgatcacccaggccacggcgtattctctcgccaatcagctgaagaaatacaagtgtgaagaatataaagacatcatcgattccgtcttaagggacgaactgcagagtatggaaaagcttgcagaaaagctccggcaggcggaagagcttcgacaatacaaggctttagtccattctcaggccaaggaattgacccaacttcgggagaagctgcgggaaggacgagatgcttcacgctggctgaacaaacacttaaagactctcctgacacccgacgatcctgataagtcacaaggtcaggatcttagagagcaacttgccgaaggtcacaggctcgcagagcatctagtgcacaagctatcaccagaaaatgatgaggatgaggatgaggacgaagatgataaggatgaggaagtggagaaggtgcaggagagccccgccccccgagaagtacagaagaccgaagagaaagaggtccctcaggactcactggaagaatgcgcggtgacttgctcaaatagtcacaacccgtcaaattctaaccaaccccatcggtcaacaaaaatcaccttcaaagaacacgaagttgattcagccctcgttgtggagagcgaacatcctcacgacgaggaagaagaggccctcaacatcccacccgagaatcagaatgaccacgaagaagaggaaggtaaagcacccgtaccgccaaggcaccacgacaaaagtaacagctaccgccaccgggaggtgtcatttctcgccctggacgagcaaaaagtgtgttcagctcaggatgtcgccagagattatagtaacccgaagtgggatgaaactagcctaggattcctggaaaagcagagcgacctcgaggaggtgaagggccaagagactgtggccccccgcctctctcgaggaccacttcgtgtggacaagcacgagataccgcaggagtccctcgacggttgttgcttaactccttccatcctccccgatctgacgcctagctaccacccttattggtccacactttactctttcgaggataagcaagtgtccttggctttggtggacaagattaagaaagaccaggaggagattgaggatcaatcccccccttgcccgcggctgtctcaggaactgcccgaggtaaaagagcaggaagtaccggaagactcagttaacgaggtctaccttaccccttcagttcaccacgacgttagcgactgtcaccaaccatactcgagcactctttcctcacttgaggaccagcttgcttgcagtgctcttgatgttgctagtcctacagaggcagcctgtccgcagggcacatggtcaggtgatctgtctcatcatcaatccgaggttcaggtctcgcaggctcagctggagccgagcacactggtcccttcatgtttaagactgcagcttgaccagggattccattgcggcaatgggctcgctcagcgcggcctgtcctccaccacatgcagtttctccgccaatgccgactcaggcaatcagtggccgttccaggagctggttctggagcccagcctgggtatgaagaaccctccccagttggaggatgatgccctggagggctcagcctctaacacccagggcagacaggtgaccggtcgcatacgggctagcctcgtgttaattctcaagacaattcgccgacgcctgccattcagcaagtggcggctcgcattccggtttgcaggaccacatgccgaatcagcagaaattcccaacacagcggggaggacacagcggatggccggctag

SEQ ID NO: 126197 - DNA, 1722 bp, synthetic construct
  misc_feature 1..1722: note = Description of Artificial Sequence: Synthetic coding sequence
  source 1..1722: mol_type = other DNA
atggtggtcagcgctgaccccctgagctccgagagagctgagatgaacatactggagataaatcaggagctccggagccagctcgctgagagtaaccagcagttccgggacctgaaagagaagtttctgatcacacaggcaactgcctactccttggctaatcaattgaagaagtacaaatgcgaagagtacaaggatatcatcgattctgtcctgcgggacgagctgcaatccatggaaaaattggcagagaagctcagacaggcagaggagttacggcagtacaaagcgctggtccattctcaggccaaggagctcacacaactgcgggagaagctacgggagggacgcgatgcttcccggtggttgaacaagcacctgaagactcttctcacgccagatgatcccgacaaatctcagggccaggacttaagagaacaattggcagaggggcacaggctggcagagcatctcgttcacaaactctccccggagaatgatgaggacgaagatgaagacgaagatgacaaggatgaggaagtagagaaggtgcaggaaagccctgcacctcgcgaggtgcagaaaaccgaggaaaaagaggtgcctcaagactcactggaagaatgcgccgtcacgtgctctaattctcataacccctcgaacagcaaccagccccatcgcagcacaaagataaccttcaaagagcacgaagttgacagcgcattggttgtggaatctgaacaccctcacgacgaagaggaagaggccctcaatattcctcctgaaaatcaaaacgatcatgaagaggaggaaggaaaggcacccgtcccaccccgtaaccggcagagtctggaaccaggcgagctgacaaatttgcgggactttctgatttcccctgtcgtgtctcacgtcgcaaatcctggccaccacgacaagagcaatagttaccgacatcgggaagtttctttcctcgctttggatgaacagaaagtgtgtagcgctcaggacgtggctcgcgactactcaaatccaaagtgggatgagactagccttggcttcctggagaagcagtccgatctggaggaggtgaaaggacaagagacagtggccccaagactgtctagaggtcctttgcgggtggataaacacgagattccccaggagtccctggacggttgttgcctgacccctagcattctgccggaccttactccatcttaccacccatactggagtacactgtattctttcgaagataagcaagtgagccttgccctagtcgataaaatcaaaaaggaccaggaggagattgaagatcagtctcccccctgcccacgcctaagccaggaactcccagaagtaaaagagcaagaggtgcctgaagattcagtgaacgaagtgtacctgacccctagcgtgcatcacgacgtttctgattgccaccaaccttattcttcaaccctgagctctctggaggaccaacttgcatgtagtgctctcgacgtggcctctcctaccgaggctgcatgcccccagggtacctggtcgggagatctttcacaccatcagtctgaggtgcaagtcagtcaggcccaactggaaccaagcactcttgtccccagctgcttgaggcttcagcttgaccagggcttccactgtggaaatggcttggcacagagaggcctgtcctcgactacttgctctttctctgccaacgcatag

SEQ ID NO: 126198 - DNA, 372 bp, synthetic construct
  misc_feature 1..372: note = Description of Artificial Sequence: Synthetic coding sequence
  source 1..372: mol_type = other DNA
atggtggtctcggctgaccccctttcgagtgaacgcgcagaaatgaacatcctcgaaattaaccaagaactgaggagtcagctggcggagtctaatcagcagttccgcgacctgaaggaaaagttccttattacacaagctactgcgtactcactcgctaatcagttgaagaagtacagctgtttgaaatatcgaaaccacttgcccccagagcgatgtagacgtttaaaaaagcgcaaaagcctccggacccattggcgaaacgtgctatccctggtgcagatcgtgactaccctgcttactcccacttctctcacgggcgcgccgaagagccacctcaggaacacaaaatccaccttgctttggctctag

SEQ ID NO: 126199 - DNA, 2004 bp, synthetic construct
  misc_feature 1..2004: note = Description of Artificial Sequence: Synthetic coding sequence
  source 1..2004: mol_type = other DNA
atggtagtttcagccgaccccctatcgtccgagcgggctgagatgaacatcctggagattaaccaagaactccgaagccagttagctgagtccaatcagcaattccgcgacctcaaggaaaagtttttaataacgcaggccaccgcatattccttggccaatcaactcaaaaaatacaagtgtgaagaatacaaagacatcattgactctgtattgcgggacgagctgcagtcaatggaaaaattggctgagaagctcaggcaagctgaggagttacgccagtacaaagccctggtccacagtcaggccaaggaactgacccagctgcgagaaaaacttcgcgagggaagggacgcttcccgttggctgaataaacaccttaaaaccctcttgacacccgacgatcctgataagagccaggggcaggatcttagggagcagctggccgaaggccaccgtctggctgaacacctagttcataagttatcaccagagaatgacgaagacgaggacgaggatgaagatgacaaagatgaggaggtggaaaaagtccaggagtcccccgcacctagagaggtgcagaagacagaagaaaaggaggtgccccaggacagcctagaggaatgtgccgtcacttgttctaatagtcacaatccatccaattctaaccagccacataggtcaactaaaatcacgttcaaagaacacgaagttgactccgcccttgtggtcgagtctgagcacccacacgacgaggaagaggaggccctcaacatccctcccgagaaccagaatgaccatgaggaggaagagggcaaggcccctgttccaccacgaaatcgccagtccttagagccaggagagctgacaaatttacgtgattttctgatttccccagtggtctcccatgtcgccaaccccgggcaccatgacaagtcaaattcctacagacatagggaggtcagcttcctcgccctagatgagcagaaagtgtgttccgcccaagatgtcgcccgtgactattccaaccctaagtgggatgaaacctcacttggcttcttggaaaaacagtctgacctggaggaggtgaagggccaggagacagtggctcccaggctgagccgtggacctttacgagtcgataagcatgagatcccgcaggagagcctggatgggtgttgcctgacacccagcattcttcccgacctcacaccttcgtaccacccttattggtctactttatattcttttgaggacaaacaggtttccctagctttggtggataaaatcaagaaggaccaggaggaaatcgaggatcaaagccctccctgccctcgactgtcccaggagcttcctgaggtgaaagaacaggaggttcctgaggactccgtgaatgaggtataccttacgccgtccgtgcaccatgacgtcagcgactgccatcagccttactccagcaccctatcttcacttgaggaccagcttgcatgttcggctttggatgtcgcgagccccacagaagccgcctgtccgcagggaacttggtccggcgacctgtctcaccatcggtcggaagttcagatttcccaggcacagctagaaccatccaccctcgtgccttcttgtctccgactgcagctcgaccagggctttcactgtggtaatggcttagcccaaaggggtttgtcaagtaccacgtgctccttttccgcgaatgccgatagcggaaaccagtggccctttcaggagctggttctggaaccttcactcggcatgaagaacccccctcagctggaggacgacgctctcgaaggatctgcttccaatacacagggtaggcaggttaccgggaggattcgggcatctcttgtcctgattctcaagaccattcggcggcgacttccctttagcaagtggcgcttagccttccgcttcgcgggacctcatgcggaatcggccgagatcccaaatacagcagagagaatgcaaagaatgattggatag

SEQ ID NO: 126200 - DNA, 1722 bp, synthetic construct
  misc_feature 1..1722: note = Description of Artificial Sequence: Synthetic coding sequence
  source 1..1722: mol_type = other DNA
atggtcgtgtccgccgacccactgagctctgaacgcgctgaaatgaatatattagaaatcaaccaggagctgcggagtcagctggcggagagtaaccagcagtttagagatctgaaggagaaatttttaatcacccaagccaccgcgtactccttggccaatcagctgaagaaatataaatgtgaggagtacaaggacattatagactccgtcctgcgtgatgagcttcagagcatggaaaagcttgccgaaaagcttcgccaagctgaggaactaagacagtataaggctctggtgcattcacaggcgaaggagttgacccagctgcgtgagaagcttcgcgagggccgtgacgcttctcgctggctaaacaaacacctgaagactctactcacacccgacgacccagataaatcccagggccaagacctccgcgaacagctcgcggaggggcatcgtttggccgagcatctggtacacaagctgagcccagaaaatgatgaggatgaggatgaggatgaagacgataaggatgaggaagtggaaaaagtgcaggagtccccagcccccagagaggtgcagaaaactgaagaaaaggaggtgccccaggattcactggaggaatgcgccgttacttgttctaacagccacaatccctcaaatagtaaccagccacatagatctacaaaaattacatttaaagaacatgaagtggactccgcattggtcgtggaatctgagcacccacacgatgaggaagaggaagcgctgaacattccgcccgagaaccaaaacgaccacgaagaggaggaaggcaaagcacctgtccctcctcgcaatagacagagcctggagccaggggagctgactaatttacgggatttcctgatttcgccagttgtgtctcacgtggccaaccccgggcaccatgataagtccaatagctataggcatagggaggttagttttctggctctggacgagcagaaagtgtgcagcgcccaggatgtggcgcgagattattccaatcctaagtgggacgagacaagcctcggcttcctggagaaacagtctgatttagaggaggtcaaagggcaggaaaccgtcgctccccgtctgagtcggggtcctcttcgggtggataaacacgaaataccccaggaaagtttggacggatgttgcttgactcccagcatcctccccgatttgactcccagttatcacccttattggtccaccctttactcattcgaggacaagcaggtctcgttagcattggtcgataaaataaaaaaagatcaggaggaaatagaggaccagtcgcctccctgccccaggttgtctcaggagctgcctgaggttaaagaacaggaggtcccagaagactctgtgaacgaagtgtatctgaccccctctgtccatcatgacgtgagtgactgtcaccagccttatagctccactctgtctagcctggaggatcagctcgcatgcagcgcactggacgtggcgtctcccaccgaagccgcttgtccacagggcacgtggtcaggggatttaagccaccatcgaagcgaggtgcagatatcacaggcgcagctggagccttccacccttgtgccctcctgtcttcgccttcagcttgaccagggcttccattgcggaaatgggctggctcagcgggggttgagctccaccacttgttccttcagcgccaatgcctag

SEQ ID NO: 126201 - DNA, 1917 bp, synthetic construct
  misc_feature 1..1917: note = Description of Artificial Sequence: Synthetic coding sequence
  source 1..1917: mol_type = other DNA
atggtcgtgtctgcagatcccctgtcttccgagagagccgagatgaatatactagagatcaatcaggagctccggagccagctggccgaatctaaccagcagtttagagaccttaaggagaaattcttgattacccaggctactgcatacagtctggccaaccagctgaagaagtataagtgcgaggagtacaaagatatcatagatagcgtcctgagggacgagctccagagtatggagaagctggccgaaaagctgcggcaggcggaggagctccgccagtacaaggcccttgtccacagccaggcgaaggaactgacccagctgagggagaagctgagggaggggcgagatgcttctaggtggttgaacaagcatttaaagactctgctcacccctgacgaccccgataaatcccagggacaggacctgcgagagcagctggctgagggtcacagactagcagaacatctggtgcataagctgtcaccggagaacgatgaagatgaggacgaagatgaggacgataaggacgaggaagtcgagaaagtccaggaatcaccagcgccccgcgaggtacaaaaaactgaggaaaaggaggtgccgcaggactctctggaggagtgcgccgttacatgttcgaactcacacaacccaagcaattccaatcagccacacaggagcacaaagataaccttcaaagagcatgaggtggactctgcccttgtcgttgaaagcgagcaccctcacgatgaggaagaggaagcgttaaatattcctcccgagaatcaaaacgatcatgaagaggaagaaggaaaagctccggtgcccccacggcaccatgataagtcgaattcctatcggcaccgagaggtcagtttcctggcattagacgaacagaaggtgtgttccgcacaggacgtggctcgggactactcaaatcccaagtgggatgagacttccctcggtttcttggaaaaacagtcagacttagaggaggtaaaaggccaggaaaccgtggcccctcggctgagtagaggccccctgagggtcgataagcacgagattcctcaggaatcactggatggatgctgcctcaccccctctattctgcctgatttaaccccatcgtatcacccttattggtcaacactttattcattcgaggataaacaggtgagtcttgcccttgtcgataagatcaagaaagaccaggaagaaattgaggatcagagtccaccctgtcctcgtcttagtcaagagctgcccgaggtaaaggaacaggaggtcccagaggactccgttaatgaggtatacctgaccccttcggtgcaccacgacgtctccgactgccaccagccttacagtagcactctctcctccctcgaagaccagctcgcctgcagtgcccttgacgttgcgtcccctacagaagccgcttgtccacagggtacctggagcggcgaccttagccaccatagatcagaggtacagatttcccaggctcagctggagccttcgactctagtgccgtcatgtcttcgcttgcaacttgaccaggggttccactgcggtaacggcctagcacagcgcggtctgtcgagcactacatgctctttcagcgctaacgccgatagcggcaatcagtggcctttccaggaactggtgctggagccgtctctgggtatgaagaatcccccacagctcgaggatgacgcgctagaaggatcagccagcaacacacagggacgccaggttacaggccgaatcagggcttcactagttctaatattgaaaacgatcaggcgccggctgccattctccaaatggagacttgcctttcggttcgcggggccacacgcagagagcgctgagattccaaataccgccgaacgaatgcagcgcatgatcgggtag

SEQ ID NO: 126202 - DNA, 1917 bp, synthetic construct
  misc_feature 1..1917: note = Description of Artificial Sequence: Synthetic coding sequence
  source 1..1917: mol_type = other DNA
atggtcgttagcgccgacccactgtcttcagagcgggcagagatgaacatcttggagattaaccaggaacttagaagccagctggctgaatcaaaccagcagttcagagatttgaaggagaagtttttaataacccaggcaactgcctactcattggccaaccagctgaagaagtataaatgtgaagagtacaaagatatcatcgattctgtgctgcgcgatgaactgcagtccatggagaagctggctgaaaagctcaggcaggcagaggaactgagacaatacaaggcactcgtccattctcaggcaaaggaactaacccaattaagagagaaactgagagaaggtagggacgcctcgcggtggctcaacaagcaccttaagaccctcctcacccccgatgaccctgataaatcccaaggacaagacctacgtgagcagttagccgaaggacaccgcttggctgaacatcttgtccataagctgagtcccgaaaacgacgaggacgaggatgaagacgaagatgacaaagatgaagaggtcgaaaaggtccaggaatcaccagcccccagggaggttcaaaaaaccgaagagaaagaggtcccccaggatagcttagaagagtgcgctgtcacctgcagcaacagccataaccccagcaactcaaatcagccgcatcgctctacaaaaattacctttaaagagcatgaggttgacagcgctctggttgtcgagagcgagcatcctcacgatgaagaggaagaggccttgaatattcctccagagaaccagaacgatcatgaggaggaagagggaaaagctcctgtacccccccggcaccatgacaagtccaactcatatcggcaccgggaggtcagcttcctcgcactagacgaacagaaggtctgctcagctcaagatgtagcccgggattattcaaaccctaagtgggacgagactagtcttggattcctcgaaaagcaatccgatcttgaagaggtaaagggccaggagaccgtggccccacgtctatctaggggtcccctgagagtagataagcacgagatccctcaagaatctctcgatggttgctgtctgacgccgtccatcctcccggacctaacaccaagctaccatccttactggtctacattatatagcttcgaagataaacaggtgagtctggccctggtggataagatcaaaaaagaccaagaagagattgaggaccaaagcccgccttgtccccggctgtcacaggagcttcctgaggtgaaagagcaggaggtgcctgaggacagtgttaacgaggtgtatctgacacccagtgtgcatcatgatgtcagtgactgtcatcaaccctactcatctactctaagctctttggaggaccaattagcgtgtagtgcactagacgttgcctcccccaccgaggctgcgtgccctcaaggcacttggtccggagaccttagccaccatcgatcagaggtgcaaatttctcaggctcagctagaaccaagcacactggtaccaagttgcctccgtttacagttggatcaggggttccactgcggtaacggactcgcccaacgagggctgagctccacaacttgttccttttctgcaaatgctgacagtggaaaccagtggccctttcaagaactcgtactggaaccgagcctcgggatgaaaaacccaccacaactggaagacgacgcactagaggggtcagctagtaatacacaagggagacaggtgacgggaagaatccgcgcttccctggtactcattctgaagaccattcggcgcagactgccttttagcaagtggcggctggcatttcgcttcgcgggcccccacgcggagtccgcagaaatacccaatactgccgagcgcatgcagagaatgataggttag

SEQ ID NO: 126203 - DNA, 624 bp, synthetic construct
  misc_feature 1..624: note = Description of Artificial Sequence: Synthetic coding sequence
  source 1..624: mol_type = other DNA
atgctcgccagctacaagagttattccagtaccttccatagcctggaggagcagcaggtgtgtatggctgtggatatcggcaggcatcgctgggaccaggtgaagaaagaagaccaggaggccaccgggccgcggctctctagagagctcctggacgaaaagggccctgaagttttacaggactccctgtaccgctgttattccaccccaagtggctgtctcgagcttacagactcttgccagccgtaccgatctgcattttatgtgttagagcagcagcgtgttggacttgcggtggatatggatgaaattgagaaataccaggaggtggaagaagatcaggggcgctgggaagaagaccagaaccctccctgcccccggttgaatggtgtgcttatggaagtcgaagagccagaggtcctacaggacagtctcgatgggtgctattccactccctcaatgtactttgagttaccagactcttttcagcactatagaagcgtcttttattccttcgaagagcagcacatttcctttgcactgtacgtcgataacagattcttcactctgaccgtgaccagtttgcacctggtgtttcagatggaggtgatcttcccacagtag

SEQ ID NO: 126204 - DNA, 1830 bp, synthetic construct
  misc_feature 1..1830: note = Description of Artificial Sequence: Synthetic coding sequence
  source 1..1830: mol_type = other DNA
cctgtgcccggaccgaccagttctgctaccaacgtatctatggtggtgtcagcggggccactgtcctcagaaaaggccgagatgaacattcttgagattaacgagaagctgaggccacagctggccgagaagaagcagcagtttcgcaatctcaaagagaagtgctttctgactcaacttagcgggttcctggcaaatcaacagaataaatataagtacgaggagtgtaaggacctgatcaaattcatgctgaggaatgaacgccaattcaaggaagaaaagttggctgaacagctaaagcaggcagaagagctccgacagtataaggttctcgtgcacgcccaggaacgggagctgacacaactcagggagaagctgagagagggaagagatgccagtcggagtctaaacgaacacttgcaagccctcttgaccccagacgaacccgacaaatctcaaggtcaggatctgcaggagcagcttgctgagggatgccgcctagctcagcacttggtccagaagctttcgccagagaatgacaatgatgacaatgaggatgtacaggtggaggtagcagagaaggtgcagaagagttctgcccctagagagatgcagaaagcagaggagaaggaggtgcctgaagacagccttgaagaatgcgcaataacctatagtaattctcacggcccctacgactccaatcagccccacaggaaaaccaagataacttttgaagaagacaaagtggacagcactctgatcggttcgagttcccacgttgaacgcgaggacgctgtgcacatcattccagagaacgaatctgatgatgaggaagaggaggagaagggccctgtgagccctagaaatttacaggagtcagaagaggaagaagtcccacaggaatcctgggacgagggctattcaacaccttccattcctccggagatgctggcttcgtacaagtcttacagttctacattccatagtctggaggagcagcaggtttgcatggccgtcgacatagggcggcaccgctgggatcaggtaaagaaagaggaccaggaggcaactggtccaagactcagcagggagctgctcgatgagaagggacccgaggtgctacaagactccttatacaggtgctacagcaccccatcaggatatctggaattgcccgaccttgggcaaccctactcatctgcagtgtactctcttgaagagcagtacctcggcctagcactagaccttgatcgcatcaagaaggaccaagaagaagaagaagatcagggacctccttgtccccgcctctccagggaattgcttgaggtcgtggaaccagaagtcctgcaggacagtctggaccgatgctattcaacaccctctagctgcctggagcagcctgactcctgccagccttacggcagcagcttctatgctctcgaggagaagcacgtgggattttcccttgacgtgggcgagatagagaagaaggggaaagggaagaagcgcaggggccggcgcagcaagaaggagcgccgaagaggacgcaaagaaggagaggaggaccagaacccgccctgtccgcgcttgaatggggtgttgatggaagttgaggagcccgaggtgttacaggattctctggacggttgttatagtactccttccatgtattttgagctccccgattcctttcaacactaccgctccgtgttctatagcttcgaagagcagcatatctcctttgctctgtatgtagataatagattcttcacactcacggtgaccagtctacaccttgtgtttcagatggaggtaatttttcctcaatag

SEQ ID NO: 126205 - DNA, 2052 bp, synthetic construct
  misc_feature 1..2052: note = Description of Artificial Sequence: Synthetic coding sequence
  source 1..2052: mol_type = other DNA
tgacccgggccgacttcttccgctacgaacgtgtccatggtggtaagcgctgggcctctgtcatctgagaaggctgaaatgaatatcctcgaaattaatgaaaagctgcggccacagctcgccgagaaaaagcagcagttcaggaacctcaaagagaaatgctttctgacccaactaagcgggtttctggcaaatcagcagaataaatataagtatgaagagtgcaaggatttgatcaagtttatgcttagaaacgaaaggcagtttaaggaagagaaactggccgaacagctgaaacaggcagaggaacttagacagtacaaagtgctggtgcatgcacaggagcgcgagttgacccagctaagggaaaaattgcgggagggacgggatgcttcccgtagcttgaacgagcacctgcaggcactcctaacacctgatgagcctgacaagtcacagggccaggatctgcaggagcagctggctgaaggatgccgactcgcccaacatctggtgcagaagctgtcacctgagaacgacaacgacgacaatgaggacgttcaggtggaagtggccgagaaagtgcagaagtcttccgctcccagggagatgcagaaggctgaggagaaggaagtgcccgaggattccctcgaagagtgtgccatcacctatagtaacagccacggtccgtatgactctaaccagccccacagaaagacaaagatcaccttcgaggaagataaggtggatagtacactcattggctccagtagtcacgtcgagcgggaggacgctgtacacataatcccggaaaatgaaagcgacgacgaggaggaagaagagaaaggacctgtctccccccggaacctacaggagtccgaggaagaggaagttccacaggagtcctgggacgaggggtactctacgccgtctattccgccagagatgctggcttcctacaaatcctactcaagcacttttcactccctggaagagcagcaggtctgtatggccgttgacattggtagacaccgctgggatcaggttaagaaggaggatcaggaggcaacaggtccccgcctgagtcgcgagctgctggacgagaaaggccctgaagtcctccaagactcattatatagatgttatagcacaccctccggctgtttggaactaactgacagttgccagccctaccgctctgctttctacgttctcgaacagcagagagtcggcctggccgtcgacatggatgaaattgagaagtatcaagaggtggaggaggatcaggaccctagctgtccaagacttagtagagaactcctcgacgagaaggagcctgaggttcttcaagacagcctcggtagatggtatagcactccttcaggttaccttgagttgcctgacctgggccagccatattcctcagcagtctactctctggaagagcagtacctgggccttgcccttgacctggataggattaaaaaagaccaggaggaagaagaggaccagggcccgccatgccctcggctgtcccgcgagctgttggaagtcgtggaacccgaggtcctgcaggatagcctggataggtgttactcaacaccgtcaagctgcctggagcagccggactcttgccagccgtacggctctagtttctatgccctcgaggaaaagcacgttggtttttctcttgatgttggggagatcgaaaagaaggggaaagggaagaaacgcagagggaggcgaagcaagaaagaacgcaggcgagggaggaaggaaggcgaggaggatcagaatccaccttgtccaagattgaatggcgtgctgatggaggttgaggagccagaagttctgcaggattccctagacggatgctactctaccccaagcatgtatttcgaactacctgactcattccagcactaccgaagcgtgttttactcgtttgaagaacaacacatcagttttgcactgtatgtggacaatcggtttttcactctgacagtgaccagcctacacctggtcttccagatggaagtaatcttccctcagtag

SEQ ID NO: 126206 - DNA, 1824 bp, synthetic construct
  misc_feature 1..1824: note = Description of Artificial Sequence: Synthetic coding sequence
  source 1..1824: mol_type = other DNA
ccggttccgggtcctacctccagcgccaccaatgtgagcatggtggtctcagccggacccctgagctcagaaaaggcagaaatgaacatcttagaaataaatgagaagttgaggcctcagctagcagaaaagaagcagcaattcagaaatttgaaggagaaatgttttttgactcaactttccgggtttttagccaaccagcagaacaagtacaagtacgaggaatgtaaggatctgattaaattcatgttgcgtaacgagaggcaattcaaagaagaaaaactcgcggagcaactcaaacaggcggaggagttaagacagtacaaggtcctcgtgcatgcacaggaacgtgagctcacccagctgcgtgaaaagttaagggagggcagggatgcctcacggtcccttaacgagcatttgcaggccttgcttacccctgatgaaccggacaagtctcagggccaggatctgcaggaacagctggcagagggctgccgcctggcacagcaccttgtgcagaagctctcacccgagaacgacaatgacgacaacgaagatgtccaggttgaggtagccgagaaagttcagaaaagttctgctcctagagagatgcagaaagctgaggagaaagaggtcccagaggactccctggaggagtgtgcaatcacatatagtaatagccatggaccatacgactcaaatcagcctcatcggaaaacaaaaattacatttgaggaggataaggtcgactccacactgattggctcttcgagtcatgtcgagagagaggacgctgtgcacattataccggaaaacgagagcgacgatgaggaggaggaggagaagggccctgttagccctaggaacctgcaagagagcgaagaggaagaggtcccacaggaatcatgggacgaaggctattcgacccctagcataccacctgaaatgctcgcctcttacaagtcttacagttctacatttcactctttagaggaacagcaggtatgcatggctgtcgacatcggacggcatagatgggaccaagtgaagaaggaggaccaggaagccaccggacctagactgagccgggagctgctggacgaaaaaggtccagaggtgctgcaggactctctgtacagatgctattccacaccctccggatgcttggagctgaccgattcctgtcagccctaccggtctgccttttacgtgctggagcaacagcgcgtgggcctcgccgtggacatggacgaaattgagaaatatcaggaggttgaggaggaccaggacccatcctgtccacgcctcagtagagagctgttggacgagaaagagccagaggtcctgcaagacagtctcggccgctggtattcaaccccatccggataccttgagctacccgatttgggtcagccatacagctctgccgtctatagcttggaggaacagtacctcggcttggcgctggacttggatcgcatcaagaaggatcaagaggaggaggaggatcagggccctccctgtcctagactctccagggagctgctggaagttgtcgaaccggaggttcttcaagattctcttgacgttatccaattgctaccggtggtactgaacagtctcacaccagcatctccaatggaagtgcccttcatgcattggcgcaaaaatatgttggcttttctgttaacctgggaaaaactgaagcgcagaggacggggccgcaaagagggcgaggaggaccagcgtcggaaggaagagggggaggaaaagaagggtaagaagattaagacccaccatgcacctgggagtaccgcctgttag

SEQ ID NO: 126207 - DNA, 396 bp, synthetic construct
  misc_feature 1..396: note = Description of Artificial Sequence: Synthetic coding sequence
  source 1..396: mol_type = other DNA
atggcagatgttgtagtagggaaagataagggaggcgagcagaggctcatctcactgcccctgtctagaatacgcgtaatcatgaaaagttccccagaggttagttctatcaatcaagaggccctcgttctcaccgctaaagctactgaactattcgtgcagtgtctggctacttactcttatcgacatggatctggcaaagaaaaaaaagtgttgacttatagcgatctggcgaacaccgcacagcagtccgagacgttccaattcctggcggacatcctgcctaagaaaattctggcctcaaagtaccttaagatgctgaaggaggaaaaacgggaagaggacgaggagaatgataatgacaacgaatcggaccacgacgaagccgactcctag

SEQ ID NO: 126208 - DNA, 582 bp, synthetic construct
  misc_feature 1..582: note = Description of Artificial Sequence: Synthetic coding sequence
  source 1..582: mol_type = other DNA
atgggaaaacagaacagcaagttgcgaccagaagttatgcaagacctgctggagtccaccgacttcacggagcatgaaatacaggaatggtacaagggctttctgagagactgcccatccggccatctgtcaatggaagaatttaagaaaatctacggaaatttcttcccatacggagacgcttctaagtttgccgagcatgtgtttaggacctttgacgccaatggagatgggaccattgactttagagagtttattatagcgctgtctgtcacatcaagaggcaaactggagcagaaactcaaatgggccttcagcatgtatgatctggacggtaatggttacataagcaaagccgagatgctggagatagtccaggccatctataaaatggtatccagtgtgatgaaaatgcctgaggatgaatcaactcccgaaaagcgcacagagaagatctttcgtcaaatggacacaaatcgggacggtaaactttctctggaggaattcattagaggagctaaaagcgaccctagcatcgtccgactgcttcagtgtgatcccagctccgctggtcagttctag

SEQ ID NO: 126209 - DNA, 582 bp, synthetic construct
  misc_feature 1..582: note = Description of Artificial Sequence: Synthetic coding sequence
  source 1..582: mol_type = other DNA
atgggcaagcagaactccaagctccgcccagaagtcatgcaggaccttcttgagtcaaccgattttaccgagcatgagattcaggaatggtacaagggtttccttcgcgattgtcctagcgggcacctctcgatggaagagtttaagaagatttacggcaacttcttcccctatggcgacgcaagcaaattcgctgagcacgtgttccgcacttttgacgccaacggtgacggaaccatcgacttccgcgagttcatcatcgccctctccgtgacgagtagggggaagctcgagcagaaactcaaatgggctttttcaatgtacgacctcgatggcaatggctatatctcgaaggctgagatgttggaaatcgttcaggctatatataagatggtgagcagcgtgatgaagatgccggaggacgagagtacacctgagaagaggacagaaaagatttttcgacaaatggataccaatcgcgatggcaaactgagtctcgaggagttcattaggggagccaagtcggatcccagcatcgtacgcttgctacagtgtgacccttcctccgcaggacagttctag

SEQ ID NO: 126210 - DNA, 582 bp, synthetic construct
  misc_feature 1..582: note = Description of Artificial Sequence: Synthetic coding sequence
  source 1..582: mol_type = other DNA
atgggaaagcaaaattccaagttgcggcctgaagtgatgcaagatctcctcgagagcacggatttcacagaacacgaaattcaggagtggtataagggctttcttcgagattgccctagcggccatcttagtatggaggagtttaaaaagatctacgggaactttttcccctatggagacgcgagcaagtttgcagagcatgtctttcgcacattcgatgccaatggagacggcacaatcgacttccgcgagttcatcatcgcactgtctgtcactagcagaggtaagctggaacaaaaactgaagtgggcttttagcatgtacgatctagacggaaatggatacatctcaaaagccgaaatgctggagatcgtgcaggccatctacaagatggtgtcaagcgtgatgaagatgcctgaagatgaatccaccccggaaaagaggactgagaaaatcttccggcagatggatactaatagggacggaaagctgtccctggaagagtttattagaggggccaagagcgatcccagtatagttcgactcctccaatgcgacccgtcgtcagccgggcagttctag

SEQ ID NO: 126211 - DNA, 582 bp, synthetic construct
  misc_feature 1..582: note = Description of Artificial Sequence: Synthetic coding sequence
  source 1..582: mol_type = other DNA
atgggtaaacaaaatagtaagttgaggccagaggtgatgcaagacctgttggaatccacagattttaccgaacacgagatacaggaatggtataagggctttctgcgggattgtccctctgggcacctgagcatggaagaatttaagaaaatttacggaaatttcttcccatacggagacgcctccaaattcgccgagcacgtcttccgtacctttgatgctaacggcgacggcaccattgatttccgggaatttattatcgcactttctgtcacgtcccgaggaaagttagaacagaaactgaagtgggcttttagcatgtacgacctggacggaaatggatacatctcgaaggctgagatgctggaaatcgtgcaggctatatacaagatggtgagctctgtcatgaagatgccggaggatgaatctacacccgagaagcggacagagaaaattttcaggcagatggatactaatcgtgatgggaagctgagtttagaagagttcatccgcggcgccaagagtgacccttcaatagtgcgccttctgcagtgtgacccatccagcgctggacagttttag

SEQ ID NO: 126212 - DNA, 3966 bp, synthetic construct
  misc_feature 1..3966: note = Description of Artificial Sequence: Synthetic coding sequence
  source 1..3966: mol_type = other DNA
atgggcgccccattcgtgtgggcactgggcctgctgatgctgcagatgctactgtttgtagctggtgaacagggaactcaagatattaccgatgcgtctgagcgcgggctgcatatgcagaagttgggctcaggttccgtccaggccgccctggcagagctcgtggccctgccatgtcttttcaccctacagccccggccttcagccgctcgggacgcgcccagaatcaagtggaccaaggtgcgaactgcaagtgggcagcggcaggacctgcctattctggttgcaaaggacaatgttgttagggtggctaagtcgtggcaggggcgcgtttcacttccaagttacccccgccggagggctaacgcgactctgctgctggggccactgagagcatctgattcgggcctgtatcggtgccaggtggtcagggggattgaagatgagcaggatctggttcctctggaggttaccggtgttgtattccattaccggagtgcaagagaccggtacgccttgacttttgcagaggctcaagaagcttgccgactgtccagtgccatcatcgctgccccacgacatctgcaggccgcctttgaagatgggtttgacaattgtgatgccggctggctgtctgaccggaccgtacgctaccccattacgcagagccgtcccggatgctacggcgatagaagcagccttcctggtgtgcggtcatacggccgccgcaatccgcaggaactgtatgacgtctattgctttgctcgggagctgggtggggaggtattctatgtgggcccagcaaggagattgaccctggccggggctagggctcagtgccggcgccagggggcagctctcgcttccgttgggcagctgcatttggcctggcacgagggcctagatcagtgcgaccccggctggctcgccgacgggtccgtcaggtacccaattcagacaccgaggagacggtgtggtggtcccgcccccggcgtgcgcacagtgtataggttcgccaaccgcacaggtttccctagcccagccgagaggttcgatgcatactgcttccgggcccaccatcccacaagtcagcatggagacctggagacccctagctcaggagatgagggggagattctgagcgctgagggaccacccgttagggagttagaaccaaccttagaggaggaggaggttgtgactcctgatttccaggagcctctcgtgagctccggcgaagaggagacccttatcctcgaagaaaaacaggagagccaacagaccttgtcccccaccccgggggaccctatgctcgcttcttggcccactggcgaggtgtggttgagcacagtcgccccctccccttctgacatgggcgccggcactgctgccagctcacatacagaagtggccccaacagaccccatgccaagacgtcgcggcagatttaaaggtttgaacgggagatatttccagcagcaagaacccgagcctgggttgcaaggcggcatggaggcgagtgcacaacctcccacaagcgaagcagctgtcaaccagatggagccccctcttgctatggccgtgactgaaatgttggggtctgggcagtctaggagcccttgggccgacttgacaaatgaggtggatatgccgggtgccggcagcgccggaggaaaatcctcacccgagccttggctttggccacccacaatggttccaccctccataagtggacactcacgcgcaccggtgctagaattggagaaagccgagggcccgagcgctcgtcccgcaacccccgacctcttctggagtcctttagaggccacagtgtctgctccgtcacccgcaccctgggaagccttccccgttgcaacttctccagatctgccaatgatggccatgctgagggggccaaaagagtggatgctgccacatcccaccccaatcagcactgaggccaatcgagtggaggctcatggtgaggcaactgccaccgcaccaccgtcccctgctgcggaaactaaagtttacagcttgccccttagccttacccccactggtcagggaggggaggcaatgcccactactcccgagtcaccccgcgctgactttagagagacaggggagacatcccctgctcaggtgaacaaggctgagcattcatcatcatccccctggccctcggtgaaccgtaacgttgccgtggggttcgttcctacggagaccgccaccgagcctaccggattgagaggcatcccagggtctgagtccggagtcttcgacaccgccgagtcgcctacgtctggtctccaggccacagtggatgaagtgcaagacccctggccctccgtttactccaagggtctggatgcttcaagtcctagtgcgcccctcgggtcgcctggcgtattcttggtacccaaagttacacctaatctggagccttgggttgcaaccgacgagggtcctacagtgaacccgatggattcaaccgtgactccagcaccatctgacgcaagtgggatttgggagcctggatctcaggtgtttgaggaggctgagtccacaaccctctcacctcaagtggcactcgacacttccatagtgactcccctaactactctggaacagggtgataaggtcggcgttccagccatgagcaccctgggctccagcagctcccagcctcatcccgagcctgaagatcaggtagagacccaggggacctcaggagccagcgttcctccccatcagagtagtcctctgggtaagcccgcggtaccgccgggcacaccaactgctgcctctgtgggcgagagtgcttctgtgtcctccggagagcccaccgtcccgtgggatccatcatcgactctacttccagtcacactggggattgaagattttgagcttgaagtgctagccggcagccccggagtggagtccttttgggaagaggtggcatcaggcgaggagcctgcactgcccggaacgccaatgaatgctggcgccgaagaggtgcactccgatccgtgcgagaataatccttgtctgcatggtggaacctgtaacgccaatggtacaatgtatggatgctcatgcgaccagggatttgccggtgagaactgcgaaatagacatagatgattgcctgtgttcaccttgtgaaaacggtggaacctgcattgatgaggttaacggattcgtctgcctgtgtctaccgagctatggaggcagcttctgcgaaaaagacactgaagggtgcgatagagggtggcacaagttccagggtcattgttataggtatttcgcccataggagggcgtgggaagatgcagaaaaggattgtcggcggagaagcgggcatctaaccagcgttcactcaccagaggagcactcattcattaattctttcgggcatgagaatacgtggattggcttgaacgataggatcgtcgagcgcgatttccaatggacagataatacaggacttcaatttgagaactggagggagaatcagcccgacaactttttcgcgggtggcgaagattgtgtggtgatggtggcccacgaatctggccgctggaatgatgtcccctgcaactacaacctcccctacgtctgcaaaaaaggaacggttctgtgcggtccaccacccgccgtcgagaatgcttcccttatcggcgcacggaaagccaaatataatgttcatgctacagtgcggtatcaatgtaatgaaggtttcgctcagcaccatgtagccactatccgttgccggtctaatggaaaatgggaccgccctcagatcgtgtgtaccaaaccccgccggtctcaccggatgagaagacaccatcaccaccatcaacatcaccatcagcaccaccatcataaaagtcggaaggaaagacgcaagcataagaaacaccccacagaagactgggagaaagacgaaggtaacttttgctag

SEQ ID NO: 126213 - DNA, 2319 bp, synthetic construct
  misc_feature 1..2319: note = Description of Artificial Sequence: Synthetic coding sequence
  source 1..2319: mol_type = other DNA
atgccaggtgctggatccgcaggcggcaagtcgagccctgagccatggctatggcctcctacaatggtcccaccctctataagtggccattcgagggcacccgtgcttgaactggagaaggccgaaggaccctccgcgagacctgccacgcccgacctgttctggagcccacttgaggccacagtgagcgcaccatccccagcaccttgggaggcctttcccgtcgccactagccctgatcttcccatgatggccatgctgaggggccctaaagaatggatgttgcctcacccaactccgatctccacagaggccaatagggtagaagcccatggcgaagcgacagcgactgcccccccaagccccgctgcagagactaaagtctactccctgccgctgtccttaactcctactggacagggaggagaggcaatgccaactactcccgaatctccgcgagcagacttcagggagacaggggaaacctcccccgcacaggtaaacaaggcggaacattcatctagcagcccctggccctccgtcaacaggaatgtggccgtggggtttgtgccaaccgagactgctacagaacctacagggctgagaggcatccctggatctgaaagcggggttttcgacactgctgagagccctacctcaggcctgcaggcaaccgtggacgaagttcaagatccttggccatcagtctattcgaaagggctcgatgcctcatcccccagtgctccactgggctcccccggggtgttcttagtgccaaaggtgactcctaatttggaaccttgggtcgccactgacgaaggccccaccgtcaacccaatggacagtactgttactccagcgcccagcgacgcaagcggtatttgggaacctggatctcaggtgttcgaggaagcggagtctacaacgttgtcccctcaagtggccctcgatactagcattgtgaccccgctcacaaccctggaacaaggagataaggtcggagtacctgctatgagcactctggggagtagctcctctcagccccatcccgagccagaagaccaggtggagacccagggcacgtccggcgctagcgtgccaccccatcagtcctcacccctgggaaagcctgccgtaccacccggaactcccacagcagcatccgtgggggagagcgcatccgtgtctagcggagagcccacagtcccctgggatcctagttccactctcctgcctgtgacgcttggaatagaggatttcgaacttgaggtgctggctgggtcaccaggagtggagtcgttttgggaggaggtcgccagcggagaggaacctgccctacccggtacaccaatgaacgccggcgccgaggaggtgcacagcgatccctgcgaaaacaatccgtgtctgcacgggggcacttgcaatgcgaatgggactatgtacggttgctcctgcgaccaaggctttgctggggagaattgcgagatcgatatcgatgattgcctgtgtagtccgtgcgaaaacggagggacgtgcatagacgaagtaaacggcttcgtctgtctgtgcctcccctcctacggcgggtctttttgcgagaaggataccgaaggctgtgaccggggctggcataagtttcagggtcactgctatcgttactttgcccatcgcagagcatgggaggacgccgagaaagattgcaggcggaggtcaggtcacctgaccagcgtgcattcccctgaagaacattcctttatcaattccttcggtcatgagaacacatggatcggactgaatgaccggatcgtcgaaagggatttccaatggaccgataacacagggctgcagtttgagaactggagagaaaaccagcctgataatttctttgctggtggcgaagactgcgtggtcatggtggcccacgagtctggccggtggaatgatgttccttgtaattataaccttccctatgtttgcaagaagggcacagtcctgtgtggacccccccccgcagtcgaaaacgcaagtctgattggtgcacggaaggccaagtacaacgtacatgccaccgtccgctaccagtgtaatgaaggtttcgcacagcatcatgtcgcgaccattcggtgtcgttccaacggaaagtgggatcggcctcagattgtttgcactaagccaaggaggtcccatcgtatgaggcggcatcatcatcatcaccagcaccaccaccagcaccaccatcataagagtcgtaaggaacggcgcaagcacaagaagcatccgacagaagattgggagaaagatgagggcaacttctgctag

SEQ ID NO: 126214 - DNA, 4008 bp, synthetic construct
  misc_feature 1..4008: note = Description of Artificial Sequence: Synthetic coding sequence
  source 1..4008: mol_type = other DNA
cgtccaccaagagacgcttccgagctgggtgctaggtccaggatgggggccccttttgtttgggcactgggcctgctgatgcttcagatgctcctgtttgtggctggggaacagggcacccaggatatcacagacgcctctgaacgggggctccatatgcagaaacttggctcggggagtgtgcaggctgccctcgcggaattggttgcccttccctgcctgttcactctgcaaccgcggccctcggcggcacgcgacgcccctcgtataaaatggacaaaggtgcgaaccgcgagtggacaaaggcaggatttacccatccttgtcgccaaagataatgtggtcagggttgctaaatcatggcagggcagggtgtccctgccatcctatcctagacgtcgggctaatgcaaccctgttacttggcccattgagagccagcgatagcgggctctataggtgtcaggtggttaggggaattgaggacgagcaggatctggtccctctggaggtaacaggtgttgtctttcactacaggtctgcacgtgatcgttacgccctgacctttgcggaagctcaggaggcctgcaggcttagcagcgctatcatcgctgctcctagacaccttcaggccgcgttcgaggatgggttcgacaactgtgacgctgggtggctctctgatcggacagttagataccctattacccagagccgcccaggatgttacggagacaggagttcgctgcccggcgtgaggtcatacggcagaaggaatccacaagaactgtacgacgtctactgtttcgccagggagctgggtggcgaagtcttctatgtgggcccagccagaaggttgaccctcgcgggggctcgcgctcagtgtaggaggcaaggcgcagccctggcatctgtaggccaactgcacctggcttggcatgagggactcgaccagtgcgatcctggttggctggccgacggatcagtaagataccccatccagacaccccgtagacggtgcggaggccctgcaccgggcgtgagaaccgtctataggttcgcaaacaggacagggtttccctctcctgcagaacggtttgatgcctattgcttcagggcccaccaccccacctcacagcatggggacctggagactccaagctccggagatgagggggagattctgtccgcagagggcccgcctgtgcgtgaactggagcccaccctggaagaagaggaggtggtgactcctgactttcaggagccgctagtcagctctggcgaggaggaaacactgatcttggaggagaaacaggaaagccagcaaactcttagcccgacgccaggagatcccatgcttgcttcctggccgaccggagaggtgtggctgtcaaccgtggcccccagtccctcggatatgggggccggaaccgctgccagctcacacaccgaggtcgcccctaccgatcctatgccaaggcggaggggccgcttcaagggtctgaacggtaggtactttcagcagcaagaaccagagccggggctgcaaggcggtatggaggctagtgcgcaacctccaacttcagaggcagctgtgaaccagatggaaccccctttggccatggccgtaaccgaaatgctcggttcagggcagagccgcagtccgtgggctgacctgaccaatgaagtggacatgccaggtgcaggaagcgccggagggaagtcaagtccggagccctggctgtggccccctactatggtcccgccatctatctctggccattctcgggctccagtgctagaattagaaaaggccgaaggcccttccgcccgaccagccacgccagacttgttttggagccccttggaagctaccgtgtccgcaccctctcctgcaccatgggaggcattcccagttgccacttccccagatctgccaatgatggcaatgctgcgagggccaaaggaatggatgctgccacatcccactcccatcagcactgaggccaaccgggtcgaggctcatggcgaagccacagcaaccgcacccccctccccggccgctgaaacaaaggtgtattccctgccactgtccctcaccccgacaggtcaggggggggaagcgatgcccacaactcccgagtcgccaagggcggacttcagggaaacgggagaaacaagccccgcacaggtcaacaaagcagaacacagttcttcctccccatggccatctgtcaatcgcaatgtggccgtggggttcgtccctacagagactgcaactgaaccaacagggctacgcggaatcccaggctccgaatcaggcgtgtttgataccgcggagagcccaaccagcggtctgcaagcgacggtggatgaggtccaggatccatggccttcagtctactcaaaagggctagacgcttcctctccaagcgctccgctcgggtcacctggtgtttttctagttccaaaagtcactccaaacctcgagccatgggtcgccactgacgagggtcccaccgtcaatcctatggattcaacagtgacccccgcaccctctgacgcctccggtatttgggagccaggcagccaagtcttcgaggaggctgagagtaccacgctgtctccccaggttgcccttgacaccagcatcgttacacctctcactacactggagcagggcgataaagtgggtgttccagccatgagcacactagggagctcttcctcacaaccccatccggagcccgaggatcaggtggaaacacaaggtacttcaggcgcatccgtaccccctcaccagtcttcccccttgggtaagcctgcagttccacctggtacccctactgcggccagcgtgggggagagcgcgtcagtgtcctctggggagccgacagtcccctgggacccaagctctaccctgctgccagtgactctggggatcgaggatttcgagcttgaagttctagctggaagccccggagtggagtccttctgggaggaagttgcgtccggtgaggagcctgccctacctgggactcctatgaacgccggtgccgaggaggtgcattcggatccctgtgagaataatccctgcttgcacggaggcacatgtaatgccaatggcaccatgtatggatgctcctgcgaccaaggcttcgctggtgaaaattgtgagattgacatcgacgattgcctgtgttctccttgtgaaaatggcgggacttgtatcgacgaggtgaatggattcgtttgcctgtgtctcccatcgtacggaggtagcttctgtgagaaggatactgaaggttgcgatcggggctggcataagtttcagggccattgctatagatactttgcccaccgcagagcatgggaggacgcagagaaagactgcagacgcaggtcaggccacctaacgtctgtgcactcccctgaggagcacagttttataaattctttcggccacgagaatacctggattgggttgaatgaccgcatcgtggaacgagactttcagtggaccgataacaccggcctacaatttgagaattggcgggagaaccagcccgacaacttctttgccggcggggaagattgtgtagtcatggtagcccatgagtccggcagatggaacgacgtgccatgcaattacaacttgccatatgtttgtaaaaagggcacagtgctatgcggtcctccaccagcagttgagaatgccagcctgatcggcgcacgtaaggctaagtacaatgtgcatgctacagtgcgctaccagtgtaatgaagggtttgcacagcaccacgttgccacgatccgttgtcgatccaacggtaaatgggatagaccacaaatcgtgtgcaccaagcctcgccgatctcatcgcatgcggcggcaccatcaccaccatcagcaccaccaccagcaccatcatcacaagagccggaaagagcgtagaaagcacaagaagcaccccacagaggattgggagaaggatgaagggaatttttgctag

SEQ ID NO: 126215 - DNA, 2190 bp, synthetic construct
  misc_feature 1..2190: note = Description of Artificial Sequence: Synthetic coding sequence
  source 1..2190: mol_type = other DNA
atgagttgctgtgacttagcagccgctggacagctcggtaaagcaagtattatggcctctgattgtgaaccagctctcaaccaagccgagggaagaaatcctactcttgagcgctaccttggggcccttagggaggcaaaaaacgatagcgagcagtttgccgcattgctgttggtgacaaaggccgtcaaggccggagacatagacgccaaaactcgtagaaggatctttgacgcagtcggcttcacctttccaaatcgcctgctcacgaccaaggaggctcctgatggctgccctgaccatgtgctgagggccctaggggtggcgttgttggcatgcttctgcagtgaccctgaacttgccgctcacccccaagtgttaaacaagattcccattctgagtaccttcctaacagcacgaggagatccagatgatgccgctaggagatctatgatcgacgatacctaccagtgtctcactgctgttgcagggacaccgagaggcccaagacaccttatcgcgggtgggactgtgtcagccctgtgccaggcttatcttggccacgggtatgggtttgatcaggcccttgccctgcttgtcggtctgttggccgccgccgagacccaatgttggaaggaagcagagcctgatctgctggctgttttaagagggctctctgaagactttcaaaaagctgaagacgcctccaagtttgagctctgccaattgcttcctcttttcttgccacctacaactgtaccacccgaatgctaccgcgacctgcaagcagggcttgcccggatactggggtccaagctttcatcctggcagcggaacccagctctgaaactcgctgcgcggttggctcacgcatgcggttctgactggatacctgccggttcatcaggttctaaattcctcgccttgctggtaaacctggcctgtgtggaagtccgcctagccttggaggagacagggactgaggtgaaagaagatgttgtgacagcatgttacgcactaatggagctcggaattcaggagtgtactcgctgtgaacagagccttctgaaggaaccacaaaaagtacagctggtatccgtgatgaaagaagccattggagctgtgatccattacctcctccaagtgggatctgagaagcagaaggaaccattcgtcttcgcaagcgtgcggatactgggtgcgtggctggctgaagagacaagctcactgcgcaaggaggtttgtcaactcctgccgttcttagtccgctatgccaaaacattgtatgaggaagccgaagaagcaaatgacctgagccagcaggtcgccaacctcgccatttccccgactaccccaggacccacctggccgggggatgccctgaggctgttactgccaggatggtgccacctaactgtggaggatggccctagggaaatcttgatcaaagagggcgctccttcgctcctatgtaaatactttctccagcaatgggagctgacatcaccagggcacgacacatccgtgctgcctgacagtgttgagatcggattgcagacatgttgtcacatcttcctgaacctggttgttacagcccctgggctgataaaaagagatgcgtgcttcacatctctgatgaacactttgatgacttctctgcccgcgttggtccagcaacaggggcgcctcctgctggctgccaacgtggctacactgggactgctgatggcgcgtctgctgagcaccagtcctgcactccaaggtacacctgctagtagaggttttttcgctgccgccattctgtttctgtctcagtctcacgttgccagggcgacccctggcagcgatcaagccgtcctagccctctcacctgagtacgagggaatttgggcagacctgcaggagttatggttcttgggcatgcaggcattcaccgggtgtgtgcctttacttccgtggctggctccagccgccctgcgctccagatggccacaggagctgctacagcttctgggatcggtgagccctaactctgtgaaacctgagatggttgccgcctatcaaggggtcctggtggagcttgcaagggctaatcgcctgtgccgcgaggctatgcggctccaagccggcgaggaaacagcgtcgcactatcgcatggcagccctagagcagtgtctgtcagaaccgtag

SEQ ID NO: 126216 - DNA, 2190 bp, synthetic construct
  misc_feature 1..2190: note = Description of Artificial Sequence: Synthetic coding sequence
  source 1..2190: mol_type = other DNA
atgtcctgctgtgacttggctgcagccggccaactggggaaagcaagcatcatggcgtccgattgtgagccggccttgaaccaagccgaagggcgcaatcccaccctagaacgttatctgggcgctctgcgcgaagcgaagaacgattctgagcaattcgccgcacttctcttggtaaccaaggccgtgaaagccggagatatcgatgcaaaaactcgaagaaggatctttgatgcggtgggattcacattcccaaacagactgcttacaaccaaggaggcacccgatgggtgccccgatcacgtcctgagagcgctgggagttgctctacttgcttgcttctgtagcgatcccgaactcgctgcacatccccaagtccttaacaaaatccccatcctcagcaccttcctgactgccaggggcgatcccgacgacgccgccaggagaagcatgattgatgacacgtaccaatgcctcacagccgtcgcaggaaccccccgaggccctcgccatctcattgctggcggtaccgtgtcagctctctgccaggcataccttggccacggctatgggtttgatcaggctctggctctgcttgtgggccttctggctgccgccgaaacccagtgctggaaggaggcggagcctgatttgctcgccgtattgcggggcttatccgaggacttccagaaggctgaggatgcctccaagttcgaactgtgtcaactgctccccttgttcctcccaccaacaacagtccctccagagtgctatagggacttgcaggcaggtctggcccgtatcctcggctctaaattgagtagctggcaacgcaaccccgcattgaaacttgccgcccgcttagctcacgcctgcggctcagattggatcccggctggctcaagcggaagtaagttcttggctctgctcgttaaccttgcttgcgtggaagtgagactggcattggaggagaccggaaccgaggttaaagaagatgtcgtcaccgcgtgctatgcactgatggaattaggaatccaggagtgtacaagatgcgaacagtccctgctgaaggaaccacagaaagttcagctagtgagtgtgatgaaggaggcgatcggcgcggtaatacattacttgctgcaggttggtagcgagaaacagaaggagccattcgtttttgcttcagttcggattttaggcgcatggctggcagaggagacatcgtccctccgcaaagaggtgtgtcagctgctgcctttcctggttagatacgcaaagaccctgtatgaagaagccgaggaagcaaatgacctgagtcaacaggtagcgaacttggcaatcagcccaaccacccctgggccaacttggccaggcgatgccttgaggttgttactgccaggatggtgtcatctaaccgtagaggacgggcccagagagatcctgataaaggaaggggcacctagtctgctctgcaagtatttcctgcagcagtgggaattgacctcacctggccacgatacgtctgtcctgcctgacagtgttgagattggtcttcagacgtgctgccatattttcctcaatctggtcgtgaccgctcccgggcttattaagagggacgcatgcttcacctccttaatgaacaccttaatgacgtcactgccagctctggtccagcagcaaggcagactgttgctggccgctaacgtggccaccttaggactcctcatggctcgactgttgagcacgagcccagccttgcaggggacgcctgcatcgagagggttcttcgcagccgcaattttgttcctgtctcagtcccacgtggccagagcgacacctggaagcgaccaagccgtgctggcgctttctcccgagtatgaaggtatttgggctgacctgcaggaactgtggttccttgggatgcaggcatttaccggatgtgtgccactcctaccgtggctggcacccgctgcactgcgatcacgttggcctcaggaactcctgcagctgctcgggtcggtatcccccaactccgtgaaaccagagatggtagcggcctaccaaggagtcctggtcgaactggcccgagctaatcgactttgccgagaggcaatgcgcctgcaggccggcgaggaaactgccagccactacaggatggccgccctggagcagtgcctgtcagaaccctag

SEQ ID NO: 126217 - DNA, 2139 bp, synthetic construct
  misc_feature 1..2139: note = Description of Artificial Sequence: Synthetic coding sequence
  source 1..2139: mol_type = other DNA
atggccagcgactgtgagcccgccctaaaccaagcagaggggagaaatcctacgttggaaaggtacctgggggcactccgcgaggctaagaacgactccgagcagttcgccgctctgctgctggtcacaaaggcagtgaaagccggggatatcgacgcaaagactcggaggcgtattttcgacgccgtgggcttcacttttcccaaccggctgctgaccacaaaggaagcaccggacggctgtcccgaccacgtcctgcgagccctgggagtcgccctgctggcctgtttctgctccgacccagagctggctgctcatccacaggtgctcaacaagattcctatcctgtcaacctttctgacagcacgcggtgatcccgacgacgccgccagacgaagtatgattgatgacacataccaatgcttgaccgccgtcgccggaactcctcgcgggcctcgccacctgattgcgggcggtacggtgtccgcactgtgccaggcttacttagggcatggttatggcttcgatcaagctttagcactgttggttggacttctggccgcggccgaaacacagtgctggaaagaggccgagccggacctgcttgcagtcctgcgtggcctgtccgaggattttcagaaggccgaagacgctagcaagttcgagctgtgccagctactgccgttgtttctgccacccacaacagtgccaccggagtgttaccgtgacctgcaggccggactggcacgtatcctggggtccaaactgagtagctggcagcgaaatccagcacttaaactggcagctcgactggcccacgcttgcgggtctgattggattcccgcaggcagctctggatcgaaatttctcgcactgttagtcaatctggcctgtgtggaggtccgactggccctcgaagaaacaggaaccgaagtcaaggaggacgttgtgacagcatgttacgcgctgatggaactcgggattcaggaatgcacccgatgcgaacagagtctgttaaaggagccgcagaaggtgcagctggtgtcggttatgaaagaggccataggtgccgtgatacattacctgctgcaggttggaagcgaaaagcagaaggagccattcgtgtttgcctctgtgaggatcctgggtgcctggttagccgaggagacttctagcctgcgcaaggaggtgtgccagctactgccctttctcgtaagatacgccaaaacattgtacgaagaagccgaagaggctaatgatcttagccagcaggtggccaacttagccattagcccgaccacacccggccctacatggcctggggatgccctgaggctgctgctacccgggtggtgtcatctcacagtggaagacggaccaagagagatcctgataaaggagggcgctccttccctcttgtgcaaatattttctccagcaatgggagctgacttccccgggtcatgatacatcggttttgccagattccgtggaaataggtttacagacctgttgtcacatttttctaaaccttgtggtcactgctccaggacttattaaaagggacgcatgcttcacctcactgatgaacactctgatgacatcactgcccgctctggtacaacagcaggggaggctcctcctcgccgctaacgtggcaaccttggggctgctgatggctaggttgctgtccacgtcgccagccctgcagggtacgccagcctctcgtggattctttgcagcggccatcctgtttttaagccagtcacacgtcgcccgcgcaacaccagggagtgaccaggcagttctagcactatccccagagtacgaaggaatttgggctgacctgcaagagttatggttcttgggaatgcaggcctttaccggatgtgtacctctcctgccatggctggcgccagcggccctacgctcccggtggccacaggaacttctgcaactgctgggatcagtgtctccaaatagtgtcaagccagaaatggttgccgcctaccagggcgtccttgtggaactggctcgggccaatcgattgtgtcgggaagctatgcgactgcaggcaggtgaagagacggcctcccactatcgcatggccgccttggagcagtgtctgagcgaaccttag

SEQ ID NO: 126218 - DNA, 531 bp, synthetic construct
  misc_feature 1..531: note = Description of Artificial Sequence: Synthetic coding sequence
  source 1..531: mol_type = other DNA
atgccgcatagtttcagatacctcgccgcccttcagggcacaccagcctcacggggcttctttgccgctgctatcctctttcttagtcagtcccacgtagcacgagcgacgccaggatctgaccaggctgtgttggctctttccccagagtatgaaggaatttgggcagatctgcaggaactatggtttctaggcatgcaggcattcaccggatgtgtgcccctactgccttggctggcgcctgcagccctccgctctcgttggcctcaggaactacttcaattattgggatcacagccacagctctgccaggcacgcgacggcgggcgacttagtggttgtcccgggggtgcgggcgccggtcagcctgctgtacccggcggacacgaggctgctggcggaaggggcgatggacagccactgcctcacgggtgtcttggcgccgtgcctgtcagagcactccgcggggtccacagaggccagacgcaaggaagggccgaacgggagggcggtcgaagacatttgccctag

SEQ ID NO: 126219 - DNA, 582 bp, synthetic construct
  misc_feature 1..582: note = Description of Artificial Sequence: Synthetic coding sequence
  source 1..582: mol_type = other DNA
tagagcagtttaaggaaggaggtctgtcagctactacccttcttggtgcgttacgcgaagacactgtacgaagaggcagaagaagctaatgacctgagccaacaggtcgcgaacttagcaatctccccaaccacaccaggccccacctggccgggggacgccctgcggctgctactaccagggtggtgccatctcacggtggaagatggacctcgcgaaattctcataaaggagggtgcccctagcctcctatgtaagtatttcctccagcagtgggagcttacctcccctgggcatgatacttcggtgttgcctgacagtgtggagatcggcctgcagacttgctgccacatcttcttgaacttagtggtcacagctcccggcctgataaagagggatgcttgctttacgtccctcatgaacaccttaatgaccagtttaccagctcttgttcaacagcaaggcagactcctgcttgctgccaatgtcgcgaccctgggcctgctgatggcacggctgctctcaacctccccgggttccatttcttctcagttgccaggagctgaacacatgccatgctag

SEQ ID NO: 126220 - DNA, 735 bp, synthetic construct
  misc_feature 1..735: note = Description of Artificial Sequence: Synthetic coding sequence
  source 1..735: mol_type = other DNA
atggcatctgattgcgagcccgctctgaatcaggccgaggggaggaatccaaccctggagcggtatctgggcgctctgcgggaggcaaaaaatgactcagaacagtttgctgccctcttactggtgaccaaagcggtgaaggctggcgatatagatgcaaagacaagacggcgcatcttcgacgctgttgggttcaccttcccaaaccgcctgctaactactaaagaggcccccgacggttgccctgaccacgttctccgagctctgggagtcgcactccttgcttgcttctgcagcgatcccgagttggccgcacacccccaagtcttaaacaagatacccattctgtcgacatttctgaccgcacgcggggacccggacgacgccgcaagacggagcatgatcgacgacacttaccagtgtctgacagcagttgcgggaacaccccgcggacctcggcacctgatcgccggaggaacagtctccgccttatgccaggcatacctcggccatggctatggctttgatcaagccctcgcacttctggtgggcctcctggctgccgcagagacccagtgttggaaagaagccgagcccgacttgctggcagtgctgaggggcctcagtgaggattttcagaaggctgaggacgcatctaaattcgagctgtgccagctgctgcctctcttcttgccccccaccaccgtaccaccagaatgctaccgggatctctag

SEQ ID NO: 126221 - DNA, 1791 bp, synthetic construct
  misc_feature 1..1791: note = Description of Artificial Sequence: Synthetic coding sequence
  source 1..1791: mol_type = other DNA
atggagccggagctggccgcccagaagcagccacggcctcggaggcggagccgacgcgcctccgggctgagcacagagggagccactgggccaagtgccgatacgtcaggttctgagctggatggaagatgttcgttgagacggggctccagcttcacattcctcacgccagggccaaattgggacttcactctgaagaggaagagacgggaaaaggatgatgatgtcgtctccctgagctctctggacctgaaggagccatctaataagcgagtgcgcccactggcgcgggttacttctctggcgaatctgatcagtccagttaggaacggtgccgtgcgacgtttcggacagacaattcagtcttttaccctgagaggagatcatcgatcacctgcctccgctcagaagttttcctctcgaagcacagtaccaactcctgccaagcgacggtctagcgccctctggtcagagatgttggatatcacaatgaaagaaagcctaacaacccgggagattcgccgccaggaagcaatttatgaaatgtctaggggggagcaggatctcatcgaggatctgaagctcgcccgcaaagcctaccacgaccccatgctcaaactcagcataatgtcagaagaggagctcacacacatctttggcgacctggacagttacatccctttgcacgaagacttactgactagaattggtgaagcaactaagccagatggtactgtcgagcagattggtcacatcctggtctcctggttgcctaggctcaatgcgtaccggggttactgttccaaccagctggctgcaaaggcgctccttgatcagaagaagcaagatccccgggttcaggacttcctgcagcggtgtttggagtctcctttttccagaaaattggatctgtggtcttttcttgacattcctcgctctagactggtgaagtatcccttgctgctcaaggaaatactaaagcataccccaaaagagcatccagatgtccagttacttgaggatgccatcttgattatccagggtgtcttatcagatatcaaccttaagaaaggtgaaagtgaatgtcaatattacatcgacaagctggagtaccttgatgaaaaacagagagatcccagaattgaggcgagcaaagtgctcctgtgccacggggagcttcggtctaaaagcggacataagctgtacattttcctctttcaggacatcctggttctgacgcgccccgtcaccagaaacgagcggcactcctaccaagtgtatcgtcagcctattccagtacaggagctggttctggaggacctgcaggacggagatgtccggatgggcggttctttccgtggcgcgtttagcaatagcgagaaagccaaaaatatttttcgaatcaggttccatgacccaagccctgcccagtcccacacattgcaggctaacgacgttttccataagcaacagtggttcaactgtattcgggctgcaatcgcaccatttcagagcgctggatcgcccccggagctgcaaggcctgcccgaactccacgaggagtgcgaaggcaaccatcccagcgcaagaaaactgaccgcccagcggcgagcaagtacagtatcaagtgttacacaggtggaagtggacgagaacgcctatcggtgcggcagcggcatgcagatggcagaggattcaaaatctctgaaaactcaccagacacagcctggcatccgcagagcccgcgataaagccttatccgggggaaaaagaaaggaaacgttggtttag

SEQ ID NO: 126222 - DNA, 483 bp, synthetic construct
  misc_feature 1..483: note = Description of Artificial Sequence: Synthetic coding sequence
  source 1..483: mol_type = other DNA
atggtggcccacgacgaaacgggcggcctactacccatcaagaggactattagagttctggatgtgaataatcagtccttcagggagcaggaggaacttacacacatcttcggagacctggatagctatattcctctacacgaggatttactcacacggattggggaagcaaccaaacccgacggcactgtggaacagatcggccacatacttgtaagttggctccccagactcaatgcataccgggggtattgctccaatcagctggcagccaaggcgctgctggaccaaaagaagcaggacccacgagtccaggactttctgcaacgctgcctggagagcccattcagcaggaagctggatctctggtcctttctggacatccctaggtcacggttagtcaagtatcccctcctgctgaaagaaattctgaagcacactcccaaggagcacccggacgtacagctgcttgaagacgcttag

SEQ ID NO: 126223 - DNA, 1629 bp, synthetic construct
  misc_feature 1..1629: note = Description of Artificial Sequence: Synthetic coding sequence
  source 1..1629: mol_type = other DNA
atggttgcacacgacgagactggtgggctcctccctattaagcgcaccattcgcgtccttgatgtgaacaatcagagctttcgggaacaagaggaaccttccaacaagcgtgtgcgacccctggccagagttacgtcactcgccaacctaatttctcctgtgagaaatggtgccgtgcggaggtttgggcagaccattcaaagtttcaccctccgcggggatcacagatctccagcttctgctcaaaagttttcatctagatctacagtgcccacccctgcaaagagacgaagttctgccctttggtctgaaatgctcgacattacgatgaaagagtcccttactaccagagaaattaggcggcaggaagccatctacgaaatgagcagaggggaacaggatctgattgaggaccttaaactcgctcggaaggcctatcatgatcccatgctgaaattgtctatcatgagtgaagaggaactgacccacattttcggggacttggattcttacattccactgcatgaggatctgctgacccgaatcggcgaggcgactaagcctgatggcactgtggaacagattgggcacattctagtaagctggctgccacgcctgaatgcttacagagggtattgctctaaccaactggctgccaaagcgctcctcgatcaaaagaagcaggacccccgggtgcaggatttcctgcagcgatgtctggaatcaccgttttcaagaaagctggacctgtggagtttccttgacattcccaggagcaggctggtcaagtatccactgttactgaaggaaatactgaaacatacaccgaaagaacacccagacgtgcagctgctggaagacgctatcctcatcattcagggagttctcagtgatatcaacctgaaaaaaggggagagtgagtgtcaatattacatcgacaaattagaatacctcgacgagaagcagagagaccccaggatcgaagcgtccaaagtacttctgtgtcatggagagctccgttccaaatctggtcacaagctgtatattttcttgttccaggatattctcgtcttaactcgccccgttactagaaatgagcgtcattcataccaggtttaccgccagccaatccccgtgcaggagctcgtgctggaggaccttcaggatggcgatgtgcgcatgggagggtcattccgaggcgcgtttagcaattccgaaaaggcaaaaaacattttcaggattcgctttcatgatcccagccccgcacagtctcacacactgcaggctaacgatgttttccataaacaacagtggtttaattgtatacgggccgctattgcccctttccaaagtgccggatctcctccagagttacaggggctccctgagctccatgaagagtgcgaaggcaatcacccttctgcccgcaagttgaccgctcaaagacgggcctccacagtctccagtgtgacgcaagtcgaagtggacgaaaacgcttaccgctgcggctctggaatgcaaatggccgaggactcgaaatccctgaaaacgcatcagactcagccgggtatcaggagagcacgagacaaggccctctcaggcggtaagcgtaaggaaactcttgtgtag

SEQ ID NO: 126224 - DNA, 483 bp, synthetic construct
  misc_feature 1..483: note = Description of Artificial Sequence: Synthetic coding sequence
  source 1..483: mol_type = other DNA
atggtggcacacgacgaaactgggggcttgttgcctataaaaaggaccattcgagtcctcgacgttaacaaccagtctttccgggagcaagaggaactcacccacatcttcggtgatcttgactcttacattcctttacacgaggatctcctgacgaggatcggggaggcgacaaagccggacggaacggtggagcaaataggccatatactggtgagttggctccccaggctgaatgcctatcggggctactgcagcaaccaacttgcggctaaggccctgttggaccagaagaagcaggatccgagggtccaggacttcctccagcgatgtctggagtcacctttcagccgcaagctggacctgtggagcttcctcgacataccccgaagtcgtctcgtcaagtatcctcttcttcttaaggagattctgaaacacacccctaaagaacaccccgacgttcaattgctggaagacgcttag

SEQ ID NO: 126225 - DNA, 1248 bp, synthetic construct
  misc_feature 1..1248: note = Description of Artificial Sequence: Synthetic coding sequence
  source 1..1248: mol_type = other DNA
atgtcccgcggagagcaggatctgatcgaggatcttaagctggcccgaaaggcctatcatgacccaatgctcaagctgtctatcatgagcgaagaagagctaactcacatatttggggatctggactcttacatccctctccacgaagacctactcactcgcatcggagaggcgacaaagccagacggaacggttgagcagatcggacatattctggtgtcttggctgcccaggctgaatgcttacagaggttactgcagtaatcagctggccgctaaagcattgcttgatcagaagaagcaggaccccagggttcaggactttctccaaaggtgcttagaatcacccttcagcagaaagctggacctgtggtcatttctggatattcctcgatctaggcttgtgaagtatcccctgttgttaaaagaaattctgaagcatacccctaaagagcaccctgatgtccaactgctggaagacgctatactgatcattcagggggtccttagcgacatcaatctcaagaaaggcgagtcagagtgtcagtattacatagataagctcgagtacctcgacgagaaacagcgtgatcccagaattgaggcttcaaaggtcctcctctgccatggagaattgcggtcaaagagtggacacaaactctatattttcctattccaggacattctcgtgctgactcgtcctgtgacccggaatgagcggcattcctatcaggtgtatcgccagcctattccggtgcaggaacttgtgttggaggacctgcaggacggagatgttcggatgggaggctccttccggggcgccttcagcaactccgagaaggccaaaaacatctttaggatccgttttcacgaccctagcccggcccagagtcacactctccaggcaaacgacgtgttccataagcaacaatggtttaattgcatcagagccgccatagctcccttccaaagcgccggtagccctccagagctgcagggactcccggaacttcatgaggagtgtgaggggaaccaccccagtgcacggaaactgaccgcacaaagaagggccagtacagtcagtagcgtcactcaggttgaagttgacgagaacgcctatagatgcggctcaggcatgcagatggccgaagatagtaagagccttaagacccatcagacacagcctgggattagacgagctcgcgataaggccctcagcgggggcaagcgcaaggagacccttgtgtag

SEQ ID NO: 126226 - DNA, 3063 bp, synthetic construct
  misc_feature 1..3063: note = Description of Artificial Sequence: Synthetic coding sequence
  source 1..3063: mol_type = other DNA
atgatgtctttcggaggtgctgacgcactgctcggcgctccctttgctccgctgcatggaggcggctcactgcattatgccttggcgcgcaaagggggcgccggcggtactcgaagcgccgcaggatctagctcaggtttccactcctggacccgtaccagcgtatcttctgtttccgcctccccatctagatttcggggcgccggggccgccagctctaccgattctctcgataccctgagcaacggccctgagggatgtatggtggctgtggccaccagtagatccgagaaagagcagctccaggctcttaacgacaggtttgccggctatatcgacaaggtccggcagcttgaagcacacaaccgctccctggaaggggaagccgccgcactgagacagcagcaggccggcagatcagcaatgggcgagttgtacgagcgagaagttagggaaatgagaggagccgtccttaggttaggagcggctcgggggcagcttagactagagcaggagcatctgcttgaggatatcgcgcacgttagacaacgactggacgacgaagctcgacagcgagaagaagcagaggctgccgctagagcactggcccgattcgctcaggaggcagaggccgcccgggttgacctccaaaaaaaagcccaggcccttcaggaagaatgcggctatttaagacggcatcatcaggaggaggttggcgaactactggggcaaatccaaggttcaggagccgctcaagcgcagatgcaggctgaaacacgtgatgcactgaaatgcgatgtgactagcgctctgagggagatcagggcacagctggagggccacgctgtgcagtctactctccaatccgaggaatggttccgggtccgcctcgatagactctcagaagccgccaaagtgaacactgacgctatgagaagtgcccaggaggagattacagaataccgccggcagctccaggctcggacaacagagctggaggccttaaagagcacgaaggacagcctggagcgacagcgttcggagctggaagaccggcatcaggccgacatagccagttaccaggaggcaatccagcaacttgacgcggagcttaggaacactaagtgggaaatggctgctcaactccgcgaatatcaggacctccttaacgtgaagatggcactggacatcgagattgctgcttaccgtaagctgctagagggcgaggagtgtaggatcggtttcgggcctatcccattcagcctgccagagggccttccaaagatcccctcagtcagtacccacataaaggtgaaatccgaagaaaagattaaagttgtggagaaatccgaaaaggagactgtgatcgtcgaagaacaaacagaagagacccaggtgacggaggaagtgaccgaggaagaggaaaaagaggccaaagaagaggaggggaaggaggaggagggtggggaggaggaagaggctgagggcggcgaggaggagacaaaaagcccccctgccgaggaagcagcctcccctgagaaggaagccaagagccctgtgaaggaggaggccaagtcaccggctgaagctaaatcgccagagaaggaagaagcaaaaagtcctgccgaggtcaaatcacctgagaaggccaaaagccccgcgaaggaagaagccaaatccccccccgaggccaaaagcccagagaaggaggaggcaaaatcgcccgccgaggtaaagtcccccgagaaggcaaaaagccctgcaaaggaagaggctaaaagcccagctgaggcaaagagtccagagaaggccaagtcgcctgtgaaagaggaagccaaatcgccggctgaggcaaagagccccgttaaggaggaagccaaatctcccgctgaggtgaagagccctgagaaggcaaagtcacccacaaaagaggaggcaaaaagcccggagaaggccaaaagtccagaaaaagaagaggccaagtccccagagaaggcaaagtcccctgtgaaagccgaggcgaaatccccagagaaggccaagagccccgtgaaagccgaggctaaatcccctgagaaggccaagagccctgtgaaggaagaggctaaatctcccgagaaagccaagtcaccagtgaaggaggaggccaagtctccagaaaaggccaaaagtccagtcaaggaagaggccaagaccccagaaaaggccaagtcacccgtgaaagaagaggcgaaatcaccagaaaaagcaaagagtcctgaaaaagccaaaacattggacgtcaaatccccagaggcaaagacccccgcgaaggaagaagcacgttctccagcagacaagttcccagagaaggccaagtcccccgtgaaggaggaggtgaagagtccagagaaggccaagtcacctctgaaggaggacgccaaggcccctgagaaagaaatcccaaaaaaggaggaagtgaaatcacccgtaaaagaggaagagaagccacaagaagtgaaggtgaaggaaccgccaaagaaagcggaggaagagaaagccccagccactcccaaaaccgaagaaaagaaagatagtaagaaggaggaggcacctaagaaagaagcacccaagcctaaagtcgaagaaaaaaaagaacccgctgtggagaagcctaaggagtccaaagttgaagccaagaaagaagaagccgaagataagaaaaaagtccccaccccagaaaaagaagcccctgcgaaagtcgaggtcaaagaggatgctaagcctaaagaaaagactgaagtggccaaaaaagagccggatgacgcaaaagcgaaagaaccctcaaaaccagctgagaagaaggaggcagcccctgaaaagaaagacacaaaagaggagaaggcgaaaaaacccgaggaaaaacccaaaactgaggcaaaagccaaggaggacgacaaaacactctccaaagaaccctctaagcccaaagcggaaaaggcggaaaagagcagtagtaccgatcagaaggattcaaagcctccggaaaaggccacagaggacaaggccgctaaaggcaagtag

SEQ ID NO: 126227 - DNA, 2916 bp, synthetic construct
  misc_feature 1..2916: note = Description of Artificial Sequence: Synthetic coding sequence
  source 1..2916: mol_type = other DNA
atgatgagctttggtggagctgatgcactgttgggggctccattcgccccattgcatggcggcgggtccctgcactatgccttagctcggaagggaggcgctggggggacccgcagcgctgcgggcagcagctccgggttccacagctggactagaacttctgtttcatccgtcagtgcaagcccttctcgatttagaggcgcgggagccgccagttcgaccgactctcttgacactctgtcaaatgggcccgaagggtgcatggtggcagtggctacttctcgatccgagaaggaacaacttcaagccttgaacgacagattcgcaggctacattgacaaagtacgtcagctggaggcgcataacagaagcctcgagggcgaagctgctgctctcaggcagcagcaggctggcagatcagccatgggtgaattatacgagcgcgaggttagagagatgcgtggggccgtgttacgcctgggtgcggctcgggggcagctccgcctggagcaggaacatctgctagaggacatcgcacacgtgcgtcagcggctggatgacgaggcccggcaacgagaagaggcagaggctgccgcccgggctttggctcgattcgcgcaggaagccgaggcagcaagggttgacttacagaaaaaggctcaagcccttcaggaggaatgcggatacctgaggagacaccaccaggaggaggtcggagagttattggggcagatccagggctcaggtgccgcccaagcccagatgcaggccgagacacgcgacgccctgaagtgtgatgtgacatctgcccttcgggaaatccgagcacagctggagggacatgccgtccagtccacattacagtccgaggagtggtttcgcgtaaggctggataggttgtctgaagccgccaaggttaatactgacgcaatgcgttccgcccaggaagagattacagagtatcggcggcaactccaggctcgcacgacagagctggaggctctcaaaagcaccaaggactctttggagaggcagagatccgagctggaggacagacatcaagcagatatcgcatcttaccaggaagccatccaacagctagatgccgagttgaggaacacaaagtgggagatggccgcacagctaagggagtaccaggacctgttaaatgtcaagatggctctcgatatcgagatcgcagcttaccggaaactcttggaaggtgaggagtgccggattggcttcggtcccattcctttcagtttgccggagggcctgcctaaaattccaagcgtgtcgacccatattaaggtgaaatcagaagagaagatcaaagtcgtcgagaaatcagagaaggaaaccgtgatagtggaagagcagacagaggagactcaggtgacggaggaagtcaccgaggaagaggaaaaggaagcaaaggaagaggagggtaaggaggaagaagggggcgaagaagaagaagccgagggcggggaggaggagacgaaatccccaccggcagaagaggccgccagtccggagaaggaagctaaatcccccgttaaggaggaggccaagtcccccgctgaggctaagtctcctgaaaaggaagaggctaaatctccagcggaggtgaaatctcccgagaaggccaagagtccggctaaagaggaggccaaatctccccccgaggccaagagtcccgaaaaagaggaggccaagagtccagccgaggtcaagtcaccggaaaaagcgaagtcgccagcgaaagaggaggctaaaagcccagctgaggcaaagagtcctgagaaagcaaaatctcccgttaaggaagaggcaaagtcacccgctgaagccaaatcaccagtgaaggaagaggccaagagccccgccgaggtaaaatcacctgagaaggccaagagccctaccaaagaagaggccaagtctcccgagaaggccaagagcccagagaaagaggaggctaaatcacccgaaaaggcaaaaagccccgtgaaggccgaagccaagagccccgagaaagccaagagccctgttaaggccgaagctaaaagcccagaaaaggctaagtcaccggtcaaagaagaagctaagtctccggaaaaggctaagagccctgtgaaagaagaggccaagtcccctgagaaagctaagtctcctgttaaggaggaagccaagacccccgagaaggctaagagccccgttaaagaggaggcaaagtcacctgagaaagctaagtctccgttaaaagaagacgccaaagcccccgaaaaggagattcctaagaaagaagaggtgaaatcacccgtgaaagaggaagaaaaaccacaggaagtaaaggttaaggaaccccccaagaaggccgaagaggagaaggctcctgctactcccaaaactgaggagaagaaggattcaaagaaggaggaggccccaaagaaggaggcaccgaaaccaaaggtagaggagaaaaaagagcctgcagtggaaaagcccaaggagtccaaggtagaggcaaagaaggaggaggcagaggacaaaaagaaggtgcctacgcccgaaaaggaggctccagcaaaagttgaggtgaaggaagatgctaagcctaaagaaaaaaccgaagtagctaaaaaagagccagacgacgctaaagcgaaggagcccagcaagcctgccgagaagaaggaagccgcgcccgaaaagaaagatactaaggaggaaaaagccaagaaacccgaggagaaaccaaagactgaagccaaggctaaagaagatgataaaactttatccaaagaaccgtcaaaacctaaagctgagaaagccgaaaagtcatccagcaccgaccagaaggattctaaaccgccagagaaggctactgaagacaaggcagccaagggcaaatag

SEQ ID NO: 126228 - DNA, 930 bp, synthetic construct
  misc_feature 1..930: note = Description of Artificial Sequence: Synthetic coding sequence
  source 1..930: mol_type = other DNA
atggatgataaggcatttaccaaggaactcgaccagtgggtggagcaactgaacgagtgtaaacagcttaacgaaaaccaggtgaggaccttatgtgagaaggccaaagaaatcctcacaaaagaatcaaacgtgcaggaagtgcgctgcccggtgacagtgtgcggggacgttcacggacagtttcatgacctgatggagctcttccgcatcgggggcaaaagccccgacactaactatctattcatgggggactacgtcgatcggggctactatagcgttgagactgtcaccctgctggtcgcgctcaaggtgcggtaccccgaacgcattacaatcctccgcggcaaccacgagagcagacagatcactcaggtgtatgggttctacgatgagtgtctccgaaaatatggaaacgctaacgtgtggaagtactttacagacttattcgactacctcccgttaacagctctagtggatggccagatcttttgcctacatggtgggctgagcccctccattgacacacttgaccatatccgggccctggatagattgcaggaggtaccacacgagggacccatgtgcgacctgctctggtccgatcctgacgaccggggggggtggggtattagtccaagaggcgctggatacacattcggtcaagatatcagtgaaaccttcaaccacgccaacggcctgacactagtttcaagggcacatcaactggtgatggagggttataattggtgccatgatagaaacgtcgttactattttttccgctccgaactattgctatcgatgtggaaaccaagccgctatcatggagctcgatgacaccttaaagtacagttttctgcagtttgaccctgctccccggaggggagagccccacgtaactcgccgaacacccgattactttctctag

SEQ ID NO: 126229 - DNA, 1623 bp, synthetic construct
  misc_feature 1..1623: note = Description of Artificial Sequence: Synthetic coding sequence
  source 1..1623: mol_type = other DNA
atggcacgccaccttcgagagtatcaggacctgctgaacgtcaaaatggccttagatattgagatcgcagcctacaggaagctcctcgagggcgaagagacccgctttagcacttttgcaggtagcataacaggtcccctctacacccatcggcccccaatcactatttcttcgaaaatccagaagcctaaggtcgaggcacctaaactgaaggtccagcacaagttcgtggaagagattattgaagagaccaaggtggaagacgaaaaatcggagatggaggaagcccttacagccattacggaggaattggccgtgtccatgaaggaggagaaaaaggaggccgcagaggaaaaggaggaggaacctgaggcagaggaagaggaggtggctgcaaagaaatctccagtgaaagccaccgcaccggaggtaaaggaagaggagggggagaaggaggaagaagagggtcaagaagaggaagaggaagaggatgagggagccaaatcggaccaggcagaagaaggaggctccgaaaaggaagggtcctcagagaaagaggagggggagcaggaggagggggaaaccgaggccgaagccgaaggagaggaagctgaggcaaaagaggagaagaaggtagaggaaaaaagcgaggaagtcgccactaaagaggaactggttgcagacgcaaaggtcgaaaagcccgagaaggctaagagccctgtaccgaagagtcccgtagaggaaaagggcaagtcacccgtccccaagagtcctgtggaagagaaaggaaagtctcccgttccgaaaagccctgtggaggaaaagggcaagagcccggtgccaaagtcaccagttgaggagaaggggaaatcacctgtgagcaagtccccggtcgaggagaaagctaagtctccggtccctaagagcccagtcgaggaagctaaatcaaaagcagaggtcggaaagggtgaacagaaagaagaggaggagaaagaagtgaaagaggcacctaaagaggagaaagtagaaaagaaggaggagaaacctaaggacgtaccagaaaagaaaaaagcggagtctcctgtgaaggaggaagctgtggctgaggtggtgaccatcacaaaatcagtgaaagtccacctcgagaaagagaccaaggaggagggcaagcccttacagcaagagaaagaaaaggagaaggctggtggcgagggggggagcgaagaagagggaagtgataagggcgctaagggttctcgcaaagaagatatcgccgtaaacggcgaggtcgagggcaaagaagaggtggagcaggaaacaaaagagaagggcagcggcagagaggaggagaagggcgtcgtaactaatggcttggacctgtctccggcagacgaaaagaaagggggggataagtccgaggaaaaggtcgtggtgacaaagacagtggaaaaaattacttccgagggaggcgacggtgcaacaaagtacattaccaagtctgtgacggttacccaaaaagtggaggaacacgaagaaactttcgaagagaaactggtgtcaacgaaaaaggttgagaaagtcacgtcccacgcgatcgtgaaagaagtcacccagtcagactag

SEQ ID NO: 126230 - DNA, 2634 bp, synthetic construct
  misc_feature 1..2634: note = Description of Artificial Sequence: Synthetic coding sequence
  source 1..2634: mol_type = other DNA
atgagttacaccctggattcactcgggaacccaagtgcctataggcgcgtgactgagacacgctcctctttctcgagagtttctgggagtccatcaagcgggtttaggtcgcagtcatggagtagaggatccccaagtactgtcagtagctcgtataagaggtctatgctggcacctcggcttgcgtattctagtgcgatgctgtcctccgccgaatcatctcttgatttctctcagagcagttccctcctgaatggggggtcaggacccggcggagattataagctctcacggagcaacgagaaagagcaactgcagggtcttaacgacagattcgcaggttatattgaaaaggtccattacctggagcagcaaaataaagaaatagaagctgagatccaggctctgcgccagaaacaggccagccatgcccagttgggggatgcctatgaccaagaaataagagaacttcgggcaacactagagatggtgaaccatgagaaggctcaggtccagctggattctgaccacctggaggaggacatacacaggttgaaggagcgatttgaagaagaggcaaggctgcgcgatgacaccgaggccgcaattagagccctccgcaaggacattgaagaagcgtctcttgtcaaggttgaactggacaagaaagtgcagtctctccaagacgaggtggctttcctgcgctcgaatcacgaggaggaagtggcagatctgctggcacagatacaggctagccatataacggtagagagaaaggactatctgaagaccgacattagcaccgccctgaaagaaattcgcagccaattagaaagccattcagatcagaacatgcatcaagcagaagagtggtttaaatgccgctacgctaagctgacagaggccgctgagcagaataaagaagcaatcagatcagcaaaagaagaaatcgccgaatatcggaggcagctgcagagcaagtctatagagctggagtcagtgagaggaaccaaggagtctctcgagcggcagctgtccgatatcgaagaacgccacaaccacgatctttcttcctaccaggacacaattcaacaactcgaaaatgagctacgggggaccaaatgggagatggccagacacctgagggaataccaagacctgctcaatgtgaaaatggctctagacattgagattgccgcatatcgtaaacttctggagggggaagagacgcgcttctccaccttcgccggttcgattacagggcctctttatactcataggccacctattaccatctcttccaaaatccagaaaccaaaggtggaggcccctaaacttaaggttcagcataagttcgtggaagaaataatcgaagagacaaaggttgaagatgaaaagagtgaaatggaggaagctttgactgccattacagaagagttggcagtgtcaatgaaagaggagaaaaaggaggccgccgaggaaaaggaggaggaacccgaggctgaggaggaggaggttgccgccaagaaatccccagtcaaagctactgctcctgaggtgaaggaggaggaaggggagaaagaggaggaagaggggcaggaggaggaggaggaggaagacgagggcgctaagtccgaccaggcagaagagggtgggtcagaaaaggaaggatcatctgaaaaggaggagggggaacaagaagagggggagacagaggcggaagccgagggcgaagaggccgaggcgaaagaggagaagaaagtggaagaaaagtctgaggaagtcgctacaaaagaagagctggtcgccgacgctaaggtggagaaaccggagaaggccaagagtccggtccccaagagcccggtggaagaaaaaggaaaatccccagtgtctaagtcaccggtcgaggagaaggcaaaatctcccgtgccaaagtcaccagtcgaagaggccaaatccaaggccgaggttggtaaaggcgaacagaaagaggaagaggagaaagaggtgaaggaggctcccaaggaggagaaggtggagaagaaagaagagaaacccaaggatgtccccgaaaagaagaaagcggaaagcccagtaaaggaagaggctgtcgctgaagttgtgactataaccaagtccgtgaaggtacacttggagaaagaaactaaagaagaaggcaagcccctgcagcaagagaaggagaaagaaaaggctggtggtgaaggaggatccgaggaagagggttctgataagggcgccaagggctctagaaaggaagatattgccgttaacggggaggtcgaagggaaagaagaggtagagcaggagaccaaagaaaagggttctgggcgcgaggaagagaaaggtgtagtaacaaatggcctggacctgtcacctgccgacgagaaaaagggaggcgacaagagcgaggagaaagtcgttgtgactaagactgtagagaagattacatctgaaggcggggacggagcgacgaagtacatcaccaagagcgtcactgtgacccagaaggtggaagaacacgaggagacttttgaggaaaaactcgtaagcaccaagaaagtggagaaggtgacctcgcatgctatcgtgaaggaggtgacacagtctgactag

SEQ ID NO: 126231 - DNA, 1071 bp, synthetic construct
  misc_feature 1..1071: note = Description of Artificial Sequence: Synthetic coding sequence
  source 1..1071: mol_type = other DNA
atgaccaagagctactccgagtccggtctgatgggtgagccacagccacagggtccccctagttggacggatgaatgcctttcctcgcaggacgaagagcatgaggccgacaagaaggaagatgaccttgagacaatgaatgccgaggaggattcactaagaaatggaggagaggaggaggacgaggacgaagacctggaagaagaggaggaagaagaagaggaggatgatgaccagaagcctaagagaagaggtcctaagaagaagaaaatgactaaagctaggctagagagatttaaattacgcagaatgaaagcaaatgcgagggaacgcaaccgtatgcatggactgaacgccgcattagacaatctccggaaggtcgtgccatgttatagtaagacacaaaaattatccaagatcgaaaccctacggctggcgaaaaattacatctgggcactttccgagatcctccgttccggaaagagtcctgatcttgtctcattcgtgcaaacattgtgcaagggtctaagccaacccaccacaaaccttgtagcaggctgtctacagctcaatccgagaacattcctccccgaacagaaccaggacatgcctccacacctgcccacagcttcggcctctttccccgtacatccgtattcgtaccagtcccctggcctaccgtcacctccatatggtactatggattcatcgcacgtcttccatgtgaaacctccaccacacgcttactccgcggccttggagccattctttgagtctccgctgacggactgtactagcccatcattcgacggccctctgtcccctcctctctcaatcaatgggaacttttcttttaaacacgaacccagcgcggaatttgagaagaattatgcattcaccatgcattatcccgcagctaccctggccggcgcgcagagtcacggaagtatcttcagcggaaccgccgcacccaggtgcgaaatcccgattgacaacattatgagcttcgactcacactcacatcatgagcgggttatgtctgcccaacttaatgcgatttttcacgactag

SEQ ID NO: 126232 - DNA, 1149 bp, synthetic construct
  misc_feature 1..1149: note = Description of Artificial Sequence: Synthetic coding sequence
  source 1..1149: mol_type = other DNA
atgttgacacgcttgttcagcgaacctgggctcttgagtgatgtccccaagtttgcttcttggggcgacggggaagatgacgagccgagaagcgataagggcgatgcccccccccctccacctccggccccaggacctggtgcccctggcccagcgcgagccgctaagcccgtgccactgcggggagaggagggcacggaggccactttggcggaggtgaaagaggagggcgagctcggaggcgaagaggaagaagaggaggaggaggaggagggactcgacgaggcggaaggagagagaccaaaaaagcgggggcccaaaaagaggaagatgaccaaagctcggctggagcgctccaaactgaggcggcagaaggctaatgcaagggagcgcaaccggatgcacgatcttaatgcagcactggacaatctgcgcaaagtcgtgccgtgttatagtaagacgcagaaactgtctaagattgagaccttgaggctagccaagaactacatatgggctttgtctgagatattgagatcaggaaagcgaccagatctggtgtcctatgtgcaaacgctgtgcaaggggctcagccagcctaccacaaacctggtcgccggatgtctgcagttgaactccaggaactttctcacagagcagggcgccgacggagccggaaggttccacggaagcggcgggccctttgcaatgcacccgtacccctatccatgtagccgtttagccggagctcagtgccaggccgcaggcggcctggggggcggggctgcccatgctttgcgtacacacggctactgtgcagcttacgagactctctacgcggccgcaggtggtgggggcgcctcacccgactataactcaagcgagtacgagggccccctgtctccacctctgtgtctgaacggcaacttcagtctcaagcaggatagttctcctgaccacgaaaaatcatatcactattccatgcattattctgctttacccggctcaaggcctacaggccacgggctggtgttcggctctagtgccgtgcgcggaggagtccacagtgagaatctgctgagttacgacatgcacctgcaccacgaccgcggcccgatgtacgaggagctcaatgcttttttccataattag

SEQ ID NO: 126233 - DNA, 996 bp, synthetic construct
  misc_feature 1..996: note = Description of Artificial Sequence: Synthetic coding sequence
  source 1..996: mol_type = other DNA
atgtctaaaacgtttgtcaaaagcaaagagatgggcgagctcgtcaacaccccctcctggatggataagggcctaggctctcagaacgaggttaaggaggaggaatcaagaccaggcacatacggcatgctcagctctctgacagaagaacacgatagcatagaagaagaggaagaggaagaagaagatggggaaaagcccaaacgcaggggacctaaaaagaagaagatgactaaggcccggttggagcggttcagagcgcgtcgagtaaaagccaacgcgcgcgaacgaactaggatgcacgggctgaatgatgccctcgacaatctgcggagagtcatgccctgttacagcaagacacaaaaactgtccaaaatagagacgctccgcctcgcacgcaactatatatgggccctctccgaagtgcttgaaacaggacagactcccgaagggaagggatttgtggagatgctctgtaagggtttgtcccagcccacctccaaccttgtggctgggtgcctccaactgggcccacagtctgtgctcctagagaaacatgaggacaagtcaccaatctgtgattcagcaatttccgttcacaactttaattaccaaagcccaggattaccgtcacccccctacggacatatggagactcatctgctgcatctcaaaccccaagtgtttaaatccctgggagaatccagttttgggtcgcacctgccagattgctcaacgcccccctatgaaggcccactaacccctcctctgagcatctccggaaatttcagccttaagcaggacgggtcacccgatttggaaaaatcctattcattcatgccacactacccatcaagttcattgagtagcggtcatgtacactcaactcctttccaagccggtacacctcgctatgacgtgcccatcgacatgtcctatgacagctatccgcaccacggaatcggtacgcaactgaacacggtgtttacggagtag

SEQ ID NO: 126234 - DNA, 1014 bp, synthetic construct
  misc_feature 1..1014: note = Description of Artificial Sequence: Synthetic coding sequence
  source 1..1014: mol_type = other DNA
atgctaacccttcccttcgatgagtcagtcgtgatgccagagtctcagatgtgtcggaagttcagcagagagtgcgaagatcagaaacagattaagaagcccgagtccttttctaagcagattgttttgcgggggaaatccataaagcgagctcccggcgaagaaacagagaaagaggaggaggaagaagacagagaggaagaggacgagaatggtctgccaaggagacggggactgcgcaaaaagaagactactaagcttcgattggaacgagtgaagttccgtcgtcaggaggctaacgcccgtgaacgaaatagaatgcacggacttaatgatgcccttgacaacttgcgaaaggtcgtgccctgttattctaaaacacagaaattgtccaaaatagaaaccctcagactggccaagaactacatttgggcactgtctgagattctacgcattggaaagaggccagacctgcttactttcgtgcagaatttatgtaaggggctcagtcagcctactacaaatctggtggcaggttgcctccaactgaatgctcggtcgttcctgatgggtcaggggggagaggccgcccaccatactaggtcgccttactccaccttttaccccccctatcattctcccgaactgaccacccctcctggtcacgggactttagacaatagtaagtcaatgaaaccatacaactattgcagcgcttacgaatccttttacgagtccacttcgcctgagtgcgcctcgccccaattcgaaggacccctgtcaccccctcctatcaattacaacggcattttttctctgaagcaggaggagacattggattacggcaagaattataactacggaatgcactactgcgccgtgccccctagaggccccctggggcagggcgccatgttcagattaccgactgatagtcattttccctatgatctgcacctgaggtctcagtccctgactatgcaagatgaactcaatgcagtgttccataattag

SEQ ID NO: 126235 - DNA, 714 bp, synthetic construct
  misc_feature 1..714: note = Description of Artificial Sequence: Synthetic coding sequence
  source 1..714: mol_type = other DNA
atgcctgccagacttgaaacatgcattagcgatctggactgcgcgtccagtagcggctctgatctgagcgggttcctgaccgacgaagaagactgcgcacgcctccagcaggctgccagcgcatctggacccccagcccctgcccgcaggggtgctcctaacattagtagggcctctgaagtgcctggggcacaagatgacgaacaggagagaaggcgaaggcgcggacgaacccgcgtcagaagcgaggcgctgctacacagtctgagacgttcccgtcgcgtgaaggccaacgatcgtgagaggaatcgcatgcacaatctgaatgcagcgttagacgccctgcgatccgtgctcccatccttcccagatgatactaagctcaccaaaattgaaaccctgagatttgcttacaactacatttgggccctggcggaaacactcagactcgcggaccagggtctgccgggggggggtgcgagggagcggctgctgcccccacagtgtgtgccctgcttaccaggaccccctagccccgcgtccgacgccgaatcgtgggggagtggcgcggctgctgccagcccgttaagcgatccttcttcccccgccgcttcagaagacttcacctataggcccggggatcccgttttttcctttccgtccttacctaaggatctcctacatactaccccctgctttatcccgtaccattag

SEQ ID NO: 126236 - DNA, 645 bp, synthetic construct
  misc_feature 1..645: note = Description of Artificial Sequence: Synthetic coding sequence
  source 1..645: mol_type = other DNA
atgacaccacagccaagtggcgcgccaaccgtccaagttacaagggaaaccgagcgatcattccctagggccagcgaagacgaggtcacatgtccgactagcgctcccccttcacccactcgcacgcggggcaattgtgcagaggcggaggaaggaggttgtcggggcgctccacgtaagctgagggctcgccgagggggccgaagcaggcctaagagtgagctcgcgctctccaagcagagaaggagtcgtaggaaaaaggctaatgaccgagaaagaaatcggatgcataacttaaactccgcattggacgcgctgagaggggtgttgcctacctttcccgacgacgccaaattgactaagatcgaaacactgaggtttgctcataattacatttgggcgcttacccagaccctgcgtattgcggaccactctctgtacgccctcgaaccacccgcaccccactgcggcgagctgggctcacccggcgggagccccggggattgggggtctctctactcaccggtgagtcaggccggctccctttctcccgccgcatccctcgaagagcgtcctggcctgttgggggctactttctccgcatgcttgtcgcctgggtccttggccttcagcgacttcctgtag

SEQ ID NO: 126237 - DNA, 456 bp, synthetic construct
  misc_feature 1..456: note = Description of Artificial Sequence: Synthetic coding sequence
  source 1..456: mol_type = other DNA
atggaacgtcccgaaccggagcttatccggcagtcatggcgtgcagtgtctcgctcaccactggagcatggaacggtgctgtttgcaagactcttcgctttagaacctgatctgctcccacttttccagtataattgcaggcagtttagcagccccgaggactgtctcagctccccggagtttctggaccacataaggaaggtgatgctggtaattgacgctgcagtgaccaatgttgaggacctttctagcttggaggaatatttggcctctttggggcggaagcaccgcgctgtgggggtgaagctgagttccttttcaaccgtgggcgaatcactgctgtatatgctagaaaagtgcttagggcccgctttcactcccgccacccgtgcagcatggagtcagctctatggagccgtggtgcaggccatgtcccgcggctgggatggagagtag

SEQ ID NO: 126238 - DNA, 237 bp, synthetic construct
  misc_feature 1..237: note = Description of Artificial Sequence: Synthetic coding sequence
  source 1..237: mol_type = other DNA
atggactgctgcacagagaatgcatgctctaaaccggacgacgatatccttgatataccccttgatgacccaggagcgaatgccgccgctgcaaaaatccaggctagcttccggggacatatggcccggaaaaagatcaagagcggggagcgcggccgaaaggggccgggaccaggcgggccgggtggagccggcgtggcccgggggggagccgggggcgggcccagtggggattag

SEQ ID NO: 126239 - DNA, 237 bp, synthetic construct
  misc_feature 1..237: note = Description of Artificial Sequence: Synthetic coding sequence
  source 1..237: mol_type = other DNA
atggattgttgtacagagaatgcctgctcaaaacctgacgacgacattctggacatccctctggatgatcccggagccaatgcagccgctgccaagatccaggcttcttttcgcggtcacatggcccgaaaaaagattaaaagcggagagagaggtcggaaggggcctggccctggcgggccgggaggcgccggagtcgcaaggggaggtgcgggcggcgggcctagtggtgattag

SEQ ID NO: 126240 - DNA, 237 bp, synthetic construct
  misc_feature 1..237: note = Description of Artificial Sequence: Synthetic coding sequence
  source 1..237: mol_type = other DNA
atggactgttgcaccgagaatgcttgctccaaaccagatgatgacatactagacatcccactggacgatcctggtgctaacgctgctgccgcaaaaatccaagcctcattccgtggacatatggcaagaaagaagattaagagtggagaaagaggacgcaaaggacctgggcccgggggcccagggggtgcaggcgttgctcgtgggggtgcaggcggagggccatccggagattag

SEQ ID NO: 126241 - DNA, 936 bp, synthetic construct
  misc_feature 1..936: note = Description of Artificial Sequence: Synthetic coding sequence
  source 1..936: mol_type = other DNA
atggctgcattaggagtgctcgagagcgacctgccctctgctgtgacattgcttaaaaacctgcaggaacaggtgatggccgttactgcccaagtaaagagccttactcagaaggttcaagcaggggcctatcccactgaaaaaggactgtctttccttgaagtgaaagaccaacttcttctgatgtatctaatggacttaactcatctgatccttgataaggctagcggcgggagccttcagggccatgatgcagtgctgaggctggtcgagatcaggacagtattggagaagttgagaccactcgatcagaagttaaagtatcagattgacaaactgatcaaaacggccgtgacggggagcctgtctgagaacgatcctctcaggtttaaaccccatccctctaatatgatgagcaaattgtcctcggaagacgaggaggaagacgaagccgaggatgaccagtctgaggctagcggaaaaaagagcgttaagggcgtgtctaaaaagtacgtacccccaaggttggttcccgtacattacgacgagactgaagccgagagggagaaaaagagactagaaagagcgaagaggcgcgccctaagctcgtcagtgattcgggaacttaaggaacaatacagcgacgcccccgaggagatcagggacgcgcgtcaccctcatgtgactcgtcagtcccaggaagaccagcacaggatcaattatgaagagtccatgatggtacggctgtccgtcagcaagagagaaaaaggccggaggaagagggccaacgtcatgagctcgcaactccactctctcacgcatttcagtgatatctcagcgttgacagggggcaccgttcatctggatgaagaccaaaatccaattaagaagcgaaagaagatcccacagaaggggaggaagaagaaaggacagtag

SEQ ID NO: 126242 - DNA, 948 bp, synthetic construct
  misc_feature 1..948: note = Description of Artificial Sequence: Synthetic coding sequence
  source 1..948: mol_type = other DNA
atggctgctttgggtgtgttagagtccgacctcccctccgccgtaactcttctgaagaatttgcaagagcaggtcatggcggtaaccgcgcaggtcaagtccctgactcagaaggtgcaagctggagcttaccctaccgaaaaagggctttcgttcctggaggtaaaggaccaactcctcctgatgtacctgatggacctgacccacctcattctggacaaggcgtcaggcggatcattgcagggacatgatgccgtgctccgactggtggagatacggacagtcctcgagaaactcaggcctctagaccagaaactcaagtatcaaatcgacaagctgattaagacggctgtgacagggagcctatcagaaaatgatcctctgcggttcaagccacatcctagcaacatgatgtccaagctgtcctccgaggatgaggaggaagatgaggcagaagacgaccaatcggaagcatccggaaagaaatccgtaaagggagtctctaagaaatacgtgccccctcggctcgtccctgtgcactacgatgagaccgaggccgaaagagagaagaagcgcctcgaacgagcaaagaggcgggcccttagttcatcggtgatacgggagctgaaggagcagtatagcgacgcccctgaggaaatccgggacgcccgtcatccccacgtgactagacagagtcaggaggaccaacatcgcatcaactacgaagagagcatgatggtgcgcctctcagtttctaaacgcgagaagggcagacggaaacgggctaacgtcatgtcgtctcagcttcactctcttacacacttctcggatatttccgccctcactgggggtacggtccaccttgacgaggatcaaaaccctattaagaagcggaaaaaaatcccccagaagggaaggaagaagaaggggttcagacggcgcaggtag

SEQ ID NO: 126243 - DNA, 2472 bp, synthetic construct
  misc_feature 1..2472: note = Description of Artificial Sequence: Synthetic coding sequence
  source 1..2472: mol_type = other DNA
atggcattgcctcgctgtacctggcctaattacgtctggcgtgcggtgatggcctgtctggtgcatagaggcttgggcgcgcctcttacactgtgcatgctcggatgtctgctccaggcaggccatgtcctgagtcagaagttggatgatgtggaccccctggtggccaccaatttcgggaaaataagaggtataaaaaaggaattaaacaatgagatcctagggcccgtaatacaattcctcggtgtcccctacgctgcaccccccacaggtgaaaggcgttttcaaccaccagagccaccatctccatggtccgatattaggaacgccacccagtttgccccagtctgtccacagaacatcatcgacggccggctgccggaggtcatgctccctgtgtggttcaccaataatttggacgtggtgagttcctatgtgcaggaccagagcgaagattgcttgtacttgaatatatacgttccaacggaggatgatatccgagattctggtgggccaaagccagtgatggtgtacatacatggcggatcttatatggaaggcaccggcaatctgtatgacgggagcgtgctcgcgtcatacggcaacgttattgtgataaccgttaattatcggctgggcgtccttggtttcttgtcaacaggggatcaggccgcgaaggggaattatggtttgctggacctgattcaagctctgcgctggaccagcgaaaacatagggtttttcgggggcgacccacttcgaatcactgtcttcggtagcggcgccggggggtcatgtgtgaatctactgacactgagccattacagcgaagggaaccgctggagcaacagtactaaaggtctttttcagcgagcaatcgctcagagcggcactgccctgtccagttgggccgtgtcttttcagccggccaaatacgcgcgaatgctcgcgacgaaggtaggatgcaatgtgtccgatactgtagaacttgtggagtgcctccagaaaaagccatataaggagctggttgaccaagacatccagcctgcaagataccatattgcattcggaccggtgatcgacggggatgttattcccgatgatccgcagatccttatggaacaaggtgaattcttgaactacgacatcatgttaggggtcaatcagggtgagggcctgaaattcgtcgagaacatagtggacagtgatgacggaatttctgccagcgattttgatttcgctgtcagcaatttcgtcgacaatttgtacggctaccccgagggtaaagatgtgctcagagaaacaattaagttcatgtacactgattgggcagatagacataatcctgaaacacggcgaaagaccctgctggccctgtttactgatcaccagtgggtggctcccgcagtggccaccgccgatctgcatagcaacttcggctcaccaacttatttttatgccttctatcatcactgccagacagatcaagtgcctgcatgggctgatgcggcacacggcgatgaagttccttatgttcttggaataccgatgatcggacctactgagctgtttccctgcaattttagcaagaacgatgtaatgctctcagctgtggtcatgacatactggacaaacttcgccaagaccggtgacccaaatcagccagtgccccaggatacaaaattcatccatacaaagcctaatcgctttgaagaagtggcctggactagatatagccagaaggaccagctgtacctgcacatcggtttgaagcccagggtaaaagaacattatcgtgccaacaaggtaaatttatggctggagttggtcccccacctgcacaatctgaatgacatctcccaatatacgtccactaccaccaaggtgccgtctacagacattacctttagacctacgaggaagaactcagtcccagtcacctccgccttcccaaccgcaaagcaggacgaccccaagcagcagccatctcccttttcagtggaccagagggattatagtactgagctcagtgtcacaattgccgtcggcgcctctcttctgttcttaaacatcctggcctttgctgcactctattataagaaagataagagaagacacgacgtgcatcggagatgcagcccacaaagaacaactacaaacgatttgacgcatgcccaagaagaggagatcatgagtctacaaatgaagcacaccgacctggaccatgaatgcgagtcaattcacccacatgaggtagtattgagaactgcttgcccccccgactataccttagcaatgagacgatcacccgacgatgtgccactgatgacacctaacacgatcactatgatcccgaacacaatacccgggatacagccactgcatacattcaacacctttacaggtggccagaataacaccttgccccatccacacccacatcctcattcacatagcacaacacgcgtgtag

SEQ ID NO: 126244 - DNA, 2592 bp, synthetic construct
  misc_feature 1..2592: note = Description of Artificial Sequence: Synthetic coding sequence
  source 1..2592: mol_type = other DNA
atggctttacccaggtgcacgtggcccaactacgtgtggagggctgtgatggcttgcttagtgcacagaggcctgggggccccgctaactctctgcatgcttggctgtctgttgcaagcaggacacgtgctctcccagaagctggacgatgtggatcccctggtcgccaccaattttgggaagatcagagggatcaaaaaggaactgaataacgagattctgggtcccgtcatacaatttctcggggttccttacgccgcaccacctacaggcgagagacgtttccagcccccagaacccccaagcccttggagcgacatccgaaacgctacccagttcgccccagtttgccctcaaaacataatcgatggaaggctcccagaggtgatgttgccagtttggttcaccaataatcttgacgtggtttcatcttacgtgcaagaccagagtgaagactgtctgtacctgaatatctatgtgccgactgaagacgtaaagcggatctctaaggaatgtgcacgcaaacctggcaaaaagatctgtcggaagggcggaccactaacgaagaaacagacagacgaccttggggataacgacggagctgaggatgaggatatacgagactctggaggacccaaacccgttatggtgtatatccatggaggctcatatatggaaggaacagggaacctgtacgacggctctgttttggcaagctatgggaatgtgattgttattaccgtgaattaccgcctgggcgtcctgggttttcttagcacgggcgatcaggccgctaaaggcaattacggattactggaccttatccaggccctgcgttggaccagtgagaacatcgggtttttcggcggcgacccactccgcataaccgtcttcggtagcggcgccgggggcagctgtgtgaatttgctcacactgtctcactatagtgaaggcaatcggtggagcaactccacaaagggtctcttccaacgagccattgctcaatccggaacagctctgtccagctgggcagttagttttcagccagctaaatacgcccgcatgctggccacaaaggtcggctgcaatgtatccgacacggttgagctggttgagtgcctacaaaaaaagccctacaaagagttagtcgaccaagacatacagcctgctcgctatcatatagccttcggtccagttattgatggcgatgttattccggacgacccccaaatcttgatggaacagggcgaatttttgaactacgatataatgctcggcgttaatcagggagagggtctcaaatttgtggaaaacatcgtggattcagatgatggaatttctgctagtgattttgatttcgctgtgagtaatttcgtggacaacctgtatgggtatccggagggaaaggatgtacttcgggaaaccataaaatttatgtatactgactgggccgaccgccataatcccgagacacgaaggaagactctgctggccctgttcactgaccaccaatgggtggcccccgctgtggcaaccgctgacctgcacagcaatttcggttccccaacctacttctatgctttctatcatcattgtcaaactgaccaagtgcccgcatgggctgatgccgcacatggtgatgaggtcccttacgtgcttggcatacctatgattgggcctaccgagctctttccctgtaatttttcaaagaatgacgtgatgctgtctgcggtggtgatgacatactggacaaatttcgccaagactggtgaccccaatcagcccgttccacaggacaccaagttcattcacacaaaacctaaccggtttgaagaagtggcctggacgcggtattcccaaaaggatcagctatacctgcatatcgggctcaagccacgtgtaaaggaacactatcgagcaaataaagtcaacctgtggctggagcttgtgccacacctgcataacctgaacgatattagccagtacacctctaccactactaaagtgccctccaccgacattactttcagacctacccggaaaaactccgtccccgtcacgtcagccttccccacagcaaagcaggacgaccctaagcaacagccctcacccttctcggtggaccagagggactactcaaccgagcttagcgtgactatcgcggtgggcgccagccttcttttcctgaatattctggcattcgcggcgttgtattacaaaaaggataagaggcgtcacgacgtccaccgacggtgcagtcctcaacggaccaccaccaatgaccttactcatgcccaggaggaagaaattatgagtctgcaaatgaaacacactgaccttgaccacgaatgtgagtccatccatccgcatgaagtggtcttgcgcactgcatgtccacccgactatacgttggcaatgcgaagatccccagacgacgtgcctttgatgaccccaaataccataacgatgatcccaaacacaatccccggtatccaacctttgcatacgtttaacactttcactggcggacagaacaataccttaccccatccccatccacacccccactctcatagcacgacacgagtgtag

SEQ ID NO: 126245 - DNA, 33 bp, synthetic construct
  misc_feature 1..33: note = Description of Artificial Sequence: Synthetic coding sequence
  source 1..33: mol_type = other DNA
atggctctcccacgatgcacttggccaaattag

SEQ ID NO: 126246 - DNA, 42 bp, synthetic construct
  misc_feature 1..42: note = Description of Artificial Sequence: Synthetic coding sequence
  source 1..42: mol_type = other DNA
atggcactgcctaggtgtacctggcccaattacgtatggtag

SEQ ID NO: 126247 - DNA, 2472 bp, synthetic construct
  misc_feature 1..2472: note = Description of Artificial Sequence: Synthetic coding sequence
  source 1..2472: mol_type = other DNA
atggccctgccccgctgtacctggccaaactatgtgtggagagccgtaatggcctgtctggtgcatagggggctcggtgcgcccctcaccctgtgcatgctgggctgtctcctgcaagctgggcacgtgctgtcgcagaagcttgacgacgtagacccccttgttgccacaaacttcggaaaaatcagaggtatcaaaaaggaactcaataacgagatactgggccccgttattcagtttctcggggtcccttacgccgcccctcccaccggcgagcgtagatttcagcctcccgaacctccttctccgtggtccgatatcaggaacgcaacccagtttgcgcctgtatgcccacaaaacatcatagatggcagactcccagaggttatgttgccggtctggtttaccaataacctggatgtagtgagctcatatgtgcaggaccaaagcgaggactgcctctacttaaacatttacgtaccaaccgaagatgatatcagggatagcggcggcccaaaacccgtcatggtctacatccacgggggttcttatatggagggcacgggcaatctgtatgacggcagtgtgctggccagctacggcaatgtgatcgtgatcactgtgaactaccgcctgggcgtgttagggttcctatccacgggggatcaggcagcaaagggaaattacgggctactggacctgatccaggcactgcgatggaccagcgagaacattggattcttcggcggagatccgctcagaattaccgtctttgggagtggggcggggggaagctgtgtgaacctgctgaccctgtcgcattacagcgaaggtaatagatggtctaatagtactaagggactgttccaacgggcgattgcccagagtggaaccgcccttagttcttgggctgtgtcttttcagcccgccaaatatgctcgcatgttagcaaccaaagtagggtgcaatgttagtgataccgtggaacttgttgagtgcctgcagaagaagccctataaggaactagtggaccaggacatccaacctgctaggtatcacattgcctttggccccgtaattgacggagatgtgattccggatgatccccagattctgatggaacagggcgagttcttgaactacgatattatgctgggagtgaaccagggcgaggggttgaagtttgtagagaacattgttgactcggatgatggaataagcgctagcgactttgactttgctgtcagcaattttgtcgataacctttatggatatccggaggggaaagatgtcctgagggagaccatcaagttcatgtacaccgactgggcggatagacacaaccccgagaccaggcggaagacccttctcgccctgtttactgatcaccagtgggtagcccccgcagtggcgacggccgatctgcactccaacttcgggtcccctacatatttttacgcattctaccatcattgccagaccgaccaagttccggcctgggcggatgctgcccatggcgacgaagtcccatatgttttgggcataccaatgattggccccacagagctcttcccttgcaatttctcaaagaatgatgtcatgctcagcgccgttgtgatgacctactggacgaattttgctaagaccggagacccaaaccaacccgtcccacaggataccaagttcatacataccaagcccaatcgtttcgaggaggtcgcatggacacgctacagtcaaaaggaccagctgtacctgcacatcgggctgaaaccccgagttaaggagcactacagggcaaacaaggtaaacctttggctggagttggtgcctcatctccacaacctcaacgacatttcacaatacacctctacaactactaaggtgccttcaactgatatcacttttcgtcctactaggaaaaattcagttcccgtgactagtgcatttcctaccgctaagcaggacgaccctaagcagcaaccctcgccatttagcgtggatcagagggattactctacggagctcagtgttaccatagcagtcggtgcctcactgcttttcttaaatattctcgcgtttgccgcattgtactacaagaaagacaagcgcaggcatgacgtgcatcggaggtgctccccccagcgtaccactaccaacgatctcacccatgcccaggaggaggaaatcatgtctttacagatgaaacacaccgacttggatcacgaatgcgagtctatccacccacacgaggtagtgctcaggaccgcttgtccgcccgattacactcttgcaatgagacggtcccccgatgatgtccccctgatgacgccgaacacaatcacaatgatccctaacaccataccgggtattcagccgctgcacacttttaacacttttacaggaggacaaaacaacacacttccacatccccaccctcacccccactctcacagtactactcgggtgtag

SEQ ID NO: 126248 - DNA, 2472 bp, synthetic construct
  misc_feature 1..2472: note = Description of Artificial Sequence: Synthetic coding sequence
  source 1..2472: mol_type = other DNA
atggctctgcctcgctgcacctggcccaattatgtttggagggccgttatggcatgtctggtccacagaggtctaggcgcccctctaacgctgtgcatgcttggctgtcttctgcaggccggccatgtgctcagtcagaagctagacgacgttgatcctctagtcgctaccaacttcggcaagatccgcgggataaaaaaggagcttaataacgagatcctgggccctgtgatccaatttctcggggttccttatgcggcccctccaacgggcgagcgccgctttcagcccccagagcctccatcaccatggtctgacatccgcaacgccactcagttcgcacccgtgtgtccacaaaacattatcgatggacggctcccagaagttatgctgcccgtctggttcactaataatctcgacgttgtgtctagttatgtacaggatcaatccgaggactgtttatatctcaacatttacgtgcccacagaggatgacattcgagactcgggaggtccaaaacccgtgatggtttacatccatggaggctcctatatggaaggaacaggaaatttatatgatggaagcgtgctggcgagctacggaaatgtgatcgttattactgtaaattatcgactgggtgtcttggggttcctgtccaccggagatcaggcagcaaaggggaattacggcctgctggacctcatccaggcccttcgttggacttctgagaacatcggttttttcgggggcgatcccttaagaatcaccgtattcggctcgggagcaggggggagttgcgtgaacctgctgactctgtcacactactcggaggggaataggtggtccaacagtaccaaaggtttatttcagcgagcaatcgctcagtctggaaccgccctttcatcttgggctgtgagcttccagcccgcaaagtacgctaggatgttagcaacgaaagttggatgtaatgtgtctgataccgtggaattggtcgagtgcctgcagaagaagccatacaaagagttggtggatcaggacattcagcctgcacgctatcatattgcgttcggacctgtgattgacggagatgttatccccgacgatccacagatcctcatggaacagggggaatttctgaattacgacattatgctcggagtgaaccaaggcgagggcctcaagttcgttgaaaatattgttgattcagacgacggtattagcgcatcagacttcgattttgccgtgtccaattttgtcgacaacctgtacggctacccggagggcaaggatgtcctgcgcgaaacaatcaagtttatgtacaccgactgggccgatcggcataacccagagactcgaagaaagactctgctagccctcttcacagaccaccagtgggtcgctcctgcggtggcaaccgctgatctacatagcaatttcggtagccctacctacttctacgcgttttaccaccactgccagaccgaccaagttccagcctgggctgatgctgcccatggcgatgaggttccttatgtgcttggtatccccatgatcgggccaacggaactctttccatgcaacttctcaaaaaatgatgttatgctgtccgccgtggtcatgacgtactggacaaattttgccaaaactggggatcctaaccagccggtcccacaggacactaagtttattcatacaaagccgaacagattcgaagaagtcgcctggactcgctactcacagaaagaccagctgtaccttcacattggtctaaaaccccgtgtaaaagaacattacagggctaataaagtgaacctgtggctggagctggtgccccacttgcacaatctaaacgacatctcgcagtatacaagcaccacaaccaaagtacctagcactgacattacatttcggccaacgaggaagaacagcgtccccgttacatctgcattcccaactgcaaagcaagatgacccaaaacaacagccctcaccttttagcgtggaccagcgcgattatagcacagagctctctgtgaccatcgctgtgggtgcgtccctgcttttcctgaatatcttggccttcgccgccttgtactataagaaagataaacgccgccacgatgtccacagacgttgttctcctcaaaggaccaccacaaacgacctaacccatgctcaggaggaagagataatgtctctgcaaatgaaacatacagacctcgaccatgaatgcgaatctattcatccgcacgaagttgtgctgcggacagcctgccctcccgactacaccctggctatgagaagatcccctgatgacgtccctctgatgaccccgaacacaattacaatgattcccaataccatccctggcatccagcctctgcatacgtttaacaccttcacaggcggccagaataataccctgcctcacccacatccccaccctcacagtcactctactactagagtttag

SEQ ID NO: 126249 - DNA, 2508 bp, synthetic construct
  misc_feature 1..2508: note = Description of Artificial Sequence: Synthetic coding sequence
  source 1..2508: mol_type = other DNA
atgtggctccttgccctttgtctggtgggtcttgccggcgcacagcggggaggggggggtcctgggggaggagcaccaggcggacctggcctggggctcggatcgctgggtgaggagagattccccgtagtgaatactgcatacggccgtgtcagaggagttcgcagagagctcaacaatgagattctcggacccgtcgtgcagttcctgggcgtaccatatgccaccccgccgctcggagcccgcagattccagccccccgaggctccggcatcttggccaggggtccgcaacgccacaaccctgccccctgcctgcccacaaaacctgcatggcgctctacccgcgattatgctaccagtgtggtttactgacaacttagaagcagctgctacttacgtgcagaaccaaagcgaggactgcctttacttgaacctatacgtacccactgaagacggcccgctcacaaagaaacgggacgaggcaactctaaatcctcccgatactgacatacgggaccctggaaaaaagcccgtcatgctattcttgcacggaggctcctacatggagggtaccggcaatatgttcgacgggagtgtgctcgccgcttatggaaacgtgatcgtggcaaccctgaattaccgccttggtgttctgggatttctcagtaccggcgatcaggcggcaaagggtaattatggcttgttagaccaaattcaggcactgcgctggttatcggagaacattgcccactttggaggggacccagaaaggattacaatctttggttccggcgctggcgcttcctgcgtaaacttgcttattctgtcacaccacagcgaaggactattccagaaagccattgcccaatcaggtacagcaatcagcagctggagtgttaactaccagcccctgaagtatacacggctactggcagctaaggtcggttgcgatcgagaggattcggctgaggccgtggagtgcctcagacgcaaaccaagccgggaactggtggatcaagatgtacaacctgccagataccatatagcttttggccccgttgttgatggagacgtcgtgccggatgatcccgagatcttaatgcagcagggagaatttctgaactatgatatgcttattggagtgaaccaaggagagggccttaagtttgttgaggactcagccgaaagcgaagatggagttagcgcctctgcctttgattttaccgtgagcaactttgttgataacctgtacggataccctgaaggcaaagacgtactcagggagaccattaagtttatgtacaccgactgggctgatagagataatggcgaaatgcgtaggaagaccttactggctttgttcaccgaccaccaatgggtggctcccgccgtggccaccgctaagctccacgctgattaccaaagccccgtgtacttctacactttctatcaccattgtcaggcagagggtagacccgagtgggccgatgccgcacatggggatgaactgccctatgtattcggcgtccccatggtgggggctactgatctcttcccctgcaacttttcaaaaaacgacgtcatgctgtctgcagttgtcatgacttattggaccaatttcgcaaaaacgggggatcctaatcagcccgtgcctcaggacactaagtttatccacacaaaacccaacaggttcgaggaagtggtctggagtaaattcaattcaaaggaaaaacagtacctccacattggcctcaagccccgcgttcgggataattatcgagcgaacaaagtggcgttctggctggagttagttccccaccttcacaaccttcatacagagttgtttactactacaactcgtctccccccttacgcgactcgttggcccccacggccaccagcaggagctcccggcacgcggagacccccacctcccgctactttacctcccgagccagaacctgagcccggtcccagagcatacgaccggttccctggcgactcaagggactactccacagaactgagtgtcacagttgcagtgggagccagtttattatttctcaatattctggcatttgccgcgctgtactacaaaagggatcgccgtcaggaactgcgttgtaggcgtctgtcgcctccgggtggctccggcagcggggtccctggtggtgggcctctcctgcccgctgccggcagggaactgccgccagaggaggagcttgtcagcctgcagctcaagcgcggcggtggcgtgggcgcagacccggcagaggccttgagacctgcctgccccccagactacaccttggccttacgaagggcaccagatgacgtgccgcttttagctccaggggccctgactctgctgccctccggactgggtccacccccccctccgcctcctcctagcttgcatcctttcggtccctttccccccccgccgcccaccgcaacatcacacaacaacacactgccgcacccacactctactactcgagtatag

SEQ ID NO: 126250 - DNA, 2547 bp, synthetic construct
  misc_feature 1..2547: note = Description of Artificial Sequence: Synthetic coding sequence
  source 1..2547: mol_type = other DNA
atgtggcttcgcctcggcccaccctcactgagcctgagccctaagcctacggtggggagatctctgtgcctgactttatggttcctcagcttagccctgcgtgctagtacacaagctcccgctccaacagtgaatacacattttggaaaactgcgcggtgcaagagtgcccctcccctcagaaatcctcggccccgtggaccagtatctcggggtgccttacgccgcccctcctattggggaaaaaaggttcctgccacctgaaccacccccctcctggtccggtatccggaacgcgacacattttccaccggtgtgtcctcagaatatacacaccgcggtgcccgaggtcatgctccccgtctggttcacggccaacctcgatatcgtggcgacttacatacaggagcccaatgaagactgcctctatctcaatgtgtatgtacctaccgaggacgtgaagcggattagtaaagagtgcgccagaaaacctaacaaaaaaatttgtaggaagggaggtagcggcgccaagaagcaaggggaagacctggctgacaacgacggagacgaagatgaggatatacgagacagcggcgcaaaaccagtcatggtctacatccacggcgggagctacatggagggaaccggcaacatgatcgatgggtctattttagcaagctacggaaatgtgatcgtcatcaccctgaactacagagtcggggttctgggtttcctgagcacaggcgaccaagccgcaaagggcaattacggcctcctcgatcagatccaggcactcagatgggtgtccgagaatatcgcattctttggaggcgatccacgaaggattaccgtttttggcagtggaattggcgcttcttgtgtaagcctgctgaccctgtcccatcattccgagggattatttcagcgtgctattatccagagcggcagcgccttaagctcctgggccgttaactaccaaccagtgaagtatacaagtctgttggcggacaaggtgggatgtaacgttctagacacagttgatatggtggactgcctgcgccagaagagcgcgaaggaactggtggaacaagatattcagccagctaggtatcacgtcgcttttggtccggtaatcgacggcgacgtaattccagacgacccagaaatcctgatggagcagggggagttcctgaattacgacattatgctgggagttaatcagggagagggcctgaagtttgttgaaggcgtggttgaccccgaggatggagtgtctggaacagacttcgactatagcgtgtccaactttgtggacaatttatacggttatcctgaagggaaagacacactccgcgaaactataaaattcatgtataccgactgggcagatagagataatcccgagactaggagaaaaaccctcgtggctctttttactgatcaccagtgggttgagccatccgtggtcactgctgacctacacgcaagatacgggtcccccacctatttctacgccttctatcatcactgccagtccctgatgaaacccgcctggtctgatgctgctcatggggacgaagtgccctacgtgtttggggttcctatggtcgggcctaccgacttgttcccttgcaacttctctaagaacgatgtgatgctcagcgccgttgttatgacctactggacaaattttgctaaaacgggggacccaaacaagcctgtaccccaggacaccaagttcatacacactaaggctaaccggttcgaggaagtggcctggagcaaatacaatcctcgcgaccagttatatctccacatcggactgaagccgagagtgcgcgaccactaccgggccaccaaagtcgctttttggaagcatctggtgccccacctgtataacctacacgacatgtttcactacacctcgactactaccaaggttcccccacccgataccacccattcttcacatatcactagacgccctaatggcaagacctggtcaacaaagagacccgctatctccccagcctactcaaacgagaacgctcaaggatcatggaacggcgaccaggatgctggacccctgctggtagagaaccctagggattattccactgaactgtctgtcaccattgccgtgggcgccagtttacttttcttaaatgttctggcctttgccgccttatactaccgcaaagacaaacgcaggcaagagccactgagacagcccagtccacaacgtggtgctggtgcacccgaattaggcgcagctcctgaagaagaacttgcagcactgcagctcggaccaacacaccacgagtgtgaagctggacccccacatgataccctgcgccttaccgctctgcccgactacacactgacgctacgccggtctccagatgatatcccacttatgactcccaacacaattacaatgatcccaaactccctagtgggtctgcaaactctgcatccatataacaccttcgcggcaggattcaattctaccggattaccccatagccactctactaccagagtgtag

SEQ ID NO: 126251 - DNA, 2487 bp, synthetic construct
  misc_feature 1..2487: note = Description of Artificial Sequence: Synthetic coding sequence
  source 1..2487: mol_type = other DNA
atgtggctccgcctggggcccccttcgctctccctttctcccaaacctactgtggggaggagcctttgtctgacgctgtggtttctgtcacttgcattgcgcgcttccactcaagctcccgccccaactgtgaatacacacttcggaaaattgaggggcgcgcgcgtgcccctgccgagcgaaattctcggacccgtggaccaatacctgggcgtgccatatgctgccccccctatcggcgagaagcgattcctccctccagagccacctcccagctggtccggtatcagaaacgcgacacactttccccccgtgtgccctcagaatatccacaccgccgtgcccgaggtgatgctaccagtgtggtttactgctaacctggatattgtggccacatacatacaggagcctaatgaggattgtctctatctcaacgtctacgttcccaccgaggacgggtccggcgctaaaaagcagggagaggatctcgccgacaacgatggggacgaggatgaagacatccgcgactctggagcgaaacctgtaatggtctacattcatggcggatcatacatggagggaacggggaatatgatagacggaagtatccttgcgtcctacggcaatgtgattgtgattaccctaaactacagagtgggcgttttgggttttttgagtaccggggaccaggccgcaaaaggaaattatggattactcgatcagatacaggctctgaggtgggtgtcagagaatatcgcattcttcggaggcgatccccggaggattacagtgttcggctcaggaatcggtgcttcctgtgtctcactcctgacccttagtcatcatagcgagggattgttccaacgggccatcatccagagtggtagcgccctgtcttcctgggccgtcaactatcagcctgtgaaatatacaagtctgctggctgacaaggttgggtgcaatgtattagacaccgttgatatggtggactgcctgcgccaaaagagcgcaaaggaactggtggaacaagatattcagccagctcgttaccacgtggccttcggcccggtcatcgacggggacgtgattccagatgacccagaaattctaatggagcagggggagttccttaactatgacatcatgctgggcgtgaatcagggcgaaggtctgaaatttgttgaaggtgtggtcgacccagaggatggagtgtcgggaactgacttcgactacagtgtgagcaacttcgtcgataacctgtatggataccctgagggcaaagacacactgcgagagaccatcaagttcatgtatacggattgggctgaccgagataatccagaaacacgccgaaagacactggttgccctattcaccgatcatcagtgggtggagcccagcgtggtgacagccgacctgcatgcccgctatgggagccctacttacttctatgccttttaccatcattgtcagtccctgatgaaacctgcttggtcggacgctgctcacggggatgaagttccatatgtgttcggggtgcctatggtcggcccaacagatctgttcccctgtaattttagcaaaaacgatgtgatgcttagcgctgttgtcatgacatactggaccaactttgccaaaaccggcgatcccaataagcctgtccctcaggacacaaaatttattcacacaaaggccaatcgattcgaagaggtggcatggtctaagtacaatcctagagaccagctgtatctgcatatcggccttaagccacgtgtgagggaccattatcgcgcaactaaagtggctttctggaagcacctcgtgccacatttatataatctgcacgacatgttccactacactagtaccacgaccaaagtgccgccgccggacaccactcatagctctcatattacccgtcgaccgaacgggaagacctggtccacaaagcggcccgctatttcacccgcttattccaacgagaacgctcagggctcatggaacggcgatcaggatgctggccccttattggtggaaaatcccagggactacagcactgaactgtcagtcaccatcgcagtgggtgcctccctcctttttctgaatgttttggcgttcgccgcgctgtactatcgcaaggataaaagaaggcaggagcccctccggcagccctccccacaacgtggcgccggggctccagagttaggcgctgcccccgaggaggaacttgctgcactgcagttgggcccaacccaccacgagtgtgaggctggtcctccacatgatacattaaggttaactgcgttgcccgactacaccctgacccttagacggtctcccgacgacattcccctgatgacaccaaatactatcactatgattccaaactcgctcgtggggctccagactctgcatccctacaacacatttgccgcgggattcaacagcactggcttaccgcattctcactccacaactagagtgtag

SEQ ID NO: 126252 - DNA, 1542 bp, synthetic construct
  misc_feature 1..1542: note = Description of Artificial Sequence: Synthetic coding sequence
  source 1..1542: mol_type = other DNA
atgtggctacgtctcggcccaccaagcttgtcattgtctcccaagcctactgtgggtaggtccctgtgtcttaccctgtggttcctaagtctcgcccttagggcttcaacgcaagcacccgccccaacggtgaacacgcattttggcaagcttcgaggtgcacgggtccctctcccttcagagatactcggacctgtagaccaatatcttggtgtgccctacgcagctcctccaatcggtgaaaagcggtttctgccccccgagcctcctccctcttggtctggaatccgcaacgctacacactttccacccgtgtgtccccaaaacatccacaccgccgttcccgaagtgatgttgccagtctggttcacagctaatctggacattgtggctacatacatccaagagccgaatgaggactgtctatatctgaacgtctatgtgccgaccgaagatgacattcgcgacagcggagccaaacctgtcatggtgtatatccatgggggttcgtacatggaaggcaccggcaatatgattgacgggtctatcctggcgagttatgggaacgtgatcgtgatcacactgaattatagagtgggagtgctagggtttttgtctaccggagatcaggctgctaaaggtaattatggccttctggaccaaattcaggctttacggtgggtctcagagaatatagccttctttggtggagatccccgccgcatcacagtatttggaagcggaatcggcgcctcttgcgtgagtcttttgactctgtcccaccactccgaggggctatttcagcgcgctattatccagtccggctcggcattgagctcctgggctgtgaactatcaaccagttaaatacaccagtctcctcgcagacaaggtggggtgcaacgtgctggacacagtagacatggtggactgtcttagacagaaatccgctaaggagcttgttgagcaggacatccaacctgcccggtaccacgttgctttcggacccgtgatcgacggcgacgtaattcctgatgacccagagattctcatggagcaaggagagttcctcaattacgatataatgctcggtgtgaaccagggcgaaggcttgaaatttgtcgagggtgtagtggacccagaggacggagtcagcggcaccgacttcgattactcagtttccaacttcgtggacaatttgtacggctatcctgaaggcaaagatacgctgcgggaaactattaagtttatgtataccgactgggctgatcgcgataaccctgaaacacgcaggaagacgcttgtcgccctgtttactgaccatcaatgggtggaacctagcgttgtgacagcggatctgcatgccagatacggcagtcccacctacttttatgccttctaccaccactgtcaaagccttatgaaacccgcttggtctgacgccgcccacggagacgaggtaccatacgtgttcggggtccctatggtggggccaaccgacttgtttccctgtaatttcagcaagaatgacgtgatgctgtag

SEQ ID NO: 126253 - DNA, 2427 bp, synthetic construct
  misc_feature 1..2427: note = Description of Artificial Sequence: Synthetic coding sequence
  source 1..2427: mol_type = other DNA
atgtggcttcgtcttggcccaccatctctgtccctaagcccaaagccgacagtgggcaggtctctctgtctgacactgtggtttctcagtttggcactgcgcgcctctactcaggctccagcacctacagtgaacacccatttcgggaagctaagaggggctagggtccccttgccaagtgaaattctaggccccgttgatcagtacctgggggtgccctacgcagcacccccgattggcgagaaacggttcctgccccctgagccccctccgtcttggagcgggattagaaacgcaacgcattttccaccagtgtgcccacaaaacatacacaccgctgtcccggaggtcatgttgcccgtgtggttcacggcaaatctggacatcgtggccacgtacattcaagagcccaacgaggactgtctgtacctgaatgtgtacgtgccaactgaggacgacatccgcgactctggggccaagcctgtgatggtgtacattcatggcgggtcgtatatggagggtaccgggaatatgattgacggcagcatcctggctagttacggaaatgttatcgtcatcacacttaactaccgggtgggagtgctcggcttcctgtcaactggcgaccaagccgcaaagggaaattatggcctgcttgaccagatccaggcgctccggtgggtatctgagaatatcgccttctttggaggtgacccaagacggattaccgtgttcggctcagggatcggcgcttcctgtgtcagcctgctgacactctctcatcactcagagggtctgttccagcgcgcgattattcagtccggatccgcactgagctcttgggcagtaaactatcagcctgtaaagtatacttccctgctggccgataaggtgggctgtaacgtgttggacacagtggatatggtcgactgtctcaggcagaaatccgccaaggaattagtagaacaggacatacagcctgcccgctaccatgtggctttcgggcccgttattgatggcgatgtaataccggatgaccccgagattctgatggaacagggcgagttcctgaactacgacattatgctgggtgttaaccagggcgagggactgaaatttgttgaaggggttgttgacccagaggacggggtgagcggtacagacttcgactactccgtctcaaacttcgtcgacaacctgtatggatacccagaaggaaaggatacacttagagagacaatcaagttcatgtacaccgactgggccgacagagacaacccggaaactagacgcaagacattagtcgctctcttcactgaccatcagtgggtggaaccatcagtggtgacagcagacctgcacgccaggtatggcagccccacctacttctacgccttctatcatcactgccagtccctgatgaagccagcttggtccgacgcggctcacggcgatgaagttccctatgtatttggggtgccaatggtgggccctactgacctgtttccttgtaatttctcaaaaaatgatgtgatgctgtcagctgtagtcatgacatactggacaaattttgctaagaccggtgacccaaataaacctgttccccaggacacgaaatttatccacaccaaagcaaataggttcgaggaagtagcctggagcaagtacaacccacgggaccagttatacctgcatatcggccttaaacccagggtgagggatcactatcgcgcaaccaaggtagcgttctggaagcacctggttccacacttatataacttacatgacatgttccactatactagcacaaccactaaagtcccaccccccgataccactcacagttcacatattactcggcggccaaatggcaagacctggtcaacaaagagacccgcaatatctccagcatattccaatgaaaacgcccaaggctcttggaacggcgatcaggacgcaggcccactcctggttgagaacccacgggattactcaaccgagttaagtgtcaccatcgccgtgggggcctctctcttgttcctgaatgttctcgccttcgccgccctgtactatagaaaagacaagcggcggcaagagcctctaaggcaaccctctcctcaacggggagccggggcacccgaactaggcgctgcacctgaggaggaactggcggcactccaactgggaccgacccaccatgagtgcgaagcgggacctccccacgatacattgaggctgaccgccctcccggactacacattgacgctgaggagatcaccggacgacattcccttaatgacgccaaacaccatcaccatgattcctaatagtctcgtcggtttacagacgcttcatccatataacactttcgccgccggcttcaactcgacaggcctcccacactcacactccactactcgagtgtag

SEQ ID NO: 126254 - DNA, 1056 bp, synthetic construct
  misc_feature 1..1056: note = Description of Artificial Sequence: Synthetic coding sequence
  source 1..1056: mol_type = other DNA
atgctgcccgtgtggttcactgcaaatctggatatcgtcgcaacttatatccaagaacctaatgaagactgcttatacctaaatgtttacgtacctaccgaagacggatctggggcaaagaaacagggcgaagatttagccgacaacgacggagatgaggacgaagacattagagattccggagctaaacccgtgatggtctacatccacgggggaagctacatggaaggaactggtaatatgatcgacggttcaattctggcgagttatggtaacgtcattgttataacactgaattacagagtcggggttcttggttttcttagtaccggcgaccaagctgccaaaggcaattatgggctgctggaccagatccaggcattacgatgggtctctgaaaacattgctttcttcggaggagaccccagacgtatcaccgtgttcggatcgggcattggcgcatcctgcgtgtcactccttacactcagtcaccactccgaaggattgttccaacgggccatcatccagagcggctcggcactcagcagctgggccgtgaattatcagcctgttaaatacacaagtctccttgcagacaaggtgggttgtaatgtactagacacagtggacatggttgattgcctccgccagaagagcgctaaagagctggttgagcaagatattcagccagcgcggtaccacgtcgcattcgggccagtcatcgatggagatgtgattccggatgaccccgaaattctgatggaacagggagagttcctgaactatgatattatgttgggggtgaatcagggagaaggattgaaattcgtggaaggggttgtcgaccccgaagatggagtctcaggaaccgactttgactatagcgtctctatcctttggacgatctgcatggcaattctcagagtccggaccccatgtgaacgccccagcagttcctgcatccagacggggcaaaccgtgacaaccttgcgacccgcagttaaacactggtggcactctagtttgacaacaagcggctggagtccacagtggtag

SEQ ID NO: 126255 - DNA, 771 bp, synthetic construct
  misc_feature 1..771: note = Description of Artificial Sequence: Synthetic coding sequence
  source 1..771: mol_type = other DNA
atgcttagaccccagggactgctgtggctccctctgctgttcacatcagtgtgtgtcatgttgaactcgaatgtgctactgtggattacggctttggccataaaattcaccctaatcgatagtcaggcccagtaccccgttgtgaataccaattatggaaagattcaaggactacgaacccccctgcctagcgagattcttggccctgtggagcagtatcttggcgtgccctatgcttccccgcccacgggtgagcggagattccagccacctgagtcgccgagctcttggactggcatccgaaatgccacacagttctcagcagtatgtcctcagcacctcgacgaacgcttcctgctgcacgacatgctgcctatctggttcaccacatcgttggacaccctgatgacctacgtccaggatcagaacgaggattgcttgtacctgaacatctatgtccccatggaggatggtacaaatattaagcgaaatgccgatgacattactagtaatgatcacggagaggacaaggatatccacgaacaaaactcgaaaaaacccgtaatggtttacattcatggagggagctatatggaggggacgggaaacatgattgatggctcaatcctggccagctacggtaacgtcattgtgatcactatcaattaccggctgggcattcttgggatgcaggaggctaggctctgcggctcctcaaaaatgttcaactatttcaagagcccatttaccaatctgattaattttttctag

SEQ ID NO: 126256 - DNA, 2451 bp, synthetic construct
  misc_feature 1..2451: note = Description of Artificial Sequence: Synthetic coding sequence
  source 1..2451: mol_type = other DNA
atgctgagaccccagggcttactgtggttacccctcttatttaccagtgtctgcgtgatgctcaacagtaatgttctcctatggatcaccgctttggccattaaatttacgctgatcgacagccaagctcaatatcccgtggtaaacacaaactatggcaagattcagggactgcggaccccacttccctctgagatcctcgggccggtggagcaatacctcggcgttccatatgcatctcctcctactggtgagcggcggttccagcctcctgaaagccccagttcttggaccgggatacgaaatgccacacagttcagcgccgtatgtcctcaacacttagatgagcgtttcctgctgcatgatatgctgcccatatggttcacgaccagcctggatactctgatgacctacgtgcaagaccagaatgaagattgcctttatctcaacatatacgtgcccatggaggatgacattcacgaacagaattccaaaaaacccgtgatggtttacatccatgggggctcatatatggaggggaccggtaacatgatcgacggcagcatccttgcttcatacgggaacgtcatcgtgataaccatcaactatcgtcttggtatcttgggcttcctgagcaccggcgatcaggccgcaaaggggaactacggactgctcgatcagatacaggccctgagatggatagaggaaaacgtgggtgcgttcggaggcgaccccaaacgggtaaccatcttcggaagtggggcgggcgcctcctgcgtgtcattactgacgttgtcacactactcagaaggcctgttccagaaagcaatcattcaatctgggactgcactttctagctgggccgttaactaccagccagccaagtatacacgaatactggccgacaaggtggggtgtaatatgcttgataccacagacatggtggagtgcctcaaaaataagaattataaggagctgatccagcagacaattacccctgctacctatcacattgctttcgggcctgtgattgacggcgacgtcattcctgatgaccctcagatacttatggagcagggcgagttcttaaattatgatattatgctgggggtgaatcagggggaaggcctgaagttcgtcgatggaattgtggacaatgaggacggtgtcacacctaatgactttgattttagcgtgtctaacttcgttgacaatctgtacgggtatcccgagggaaaagatacactgagagagacaatcaagtttatgtataccgactgggccgacaaggaaaatcctgaaacaagaagaaagaccctcgtcgctctgtttaccgatcaccagtgggtggccccagcggtggccacggccgacttacacgcccagtatggctcccccacatacttttacgccttctaccaccactgtcagtctgagatgaagccttcctgggccgattctgcacacggggatgaggttccctacgtcttcggcatcccaatgatcggacctacggaactgttcagctgcaacttttccaaaaatgacgtgatgctttctgctgtcgtgatgacttattggactaactttgctaaaacgggagatccaaatcagcccgtgccccaggatactaagttcattcacactaaaccaaatcgcttcgaagaagtggcttggagcaaatataacccaaaggatcagctgtacttgcacataggactgaaacctcgcgtgcgcgatcattaccgcgcaactaaggtggcattctggctcgaactggtgccccatcttcataacctaaacgagatcttccagtacgtctctactaccaccaaggtaccaccccctgatatgaccagctttccgtacgggacccgaagaagcccagcaaagatatggccgaccaccaagcggcccgcaattactcccgctaataatccaaagcactccaaagatcctcacaaaaccgggcctgaagacaccaccgtcctgatagaaacaaagcgggattattccacagaactgtctgtaacgattgcagtgggggctagccttctgttcctgaacattctagcttttgccgctctatactacaaaaaggacaagaggcggcatgagacccacagacatcccagcccgcaaaggaacacgactaacgatatcacccatattcagaacgaggagataatgagtctgcaaatgaaacaactggagcacgaccatgagtgcgagtccttgcaggctcacgacaccctccgactaacgtgtccccctgattataccctcactctgagacggtccccggacgatatcccattcatgacacccaacacaattactatgattcccaacacgcttatgggcatgcaacccctccatactttcaagaccttttctggtggtcaaaactcaacaaacttgcctcatggacattctacaacaagggtgtag

SEQ ID NO: 126257 - DNA, 2451 bp, synthetic construct
  misc_feature 1..2451: note = Description of Artificial Sequence: Synthetic coding sequence
  source 1..2451: mol_type = other DNA
atgctgcgacctcagggactgctgtggctgcctctgctgttcacaagcgtctgcgtaatgcttaacagtaacgttctgctgtggattaccgcactggccatcaaatttaccctgattgatagccaggcacagtaccccgtggttaatactaattatggtaaaattcagggccttcgcacccccctgccatctgagatcctcgggcctgtcgaacagtatttgggcgtaccttatgcatccccccccacgggagagagaagattccaaccgcccgagtcccccagtagctggacagggattcgcaacgctacccagtttagtgcagtctgtccccaacatctggacgagagattccttctgcacgatatgctaccgatatggtttacaaccagtctggacacgttgatgacgtacgttcaggatcagaatgaggattgcctttacctgaatatctacgtccccatggaagacgatatccatgaacagaatagcaaaaagcccgtgatggtttacattcatggtggatcctacatggaaggaaccggaaacatgatcgatgggtctatcctggcttcctatggtaacgttatcgttattacaattaattaccgcctgggtatcctcggattcctgtccactggcgatcaggctgcaaaagggaattacggactgcttgatcagatacaggccctcaggtggattgaggagaacgtgggggcctttggaggagaccccaagagagttacaatttttggctctggagcgggagcctcatgtgtttccctgttaaccctttctcactactctgagggattgttccagaaggccatcatccagtcaggcactgctttgagtagctgggccgtgaattatcagcctgctaagtataccaggatcttagccgacaaagtagggtgtaatatgcttgatactacagacatggtggaatgcctgaaaaacaaaaactataaggagttaatccagcaaactattaccccagctacataccacattgcctttggacccgtgatcgacggtgacgtcatccctgatgacccacagatcctgatggaacagggagagttcctcaactacgacatcatgctgggagtgaaccagggggaggggctgaagttcgtggatggcattgtggataacgaagacggtgtgactcccaacgacttcgacttttccgtctctaactttgtggacaatctctacggctatcccgagggcaaggataccctccgcgaaactatcaagttcatgtatactgattgggctgataaagaaaatccagagacaaggaggaagactctggttgcgctgtttacggaccaccagtgggttgcaccagccgtggctacagccgatctccatgcccaatatgggagccccacttatttttatgcattttaccaccattgccaatctgaaatgaaaccaagctgggcggactctgcacatggggacgaggtaccgtacgtattcgggatcccaatgatagggcccaccgagctgtttagctgcaattttagcaaaaatgatgtgatgctatctgccgtggtaatgacatactggacaaacttcgccaaaacgggagacccaaatcagccagtgccgcaggatacaaagtttattcacaccaaacccaacaggttcgaagaggtcgcctggtctaagtacaatcccaaggatcagttatacctgcatataggcctgaaaccacgcgtcagggatcactatcgtgccacgaaagttgcattttggctggagctggtgccacacctgcacaacctgaacgaaatcttccaatacgtttctaccactacaaaggtgcctccgcccgatatgaccagcttcccatatgggacaaggaggagtcccgctaagatctggcctacaaccaaacgccccgccataacacccgcaaataaccctaagcactctaaagacccccataaaacaggacccgaggacactactgtgctcatcgaaacaaagcgtgactacagcactgagctgagtgtgactattgcagtaggagctagccttttatttctaaacattctcgcctttgcggcgctttactacaagaaagacaagcggcgccacgagactcatcggcatcccagtcctcagaggaatactaccaatgacatcacccacatacagaacgaagaaattatgtctctgcagatgaagcagctggagcacgatcacgaatgtgaaagcctgcaggcacacgatactctccgcctgacctgccctccagattatactctcacactcaggcggagtccagacgacatcccctttatgaccccaaatactataaccatgatcccaaacaccctgatgggaatgcagccgttacacaccttcaaaactttcagcggcgggcagaattcaactaatcttccgcacggacattctacaaccagagtgtag

SEQ ID NO: 126258 - DNA, 2622 bp, synthetic construct
  misc_feature 1..2622: note = Description of Artificial Sequence: Synthetic coding sequence
  source 1..2622: mol_type = other DNA
atgctcagaccccaggggctcctatggctgccactgctctttactagcgtgtgtgttatgttaaacagcaacgtactcttgtggataactgcattagccatcaagttcacgctaatcgactctcaggctcagtaccctgtggtgaatacaaactacgggaaaatccaagggctgcgcactccccttccaagcgagatcctcgggccagtggaacagtacctgggtgtgccatacgcttcgccaccaactggagaacgacgctttcagccgccggaaagcccttctagttggacaggcataaggaatgcgacccagttctcagccgtgtgtccacagcacttagacgaaagattcttgttgcatgatatgttaccgatttggttcactacatcattagatactttgatgacttacgtccaggaccagaatgaagactgcctgtatcttaacatctacgttcctatggaggacggtaccaacattaagcggaatgcggacgacatcacatccaatgaccatggtgaggacaaagatatccatgagcagaactctaagaaaccagtgatggtttacatccacggggggagttatatggaaggcaccggaaacatgatagacggtagcattctggctagctatggtaacgtgatcgtaattacgattaactatagacttggcattctggcccagaatacactggcccacgggaactgcaagcaccgctgtcaactgcacctacaagccccacgggactgtaaatctgcctatccgtttcgcaatgaggatgaaatccgtggcttcctgtcgaccggcgaccaggcagcaaaggggaattacggattgctcgatcagatccaagcactgcgttggatcgaggagaatgtcggggcctttggtggcgaccctaaacgggtgacaatttttggaagcggcgccggagcctcctgcgtatccctcttgaccctgtctcactattccgagggcctctttcagaaggcaataatacagtctggcactgctctgtcgagctgggcggtaaactaccaacccgctaaatatacgcgtattttggcggataaggtcgggtgtaatatgctagacactaccgatatggtggaatgtttaaaaaacaaaaactacaaagagttaatccagcagactatcacacccgccacctatcacattgcttttgggcccgtcattgacggagatgttattcccgatgatccccagattctgatggagcaaggagagttcctgaactacgatattatgttaggcgtgaatcagggagaaggcctgaaattcgtggacggcatagtggataacgaggacggagtaacccccaatgacttcgacttttccgtgagtaacttcgtggataatctgtacggctaccctgaaggtaaggataccctgcgcgagaccataaaatttatgtacacagattgggccgacaaggaaaatcctgagacgcggagaaaaaccctggttgcactctttactgaccaccagtgggttgcgcccgcagtggctacagcagatctgcacgcgcaatatggctcaccaacctacttctatgccttctaccaccactgtcagtccgagatgaaaccgtcttgggcagattcggcacacggcgacgaggtaccttacgtgtttggtatcccaatgattggccccactgagcttttctcctgcaacttctctaaaaatgacgttatgctgagcgccgtcgtcatgacatattggacaaacttcgccaagacgggggacccaaaccagccggtccctcaagatacaaaatttattcacactaaacccaacaggtttgaggaggtagcttggagcaagtacaatcccaaagatcagctgtatctccatatcggactcaaaccgcgtgtgagggaccattacagggcaacaaaggtggctttctggttagagctcgttccccatctgcataacttgaatgagatatttcaatacgtatctactactactaaggtccccccaccagatatgacctcctttccatacggtacacggagaagcccggcaaagatttggcctactactaaacggcctgcaattacaccagcgaacaaccccaaacactcgaaggatcctcacaagacgggaccagaggacaccactgttttgattgaaactaagcgcgattacagtacagagctgagcgtgactatcgccgttggtgcctcactgctgtttttaaacatcctagcattcgcagcactctattataaaaaagacaagcgaaggcacgaaactcacaggcatccaagtccccagcgcaataccactaatgatatcacgcatatccagaacgaagaaatcatgtcattacagatgaagcagttagagcacgaccacgaatgtgagtctctgcaggctcacgatactctgcggttgacatgtccacctgattacacgcttacactgagacgatctcccgacgacattccttttatgacccctaatactatcaccatgattccaaatacactaatgggaatgcagccactgcacactttcaagaccttcagcgggggccaaaatagcactaatcttccacacggccattcgacgaccagggtttag

SEQ ID NO: 126259 - DNA, 1947 bp, synthetic construct
  misc_feature 1..1947: note = Description of Artificial Sequence: Synthetic coding sequence
  source 1..1947: mol_type = other DNA
atggtgtacattcacggtggttcatatatggagggaaccgggaacatgattgatgggagtatccttgccagctatggtaatgtgatcgtgatcacgatcaactatcgacttggcattttgggtttcttgtccaccggcgaccaggcagctaagggaaactacggcctcttagatcagatacaggccctgagatggatagaggaaaacgtcggagcctttgggggagacccaaaacgcgtaacaatctttggtagtggagccggcgcaagctgtgtcagcctgctgacactcagccactattccgaaggactgttccagaaagcaattatccagagcggcacggcactatcttcatgggctgtgaactaccagcccgcaaagtatacacggatcctggccgataaggtaggttgcaatatgttggacaccactgatatggtggagtgtctgaagaacaaaaactacaaagaactcattcagcagactattaccccagctacgtaccatatagcttttggccccgtaatcgacggcgatgtgattcccgatgacccgcagatcctgatggaacagggcgaattcttgaattatgatataatgctaggtgtaaaccagggagaaggcctaaaattcgtagatggaatagtggataacgaagacggagtcacaccaaatgacttcgactttagcgtcagcaacttcgtcgataacctttatgggtatcccgaagggaaagatactctgagggaaacaattaaattcatgtacaccgactgggctgacaaagagaatcctgagacgagacgtaagaccctcgtggccctgttcacagaccaccaatgggttgcacccgcagtggctacggccgacctgcacgctcagtatgggtccccaacctacttttacgccttctaccatcattgtcagtctgagatgaagccaagttgggccgattctgctcacggagacgaggtaccgtacgttttcggtatacccatgatcggacctacagagctcttcagctgtaactttagtaagaacgatgttatgttgagtgccgtggttatgacatactggaccaatttcgccaagaccggagaccctaatcaacccgtgccccaggacactaaattcattcacaccaagcccaatcggttcgaggaggtggcctggagcaagtataacccaaaggatcagctctatctgcatatcggcctgaagccccgtgttagggatcattatcgtgccacgaaggtggccttttggctggagctggtgccgcaccttcataacctcaacgaaatctttcagtatgtaagtaccacaacaaaggtgcctcctcccgatatgaccagtttcccatatgggacacgacgatcgcccgctaagatttggcctacgacgaagaggcccgctatcacaccggccaataaccccaagcacagtaaagatccccataagacaggtcccgaagacactacagttttgattgaaactaaacgagactactccacggagttgtcagtgactattgctgttggcgccagcctattgttccttaacatcctggcctttgctgctctgtattataaaaaggacaagcggcggcatgagactcatagacatccctctccacagaggaatacgaccaatgatattacgcatatacagaacgaagaaatcatgagcctgcagatgaagcagctggaacacgatcacgagtgcgagtcattgcaagcgcacgacaccctccgtctgacatgtccaccggactacacgctgactctcagaagatcacccgatgacatcccttttatgactccaaacaccatcaccatgatccccaacacactcatgggcatgcagccgctccacaccttcaaaaccttttcaggtggacagaacagtacaaatctcccccacggtcactccaccaccagggtgtag

SEQ ID NO: 126260 - DNA, 711 bp, synthetic construct
  misc_feature 1..711: note = Description of Artificial Sequence: Synthetic coding sequence
  source 1..711: mol_type = other DNA
tagaattcaaatgtactgctatggatcaccgctctcgcaattaagtttacactgatcgacagccaagcacagtacccggtggttaacacaaattatggcaaaattcagggcctccgaacacctcttccatccgagatcctggggcctgtggagcagtacctgggcgtaccctacgctagtcctcctacaggcgaacggcgattccaaccccccgagtctccatcgtcctggaccgggattagaaacgcaacacaattcagcgctgtgtgcccgcaacacctggacgaaagattcttgttacatgacatgttgcctatatggttcaccacctcactcgacactcttatgacttacgtgcaggatcagaatgaggactgcctctatctgaatatctatgtgccaatggaagacggtaccaacataaaacgcaacgcagacgatatcactagtaacgatcacggcgaggacaaagacatccatgaacagaattctaaaaaacccgttatggtctacatccacggtgggtcctatatggaagggaccgggaacatgattgatggcagcatcctggcctcctatgggaacgttattgtgatcaccatcaattatcgcctggggattctgggaatgcaggaagcaagactctgcggatcaagtaagatgtttaattactttaagtccccctttaccaatctgattaatttcttttag

SEQ ID NO: 126261 - DNA, 2511 bp, synthetic construct
  misc_feature 1..2511: note = Description of Artificial Sequence: Synthetic coding sequence
  source 1..2511: mol_type = other DNA
atgctccggccccagggtctcctgtggcttcccctgctctttacttccgtatgcgttatgttgaacagtaacgtgctcctctggattaccgcactagcgataaaattcactctgatagactctcaggcccagtatcctgtggtcaatacaaattatggcaagatccaagggctaagaacccccttgcctagcgaaatcctggggcctgtcgagcagtatctgggagtgccttacgcgagcccgcctacaggcgagcggagatttcagccacccgagtccccttccagttggacggggatccggaatgccacgcaatttagcgctgtttgcccacagcatctcgacgagagatttctcctccatgacatgttgccgatatggttcactacatccttggatacactgatgacatacgtccaagaccagaatgaagactgcctctatctgaacatttacgttccgatggaagatggcaccaacattaaacgcaatgccgacgacatcacgagcaatgaccatggagaagacaaagacattcatgagcagaattctaagaagcccgtgatggtgtatatccacgggggctcatatatggaaggtactgggaatatgattgacggtagcattctggcctcatacggaaacgtcattgtgataaccattaactatagacttgggatccttggctttctctcaactggcgaccaggctgccaaagggaactacggtttgctcgatcagattcaagcgctgcggtggattgaagaaaacgtgggagccttcggaggagacccaaaacgagtcacgatctttggcagcggtgcaggcgcaagctgcgtcagcttgctgaccctcagtcactatagtgagggcctctttcagaaggcgattatccagtcaggaacagccctgtcctcctgggcagtgaattatcaaccagccaagtacactcggattctagccgacaaagtgggctgtaacatgctagatactactgatatggtagaatgtctcaagaataagaattacaaggaattaattcagcaaacaatcacccccgccacatatcacattgcctttggaccagttattgacggcgacgtgattccagacgaccctcagatattgatggaacagggagaattcctgaattacgacataatgcttggagtgaatcaaggtgaagggttaaaattcgtcgacgggattgtggacaatgaagacggcgtgactcctaacgactttgatttctctgtgtccaacttcgtcgacaacctgtatggataccccgagggcaaagataccctccgtgagaccattaaattcatgtacacagattgggctgacaaggagaatcctgagacacgacgcaaaactctggtggcactgtttaccgatcaccagtgggtggcgcccgcggtggcaaccgccgacttgcatgcacaatacggtagcccaacatatttctatgccttttaccatcactgtcagagcgaaatgaagccgtcatgggccgattctgcgcacggagatgaggtcccttacgtattcggcatacctatgatcggccctactgagttattctcatgcaatttcagcaaaaatgatgtgatgctgtccgcggtggtgatgacttactggaccaattttgcgaagaccggtgaccctaaccagcccgtacctcaagacaccaagttcatccataccaagcctaatcgctttgaggaagtggcctggagcaaatacaaccccaaggatcagctgtatctgcacattgggctcaagccccgggtccgagaccattacagggctactaaggtggccttctggctcgagctggtgccacatttacacaatttgaacgaaatcttccaatacgtgagtacaactacaaaagttcccccccctgatatgacgagctttccttacggaacaagacggtctcccgccaaaatctggccaacaaccaagcgtcccgcaatcaccccagcaaataaccccaaacatagcaaagatccccacaaaaccgggcccgaggacacgaccgtgctcatcgagaccaaacgggactactccacagagctctccgtcacaattgcagtgggcgcctcccttctcttcctaaatattctggctttcgccgcactgtactacaagaaggataagcgcagacatgaaactcacagacacccctcaccccaacgaaatactactaatgacatcacccacatccagaatgaagaaattatgtcacttcagatgaaacagctggaacacgatcatgaatgtgagtctctccaagctcacgacacactcaggttgacctgcccacctgattatactctgacactgagaagaagccctgacgatattccattcatgacaccgaacacaatcacaatgatccctaatactcttatgggaatgcagcctctgcatactttcaagacttttagtgggggccaaaattctaccaatctcccccatggccactctacaacgcgcgtgtag

SEQ ID NO: 126262 - DNA, 1824 bp, synthetic construct
  misc_feature 1..1824: note = Description of Artificial Sequence: Synthetic coding sequence
  source 1..1824: mol_type = other DNA
atgatcgccaggtgtttactggctgtgcgcagtctcaggagggtgggtggctctaggatcctattgagaatgacgctggggcgggaggttatgagtcctctccaggccatgtcaagctatacagtcgccggaaggaatgtactgagatgggacctttccccggaacagataaaaaccagaaccgaggaactgatcgtgcaaacgaaacaggtctatgacgcagtagggatgctggggatagaggaagtgacatatgagaattgcttacaggccctggctgacgtcgaggtgaaatacattgtagaacgcacaatgcttgactttccacaacacgtgtccagtgacaaggaggtccgtgccgcgagtaccgaagccgacaaacgcctgtctagatttgatatagaaatgtcgatgcgcggggacatcttcgaacgcatcgttcatctacaggaaacgtgtgatctcggaaaaatcaagcctgaagctagacgttacttggaaaaatccatcaaaatgggaaaacggaatggactccatttgcctgagcaagtgcagaatgagataaagtccatgaagaaacgcatgtcagaactgtgtattgacttcaataagaacttgaatgaggacgatacattcctggtgttcagtaaagctgagttaggtgccctcccagacgattttatcgacagtttagagaagaccgacgacgataagtacaagataaccttaaaatatccccactacttcccggtcatgaaaaagtgctgtattccagagactcgaagaaggatggaaatggcgttcaacactcgctgcaaggaagaaaacaccatcattctacagcagcttcttcccctccgtaccaaggtcgctaagctgctagggtactcaactcacgctgattttgtattagagatgaatacagccaagtccacatcccgcgttacggcctttttagacgatctgtctcagaaactgaagcccttgggagaagcagaacgtgagtttattttgaatctcaagaagaaagaatgcaaggataggggtttcgagtacgacggaaagatcaatgcgtgggacctttactattacatgacccagaccgaggaactgaagtactctatagaccaggaattcttaaaggagtactttccaatcgaggtcgtgacggaagggcttctcaacacttatcaagaattactggggctgagcttcgaacagatgactgacgcccacgtgtggaataaaagtgtcacactgtatacagtcaaggataaggccactggggaggtgctcggacagttctacctagacctctatccgagagaggggaaatacaatcatgctgcctgcttcgggctgcaacctggctgtctgctgcctgatggatctagaatgatggctgtggcggcacttgttgtcaacttctctcagccggtcgctggtagaccaagcttactgcgccacgacgaggtacgaacatactttcacgagttcggacacgtgatgcaccaaatttgcgcacaaactgactttgcacggttctcagggacaaatgttgaaaccgattttgtggaagtgccatctcagatgctcgagaattgggtatgggatgtagatagtctcaggcgactgtctaagcactacaaggacgggtctccaatcgctgacgatctgctggagaagctggtggcgagtcgccttgtcaacaccggactcctcacactgaggcagatcgtgctctctaaggtggatcagtcattgcacactaataccagtcttgacgccgcctccaacatgcctaatacggcgcagaagtactag

SEQ ID NO: 126263 - DNA, 2115 bp, synthetic construct
  misc_feature 1..2115: note = Description of Artificial Sequence: Synthetic coding sequence
  source 1..2115: mol_type = other DNA
atgattgcgagatgtctcctcgcagtacgctctttgcgtagggtgggaggatccagaatcctgttgcgtatgactttggggcgtgaagttatgtctccactgcaggccatgtcctcatatactgtcgcagggaggaatgtcctgcgatgggatctcagccctgaacagataaagacaagaaccgaagaactaattgtccagaccaagcaagtatacgacgccgtgggtatgctgggtattgaggaggttacgtacgagaactgtctccaggctcttgctgacgttgaagtcaaatacattgttgaacgcaccatgcttgacttcccccagcacgtctcttccgataaagaggtacgggcagcgagtacagaagccgacaaacgtcttagccgctttgacatagagatgtccatgaggggtgatatctttgaacgcatcgtccacttgcaggagacctgtgacctaggtaaaatcaagccagaagctcggcgctacttagagaagtccattaaaatgggcaaaagaaacggattgcacctcccggagcaggtgcagaatgaaattaagagtatgaaaaaacgcatgtccgaactctgcatcgacttcaataagaatctgaatgaggacgacacgtttctggtgttttccaaagctgagcttggcgccttacctgatgacttcatcgacagcctggagaaaaccgatgacgacaaatacaaaatcaccctgaagtacccgcactactttccagtgatgaagaagtgttgtataccagagacccgccgccgaatggaaatggcttttaatacccggtgcaaggaggaaaacacaataattcttcagcagctgctccctctgcggacaaaggtggctaagctgctaggatattccacgcatgcggatttcgtcttggaaatgaataccgctaagtccacctcgagggtgacagcattcctcgatgaccttagccaaaagctcaaaccactaggggaggccgaacgtgagttcatactcaacttaaagaaaaaagaatgtaaggaccggggcttcgaatatgatgggaagatcaacgcatgggacctgtattactacatgacacagaccgaagagctcaaatatagtattgaccaggagttcctgaaagagtactttccaatcgaagtggtgactgagggattactgaatacctatcaagagctgctcggtctgtcattcgagcagatgaccgatgcccatgtgtggaataagagcgttacgctttacaccgtaaaagacaaggctacgggcgaggtgttggggcagttttacctcgacttgtacccacgggagggcaagtacaatcacgctgcatgttttggtctccaacccgggtgcctgctgccagacggaagcagaatgatggctgtggcagccctggtagtgaacttctctcaaccggtggctggacgcccatcccttctgagacatgacgaagttagaacctactttcacgaatttggtcatgtaatgcaccaaatctgtgcccaaaccgactttgccaggtttagtggtacaaacgtggaaaccgactttgtcgaggtgccctctcagatgttagaaaactgggtgtgggacgtcgactccctacggcggctgtccaaacattacaaggacgggagtcctatcgccgacgatctgctcgagaagctagtggccagcagacttgtcaatactggcctcctgactctgcggcagatcgtcctgtcgaaagtggaccagagtctccacactaacacttctcttgatgccgcgtcagagtacgcgaaatactgtagcgaaatcctgggagtggctgccacacctgggacaaatatgccagcaacattcggccacctagcaggcggatatgacgggcagtactatgggtatctgtggtctgaggttttctcgatggatatgttttattcgtgttttaagaaagaagggatcatgaacccagaagtcggcatgaaataccgcaatctcatactgaagccaggggggagcttggatggcatggacatgctgcacaactttctaaagcgggagccaaatcagaaagcattcctcatgagcagaggcctgcacgcaccctag

SEQ ID NO: 126264 - DNA, 1803 bp, synthetic construct
  misc_feature 1..1803: note = Description of Artificial Sequence: Synthetic coding sequence
  source 1..1803: mol_type = other DNA
atgctagacttcccccagcacgtatcaagtgataaagaagtgagagccgcttctactgaggccgataagcgactttcccgattcgatatagaaatgagtatgcgcggcgatatattcgagcgaatagtgcacctacaggaaacctgtgatcttgggaaaattaaacccgaagccaggcggtatctggaaaaatccatcaaaatggggaaacggaacggcctgcacctgcctgagcaagtgcagaacgagatcaaatccatgaaaaaaagaatgtcggagctgtgtatcgatttcaacaaaaatctgaacgaagacgacacttttctcgtgttcagcaaagccgagctcggcgccctgccggacgatttcattgacagcctagagaaaacggacgacgataagtataagatcacactcaaatatccccactacttccctgttatgaaaaagtgttgtatcccagagacccgcaggcgtatggaaatggcattcaatacgcgctgcaaagaagagaacacgattatcctacagcagcttcttccactgaggactaaagtggcaaaactgctgggatattcaacacacgctgacttcgtgcttgagatgaatacagctaagtccacctcaagggtgaccgctttcctggatgatctttcgcagaaactcaagcctctcggggaagccgagagagaattcattctgaatctcaaaaaaaaggagtgcaaagacagagggtttgagtatgacgggaaaattaatgcatgggacctgtactattacatgacacaaacagaggaacttaaatattcaattgatcaggagttcctaaaggagtatttcccaatcgaggtcgtgactgagggcctcctgaacacctatcaggaacttcttgggctgagttttgaacagatgaccgatgcccacgtgtggaacaaatccgttaccctgtacacggttaaggataaagccacaggcgaagtgctgggccagttctacctggatctctatccacgagagggcaagtacaatcatgccgcgtgctttggcctgcaacccggttgtctcctgcctgatggaagccgtatgatggccgtagcagcactggttgtgaacttttcccagcctgtagccggtagaccctctctccttaggcatgacgaagtcagaacgtattttcatgaattcggccacgttatgcaccaaatctgtgctcagacagattttgcccgcttttcaggcacgaacgttgagacggattttgtggaggtcccttcacagatgctggagaactgggtctgggatgtggatagtctgcgtagactgtcgaaacactacaaggatggctcaccaattgctgatgatctgttggagaagctggtagctagtcgcctcgtgaatacaggactactgactctgcggcagatagtcctctcaaaagtcgatcaatcattgcataccaatacctccttagacgcagccagtgaatacgctaaatactgtagtgagattctcggcgtggctgcgactcctggcactaatatgcccgctacgtttggccatctggccggcggttacgatggacaatattacggctacctgtggagcgaggtctttagtatggacatgttctactcatgtttcaaaaaggagggcatcatgaatcctgaggttggaatgaaatatcgtaacttaatattgaaaccaggaggatctcttgatggtatggatatgctccacaacttcctgaaacgagaacctaatcagaaagcttttctcatgtctagagggctccacgcgccctag

SEQ ID NO: 126265 - DNA, 366 bp, synthetic construct
  misc_feature 1..366: note = Description of Artificial Sequence: Synthetic coding sequence
  source 1..366: mol_type = other DNA
atggctcgtagagctggaggggcacgcatgttcgggtcactgcttctgtttgcactgctggccgctggagtggcccccctgtcttgggacctccctgaaccacgttcccgcgcctcaaagattagggtgcattcccgcgggaacctatgggccacggggcattttatgggaaaaaaaagtctagaaccatcttctccatcccctctcgggaccgcacctcatactagcctgcgggaccagcgcctgcagttgagccacgaccttctcgggattctgcttctcaagaaagctctgggcgtgagccttagcaggccagcgccacaaattcagtatcggcggcttttggtgcagatccttcaaaaatag

SEQ ID NO: 126266 - DNA, 465 bp, synthetic construct
  misc_feature 1..465: note = Description of Artificial Sequence: Synthetic coding sequence
  source 1..465: mol_type = other DNA
atggctcggcgagcaggaggggctagaatgtttggcagcttgctgctgttcgctctgttggccgcgggagtggcccctctctcctgggacctaccagaaccccggtcgagggcgagcaaaatcagagtccactcccgcggtaacctctgggctaccgggcacttcatggggaaaaaaagccttgagccaagctcgccatctcctctgggaacggctcctcatacttccctaagagaccaacgactccagctaagtcacgacctccttggcattctgctccttaagaaggccttgggtgtttcactgtcacgtcccgctccacaaatccaggaagcagctgggacaaacactgcggagatgacccctatcatgggccagacccagcagcggggcttggactgtgcccaccccggaaaagtgctgaacgggaccctgcttatggctccttccggatgtaaatcctag

SEQ ID NO: 126267 - DNA, 1173 bp, synthetic construct
  misc_feature 1..1173: note = Description of Artificial Sequence: Synthetic coding sequence
  source 1..1173: mol_type = other DNA
atgccgtcaaagtctctcagcaatctgtccgtaacaactggcgcaaatgagagcggctctgtccccgaaggttgggaacgcgatttccttcccgccagtgacggcaccactacagagctggtcatcaggtgtgttattccctcactctacctgttgatcataacagtggggctgctcggaaacatcatgctagtcaagatttttattactaattcagccatgaggtcggtgccaaacatctttatctccaacctcgctgcgggcgatctgctgctgctcctaacctgcgtgccagtagacgcctctcggtacttctttgatgaatggatgttcggaaaggttggatgcaaactgatcccagtcatacaactcacctctgtgggagtgagtgtattcaccctgaccgctctgagcgcagatcggtacagagcgatcgtgaatccaatggatatgcagaccagcggcgcactgctgagaacatgcgtaaaggccatgggcatctgggtcgtatccgttttgttggcagtgcctgaagctgtgttctccgaagtggcccggatttcttccctcgataacagctctttcaccgcgtgtataccttacccccagactgatgaactgcaccccaagatacactctgtgttaattttccttgtgtactttctgatccctctggccatcatctccatttattactatcacatcgctaaaacactcatcaagagcgcacacaacctccctggagagtataacgagcacactaagaaacagatggaaacaagaaagcgattagcaaaaattgtgctggtgtttgtggggtgcttcattttttgttggttccccaatcacatcctgtatatgtatcgctcattcaattacaacgaaatcgacccttcactgggccatatgattgttaccttagtggcacgggtactcagctttggaaatagttgcgtaaatcctttcgccttgtaccttctctcagaaagctttaggcgccatttcaattctcagctgtgctgcggccgcaaatcgtatcaggaacgcggaacttcttacctcctgagctccagtgctgtgagaatgacttcactgaaatctaatgccaagaatatggtgactaatagcgtgctgctcaatgggcactcaatgaaacaggaaatggccctatag

SEQ ID NO: 126268 - DNA, 1281 bp, synthetic construct
  misc_feature 1..1281: note = Description of Artificial Sequence: Synthetic coding sequence
  source 1..1281: mol_type = other DNA
atgactcccctgtgcttaaactgcagtgtcctgccgggggacttgtatcctggaggagctcgcaaccctatggcctgcaatggctctgctgccaggggtcacttcgaccctgaggacttgaacttaacggacgaggccctccgtctcaagtatctgggtccccaacagactgagctcttcatgccaatctgcgctacctatctgctgatcttcgtcgttggcgcggtgggtaacgggctgacctgcctcgtgatcctgcggcataaagccatgagaactcccacaaattactacttgttcagcctcgcggtgagtgacctcttagtcctccttgttggattgccactagagctgtacgaaatgtggcataattatcccttcttgctgggcgtgggcggatgttattttcgtacgctgctattcgaaatggtctgtctcgcctcagtattgaacgtgacagctctcagcgtggagagatatgtggcggtggttcatcctctccaggccagatcgatggtaacacgggcccatgtgcgtagagtgttgggagccgtttggggacttgccatgctgtgcagcctgcctaatacctctctacatggaattcggcaactgcatgttccttgtagaggccctgtacccgattccgctgtgtgcatgttagttagaccccgcgcactctacaatatggtagtccaaacgacggcgctgctgttcttctgtctaccaatggcaattatgagcgttctgtatttactcataggactccggctgagacgggagaggctcctactcatgcaggaagctaaaggtcgaggttcggcagccgcacgcagtaggtacacctgccgcctccagcagcacgatagaggaaggcggcaggtgactaagatgttattcgtgttggtggtggtgttcggtatctgctgggccccgtttcacgccgatagggtcatgtggtccgtggtatcacaatggaccgacggactgcatttagcctttcagcacgtccatgtgatcagcggcatattcttctacctaggaagcgcagcgaatcctgtgctctacagtctaatgagctctcgctttagagagaccttccaggaggcactctgcctcggggcttgctgccaccgattgaggcccagacacagcagccatagtctttctaggatgactaccggatcaacgctttgcgacgtggggtccctcgggtcctgggtccaccccctggccggtaatgacggccctgaggcacagcaggaaaccgacccctcctag

SEQ ID NO: 126269 - DNA, 1248 bp, synthetic construct
  misc_feature 1..1248: note = Description of Artificial Sequence: Synthetic coding sequence
  source 1..1248: mol_type = other DNA
atgtctggtatggagaagttgcagaacgcttcttggatctaccagcaaaagctcgaagaccctttccagaaacacctgaacagtaccgaagagtatctagcattcctctgcggtccgagacggtcccacttctttctgccagtcagcgtagtctatgtgcccattttcgttgtaggggttattgggaatgttttggtctgtttagtcatcctccagcaccaagccatgaaaacccctactaattactacctgttcagcctggctgtaagcgatcttctagtgctgcttctcggcatgcctcttgaggtgtacgaaatgtggagaaattatcctttcctgtttggccctgtgggatgttatttcaagactgccctgttcgagacagtatgttttgcaagtatcctttcaattaccactgtgtccgttgaaagatatgtagcgatactccacccattcagagccaagctgcagagcacccggcggcgcgcactaaggatcttgggtatcgtgtggggatttagtgttcttttttccctcccaaacacatcaatccacggcatcaagttccactattttcccaacggttccctcgtgcccggctcagccacgtgcactgtgataaagcccatgtggatatacaacttcataatccaggtgacctcttttttattctacctgcttcccatgacggttatatccgtcctctattatcttatggcgctcaggctcaagaaggacaagtctctggaagccgatgagggcaacgcaaatattcagcgtccatgccgcaagagcgtcaacaagatgctgtttgtgctcgttctggtgttcgcgatctgttgggcccctttccatatagaccgtctcttcttcagcttcgtagaagagtggagcgaatcactggccgctgtcttcaacctggtgcacgtcgtctccggagtcttcttttatctatctagcgccgttaaccccatcatctacaacctgctgtctcggcggtttcaggctgcctttcagaacgtgatctccagttttcacaaacaatggcacagccagcacgacccacagctgccccctgcacagcggaatatctttctcacagaatgtcatttcgtggaactgaccgaagacatcggacctcagtttccgtgtcaatcttctatgcacaactcgcatttgccagccgctctctccagtgaacagatgtctcgtacaaactatcagagttttcactttaataaaacttag

SEQ ID NO: 126270 - DNA, 5625 bp, synthetic construct
  misc_feature 1..5625: note = Description of Artificial Sequence: Synthetic coding sequence
  source 1..5625: mol_type = other DNA
atgcttgggtctagcgtaaagtccgtgcagcctgaggtagagctgagtagcggtggcggagacgagggcgcagacgagcctcgcggtgccggcagaaaggccgcagctgccgacggccgtggcatgctccccaagagagcgaaagcccccggcgggggcggcgggatggcaaaggcttctgctgccgagctaaaagtttttaagagcgggtccgtcgattctcgcgtcccaggcggtccacccgcgagcaacttgcggaaacagaagagtctgaccaacctgagtttcctcaccgactccgaaaagaaacttcagctgtacgaaccggagtggtcagacgacatggcaaaggctccgaaaggcctgggtaaagttggctccaaagggcgcgaagcccctctgatgagtaaaactttatctaagtcggaacattctctttttcaggccaaaggcagtccagccggcggagccaaaactcctctggcccccttggcgccgaaccttggaaaaccttccagaataccgaggggcccctacgcagaggtcaagcccctctcaaaggccccagaggctgccgtgagcgaagacggtaagagtgatgatgagctgctatcatctaaagcaaaggcccagaagagtagcggccccgtgccatccgccaaggggcaagaagaacgcgcctttttgaaggtggatcccgaactcgtggttactgtgctaggtgacctggaacagttactgttctctcaaatgttggatcctgaatctcagagaaagcgcacggttcagaacgtgctcgacctacggcagaatttagaggaaaccatgagttccctcagaggctctcaggtcacccacagttctctcgagatgacctgctacgactcagatgacgccaatccaagaagcgtttcatccttgagcaatcgctcctctcctctgtcctggcgctacgggcagtccagtcctaggcttcaggcaggcgatgctccatccgtcgggggttcctgcaggagcgaagggactccagcctggtatatgcatggggagcgcgcccactacagccatacaatgcccatgcggtccccgtctaaactctcacacatctcaagattagaactcgtggagagcctggacagtgacgaagtggatttgaagtctggctacatgagcgacagcgacttaatggggaaaacaatgacagaagacgatgatattaccacaggctgggatgaatcttcgtcaatttcctcgggattatctgacgcaagcgataacctttcaagcgaggagttcaacgcctcgtcctcgctcaactctctgccgagtacccccaccgctagcaggcgtaactcaaccattgtcctaagaactgatagtgaaaagaggtcactggccgagagcggtctgtcttggttttccgaaagcgaggagaaggccccaaagaagttggaatacgactctggatctctgaagatggaacccgggacatctaaatggcggagagaaaggccagagagctgcgacgacagttctaaaggcggggaattaaagaagcctatctctttgggccaccccggtagcttaaaaaaaggcaagactccacccgtagccgtcacctctcctatcacccacacggcccagagtgcgctgaaagtcgccggcaaacccgaaggaaaggcaactgataagggcaagctcgctgtgaaaaacacaggactgcagcggtcttcctcagacgctggacgggaccgtctatcagacgcaaagaagcctccatctggcattgcacggccctctacgagtgggagttttggctataaaaagccacctccagccacaggcacagccactgtcatgcaaaccggcggttctgcaacgttatcgaagattcaaaaaagttctggtattcctgtgaagcccgttaacggaaggaagacgtcacttgatgtcagtaactccgctgagccaggattcttggcacccggcgcacggtcgaacatccagtaccgctcgctgcccagaccagcaaaaagctccagcatgagtgtgacaggagggcgcgggggccctcgccccgtatcctcaagcattgatccatctctcctgagtaccaaacagggaggactgacccccagtcgcttaaaggaacccactaaggtcgcatcaggtcgaacaaccccagcccccgtgaaccagacggatcgcgagaaggaaaaggcgaaggccaaagccgtggccctggactctgacaatattagcctcaaatctatcgggagcccagagtcaacgcccaagaaccaagcttcacatcccacggcgacaaaactggcagaactgcctcctacccctctgcgggcgacggctaaatcgtttgtaaaaccgcctagcctggctaacctcgataaagtgaattccaacagcctcgatctgccctcgagttccgacactacccacgcctccaaagtgcccgatctccatgcgacgtcttctgctagtggtgggccactgccgtcctgtttcaccccttctccagctcctattttaaatattaacagcgcatcattttctcagggacttgaactaatgtcaggcttctctgtccctaaggagacacggatgtatcccaagctgtctggcttacatagaagcatggagtcactgcagatgccaatgtccctgcccagtgcattccccagttcaacgcccgtaccaacccctcccgctcctcctgccgctcccacagaagaggagactgaggagctgacatggagtggttccccgcgggcgggccaacttgattccaatcagagagacaggaatacattgccaaagaagggcctgaggtaccaactccagtcacaagaagaaaccaaggagcgtcggcatagtcatacaataggaggactgcctgagagcgacgatcagtccgagctcccatcccccccggcgctcccaatgtccctgtctgctaagggtcagctgaccaacattgtttcccccaccgccgccacgacgccccgcattactcggtcgaattctatccccacccatgaagccgctttcgagttgtacagtggctctcagatggggagcacactgtcccttgcagagcggccaaaggggatgattcggagcggcagctttcgcgatccaaccgatgatgtgcatggatcggtactgtcgcttgcctcctctgcttcctcaacctacagctccgccgaggagagaatgcagtctgagcagattagaaaactccggcgtgaactggagtcatcccaagagaaggttgcaactttaacttcccagctgtccgcaaatgccaatttggttgctgccttcgaacagtcactagtaaacatgacatccaggctgagacatctagctgagacggcagaggagaaagacaccgaattgctggatctgcgggaaacaattgattttcttaaaaaaaagaacagcgaggcccaagccgtgattcagggggccctaaatgcctccgaaacaactccaaaggagttaagaattaagagacaaaattcatccgatagcatcagctccctgaactcgattacttcccacagtagcatcgggtcgtcaaaagatgctgatgccaagaaaaaaaagaagaagtcttggctgcgctcatctttcaataaagcatttagtattaagaagggcccgaagtctgccagttcttacagcgatatcgaagaaattgccactcctgattcaagcgctcctagctcacctaagctccagcatggaagcaccgagactgcgtcaccctccattaaatccagcacgagctctagtgtcggcacagatgtcactgaagggcctgcccacccagcaccgcacacgcgactgttccacgccaatgaagaggaggaacctgagaagaaagaggtcagcgagctgagatccgagctgtgggaaaaagagatgaagctgaccgacattaggctcgaggctttgaatagcgcacaccagcttgaccaactgagggagaccatgcacaatatgcagctggaagtcgacctgcttaaagcagagaatgacagactgaaagtcgccccgggcccatcttcagggtctactccagggcaggtgccaggctcatctgctcttagctctcctcggagatcacttggcctggcactaacacacagtttcggaccaagccttgccgacacggacctttctcccatggatggcatcagcacgtgcggtcctaaggaggaagttaccctgcgcgtggtggttcgtatgccacctcagcacatcattaaaggagacttgaagcagcaggagttcttcctgggctgtagtaaggtctccggcaaggtcgattggaaaatgctggatgaggctgtgtttcaggtctttaaggactacataagtaagatggatcctgcttccaccctcggcctctccactgagagcatccatggctattcaataagtcatgttaaacgggttctggatgcggaacctcctgagatgcccccgtgccggcggggtgtgaataatatctcagtgagtctcaagggcttgaaagagaagtgtgtggattccctggtgtttgagaccctgattcctaagccgatgatgcagcactatatcagcctacttctcaagcatcgacggctagtgctgtccgggccttctggcaccggaaagacgtacctgaccaaccggttggcagagtacctggtggagcgctctggacgcgaagtgactgaaggaatcgtgagtacctttaatatgcatcagcagtcatgtaaggacctgcagctatatctgtccaatctcgccaatcagatcgatagggaaactggaatcggtgatgtacccctcgtgatcttactggacgatttgtccgaggccggcagtattagtgaattagtgaacggtgcactgacatgcaagtaccacaagtgcccatatattattggcactactaatcagccggtgaaaatgacgccgaatcatggccttcatctgagtttcaggatgttgacctttagcaacaacgtggaacccgccaacggttttctggtgcgctatctcagaaggaaactggtggagtccgactccgatattaacgccaataaagaggagttgctaagggtgcttgactgggtgcctaagctttggtaccacttgcatacattcctcgagaaacatagtacgtctgacttcctaataggaccttgctttttcctaagctgccctattggaatagaagactttcggacttggttcatcgacctctggaataattctattatcccctatctacaagagggcgccaaggatggaattaaagtgcatggccagaaggccgcatgggaggatcccgtcgagtgggttcgcgatacactaccatggccctctgcccagcaggaccaaagcaagctctatcacctgcctccaccaacagtgggccctcattcgattgctagccctcctgaggaccggaccgttaaggatagcacgcccagtagcttggatagcgacccactgatggctatgctcctcaaactgcaggaggcagccaattacatagaatcgccggaccgcgaaaccattcttgaccccaatctccaagctacactgtag

SEQ ID NO: 126271 - DNA, 5634 bp, synthetic construct
  misc_feature 1..5634: note = Description of Artificial Sequence: Synthetic coding sequence
  source 1..5634: mol_type = other DNA
atgctgggttcttctgtcaaatccgtacagcccgaggtggagcttagtagcggaggaggtgacgaaggcgcggacgaacctagaggggcaggccgcaaagccgcagccgctgatggcagggggatgttgcccaagcgtgctaaggctcctgggggtggtggcggcatggctaaggcctccgctgccgagctgaaggtatttaagtctgggtccgttgattcacgcgtgcccggcggtccccccgcatcaaacctgcgaaaacagaagagccttacgaacctgtctttcttaactgacagcgagaaaaagttacaactgtacgagccggagtggagtgacgacatggcaaaggctcctaaagggcttgggaaggtagggagcaaaggaagggaggctccactcatgtccaaaactctctcaaagtccgagcacagcttgttccaggccaaagggagccctgcgggaggcgccaaaactcccctggcaccactggccccgaacctggggaagcctagtcggatcccaagaggcccttatgcagaagttaagccgctgagcaaggcccccgaagccgctgtgtccgaggacgggaagagcgatgatgagctgctctcttccaaggcaaaggcccagaagtcctccggtcctgtgccgtctgcgaagggacaggaggagcgtgcgttcctgaaagtggatcccgagcttgtggtgaccgtactgggggatcttgagcagttactgttcagccagatgcttgatcccgaatcacagaggaaaagaactgtgcaaaatgtattggatctgcggcagaacctggaggagacaatgagttccctcaggggatctcaggtgacacactcctcactcgagatgacttgttatgatagtgacgacgcaaacccgcggtcagtctcaagtttgtcaaatcggtctagtcccctatcatggcggtatggccagtcttctccccgattgcaagcaggggacgctccctctgtcggggggagttgtagatcagaaggaacccccgcttggtatatgcacggggagagggcacactatagtcacactatgccgatgaggagtccctccaaactgagccacatcagtcggctcgaactggtggaaagccttgattctgacgaggttgatttgaagtccggctacatgtcagacagtgatttaatggggaagactatgactgaagacgacgacattactactggctgggacgaatcttccagcatcagctccggcttgagcgatgcctctgataaccttagcagtgaggaatttaatgcatcttcctcactgaattcgttacccagtacacctaccgcaagtcgccggaatagtaccatagtcttgcggacggacagcgagaaacgtagcttggcggaaagcggacttagctggttctcagaaagcgaggaaaaggcacctaagaagctggaatatgacagtgggagcctgaagatggaacctggaacgagcaaatggagaagggagcgacctgaatcctgcgacgactcatctaagggcggcgagctcaaaaaaccaatctcattgggtcaccccggcagtcttaagaaggggaaaacgcctcccgtcgctgtgacgtcccctattacacacactgcccagagtgcactcaaggttgccggcaaaccggaaggaaaggccaccgacaaagggaagctcgcagttaagaacactggcctccagcggagcagctctgacgccggccgggatcgcctcagtgatgctaagaagccgccatccggcatcgctagaccatccacttctggttccttcgggtacaagaagcctccaccagctacggggacagctactgtcatgcagactggggggagtgccaccctgagtaaaatccaaaaatcgtccggcatcccggtcaagcctgtcaatggtcgaaaaacctccctggatgtctccaattccgctgagccgggctttttggcccccggcgcccgctcaaacattcagtaccgttccctaccgcggcctgcaaaatccagctctatgtcggtgacgggaggcaggggcggccctcgaccagtttctagctcaatcgaccccagcctactctctaccaaacagggcggcttgacaccaagccgcctgaaggagcctactaaggtcgcttcgggtaggactactcccgcccccgttaaccagacagaccgagaaaaggagaaagccaaggctaaagcagttgccctggattccgacaatatctcactcaagtcgattggttcgcccgaatccacgcctaagaaccaagcctcacacccaaccgcgacgaagctggcggagctgccacccaccccactgcgagcaaccgctaagtcgttcgtaaagcctccatccttggccaacctagacaaggttaattctaattcacttgacctccccagctcatctgacaccacccacgctagcaaggtaccagatctgcatgccacatcttctgcctccgggggccccctcccttcatgctttactcctagtccagccccaatcctcaatatcaactcagcttcattttcccagggactcgagttaatgtccggcttctctgtacccaaagaaacacgcatgtacccaaaactatccggcttgcacagatccatggaatctttgcaaatgccaatgtccctgccttccgccttcccaagctctaccccagtgccaacgccaccagcccctccagcagccccgacagaagaggagacagaagaactgacttggagcggctccccccgggcaggccagctggatagcaaccagcgggatcggaatacactgcctaagaaggggctgcgctatcaactgcaatcccaggaggagacaaaggagcgaagacacagtcacacaatcggcggccttccagagtcagacgaccagagcgagctgccaagccccccggctctgccaatgtctctcagcgctaaaggccaactgactaacattgttagtcctacggctgcaaccacaccccgaatcacccggagcaattctatccctacccatgaggcagccttcgagttatattcaggctcacagatgggttccaccctgtccctggctgaacggcccaaagggatgatccgctccggatcattcagagacccaacggacgacgtgcacgggagcgtgctttcccttgccagctcggcctcaagcacgtattcgtctgcagaagagagaatgcagtctgagcagatccgtaagcttcggagggaattagaatcgagccaggaaaaggtggccaccctgaccagtcagttgtccgctaatgccaatctggtcgctgcttttgagcaatcactcgtgaacatgacttcccgcctgcgacatttggccgaaacagccgaggagaaagatacggaactgctcgatctgagggagacaattgactttctgaagaaaaagaattcagaggcccaggccgtgatccagggggccttgaacgccagcgagaccacccctaaggaattgagaattaaacgacagaactcatcagactctatcagcagcctgaactccatcacttcccacagttccatcggatcgagcaaagacgccgatgcgaagaaaaagaaaaaaaaatcttgggtctatgaattgcggagctcttttaacaaggctttttctattaagaaggggcccaagtctgccagttcttacagcgacatcgaagagatcgcgactcccgatagctccgccccgtcgtccccaaagctccagcatggctccacagaaactgcaagcccctctatcaaaagcagtacatctagttcagttggcacagacgtcaccgaaggacctgcccatcctgcgccccacactagattgtttcacgccaatgaggaggaagaaccagagaaaaaagaagtgagtgaattgcggagtgagctttgggagaaagagatgaagcttactgacattagacttgaggcactaaactcggcccaccagctggaccaactgagagagacgatgcataatatgcagctcgaggtggacttactcaaagccgagaatgataggctgaaggtggcgccaggaccctcctcaggctccacgccagggcaggtgccggggtcctctgctcttagcagccctagacgttctctcggactggcactgacccacagcttcgggccaagccttgccgacaccgacctgagtcccatggacggcattagcacatgtgggcccaaagaggaagtgaccctacgggtcgtggttagaatgcccccacagcatattattaagggtgacctcaagcagcaggagtttttcctcggctgcagcaaggtgtccgggaaggtcgattggaaaatgctcgacgaagccgtgtttcaagtttttaaagactatatttcaaagatggaccctgcctcaactctggggcttagcacggagagcatccatggatacagcatttctcatgtgaagagagtgctggacgcagaacctccagaaatgccaccatgcaggcggggcgtgaacaatatctctgtatctttaaaaggcctgaaagagaagtgcgttgatagtctggtgtttgagactctgatcccaaagcctatgatgcagcattacatctccctgctgcttaaacatcgcagattggtgctgtcgggcccaagtggaaccgggaaaacctatctgaccaataggttggccgagtatcttgtcgaacgctcaggccgggaggtgactgagggcatcgtgtctacattcaacatgcaccagcagtcttgcaaggatctgcagctgtacttgagcaacctcgctaaccagatcgaccgggagactggcatcggagacgtgcctctggtgatcctgctggatgacttatcagaagctggctctatctccgagctggtcaatggcgccctcacttgcaagtaccacaagtgtccctacatcattgggaccaccaatcagcctgtgaaaatgacccccaaccacggactgcatttgagcttcaggatgctgactttttccaataatgtagagccagctaacggcttcctcgtccgctacttgcggagaaagcttgtggaatcagatagcgatataaatgctaataaggaggaactgctccgagtcttagactgggtcccgaaactgtggtaccatctgcatacattccttgaaaagcacagtaccagcgattttctcataggaccgtgtttttttctctcctgcccgatcggcattgaagatttcaggacatggttcattgatctgtggaataattctatcattccctacctgcaagaaggtgccaaggacggaatcaaagtccacggtcaaaaggccgcctgggaggaccccgtcgaatgggttcgagatacattaccttggccctccgcccagcaggatcaaagcaaactgtatcatctcccgccgcctacggtgggtccacatagcatcgcctccccaccggaggacaggactgtaaaagattcaacgccctcgtctctggacagtgatcccctgatggcgatgctcctcaaactccaggaagcagcaaactatatcgaatcaccagatcgtgaaactatcctggatccgaacctgcaggctacactgtag

SEQ ID NO: 126272 - DNA, 5610 bp, synthetic construct
  misc_feature 1..5610: note = Description of Artificial Sequence: Synthetic coding sequence
  source 1..5610: mol_type = other DNA
atgttgggctctagcgttaaatccgtccaacccgaggtggagctctcctctgggggtggggatgagggcgccgacgagccaaggggtgccggacgcaaagcagcagccgctgatggccgaggcatgcttccgaaaagggcgaaggcacctggtggcgggggtggaatggcaaaggcatcagccgccgaacttaaagtgtttaagagtggctccgttgactctcgggtacccggagggccgcctgccagtaatcttcgaaagcaaaagtccctcactaatctctcctttctgacagacagtgaaaagaaattgcagttgtatgagcccgagtggagcgatgatatggctaaggctcccaaaggccttggcaaggtagggtcaaagggtagagaagcacccctcatgtctaaaactctctccaaatctgagcatagtctttttcaggccaaggggagtccggccggcggagctaaaacacctctggcccctctcgccccaaacctgggaaaaccgagtcgcataccaaggggaccatacgcagaggtgaagccgttatccaaggcacctgaagccgcagtgtccgaagacggaaagagtgacgatgagttgctgtcttcaaaggccaaggcccagaaatcatccggccctgtgccttctgccaaggggcaggaggaacgcgctttcctgaaggtcgatcccgagctggtcgtcacagtactgggcgatttggaacaactgctgttctcacagatgttagatccggagagccagcgcaaacgcactgttcaaaatgtacttgatctgcgccagaatctggaggaaactatgagttccctcagaggaagccaggttacacattcctcactggagatgacatgttatgattccgacgatgcaaatccccgctccgtctctagcctttctaataggagttcaccattgtcatggcgatatggccagagttcccctaggcttcaggcaggtgatgcacctagtgtgggtgggtcttgtagaagcgaagggacccccgcatggtatatgcatggagagagggcacactattcccacacgatgcccatgcgttcccctagtaagctatcccacatttctagactggagttagtggaaagcctggactccgacgaggttgacctgaagagcggatatatgtcagactctgatctaatgggcaaaactatgaccgaggatgatgacatcaccacagggtgggacgaatcgtcaagcatttcttctggcctgagcgacgcttccgacaaccttagctccgaagagtttaacgcctcctcctccctcaattctctgccatcaacgcccacagcctcacggagaaactcgaccatcgttctccggaccgatagtgaaaaacgcagcctggctgaaagcggtcttagttggttctccgaatcagaagagaaagcacctaaaaagctcgagtacgacagcggttcgctgaaaatggagccagggacttcgaaatggcgccgtgagcgcccggagtcgtgcgatgatagctctaaagggggcgagttaaagaaaccaatcagtcttgggcatcccggcagcttaaaaaaaggcaaaacacctcccgtcgcggtgacctcccctataactcacactgcccagtctgccttgaaagtcgcaggcaaacccgagggaaaagcgaccgacaagggcaaactggctgtgaagaataccggtttgcagcgttcttcttcggatgctggaagggatcgtttgagcgacgccaaaaagcctccctctggcattgccagaccttcaacctctgggagcttcggctataagaaaccgccaccagctactggcacggcgacagttatgcagaccgggggatctgccaccctcagcaaaattcagaagagcagcgggattcctgtcaaaccagtgaacggtagaaagaccagcctggatgtgtcaaattctgcagagcccggctttttggctcctggtgcaaggtctaatattcaataccgtagcctgcccaggcccgcaaaaagctctagtatgtcagtgaccggcggccggggcggacctagacctgtgtcctcatctatagacccttctctgctgtccacaaaacagggagggctgaccccttcacggctgaaagagccaacaaaggtggccagcggacggaccacaccggctcccgtgaaccagacggatcgagagaaggagaaggctaaagctaaggctgtggcccttgacagtgataacatcagcctcaagagcatcggttcacctgagtccactcctaagaatcaggccagtcaccccaccgcaaccaaactcgcagagctgcctccaacccctcttagagctacagctaaatcgtttgtgaaaccccctagcctggcaaatttagacaaggttaattctaattcccttgaccttccctcatcttcggatactacccacgcttctaaggtcccagaccttcatgccacatcctcagcctcagggggccctcttccctcttgctttacaccttccccagccccaatcctgaatattaattctgcgagcttctctcaaggactcgagttgatgagcggtttcagcgtgcctaaagaaacaagaatgtatcccaagttaagtggcctccacagatccatggaatctctccagatgccgatgtcactgccatctgcgtttcccagcagcacccccgtgcctaccccgccagcgcctcccgcagcacccacggaggaggagacagaggaattgacatggtcaggttcaccaagggccggtcagctggactccaaccagagagatagaaacaccctgcccaaaaaaggcctgagatatcaactacaatcccaggaggagaccaaagagcgccgccatagccatactatcggaggactgccggaaagcgacgaccagagtgagctgccttccccgcctgctctaccaatgtcactctctgctaaaggtcaattaactaacatagtgtcccctacggccgccactaccccgagaatcacaagatcgaactcaattcctacacacgaagctgcatttgagctttatagcggatcccagatgggcagtacccttagcctcgcagagcgccccaaaggcatgattcgatccggatcatttcgagaccccactgacgacgtccatggcagtgtgctgtccctcgcctcttcggcttccagtacgtattcgtctcaaattcgcaaacttaggcgtgaactcgaatcatctcaggaaaaggtggcgacgctgacttcccagttatctgcaaatgccaacttagtggccgcctttgaacagtcactggtgaatatgaccagcagactccggcaccttgccgagactgccgaagagaaagacactgagctgctggacctccgtgaaacaatagatttcttgaagaagaagaattcagaggcccaagccgtgatacaaggggccctgaatgcgtccgagactacaccaaaagaactcagaataaagcgccagaattcttccgatagtatttctagcttaaattcaatcacttcccattccagtattggcagctctaaggatgcagatgctaaaaagaagaagaaaaaaagctgggtttatgagctccggtcctcatttaacaaggcgttcagtatcaagaagggaccgaaaagtgcttcctcctactctgacatcgaggaaatcgccacccccgactcttctgcgccttcatctcctaagttgcaacacggatctacagagactgcttccccttcaatcaaaagtagtaccagctccagcgtaggaactgacgtcacggaaggcccagcgcatcctgctccgcacacaaggctgttccacgccaacgaagaggaggagcccgaaaaaaaagaggtcagtgaactgcgcagtgagctgtgggagaaagagatgaaactaactgacatccggctagaggcacttaactccgcgcatcagctggaccaacttagggaaacaatgcacaatatgcagctagaggtagatctcttgaaggccgagaatgaccggctcaaggtggctcccggacctagctccggatcaacaccaggacaggtccctggctcgtctgcactatccagtcctagacggagcttaggccttgcccttactcacagttttgggccctccctcgccgacactgacctcagccctatggacggcatcagcacttgcgggcccaaggaagaggtgactctccgggtggttgtgagaatgcccccccaacacattatcaagggagatctgaagcaacaggaattcttcttggggtgctccaaagtctcaggcaaggtggactggaagatgttagatgaggccgtcttccaggtatttaaagattatatttctaagatggatccagcatcaaccctgggtctatcaacagaatccatccacggttatagtatctcccatgtgaagcgcgtgctggatgccgaaccccctgaaatgcccccatgccgcaggggggtgaataatatctctgtgtccctcaaaggcttaaaggagaagtgtgttgactctctcgtttttgagactctgatacccaagcctatgatgcagcactacatctccctattactcaaacaccggcgactcgtattaagtgggccaagcggcacgggtaagacatacctaacgaatcgtctggcagagtacctcgttgagcgaagcggacgcgaggtcactgagggcattgtgtcaacgtttaatatgcaccagcagagttgtaaagatctacagctgtacctgtccaaccttgctaatcagattgaccgggaaacaggcattggcgacgtgccactagtgatattactagacgatttgtcagaggcggggagtatctctgagttagtcaatggggctctgacttgtaagtatcacaaatgtccctatattatcgggactacgaaccagccagtcaagatgacacctaaccacggactccacctatccttcagaatgctgacattctctaacaacgttgaaccagcaaatgggtttctggtccgatacctgaggagaaaactggttgagagtgactccgatattaatgcaaacaaagaggagctcctcagagtgctcgattgggtaccgaagctgtggtaccacctccacacgtttctcgagaaacactcaacctcagatttcctgatcggcccttgtttttttttaagttgccctatcggtattgaggatttccgtacctggttcatcgacctctggaataatagcattattccctatctacaggagggcgccaaagacggcattaaggtccatggccaaaaagcggcatgggaggaccccgtggagtgggtacgggatactttgccctggcctagcgctcagcaggatcagtcgaagctttaccatctcccacctccaaccgtggggccccattcgatcgcatctcccccagaggatcgtacggtgaaagattccacaccttcctcactcgattctgaccccttgatggccatgttgctcaagctgcaggaggcggcaaactacatcgagtccccggatcgggaaaccatcctagaccctaacttacaggccaccctctag

SEQ ID NO: 126273 - DNA, 5454 bp, synthetic construct
  misc_feature 1..5454: note = Description of Artificial Sequence: Synthetic coding sequence
  source 1..5454: mol_type = other DNA
atgttgggatctagtgtcaaaagtgtccagcctgaggtggaactgtcttcagggggcggtgatgagggagcggacgagcctcggggagctggcaggaaagccgctgcggcagatggtcgtggtatgcttccaaagagggccaaggcacccgggggagggggaggtatggcgaaagcgtctgctgcagagttgaaggtgtttaagagcggcagcgtggacagcagggtgcctgggggtccaccagcaagtaatctgagaaagcagaaatccctgacaaatctaagttttctcacagacagtgaaaagaaattacagctatatgaacccgagtggagcgatgacatggccaaagctccaaagggacttggcaaagttggctcaaagggccgggaagcccctcttatgagcaagactcttagtaagtccgagcatagcctgttccaggccaagggatcccccgctggaggcgccaaaacccctctcgcccccctggcacccaacctgggtaagccttcccggataccgcggggaccttacgcggaggttaaacctttatcaaaggcgcctgaagccgctgtaagtgaggatggtaaatctgacgacgaattactcagctccaaagcaaaggcccagaagagttctggaccagtgccttccgcgaagggccaggaggagagggcattcctcaaagtagaccccgagctggtggtcaccgtgctgggtgatctcgagcagttgttgttttctcagatgttggacccagagtcccagcggaaaagaactgtgcagaatgttctcgatctgagacagaacctcgaggagacaatgtcatccttgagagggtcccaggtaactcattccagcttggagatgacatgctacgactctgatgacgcaaatccgaggagcgtgtcgagcctgtccaaccggtcttcaccactctcttggcgctacggacagtcaagtcccaggctccaggctggggatgctccatctgtcggcggaagttgccgttccgaagggactcccgcgtggtatatgcatggcgaacgtgcgcattactcccataccatgcccatgcgaagcccatctaagctttcgcacataagccggctagagctggtggagtctctggattcagacgaagtagatctgaaatccgggtacatgagtgattccgatcttatgggcaagaccatgaccgaagacgatgatattacaaccggttgggacgagagtagctctatttctagcggactgagcgacgcatcagataaccttagcagtgaagagttcaacgcctcctcatctctaaacagtcttcctagcacacctaccgcctctagaagaaattccaccatcgtcctgcggactgactccgaaaagcgctccctggccgagtcaggcctgtcgtggttttccgagagcgaggagaaagctccaaaaaaactggagtacgacagtggcagccttaagatggaacctggaacgagcaagtggagaagagaacgccctgaatcctgtgatgactcctcaaagggcggggaattaaagaagccaatatctctgggacatccaggcagcttgaagaagggcaagaccccacccgtggccgttacatccccaattacacataccgcccagtccgctctcaaggtagccggaaagcctgaggggaaggccaccgataagggcaagctcgcagttaaaaacaccggcctccagcgcagttcttcagatgctggccgagatcgactcagtgatgcgaagaaacccccctcagggatcgcccgaccaagtacatctggatcattcggctataagaagccgcctccagcaactggaaccgctaccgtcatgcaaaccggtggatccgcgactttgtccaagatccagaaatcttccggcatccctgtcaaaccggtcaacggccggaagacttcattagacgtgtctaattcggccgagccgggattcctcgccccaggcgcacggtccaacatccagtataggtctctgccgagacctgccaagagctcctcgatgagtgtcacaggcggacggggtggacctcgacccgtctcgtcttccatagaccctagtctgctctctaccaagcaggggggactgaccccaagtcgtctaaaggagcccacaaaggtggcctctggccggactacccctgcccctgtcaaccaaactgaccgcgagaaggaaaaagcgaaagctaaagcagtcgcgctggactcggataacatctccttaaaaagtatcggatctcccgaatccaccccgaaaaatcaggcaagtcacccaacagctaccaagctcgccgagctccccccaactccgctgagggctaccgcaaagtcatttgtgaagccaccaagtctcgccaacctggacaaggtgaattctaacagtctagatttgccctcctcttcagatacaacccacgctagcaaagtgcccgacctccatgcaacttcaagcgccagcggggggccactacctagctgctttacaccaagcccagcacccatcctcaatattaacagcgcctcattttcgcagggattggaattaatgtccggattcagcgtcccaaaggagactcgcatgtaccctaaactctcgggcctgcataggtcaatggaaagtctgcagatgccaatgtctttgccttctgcattcccctcgtctacccccgtgcctactccgcccgcccctccagctgccccaacggaggaggagacagaggaactgacctggagtggatctccccgggcgggccaactggactcaaaccagagggatagaaacacgctgccaaaaaagggcctccgatatcagctgcagtctcaggaggagaccaaggaaagaaggcatagtcacacaatcggtggtttaccagagtcagacgaccagagtgagctcccaagtcctccagccttaccaatgagcctcagcgcgaagggacagctgaccaatattgtccatggtagcgtcctctcgttagcctctagcgcatcaagcacttattcctcagcagaggaacgcatgcagtccgagcagattcgaaaactgcggcgggagctggagagcagtcaggagaaggtggctaccctgacatcccagctcagcgccaacgccaacttagtggcagcttttgagcaaagccttgtcaatatgactagtcgtctccggcatctagctgagacagcggaagaaaaggacaccgaattgctggatctcagagagacgatcgatttcctgaagaaaaaaaactccgaagcccaggccgtgatccagggggctctcaatgcttccgagactacccctaaagaactgaggatcaagcgccagaattccagcgattcaatttccagtctgaatagcataacgtctcattcctctattgggtcttccaaagacgcagacgcgaagaaaaagaagaaaaagtcttggctgagatcctccttcaacaaggcatttagcattaagaagggccccaagagtgcttcaagctattccgacatcgaggaaattgcaacccccgactcgtctgctccatcaagccccaagctgcagcacggcagtactgagactgccagtccctctatcaaatcgagcacatcttcctccgttgggacagatgtcactgagggccccgcgcaccctgccccgcacacacgcctattccatgccaacgaagaggaggaaccagagaagaaggaggtgagtgagctgcgctctgaactgtgggaaaaagagatgaaactcaccgatatccgtttggaggctctaaacagcgcccatcaacttgatcaattgagagagacaatgcataatatgcagttggaggttgaccttctcaaggccgagaatgaccgcctgaaagtggctccggggccttcttctggcagcactcccgggcaggtacctgggtcatccgccctgtccagccctcgacgctcactgggactggccctgacacactcctttggtccctcgctggccgacactgatttgtctcccatggatggaatctcgacctgtggccctaaggaggaagtgactttgagagtcgtggtgcggatgcccccgcaacatattataaagggagatttgaagcagcaggaatttttccttggttgcagcaaagtgtccggcaaagttgattggaagatgctggatgaggctgtgtttcaggtgttcaaggattatatttcaaagatggatccagcttcaactctcgggttgagcacagagtctattcatggatatagtatctcccacgtcaagcgagtgttagacgccgagccacccgaaatgcccccatgtcgacgcggggtgaacaatatctccgtctctctgaagggcttgaaggaaaagtgcgtggattcactggtgttcgaaaccttgattcccaagcccatgatgcaacattacatctccctcttattgaagcatcgccgcctggtcctgagcggcccttcgggcacaggaaaaacttatctgacgaaccggctcgctgaatacttggtagaacgttccgggagagaggtgaccgaaggtatcgtgagtactttcaacatgcaccagcagtcgtgtaaagatctccagctgtacctttctaacctggcaaaccagatcgatcgagaaaccggtatcggagatgtgcccttggtcattctgctcgacgacctgtctgaggccggatctatcagcgagctcgtaaacggggcactgacatgcaaatatcataaatgtccttacattatcggcaccaccaatcagcccgtgaaaatgaccccaaatcatggactgcatctctcgtttaggatgctgacattttctaataacgttgagccggccaacggattcctcgtgaggtacctcagacgaaaactggttgaatcagattcagatattaacgctaacaaggaagaactcttgcgcgtcctggactgggtaccaaaactttggtatcatttgcatacattcctcgaaaagcactctacttccgatttcctcatcggaccatgctttttcttgtcttgtccaattggcattgaagatttccgaacatggttcatagatttatggaacaattctataattccatatctgcaagagggtgcgaaggacggaatcaaagtccacgggcagaaagccgcatgggaggatccagtggagtgggttagggacactcttccctggccaagtgcacaacaggatcagagcaagctttaccacctccctccccccaccgtcggcccccattccattgccagccccccagaagatcggacggttaaggactccacaccaagctctctggatagcgatcccttgatggctatgttactgaagctgcaagaggctgcgaactacatcgaaagtccagacagagagaccattctggaccctaatctgcaggccactttgtag

SEQ ID NO: 126274 - DNA, 783 bp, synthetic construct
  misc_feature 1..783: note = Description of Artificial Sequence: Synthetic coding sequence
  source 1..783: mol_type = other DNA
atgcatcagcagtcttgtaaggatttgcagctgtacctctctaacctggccaaccagatcgacagagaaacaggcataggcgatgtgccgttagtgattttactggatgacctgtcagaagcagggagtatcagtgaactggtcaatggtgccctgacctgtaagtaccataagtgcccctacattattggcaccacaaaccagcctgtcaagatgacccccaatcacggattacacctcagttttagccggatgttgactttttctaacaacgtcgaacctgcaaacggatttttggtccgctatttgagacgcaaacttgtcgaatctgactccgacattaatgctaataaagaagaactcttgcgcgtcctcgactgggtcccaaagctgtggtaccatttacatactttcctggagaagcatagtactagcgattttctgattgggtccccttgctttttcctctcttgcccaatcggcattgaagacttcagaacctggtttattgacctgtggaacaattcaatcattccttacctccaagagggcgccaaggatggaattaaggtccacggacagaaagctgcatgggaagacccagtggagtgggtacgcgacacgctaccttggccttccgctcaacaggacgacagcacgcccagcagcctggacagcgacccacttatggcaatgttgctgaagctccaagaagcggcaaactacattgaaagccctgatcgggaaacaatcttggacccaaaccttcaggccactttatag

SEQ ID NO: 126275 - DNA, 2193 bp, synthetic construct
  misc_feature 1..2193: note = Description of Artificial Sequence: Synthetic coding sequence
  source 1..2193: mol_type = other DNA
atggagcccggtaccagcaagtggagacgggaacgacccgaatcttgcgatgactcatcgaaggggggagaactgaagaaacccatttccctcggacaccccgggtccttgaaaaagggcaagacaccgccggtcgccgtgactagccccataacacacaccgcacagagcgccctgaaggtggcaggtaagccagaaggaaaggctaccgacaaaggcaagcttgctgtcaagaacacaggacttcagcgcagttcatcagatgcaggaagggatcggctttccgacgcgaaaaaaccccccagcggcatagccaggcccagtacttcgggcagctttgggtataagaagcctcctcctgccaccgggacagctaccgtgatgcaaactggaggaagtgctacccttagcaagattcaaaagagtagcggcatccccgtgaagccagtcaatggtaggaaaaccagtctggacgtaagtaattccgctgagccggggttcctggctcctggagcccggtccaatattcaatatcgaagtctacccaggccggcaaagtcatccagcatgtccgtgaccgggggccgaggtgggccaagacccgtgtcttcatcgatagatccctcgcttttaagtacgaagcagggagggctgaccccttctaggctaaaggaaccaaccaaggtggcgtcaggaagaactaccccggcacctgtgaaccagactgatagagagaaggaaaaagctaaggcgaaggctgtggcactggactccgataacatatcccttaaatcaatcggatcccccgagtcaacacctaaaaatcaggcttctcacccaaccgctaccaagctggccgagctgccacctacccccctgcgggctactgcgaagagctttgtcaagccccctagtctggcaaacctggacaaggtgaattcaaactcacttgatctgccttcttcctcagataccacccacgcttctaaggtcccagacctgcacgctaccagctcagctagcggcggccccctcccaagttgttttaccccaagccccgcccctatcctgaatataaattctgccagcttcagtcagggcctcgaacttatgtctgggttttccgttccgaaggagacccgaatgtatccaaagttatctgggctgcatcgcagtatggagtcactgcagatgccaatgagtctccctagtgccttcccttctagtacccccgtaccaaccccacccgcgccaccagccgccccaactgaagaggagacggaggagctaacctggtcaggaagtccgagagcagggcagctcgactctaaccagcgcgatcggaatacccttccaaagaaaggccttcgctatcagcttcagagccaggaagagacaaaggagcgtcgccatagccatacaattgggggactgcccgaaagtgacgaccagtcagagctgccttcaccacctgccctgccaatgtcgcttagtgcaaagggccagctcacaaatatcgtctcacccacagccgctaccacccccaggatcacaaggtccaactccataccgacacatgaggccgcatttgaactgtactcaggctctcagatgggaagtactctgagcttggctgagagacctaagggcatgattcgatcaggcagctttcgcgatccaacggatgacgtgcacggaagcgtcctgtctctggcttcatctgcgtcttccacatattctagccagatccgaaaactgcggagggaacttgagtcttcgcaagaaaaggtcgctactctgacctcacaactcagcgctaacgccaaccttgtggctgctttcgagcagtcacttgtgaatatgacttcccgcctgcgccacctcgctgagaccgcggaggagaaaatggagtttcgttcctgtcacccaggctggtcggctttagcccggtcctggctgactgctaactctgcttcacaggacactgaactgcttgatctaagggagactattgatttcctgaagaagaaaaactctgaagcccaggctgtgatccagggggccctgaatgcaagtgaaacaacacccaaggagttaagaattaagagacagaacagctccgactccatttcctcccttaactctatcacttcgcattcctctataggatcttctaaggatgccgatgcgtag

SEQ ID NO: 126276 - DNA, 4452 bp, synthetic construct
  misc_feature 1..4452: note = Description of Artificial Sequence: Synthetic coding sequence
  source 1..4452: mol_type = other DNA
atgctgcacctgcccctgccccggagcggcaggacagtaaatttccctaggagctgggatgaatcttcctcaatctcatccggtctgagtgatgcatctgacaatctgtcttcggaagaatttaacgccagctcgagcctcaattctcttccctctaccccgaccgcttcaaggcggaactcaactatcgtgctgcgcactgactccgagaaacggagcctggccgaatccggcctctcttggttctcagaatctgaagaaaaagctcccaaaaagctagaatacgacagcggcagtctcaagatggaaccggggacgtctaagtggagacgcgagaggcctgaatcttgtgatgattcctccaaaggcggggagctgaaaaagcccatctcgctggggcatccaggctccctcaagaaggggaagactccccccgtggctgtaacatcccctatcacgcacactgcgcaatccgccctcaaagtggccggaaagcctgagggaaaagccactgataaaggcaaattggccgtgaagaacacaggtctccagcgatccagctcggatgctgggcgcgataggttgtccgacgccaagaagccacctagtggaattgcccggccgtcaaccagcgggagcttcggctacaagaagcccccccccgccaccggcaccgccaccgtcatgcaaactggaggcagtgcaactttgtcgaagatccaaaagtctagtgggatcccagttaagccagtgaacggaagaaagacaagtctggatgtgagtaattccgccgagccagggtttttggcacccggtgcacgttctaacattcagtatcggtcactacctcgtcctgccaaaagctcgtccatgagtgtaacagggggcagaggcggccccaggcccgtgtcctcctccattgacccctccctcctctcaaccaaacaaggggggttgaccccttcccggcttaaggaacccactaaggtagcttctggaagaacgacccccgctcccgtcaatcagaccgaccgggagaaggagaaggccaaagctaaggcggtggcactcgactctgacaacattagtctgaagagcattggaagccccgagtccaccccaaaaaaccaggcttctcaccccacagccacgaagcttgcggaactcccccccacacccctgcgcgctactgcgaaatctttcgtgaaaccgccaagtctggctaaccttgacaaggtcaattcgaattctctggatcttccctcgtctagtgacaccacgcacgccagcaaggtccctgatttgcatgccacgagctctgcttccggaggtcccctgccgtcatgctttactccaagccctgccccaattctgaacatcaattccgcttcattctctcaagggctcgaactcatgtctggctttagcgtgccgaaagagacccggatgtaccccaaacttagtggtctgcataggtctatggagtccctgcagatgcctatgtctcttcccagcgcttttccctctagcacacccgtgcctacacccccggccccaccagcggcccctaccgaggaggaaacagaggagctgacctggagtggctcccctcgagctggtcaacttgactcaaatcagagggaccgcaacactctgccaaagaagggactgaggtaccagctacaaagtcaagaggaaaccaaggaacggcgccactcacatactattgggggactcccagagagcgatgaccagtctgagttaccttcacccccggcgctgcccatgtcactttctgcaaagggacaattaactaacattgtgtccccaacagcggcaacaactccccgaattaccagaagcaactccattcccacacatgaagcggcctttgagctttactccgggtctcagatgggaagcacgctctcccttgccgagcgtcccaaagggatgatccgcagcggctcatttagagaccctacagatgatgttcatggctccgtgctgtcactggcctcaagcgccagttccacgtacagctccgccgaagagcgcatgcagtctgaacaaattaggaagctgaggagagagctggagagttctcaggagaaggttgctacgctaaccagtcagctgtccgctaacgccaatctggtagcagcttttgaacaatcgctggtaaacatgacctccaggctgaggcatctagccgagacagctgaggagaaggatactgaattgctggacctgcgggagaccattgacttcctgaagaagaaaaacagcgaagcccaggccgtgatccaaggcgcactcaacgccagcgagacaacaccaaaggagttacgcattaaacgacaaaactcttcggatagtataagctccctcaactccattacatcgcacagcagcatcggaagttctaaagacgcggacgccaagaagaagaaaaagaaatcctggctccgcagctcgttcaataaagcattttccatcaagaaggggcccaaaagtgcgagctcctactccgatatagaagagattgccacgcccgactcgagcgctccaagcagtcccaaactacagcacggaagtactgagactgctagcccctcgattaaaagcagcacatcttcaagtgtcggcaccgatgtgactgagggcccagcgcatccagccccacacacgaggctatttcatgccaatgaggaggaagagcctgaaaaaaaggaagtgtccgaattgcgatccgaattgtgggagaaggaaatgaagcttacagacatccgcctggaagccctgaattcggcccaccaacttgaccagttaagagagactatgcataacatgcagttagaggtggacttgcttaaagctgaaaacgataggctgaaggttgcccctggtccgagctcaggatccacacctggccaagttcccggctcttcggccctgtccagccccaggaggagcttggggctggccttgacacacagcttcggccccagtctcgccgataccgacctcagtccgatggacgggatctctacctgtggtcctaaagaagaggtgactttacgggtggtggtgagaatgccaccccagcatattatcaagggcgacctcaagcagcaagaatttttcctggggtgttctaaggtgtcgggcaaggtggattggaaaatgctcgacgaggcagtgtttcaggtgtttaaagactacattagcaagatggatcccgcttcaacactgggtctgagtactgagtccatccatggctacagtataagccatgtgaagcgcgtcttagatgccgagcctccagaaatgcccccttgcaggcggggtgtgaacaatatttctgtctctttgaaaggtctaaaagagaaatgtgtggacagcctggtattcgaaaccttaattcccaagccaatgatgcagcattatatttcactgctactgaaacataggcgtcttgtcctttctgggcctagcggaacaggcaagacttacttaacgaacagactagctgaatatctggttgagcggtccgggagagaagttaccgaaggcattgtctctacgtttaacatgcatcagcagtcttgcaaggacctgcagctttacctctcaaacttggcaaaccagattgatcgggaaaccgggataggcgacgttccactggtaatccttcttgacgatctgtctgaagcggggagtattagcgagctggtgaatggagcccttacctgtaagtaccataaatgtccctacattatcgggaccacaaaccagcctgtgaaaatgactccaaatcacggattacacctctcgttccggatgttgactttctcaaacaacgtggaacccgctaacggttttctggtccggtatcttcgccggaaacttgtcgagtcagattccgacataaatgcaaataaagaggagttgctacgcgttttggactgggtgccaaaactctggtaccatttgcacacttttctagagaaacattctacgtctgactttctgatagggccttgtttttttctgtcttgcccaattggaattgaggactttaggacatggttcatcgatttatggaacaatagcattattccttatttacaggagggagcgaaagatggtataaaggtgcacggccagaaggccgcttgggaagatccagtagagtgggtacgtgatactctgccatggccgtcagctcagcaagaccagagtaaattataccacttgcctccgccgacagtcggaccacactctatcgctagccccccagaagacagaactgtgaaagacagtactccatcctcacttgattccgaccctcttatggctatgcttcttaaactacaggaggcagccaactacattgagtctcccgatcgggaaactattctggatccaaatctgcaagctactctctag

SEQ ID NO: 126277 - DNA, 4482 bp, synthetic construct
  misc_feature 1..4482: note = Description of Artificial Sequence: Synthetic coding sequence
  source 1..4482: mol_type = other DNA
atgctttggcctagaaacttgacatcctgggacgattctagctccgtgagttcggggattagcgatacgatcgataatctgagtacagacgacattaacacttcttccagcatatcatcctatgcaaatacgccggcctcaagcagaaagaaccttgatgtgcagactgacgcggagaaacattcccaggttgagcgcaactctctttggagtggtgacgatgttaaaaaaagtgacggcggttctgatagtggtattaaaatggagcccgggtcaaagtggaggcggaacccatcggatgtatcagatgagagtgacaaatctaccagcggcaagaagaatccagtgatcagtcagacgggctcttggcggcggggaatgactgcacaggtgggtatcaccatgcctcgcaccaagccttcggccccagcaggggccctcaagacaccaggaactggcaagaccgacgacgctaaagtatccgaaaagggacgcctgagccccaaggcctcccaggtaaaacgaagcccaagcgatgctgggcgatcgtcgggggatgagtctaagaagccactgccgagcagttctaggaccccgactgccaatgccaattccttcgggttcaaaaagcagagcggctcagctgccggtctggccatgatcacggcatcgggggtcactgtgactagccggtccgcaacgctgggaaagatcccaaagtcgagcgccctggtctctagaagcgctggacgcaagtcttcaatggatggagcccaaaaccaggatgatggctatctcgccctgtccagccgcacgaacttgcaatacagatcactgcctagaccaagcaagtccaattcccggaatggcgcaggcaatagatcctccacaagtagtattgactctaacatctcgagcaagtccgccggtctgcccgtgccaaagctgagagagcccagcaagactgctcttggttcatcgttacccggacttgtaaatcagacagataaggagaaagggatttcttccgataacgagtcagttgccagttgcaattccgtcaaagtcaatccagctgcccagccagtgagctcacccgcacaaaccagcttgcagcctggggcaaagtacccagacgtcgcatccccgacactcagacgattattcggcgggaagcccacaaagcaggtaccaatagccacagcagaaaacatgaagaactctgtggtgatatcaaacccgcatgctactatgacgcagcaggggaatcttgattcacctagcggatccggggtcctgtccagcggtagcagttctccgctgtacagcaaaaatgtggacctgaaccagtcaccactggccagcagcccatcaagcgctcactccgccccgagtaactcactcacatggggtactaacgcctcctcaagctccgccgtgagcaaagatggactcggcttccaatcagtgtcctctctccatacctcatgcgagagcatcgacatttccctgagtagcgggggcgtgccctcccataactcgtcaacagggctgattgcctcctcaaaagatgactccctgactccgttcgtgagaacgaactcagtaaaaaccacacttagcgagtcagatccccacctggatcggaatactcttccaaaaaaaggcttgcgttacactcctacatcgcaactccgcacccaagaggacgccaaggaatggctgcgctcacattcagccggtggcctccaggatactgcagctaatagtcccttttcgtccgggtctagcgttacatctccaagtggcaccaggttcaacttttcgcagctggcatcaccaacaacagtgacgcagatgtctctgagcaatcccaccatgctccgtacgcatagcttgtccaatgcagacgggcagtacgatccctacaccgattcacgctttagaaactctagcatgagtttggatgagaaatcgcggacaatgtcccggtccgggtcctttcgcgatggcttcgaggaagtgcacggttcaagtcttagcctggtctcttccacgagttctgtttactcaacccccgaagagaaatgtcagagcgaaataagaaagctccgccgggaactagacgcaagccaagagaaagtgagtgcacttaccacccagctgactgcaaacgcccacttagtggctgcatttgagcagtcattagggaacatgacaattcgccttcaatccctgaccatgacagccgaacagaaggactctgagctgaacgaactgaggaaaaccattgaactcctcaagaagcagaacgcggcggcccaggctgccatcaacggcgtgatcaataccccagagctgaattgcaaaggtaacggaacagctcagtctgccgacctgagaatccgtcgtcagcacagttctgattcagtgtcatctattaacagcgcaacttctcattcatcagttggtagcaacatcgaaagcgacagtaaaaagaagaagaggaagaattggctgagatcctcttttaagcaggcatttgggaaaaaaaaatcgccaaaaagtgcttcctctcacagcgatatcgaagagatgactgactcctctctgccttcttcccccaaattgcctcataatggctccactggttccactccactactgcggaactcccactccaacagtcttatatccgaatgcatggactccgaagccgagaccgtcatgcagctgcgcaatgaactcagagataaagagatgaagttaactgacattcggctcgaggccctaagctctgcgcatcaattggaccagctgcgggaagctatgaatagaatgcagtctgaaatcgaaaagctaaaggccgagaacgatagactcaagagtgagagccagggatcagggtgttctcgcgcaccttcacaggttagcatttcagcatcacctaggcaatctatgggtttaagccagcattctttgaatctgacagagtccacttccctcgacatgctgctcgacgatacgggcgagtgttcagcccgcaaggagggcgggaggcacgtgaagattgtggtgtcttttcaagaggaaatgaagtggaaagaagactctcgtccacacctgttcctgatcggctgcattggtgtcagtggaaaaacaaaatgggacgtccttgatggcgtggtcagacggctgtttaaggagtacatcatacatgtggatcccgtatcccaattgggacttaattccgactccgtgttgggctattctatcggagagattaaacgcagcaataccagcgagacgccagagctgctcccttgtgggtatctggtgggggaaaacacgacaattagcgtgaccgtgaagggattggcagagaactcattggattcactggtgtttgagtcactgatccccaagccaatcctgcagagatacgtgtcactccttattgaacacagaagaatcattctcagcggacccagcggtaccggaaaaacatatctcgcgaatcggctgagcgaatacatagtcctgagagaggggcgcgagctcacagatggcgtgatagcaaccttcaacgtcgatcataagtcatctaaagagctgaggcagtacttaagcaatttggcagatcagtgcaactcagagaataacgcagtggacatgccactcgtgattatactggataacctgcatcatgtgtcttcactgggagagatctttaatggactgctgaactgtaagtatcacaaatgcccatatataattggaaccatgaaccaggcaacctcttccacaccaaaccttcagcttcatcacaatttccgctgggtcctgtgcgccaaccacactgagccagtcaagggttttcttggtcgttttcttagaagaaaactgatggagaccgagatctctggccgcgtgaggaatatggagctagtgaagattatcgattggataccaaaagtgtggcatcaccttaatcggtttctagaagcacatagttcaagtgacgtgacaatcggcccacgcctgttcctgtcttgccctattgatgttgatgggtcccgggtgtggtttaccgatctgtggaactactccattatcccttaccttctggaggccgtgcgggagggactccaactgtatggtagaagagctccatgggaagatccagcaaaatgggtgatggacacgtacccgtgggcggcctctccacagcagcatgagtggccacccctgctgcagctgcggccggaagatgtgggatttgacggatactcaatgcccagagagggctcaacatccaagcagatgccgccatcagacgccgaaggggaccccttaatgaatatgcttatgcgtcttcaggaggccgctaattatagtagtccgcaatcatacgacagcgactctaactcaaacagtcaccacgatgatatccttgactcatctttagagtctaccctttag

SEQ ID NO: 126278 - DNA, 7290 bp, synthetic construct
  misc_feature 1..7290: note = Description of Artificial Sequence: Synthetic coding sequence
  source 1..7290: mol_type = other DNA
atgcctgccattctagtggcctcaaagatgaagtcaggactgcccaagccagtgcactccgccgcaccgatcttgcatgttccaccggcgagagcaggtcctcagccctgctacttaaaattgggaagtaaagtggaagttagtaaaactacctacccttcacagattcctctcaagtctcaggtactacagggcctgcaggaaccagctggagagggtctcccgttacggaaaagtgggagcgtagagaacggattcgatacccagatttacactgattgggccaaccactacctcgccaaatcgggccacaagcggctgatccgggacttacagcaagatgtgacggatggagtcctgcttgcccagataatccaggttgtggcaaatgaaaaaatcgaagatatcaatgggtgcccaaagaatcgcagtcagatgatagagaatatcgacgcatgtctgaatttcttagcagctaaagggattaatatccagggactctctgcagaggagatacggaacggaaacctaaaagcaattttgggcttattcttcagcctcagccggtacaaacagcagcagcagcagccccagaagcagcacctgtcatccccactgccacccgctgtttctcaggtggctggcgctcccagccaatgccaagccggaaccccccagcagcaagttcccgttacaccacaggcaccttgtcagccgcaccagcccgcaccacatcagcaatctaaggcacaggcggagatgcagtctaggttgcctggccccaccgcaagagtgagcgcggctgggtccgaggcaaagacgcgcggcggctctacaacagcgaataaccgacggtcacagagttttaataactacgataaatccaagccagttaccagtccaccacctcccccttcatctcatgagaaggaacctttagcctcgagcgccagctctcatccgggaatgagtgacaatgcgccagcctcactcgagtccggctcgagcagcacccccacgaattgtagcaccagttccgctatccctcagccaggggccgccactaagccatggcgttcaaagtctctctccgtgaaacatagtgcgacagtgtccatgctttcagtcaaaccccccggaccagaggcgcccaggcccacacccgaagcaatgaagcctgccccaaataatcaaaagtccatgcttgaaaaattaaaacttttcaactcgaaaggaggcagcaaagccggcgaagggccagggtctcgcgacacttcatgcgaacgtctggagacactcccttctttcgaggaatcagaggaacttgaggctgccagtaggatgctcactaccgtcggccctgcatcctctagcccaaaaatcgccctgaaaggaattgcccagcgtaccttctcgcgggccctcaccaataaaaagtcgtctttgaagggcaacgaaaaagagaaggaaaagcagcagagagaaaaagataaggagaaatcgaaagatctggcaaagcgggcttctgtcactgagcgtcttgatttgaaggaggagccgaaagaagaccctagtggtgccgctgttcccgagatgccgaagaagagtagtaagatcgcatctttcattcccaaaggtggcaaattgaactctgctaagaaggaaccgatggccccgtctcacagtggcattcccaaacctggcatgaaatctatgcctgggaagtctccgtccgccccagctccaagcaaggagggagaacggagccgctccggaaaattgtcatccgggctaccacagcagaagccccagctggatggaaggcacagtagcagctcaagttccctggcttcgtcagaggggaagggcccggggggcacaactctcaaccactccattagctcacagactgtcagcggcagtgtaggaaccacacagacaacaggcagcaacacggtgagcgtgcaactgccccagccccaacagcagtacaatcacccaaatactgcaaccgtggcccccttcctgtaccgctcacagacagatacagagggaaatgtaaccgcagagtcctcatcaacaggagtttctgtggaacccagccattttaccaaaaccggccagcctgccctagaagaactgacgggggaggaccccgaagctcgtagacttagaacagtcaaaaatatagccgatcttcgtcagaacctggaggaaactatgagctccttacgggggacacaagtgacccattctactctcgagaccactttcgacactaacgtcactactgaaatgtccggcagaagtatcttatctctgaccggtaggccgaccccccttagttggcgtctggggcagtcgtcacccagactccaggctggggacgccccatctatgggcaacggataccctcctcgagcaaatgcctcacgattcattaacacagaaagtggcagatacgtgtatagtgccccgttaaggcggcagctcgcttcccgaggcagctcagtgtgtcacgtggacgtgagcgataaagccggtgatgagatggaccttgagggtatctccatggacgctccagggtacatgtctgatggcgatgttctgtcaaagaatatcaggactgacgatatcacaagtggttacatgaccgacggaggtttgggcttgtatactcgaaggttaaaccgcctccccgatggaatggccgttgtgcgggagaccctccagcggaacaccagcctgggcctgggagatgcggactcttgggacgactccagttccgtgtcgagcggcatcagtgacacaattgacaatctgagcactgacgacatcaacacgtcaagttcaatatcttcatacgccaatacccctgcatcttctagaaagaacctggatgttcaaactgatgcagagaagcattctcaggtagaacggaatagcctctggtcgggggatgacgtgaagaagtctgacggcggaagtgattctggcattaaaatggaaccaggatctaaatggcggaggaatccttcagacgttagtgacgagagtgataagagtacgagtggtaaaaaaaaccccgtcatctcccagacggggagctggcggcgggggatgacagcccaggtaggtataaccatgcctagaaccaaaccttccgccccggccggcgcactgaagaccccaggcaccggcaaaaccgatgacgctaaggtgagcgagaagggcaggctcagtcccaaggcaagtcaggtgaagcgatcaccatcagacgcaggccgaagttccggtgatgaatctaaaaaaccgctgcctagctcaagcaggacgcccaccgccaacgctaacagttttggttttaagaaacagtctggctctgctgctggtctggccatgataaccgctagtggagtaacagtcacatcccgtagtgccacacttggcaagattcccaagagctctgccctggtctctaggtcagcagggaggaagtcttccatggacggtgcccagaaccaggatgacggctacctggccctgtcttctagaaccaatcttcagtatagatcccttccaagaccctcaaagagcaattctcgcaatggcgccggtaatagatcttctacttccagtattgactctaatatcagctcaaaatctgcaggcctgcccgtgcccaaactgcgtgagccttctaagacagccctgggctcctcactccctggcctcgtcaaccaaacagacaaagaaaaggggattagctctgataacgagagcgtagcaagctgtaattcagttaaagttaatccagctgcgcaacccgtgagttccccagcccagacatccttgcagcctggcgccaagtacccagatgtcgctagccccactttacgaaggctatttggaggcaaacccaccaagcaagtgcccatcgctacggctgagaacatgaagaattccgtcgtcatatcgaatccccatgcaactatgactcagcaagggaatctggactcgcctagcggctccggcgtgctgtcaagcgggtcaagttcaccactctacagcaagaacgtcgatctcaaccaatcacctctggccagtagcccctcctcagcacacagtgcgcctagcaattcgcttacgtggggcaccaacgcttcctcatccagcgctgtgtccaaggacggattgggatttcagtcagtgtcgagcctccatacctcttgcgaatctatcgacatttctctgtctagcggcggagtgcccagccataactcatctaccggtctgatcgcttcatccaaagacgacagtctgacaccttttgtccgaactaatagcgtgaagaccaccctcagtgaatcaccactgtcgtccccagcggccagcccaaaattttgcagatccacccttcctaggaagcaggatagcgacccccatctggataggaatactctacccaagaaggggctgcgctacaccccaacatctcagctgagaacccaagaggacgccaaggagtggctcaggtctcacagtgcgggcggcctccaggacacggccgccaatagcccattctcttctggttctagcgttacgtcgccgagcggcacaaggttcaacttcagccagttggcctctcctactactgtgacgcagatgtcactgagtaatcccaccatgctgcggacgcacagtctcagcaatgccgacgggcagtacgacccctatacagactcccggtttcgtaactcatcaatgagtttagacgagaagtctcgaacaatgagtcggtctggaagttttagggatgggttcgaagaggtccatggcagctctctgtctttggtctctagcacgtcatctgtgtactctacccccgaggagaaatgccagagcgaaattcggaagctgagaagggaattggacgccagccaggagaaggtaagcgcattgacaactcagctcaccgctaacgcccacttggtggctgccttcgaacaaagcctgggtaacatgacgatccgcttacagtccctgaccatgaccgctgagcagaaggattcagaactgaatgagctgcggaaaacaatcgaactcctcaagaaacagaacgctgccgcgcaggctgcgataaacggcgtcattaacacacctgagctcaactgtaagggcaacggtacggcccagtccgcagacctcaggattcgtcgccagcattcaagcgattctgtgagttctattaattctgcgacttctcactcgtccgtcggaagcaatatcgagtccgactcaaagaaaaagaaacggaagaactggctgaggagcagttttaaacaagcatttggaaaaaagaaaagcccaaagagtgcttcctcacatagcgatattgaggagatgactgacagttctcttccaagtagtccgaagctccctcataacggctccactggatcaacccccctccttcgaaactcacactcaaattcattgattagcgagtgcatggacagtgaggctgagacagtgatgcagcttcgcaacgagctgagggacaaggaaatgaagcttactgacattaggctcgaagccctgtcttcagcacaccagctggaccagttaagggaagcaatgaaccgcatgcagtcagaaatcgagaagctgaaagcagagaacgaccgcctcaaatctgaatctcagggatcaggatgttccagagcacccagccaggtgagcatctccgcctccccgcgacaatccatgggcctgagccagcactcgttgaacctgactgagagcacatctctggatatgctgctggacgataccggcgagtgttcggcacgtaaggaggggggtaggcacgtcaagatcgtggtgtcctttcaggaagagatgaagtggaaagaggactcccgcccacatctcttcctgattggttgtatcggcgtatcaggaaaaaccaaatgggatgtcttagacggagtggtgcggcggctgtttaaggagtatatcatccatgttgacccagtgagccagcttggcctgaactccgatagcgtgctaggatacagtattggcgaaattaagcggagcaacaccagcgagacaccagagttgttaccatgtggctacttggttggggagaacacaaccatatccgttacggttaaaggccttgccgagaatagccttgacagccttgtgtttgagagtctgataccaaagccgattcttcagcgctacgtgtcgctgttaatcgagcatcggagaattattctctctggaccaagcggcactgggaagacctacctagccaataggctttcggagtacatcgtccttcgtgaaggtcgcgaactgactgatggggtgattgcgacctttaatgtggaccataaaagcagcaaggagttgcgccagtatctaagcaatctggcagaccagtgcaacagcgagaacaacgccgtggacatgcctcttgtcatcatcctagacaacctacaccatgtgagtagtctcggcgaaatttttaacggactcttgaattgcaagtatcataagtgtccatatatcattggtactatgaatcaggcaacaagttctacccccaacctccaattgcatcataattttagatgggtcctatgcgccaatcacaccgaacctgttaaaggattcttgggaaggtttttaaggaggaaattgatggagacagaaatttcaggtcgagtgcgcaacatggaactggtcaaaataatcgattggataccgaaggtgtggcaccatctgaatcgttttttagaggcccacagcagttcagatgtgaccatcgggccccggctgtttttatcttgccctatcgatgtcgatggatcgcgggtgtggttcactgacttgtggaattacagtattattccttacctcctggaggctgtgcgtgagggactgcaactatatgggcgaagagcaccatgggaggacccagccaagtgggtgatggatacctacccctgggccgctagtccacaacagcatgagtggcctccactgctccaactgaggcctgaggacgtgggatttgatgggtactctatgccgagagagggctccacttccaagcaaatgcccccaagcgatgcagagggagaccccttaatgaatatgctgatgcggcttcaggaggcagctaattatagtagcccccagtcttacgactctgactccaactcaaacagccatcacgacgacatcctggactcatctttagaaagtaccctgtag

SEQ ID NO: 126279 - DNA, 7299 bp, synthetic construct
  misc_feature 1..7299: note = Description of Artificial Sequence: Synthetic coding sequence
  source 1..7299: mol_type = other DNA
atgccagcgatcctagtagctagcaagatgaaatctggactccctaaacccgttcattcagcggctccgatcctccacgtgccaccagcaagagctggcccccagccctgttatctaaaactgggtagcaaagtcgaggtgtccaaaactacatatccttcccaaatcccactgaaatcccaggtgttgcagggactgcaggagccagctggtgaaggtctgccacttagaaaatccggttcagtggaaaatgggttcgatactcagatctacacagattgggccaaccattacctggccaagagcgggcataaacggttgatccgagatttgcagcaggatgtgactgacggggtgttgcttgcccagatcattcaggtagttgccaatgaaaaaatcgaagatatcaatggctgtcccaagaaccggtcccagatgattgaaaatatagacgcctgcctcaacttcctcgccgcaaaaggaataaacatccagggcctcagcgccgaggagatccgaaatggtaaccttaaggcgattctgggactgtttttttccctgtcccgatacaagcaacagcaacagcaacctcaaaagcagcacctctcttctcccttgccacctgcagtgtcacaggtggccggagcaccttcccagtgtcaggctggcactccacagcagcaggtccccgttactccacaggctccctgccagcctcatcagccagccccccaccagcagtcaaaggctcaagccgaaatgcaaagcagactcccgggccccaccgcaagagtgagcgcagctggctctgaggcaaaaacccgcggcggctccaccaccgccaacaatagaaggagtcagtcatttaataattacgacaaaagtaaaccggtgaccagtcctccacctccgccttcgtcccacgaaaaagagccactagcatcgtctgcctcttctcacccggggatgtctgataatgcccccgctagtctagagtctgggtccagctcaacaccgactaattgctccacatcctccgcaattcctcagcccggagctgctaccaagccttggaggtccaagagtttatccgtgaagcactccgctacggttagcatgctgtctgttaaacccccaggacccgaagccccgcggcctacccccgaggccatgaagccagcacccaacaatcagaaatctatgctggaaaagctcaaattgttcaactcaaagggagggagcaaggccggggaggggcccggatctagggacacctcttgtgagcgcctagagacattgccatccttcgaagaaagcgaagagctggaagcagcatcaagaatgctcactactgtaggccccgcctcctcatccccaaaaattgcactgaaagggatagcacagaggaccttttctcgggcgctgaccaacaaaaaatcctctctgaaggggaacgaaaaggagaaagaaaagcaacagcgagaaaaggataaggagaagtccaaggatcttgccaagagagccagcgttaccgaaagactcgatcttaaagaggagcccaaggaagatccctctggcgccgcggttccagaaatgccgaaaaagtccagcaaaattgccagtttcatccccaagggcggaaaactgaattctgcaaaaaaggagcccatggccccttcccactccgggattcccaagcccggcatgaaaagtatgccaggtaagtcaccgagcgcacccgccccgtctaaggagggggagcggtctaggagcggtaagttgtcttccgggttgccccagcaaaagccccaacttgacggccgtcactctagtagcagtagttcacttgccagttccgaaggcaaggggccaggaggcacgacactcaatcactcaattagcagccagactgtgtctggcagtgttgggaccacacaaacaactggatctaacactgtttcagtccaactcccacaaccccagcagcagtataatcatcctaacactgctacagttgcacccttcctctaccgcagccagaccgacactgagggaaatgtcacagcagaatcctcctctaccggcgtctctgtcgaaccgtcccatttcaccaaaactggccagcctgcactggaggagttgaccggagaagacccagaagccagaagactgagaaccgttaagaatatcgccgaccttaggcaaaacttagaggagacaatgagttcactaaggggcacacaagtcacacacagcaccctggagaccaccttcgacaccaatgtaactacagaaatgtctggacgcagtattctcagcctgactggacggccaacccccctgtcatggagactgggacaatccagtccaagactgcaagcgggcgacgcccccagcatggggaatggctatcccccccgtgcaaatgcttccagatttattaatacagaatccgggagatatgtctactctgcccccttgcggcgccagctggctagcaggggctctagcgtgtgccatgtggatgttagcgataaggctggcgacgaaatggatctcgagggcatctcaatggacgcccctgggtatatgagcgacggcgacgtcctcagcaaaaacatacgtacagatgacatcacgtcaggctatatgaccgacggaggacttggtctctacacgcgcagactgaaccgcctgccagacgggatggctgtggttagagagaccttgcagagaaatacgagcctgggcctcggcgacgcggactcatgggacgactcctcctctgtctcaagcggcatcagcgataccatcgataatcttagcaccgatgacatcaacacctccagctcaatcagcagctacgcaaacacacctgccagcagccggaaaaatctggacgtacagacggacgccgagaaacatagccaggtcgagcgcaattctttgtggagcggtgatgatgtaaaaaagagcgacggtggatctgactctgggattaaaatggagccagggtctaagtggagaagaaatccgagtgacgtttcagacgagtcagataaaagcacatccggcaagaaaaatccagtcatcagtcagaccggatcttggcgacgcggaatgaccgcccaagtcgggatcactatgcctcgtaccaagccaagcgcacctgcaggagcgctgaagacgcccggcactggtaagacagatgatgctaaggtgagcgagaagggccggctgtcccccaaagcatctcaggttaagcgcagtcccagcgatgctggacgctctagcggggatgagtctaagaagccgctcccctcatcctctcgcaccccaacagccaatgctaacagtttcgggtttaagaagcagtcaggaagtgccgccggtctggcgatgatcactgccagtggtgtgacagtaacgtctcggtccgcaactctaggcaaaatacctaagtcatcagcgctggttagccggtctgcaggtcgaaaatcaagcatggacggcgcccaaaatcaagacgatgggtatctcgccttatcgagccgaaccaacttgcagtatcgctcactgccacggccgtcaaagtccaactcacggaatggagctgggaatcggtccagcacctcttccattgatagcaacatctcttcaaaatcggccggcttacccgtacctaaactgcgtgagccgtctaagactgccttgggcagtagcctccccgggctggtgaatcagacggataaggagaagggaatttcctcagacaacgagagcgtggcgtcttgcaattctgtgaaagtcaatccagctgcccagcctgtcagttcgcctgcacaaacctcgctgcaacctggcgctaaatatcccgatgtggccagccccactctgcgaagacttttcgggggcaagcctacgaagcaggtgcctatcgcgacggcagagaatatgaaaaattccgtcgtcattagcaatcctcatgccacgatgacacagcagggtaacctcgactctccatccggctcaggcgtgctctcgagcgggtcctcaagcccgctgtactcaaaaaacgtggacttgaatcaaagccccttggcttcttcgcctagttccgcacactcagctcccagtaattcactgacgtgggggaccaatgcttcaagttcttcagcagtatctaaggatggtttgggatttcagtccgtcagttcgctgcacacttcttgtgagtcgatcgacatttcactctcctcgggaggcgtgccatcccataactccagtaccggcctgattgctagttctaaggacgacagtctgacaccgtttgtacgcacaaatagtgtgaagactacattaagcgaaagcccgttaagttctcccgctgccagtccgaagttttgcagaagtacgctccctagaaagcaggattcagacccacaccttgatcggaacacactgcctaagaagggcctgcgctacacccctacctctcagctccggacacaggaagacgccaaagaatggctgcggtcacattcggccggcggcttgcaagatactgccgcgaattcacccttctcttccggcagttctgttacctcgcccagcggcacccggtttaacttcagccagttggcaagtcctacaactgttacccagatgtcactgtccaatcctaccatgttgcgaacccacagcctgtctaacgcggacggccagtacgatccttatactgacagtagatttcggaactcatctatgagtctggatgaaaagtcgaggactatgtcaagaagtggctcctttcgcgacggatttgaggaagttcacgggtctagcctttccttagtttccagtaccagctctgtttactccacaccggaggagaagtgtcagtctgaaattcggaagcttcgcagagagctcgatgccagccaagagaaggtgagtgcattaactactcaactgacagctaatgctcacctcgttgccgcctttgagcagagtctgggcaacatgaccatcagattacagtctctgacaatgaccgcagagcagaaagactctgagttaaatgagcttagaaaaaccattgagttactcaagaagcaaaacgctgctgcgcaggccgccattaacggagtcattaatactcctgaactcaattgtaaaggtaacggcactgcccaatcggccgatctccgcattaggcggcagcatagtagcgacagtgtgtcgtccatcaacagtgccacaagccattctagcgttggaagtaatattgagagcgactctaagaagaagaaacggaaaaactgggtaaacgagctaaggtcttcattcaaacaggcttttgggaagaaaaagagccccaagtctgccagttcacatagcgacatagaggagatgaccgatagcagcctgccaagtagtccaaaattgccacataatggcagtactggatcaacacctctgttgcgtaattctcattccaatagtctgattagcgaatgtatggacagcgaagcagaaacagttatgcagctcagaaatgagttgcgtgacaaggaaatgaagctcacggacatacgccttgaagccttaagtagtgcccaccagttagatcaactccgggaggctatgaacagaatgcagagcgagatcgagaaacttaaggcagagaatgaccgacttaagtccgaaagccagggctctggctgctccagagcaccttcacaggtgagtatatcagcgtccccccggcaaagtatgggactctcacagcatagtctgaatttaaccgaaagcacctcgctcgacatgcttctcgatgatacaggggagtgctcggctcggaaggagggcgggcggcacgttaaaattgttgtatcctttcaagaggaaatgaagtggaaggaagatagtcgtccgcacctttttctcattggatgcattggcgtgtccggaaagaccaaatgggatgtgctggatggagtggtccggcggttgttcaaggaatatatcattcatgtagatccagtctcccagctgggactcaattcagacagcgtgctcggatacagcatcggggaaatcaagcgtagtaataccagcgagactcctgaacttttgccctgtggttacctggttggagaaaacacaaccataagtgtcaccgtcaaggggctggctgaaaattccctcgactcacttgtgtttgaatcactgataccaaaacctattctacagaggtacgtctccttgctcattgagcatcgccggatcatattgtctggaccctctggcaccggaaaaacatacttggccaaccgcctgtccgaatacatcgtactgcgggaagggcgtgaactgactgatggggtgattgcgacttttaacgtcgatcacaagtcctctaaagagctaaggcagtatctgagtaatctggccgatcagtgtaatagcgagaataatgcagtcgatatgccacttgtgattatcttggataatttacatcacgtatccagcctgggcgagatttttaatgggctgctgaactgtaagtaccacaaatgtccttacattattggcactatgaatcaggcaacgagctctaccccgaacctccagttgcaccacaatttccggtgggtactgtgtgccaaccacacagagcccgtgaaggggtttttgggccgtttcctgagaaggaagctaatggagaccgaaataagcggacgagtgcgcaacatggaattggtcaaaatcatcgattggatcccaaaggtctggcatcatcttaataggtttcttgaggcccattcttcttctgatgtgactatcggtccaagactgtttctgtcctgtccgattgatgtcgatggctctcgggtgtggttcaccgatctatggaattacagtataataccctatttgctagaagctgtgcgtgagggcctgcagctgtacggccgaagggcgccatgggaggatcctgccaaatgggttatggacacatatccctgggctgcatccccgcagcagcatgaatggcctcctctgctgcaactgcggccggaggatgtgggtttcgacggctactctatgccaagagagggtagtacttccaaacagatgccaccctcagatgcagaaggagacccactgatgaacatgcttatgaggcttcaagaggccgccaactactccagtccacagtcatatgatagcgatagcaattctaatagccaccacgatgacatactcgattcgagcctggaaagtacgctgtag

SEQ ID NO: 126280 - DNA, 7467 bp, synthetic construct
  misc_feature 1..7467: note = Description of Artificial Sequence: Synthetic coding sequence
  source 1..7467: mol_type = other DNA
atgccagccattctcgtggcgagcaaaatgaagtctggactacccaagcctgtgcatagcgccgcccccatactccatgtgcctccagcacgagccggacctcaaccctgttacctcaagctcggatccaaggtggaagtgagcaagaccacatatcctagccaaatcccgctgaagagtcaggtgctccaggggctccaggagccggctggtgaaggcttacctctgaggaaaagcgggtccgtggaaaatggttttgacacacagatctatacagattgggcgaaccactacttggcaaaaagcgggcacaagaggctgatccgcgacctccagcaggacgttactgatggtgtccttttggctcagattattcaggtggtggctaatgaaaagatcgaagatataaacggctgtcccaagaatagaagccagatgatagaaaacattgacgcatgtcttaacttcctggctgccaaaggtattaacattcaaggactgtcagcagaagaaatccgcaacggcaacctgaaggcgattttgggcctgttcttcagcctgtcacggtataaacagcagcagcaacagccccagaagcagcatctctcatccccactgccacccgccgttagtcaggtggccggggcaccttcacagtgtcaggccggaactccacaacagcaagtgcccgtgacccctcaggcaccttgccagccacatcagccagcaccacaccagcagagcaaggcacaggccgagatgcagagcagcgccagctccaaggatagcagtcagagcaaaattatccgattcactctgggtcagaaaaagatttctagactgcctggccctacagcgagagtgtctgcagcagggtccgaggccaaaacgagagggggtagtactacggctaacaatcggagatcccagagctttaacaattacgataaatcaaagcctgtgacctctcccccgcctcccccctcgtcacatgagaaggaacctctcgctagctcagcctcatcccaccctggcatgagtgataacgcgccagcctcactggaatccggaagttcctcaacccctacgaactgctcaacctcaagcgctattcctcaacccggggcagccaccaaaccatggcggagcaagagtctgagcgtgaaacacagtgccaccgtttcaatgctgtctgttaaacccccgggacccgaggcccctcggcctaccccagaggccatgaaaccagctcccaataatcaaaagagcatgctggaaaaacttaaactgttcaactcaaagggtggctcaaaggctggtgaaggacccgggagccgtgacacaagctgcgaaagattggaaaccctcccctccttcgaggaaagcgaagagcttgaggcagctagtcgcatgctgacaacggtgggccccgcctcgtcctctccgaaaatagctctgaaggggattgctcagcgtacatttagccgtgcactgacgaacaaaaagagtagcctcaaaggtaacgaaaaggaaaaagagaagcaacaacgggagaaggataaagagaaatcaaaggacttggccaagcgcgctagtgtcacagagcggctggatcttaaggaggaaccaaaggaagatccatccggcgccgcagtgcccgagatgcccaaaaaatcaagtaagatcgccagcttcataccgaagggcggcaagcttaactccgcaaagaaagagcctatggccccaagccattccgggatccccaagcccggcatgaagagcatgcctggaaagtccccatctgcccccgctcccagcaaggaaggcgagcggtccagatctggtaaattatcctcagggctaccacaacagaaacctcagctggacggccgccactccagctcaagctcttcccttgcctcttcagaagggaaagggccaggggggacaactcttaaccattcaatatcttcccaaacggtttccggctctgttggcacgacccaaacaacaggttccaacacagtttccgtgcagctgccacagccacagcagcagtataatcatcccaacacagccacagtggccccatttctgtaccggtctcagacagacacggagggaaacgtcacggcggagagctctagcacaggagtttcggttgaaccatcccatttcaccaaaaccggccaacctgctttggaagagctgactggcgaagaccctgaagcacgccgcctcagaacggtcaagaacatagctgacctgaggcaaaacttggaggagacaatgtcctctttaagaggcacacaggtcacccactcaaccctagaaacaaccttcgacactaacgtcaccacggagatgagtggccgctctatactgtcgctcactggcaggcccacccccttgtcttggaggctgggccagagttctccgaggctgcaggcaggagacgccccgagcatgggcaatggttatcccccacgcgcaaacgccagtcgattcatcaataccgaatccggccgatatgtctacagcgctccccttcgaagacagctggctagccgtggatcaagtgtctgtcacgtcgatgtgagtgacaaagctggcgacgaaatggatttggagggaatctccatggatgcccccgggtacatgtcagatggagacgttctcagcaaaaatattaggactgacgatataacatcagggtatatgaccgacggcggcctggggctgtacactagacgtctgaatcgactgcctgacggcatggctgtggttcgggagactctgcaacgcaacacatcgctaggcctaggcgacgccgactcttgggatgactccagttcagtttcttctggtatatcagatacgattgataatctgagtacagatgatatcaatacaagctcttcgatcagcagttatgccaacacacccgcatcatctcggaagaatctcgatgtgcagaccgatgcagaaaaacactcccaagtagagcgtaattctttgtggtcaggagatgacgtaaagaaatccgatggcggcagtgattccgggataaagatggaaccaggcagcaaatggcgacggaatccaagtgatgtcagcgacgagtccgacaagtccacctccggcaagaagaatcccgtcatcagtcagacagggtcatggagacgtgggatgacagctcaggttggcattacaatgccacgaaccaaaccttccgcacctgccggagccctgaaaactccaggaactggaaaaactgacgatgcaaaagtatctgaaaaaggtcgcctgagccctaaagcctcccaagtgaagcgttctcctagcgacgccggtcggtcctccggtgatgaatccaagaagcctttgccgtcatcatccagaacccctacggccaacgcaaattcctttgggtttaaaaagcaaagtggctcagcagcgggcctcgctatgataacagcgtccggcgtgaccgtgacctctaggtcagccactctcggcaagattcccaagtcatcggccctagtatcgcgatctgccgggagaaaatccagcatggatggcgcacaaaatcaagatgatgggtacctggccctgagctcaagaactaacctgcagtacagatcactgcctcgcccctccaagtcaaattcacggaacggtgccggtaacaggtcttctaccagttctatagattccaacattagtagcaagtctgctggtctgcctgttcccaagttacgagagccatcaaagaccgctctcggcagctccctgcctggtctcgtgaaccaaactgacaaggagaagggaatcagctctgacaatgaatccgttgctagctgtaacagtgttaaggtgaacccggccgcccagcctgtatcctccccagcgcagactagccttcagcctggagcaaagtaccccgatgtcgcaagtcctacattacggaggctgtttggcggaaagcctacgaagcaggtgcccatcgccacagctgagaacatgaagaacagcgtggtgatttctaatcctcacgctactatgacccaacagggtaacctggattccccttcaggttcaggtgtcttgtcatcaggttcgagctctccactgtactcaaagaacgtcgacttgaaccagtcccctctagcatcaagtccaagcagtgcgcattccgcaccatctaacagcctgacctggggaaccaacgcatcgagcagctcagcagttagcaaagacggcctgggatttcagtcggtgagcagtctccacacctcttgtgagagcattgacatctcactcagctctggaggggttccaagtcacaattccagtaccgggctgattgcttccagtaaagacgacagcttaacaccgtttgtgcgtacaaactccgtcaagacaacactgtctgagagccccttaagctctcccgccgcatcccctaagttctgtcgttcaacactgcctaggaaacaggacagtgacccacatctggatcggaatactctacctaagaagggtcttcgatacacgcctacctcccagctccgcacacaggaggatgcaaaggaatggctaaggagtcacagcgctggagggctgcaggacacagctgctaatagcccattctcctcgggctcatccgtgacttcacctagcggcactaggtttaacttcagccagctggcctctcccaccacagtgacacaaatgtcactgagtaatcccaccatgctgcgcacccactcgctttctaatgccgatggacagtacgatccctacactgacagtcgctttcgcaatagctccatgtccttggacgagaaatcccgcacaatgtcccgatcaggctctttccgggacggctttgaagaggaatcttgggaaaagtcgagcgttgacaactttgtctccagactacactcctccctgcatttctccttaccgctgtttcatcacgctcggtacgagctggtacatggtagcagccttagtcttgtaagcagtacttcgtctgtgtattcaacccctgaggagaaatgccaatcagaaatccggaaactgcgcagagagctggacgcctcccaggaaaaagtgtccgctctgaccacccagcttaccgccaacgctcacctcgtcgctgctttcgagcagtcgttagggaatatgaccatcaggctgcagtcactgacgatgacagccgaacagaaagactctgaacttaatgagctgcggaaaaccattgagctgctgaaaaagcagaatgctgcagcgcaggccgccataaacggcgtcattaacactcctgagcttaactgcaaaggtaacgggaccgcccagagcgctgatctgcgaattagacggcagcacagctctgattcagtttcctcaattaatagcgcaacatctcattcttccgtgggatcaaatatagagtctgattctaaaaagaagaaacgtaaaaattgggtgaacgagttgcggagcagcttcaagcaggccttcggtaagaaaaagtctccaaagtctgcctcctcacactccgacattgaggagatgacagatagctcactgcctagctcgcccaaactgccacataatgggagcactggaagtactcctctcctgcgaaactcccatagtaattccctcataagcgaatgtatggattccgaggctgagacagtcatgcagttgcgtaacgaactacgggataaagaaatgaaattgacagatatcaggctggaggcgctttctagcgcacaccagttggaccagcttagagaggccatgaaccgaatgcaatctgagatcgaaaagttaaaagctgagaacgaccgcctcaagagtgagtcacaaggaagtggatgcagtcgagccccctctcaagtaagcatttctgcttctccacggcagtccatgggcctgagccagcattctttaaacctgactgaatctactagcctggatatgttgctggatgatacgggcgagtgttccgcacggaaggagggaggtagacacgttaagatcgtggtgtctttccaggaagagatgaaatggaaagaggactctcgtccccacctgttccttataggctgcattggcgtcagcggcaaaaccaagtgggatgtgctcgacggggtcgttcgcagactattcaaagaatatataatacatgttgacccagtgtcccagctgggacttaattcagacagtgtcttaggatactccatcggcgaaatcaaaagatcgaacacttccgagacccccgagttgcttccatgcggctatctggtgggcgaaaataccacaatctccgtgaccgtcaaaggtctggccgagaatagcctggacagccttgtcttcgagagcttaatccctaagccaattctccagaggtacgtgtctctgcttatcgagcatcgtaggatcattttgtctggcccctctggcaccggaaaaacctacttggcgaatcgccttagtgagtatattgttcttagggaggggagggaactgactgacggcgtgatcgcaacgttcaacgtcgaccacaaaagctccaaagaactgcggcaatatcttagtaatctggcagatcagtgcaatagcgagaataacgcggtggatatgccgctggtgatcattctggataacctccatcacgtatcctctctgggtgaaatttttaacgggctgcttaactgcaagtatcataagtgcccttatattatcggaaccatgaaccaggcgacgtcttcaacgcccaatctgcagcttcaccataactttcgctgggtcctgtgcgctaaccacacagagcctgtaaagggctttctggggcgctttctacggcgcaaattgatggaaacagagatttcagggagagtgcgtaacatggagcttgtgaagatcatcgattggattcccaaagtatggcaccatctcaatcgctttttggaggcacatagctccagcgatgtcacaattggcccgaggttatttctgagctgtccaattgatgttgatggaagtcgagtgtggtttaccgacctctggaactattctattattccatacttgctggaagcagtgagggaaggcttacaactctacggtcgccgcgccccatgggaggatccggctaagtgggttatggatacatatccatgggcggccagtcctcagcagcacgagtggccacccttactgcagcttcggccagaagatgtgggctttgacggatactccatgcctcgagaaggcagcaccagcaagcagatgccaccgagtgacgcagaaggtgaccctctcatgaatatgcttatgcggctgcaagaagcagccaattattcctctccccagtcttacgactctgacagtaatagtaactcccatcacgacgatatcctcgacagttcccttgaatcgaccctttag

SEQ ID NO: 126281 - DNA, 7254 bp, synthetic construct
  misc_feature 1..7254: note = Description of Artificial Sequence: Synthetic coding sequence
  source 1..7254: mol_type = other DNA
atgtctgtgatgctctggcggtgggaacagaataatactactatgaagctgcagatttatacagactgggccaaccattatctggcaaagtctggccataagagactgatcagggatcttcagcaggatgtgaccgacggcgtgctcctagctcagatcatccaggtggtggccaatgagaagatagaagacattaacgggtgtcccaagaacaggtcacaaatgattgagaacatagacgcttgcctgaattttctggctgccaaagggatcaacatccagggcctgtcggcagaggagatccgcaatgggaacctcaaggcaatcctggggctctttttctcgctgtcccgctacaagcaacaacagcagcaacctcaaaagcaacacctttcatctcctcttccaccggccgttagccaggtcgccggagccccatcccagtgtcaggcaggcacgccacaacaacaggtgcccgtgacacctcaggccccttgtcagccccaccaaccggcaccccatcaacagtctaaagcacaggcggagatgcagtctagcgcctcttcaaaagactcttcacaaagcaaaataattaggtttactctcggacaaaagaaaatttctcgactacccggccctactgcaagggtttctgccgccggatcagaagccaagacccggggaggctccacaaccgccaacaatcgcagatcacaatccttcaacaactacgacaaaagtaagcctgtaacctctccaccgccacctccctccagccacgaaaaggaaccacttgcttcgtccgctagctcccaccctggtatgtcggacaacgcacccgccagcctcgagagcggtagtagcagcactcccacaaactgttccacgagttctgccatacctcagcctggagcagcaaccaaaccttggcgctctaagtctttatcagtgaagcactctgcaacggtttctatgctgagtgtgaagccccccggccctgaggctccccggccgacccctgaggccatgaagcccgcccctaataaccagaagagtatgctggagaaactgaaactgttcaactcgaagggcggttcaaaggcaggagaaggacctggttcgcgtgatactagctgtgaaagactggagaccctcccatcgttcgaagagtctgaagagcttgaggctgctagcaggatgttgactacggtaggtcccgccagtagcagccccaaaattgctctaaaggggatagctcagaggacattctcccgcgcacttacgaataagaagagttcattgaagggaaacgaaaaagagaaggaaaaacaacagagggaaaaggacaaggagaaaagcaaagacctcgccaagcgcgctagcgtaacggagaggctcgatctaaaggaagagcctaaggaggatccctccggcgctgcagtaccggagatgccgaaaaagagttctaaaatagccagcttcatccccaaaggtggaaaactgaatagcgctaagaaggagccgatggctccgtcacactccggcattcctaagccaggtatgaaatccatgccagggaaatctcccagtgcgccagccccaagcaaggagggcgagcggtctaggtctggcaaactgtcatccgggctcccccagcagaagccacaactcgacgggagacactcctcctcctcatcaagcctagcatcctctgagggcaagggcccgggcggcaccaccctgaaccatagcatcagcagtcagaccgtgtccggatcagtgggcacaacgcaaacaactggtagcaataccgtgagtgtgcaactgccacagccccagcaacagtataaccaccccaacactgcaacagtggcccccttcctctatagatcccagactgacacagaggggaatgttactgctgagtcatcctccactggagtgtccgtggagcccagtcacttcactaaaacaggacagccagcactggaagaacttactggagaagatcccgaagcccggaggctcaggacagtcaagaatattgcagatctcaggcagaacctcgaggaaaccatgtcctcgctgaggggcacgcaagtcacccactctacgctggaaacaacgttcgacacaaacgttacaacagaaatgtcagggcgatctatcctctcgttaaccggtcggcctacacccttgtcctggcgattaggccagagtagccctaggctgcaggccggtgacgctcccagcatggggaacggctatccgcctcgagccaatgcttcacgatttatcaacaccgaatctggcagatatgtgtactcagcccctctccgcaggcaattggctagccggggttctagcgtgtgccacgtcgacgtcagcgacaaggcgggcgacgagatggacttggaaggtatctcaatggatgcgcccggatatatgtcggatggagatgtgctgtccaagaatatcaggaccgacgatatcacgagcgggtacatgacagacggaggactggggctatatacgcggcgccttaatagattgccggatgggatggcagtggtgagagaaacgctccagaggaacacatctctgggactgggcgacgcagactcttgggacgattccagctcagtatccagcggaatctccgacacaattgacaatttatccacagacgacattaacaccagttcatcaatctctagctacgctaatacaccggcctcttcgcgaaaaaatctggatgtgcagacagacgcagaaaagcatagtcaagttgagcggaactccttgtggtcgggggatgacgtaaagaagtctgacggcggaagtgactctggcatcaagatggaacccggaagtaagtggagacgaaacccaagcgatgtgtctgatgaatctgataagagtactagcggtaaaaagaatcccgttatttcccagacgggttcctggcggcgggggatgacagctcaggtgggcatcacaatgccccggaccaagcctagcgctcccgccggagcacttaagacacccggcacaggaaagacagatgacgccaaggttagcgagaaggggcgcttgtcccctaaagcctctcaggtgaagcggtctccatccgatgctgggcgatcctccggtgacgagagcaagaagcccctaccgtccagtagcaggacccccactgccaacgcgaattccttcggcttcaaaaagcaaagcggctcggccgctggcctcgccatgatcaccgcgagcggtgtgactgtaacatctagatctgcgacgctgggaaaaatccctaaatcctccgcccttgtgtcccggagcgcaggacgtaaaagctcaatggatggggcacagaatcaggatgatgggtatcttgctctgtctagcaggacaaatctgcagtaccgcagccttcccagacctagtaaaagcaacagcaggaatggagcgggaaacagatctagtacatcgtccatagattcaaacatatcaagcaagagtgctggactacctgtaccaaagctgagggagccatctaagacagcactggggtctagcttgcctgggctggtcaaccaaacagacaaagaaaaaggaatttccagcgacaatgagtcggtcgcatcatgcaattctgtaaaggtcaaccccgccgcccaaccagtgagctctccagcccaaacgagcttacagccaggggcgaagtaccccgacgttgcttccccaacgctgcggcggctgttcggaggtaagcccacgaagcaggtccctatcgcaaccgcagagaatatgaaaaactcagtcgtcatctcgaacccacacgcaaccatgacacaacagggaaatctggattctccctcagggtctggagttttgtcatctggatccagctcacccctctattctaaaaatgtcgaccttaatcagtcgcctctcgcatcatcacctagctctgcccactctgccccgagcaattcactcacctgggggactaacgcctcaagcagttcagccgtttccaaagatgggcttgggtttcaaagcgtgtccagccttcataccagttgtgagtcaattgacataagtctgtcatctggcggcgtcccttcccataactcctccactggcttaattgccagcagcaaggatgacagtctgactcctttcgtcaggacaaatagtgtgaaaacaaccctgtccgagtcacccctgagcagtcctgcagcctcacccaagttctgccggtccacgctgcctcgaaagcaggactccgatccccatctcgaccgcaatacactgccaaaaaagggattgcgctacacaccaacctcgcagctgaggacccaagaggatgccaaagaatggctgagaagtcattcagcgggggggctccaggacacagccgcaaatagccctttttcaagtgggagttccgtcactagcccctctgggacaaggtttaattttagccagctcgcctcccccactacggtgacacagatgagcctttctaacccaacaatgcttcggacacatagcttatctaatgctgacgggcagtacgacccgtacaccgacagccggtttagaaattcttccatgagcttagacgagaaaagccgcacgatgtcccgatccggatccttccgggacggatttgaagaggagtcctgggagaaatcctccgtggacaacttcgtgtctcgcctgcactcctcactgcacttctctctgcctctgttccaccatgcaagatacgaattggtacatgggagttcactctcactggtgtcaagcacttctagtgtgtatagcacgccagaggagaaatgtcagtctgaaattcgcaagctgcgaagagagttagacgcaagccaggaaaaggtttctgccctgacaactcagcttaccgccaatgcccacctcgtagcagcatttgagcagtccttaggcaacatgactatcagactccagagtcttaccatgaccgccgaacagaaggactctgagctgaacgaacttaggaaaaccatcgagttattgaagaaacagaatgctgctgctcaagctgctatcaatggcgtaattaatacacctgagcttaattgtaagggaaacgggaccgcccagtccgctgacctgcgtatccgcaggcaacattcctccgattccgtgtcctccataaactcggcaacatcacacagcagcgtaggctctaacattgagtctgactctaagaagaaaaaacgcaaaaactgggtgaacgagttacggtcctcatttaagcaagcgtttggaaaaaagaaatccccaaaaagcgcttcatcccactccgacattgaagaaatgacggattcctccctgccatcaagccctaagcttcctcacaatggtagtacaggctctactcctctgctacgcaatagccactccaacagcctgatatccgagtgcatggacagtgaagccgagaccgttatgcagttgaggaacgaactgcgcgacaaggagatgaagctgactgatatcaggctggaagcactatcctccgcccaccagctggatcaactcagggaggcaatgaacagaatgcagagtgagatcgaaaagctgaaagcggaaaatgaccggctcaagtccgagagccaagggtccggctgcagtagagcccccagccaggtttccattagcgcttcgccacgacagagcatggggctgtcacaacattcattaaacctgacggagtctaccagcctggatatgctgctcgacgataccggagaatgctcggcccggaaagaaggcgggcggcatgtcaaaatagtcgtcagcttccaggaagagatgaagtggaaagaggattcccgcccacacctattccttatcggatgtataggagtctccggcaagaccaagtgggatgtactcgacggggtggtgcggcgactttttaaagagtatattatccacgtggatcccgtgtctcaactgggactgaactcagattctgtacttggctattcaattggagagataaagaggtccaatacctccgaaacaccagagctccttccctgtgggtatctcgtgggtgaaaatactacaattagtgttacagtgaagggcctggcagaaaattccctcgattccctggtcttcgagtctctgattcccaagcccattcttcagagatacgtgagtctgctcattgagcacagaaggatcattctgagtggcccctcagggactggaaaaacctacctggctaaccggcttagcgaatatatcgtcctacgggaaggacgggagcttacagacggggtcatagctaccttcaacgtggaccacaagtccagcaaagaacttaggcagtacctgtcaaacctagctgatcagtgcaactcagaaaacaatgccgtcgatatgcctttagtgataatcttagataatctacatcatgtgtcatcactcggcgaaatttttaatgggttactcaactgcaagtaccataagtgtccatacatcattggcacaatgaaccaagccaccagtagcacccctaacctgcagttgcatcataactttcgttgggtcctttgcgcgaaccacactgagcctgtgaaagggtttctggggaggttcctgaggaggaagctgatggagaccgaaattagcggccgggtgagaaacatggagcttgtcaaaataattgactggatcccaaaggtatggcaccatctcaatcgtttcctagaggcccactccagcagtgacgtcacaatcggaccacggctgttcctgtcctgcccgattgacgtggacgggagcagagtctggtttacagacctgtggaattatagcataatcccatatttattggaagcagtacgcgaagggctgcagctttacggtagacgggccccttgggaagatccagctaagtgggtgatggacacctacccctgggcagcctctcctcagcagcacgaatggcctccacttctccagctcaggccagaggatgtgggctttgatggctactccatgccccgggaggggtccacttcaaagcagatgcctccctccgatgcagaaggagatcctctgatgaacatgctgatgaggctgcaggaggcagcaaactactcatctccacaatcatatgatagtgattctaactcgaacagtcatcacgacgatatcctagactcttctttggagagcaccttgtag

SEQ ID NO: 126282 - DNA, 4482 bp, synthetic construct
  misc_feature 1..4482: note = Description of Artificial Sequence: Synthetic coding sequence
  source 1..4482: mol_type = other DNA
atgctgtggccacggaacctgacaagctgggatgactccagcagtgtttcatccggcatctcagacacgatcgataacctgtctactgatgacattaacacctcgagcagcatttcatcttatgccaacacgccggcctcttccagaaaaaacctggacgtgcagactgatgctgagaagcatagccaggtggagcgtaactctctgtggagcggagatgacgtgaagaagagcgacggcgggtccgactcagggatcaagatggagcctggatccaagtggaggaggaatcccagcgacgtcagtgatgagtctgacaagtcaacctcggggaagaagaacccagtgattagccagaccggtagttggaggcgcggcatgacagcacaggtgggaataaccatgcctcggaccaagcccagcgcccccgccggtgcccttaaaacacccgggaccggcaagaccgacgatgctaaggtgtccgaaaaaggccgcctgagcccgaaggctagccaggtgaagcggtccccaagcgacgcgggaaggagctcaggagatgagtccaagaaacccctgccatcttcatctagaacacccacggcgaacgccaacagcttcggctttaaaaaacagtcaggatctgccgctggcctggcaatgattactgcctccggggtcactgtgacgtcccggtcggccaccctgggcaagattcctaaatcttcggctcttgtgtccagatcagccggccgcaagtcgagtatggacggcgcgcagaaccaggacgacggctacctggccctctcctctcgaaccaacctgcagtatagatccctgcctcgaccctctaagtccaatagcaggaatggcgccggaaatcggagttccacaagctccattgactctaacatttcctctaagagcgccggactgcctgtgccaaaactgcgggaaccgtccaagactgctctgggctctagcctacccggcctggtgaaccaaacggataaagagaagggtatttcttccgacaatgagagcgtcgcaagctgcaattctgtcaaggttaacccagctgctcagccagtgtcctctccggcccaaacaagcctgcaacccggagcgaaatacccagacgtcgcctcaccaactctgcgccgcctcttcggagggaaacctaccaaacaggtgcctatagctactgccgaaaacatgaagaacagcgtggtgataagcaatccgcatgcaaccatgacccagcagggtaatctggacagtccttcaggaagtggcgtcttgtcctctgggagctcaagcccactatattcaaaaaatgtcgacttgaaccaatcccccctggcctcttccccctcttctgcccactcggccccatcgaactctctcacgtggggtactaatgcaagctcttcgtcggccgtctcaaaagacggcttgggtttccagagtgtgtcgtccctccacacgtcctgtgaatccatagacataagtctgagcagcggaggcgtacccagtcacaactcatccaccggactgattgcttctagcaaggatgacagcctcacacctttcgtacggactaactcagtgaagacaaccctgagtgagtctgacccacatctcgaccggaacaccctgcccaagaaggggctgcgctacacacccaccagccagttacgcacacaggaggacgccaaagaatggctgaggagccacagcgcaggtggcctccaggacaccgctgcaaactccccttttagtagcggctcctccgtaacgtcaccatccgggactagattcaatttttctcagctggcatcccccaccactgtcacccaaatgagcctgtcaaaccctactatgctgcgcacacacagcctttcaaacgccgacggccaatacgacccctatacagactctcgcttccgaaattcttcaatgagtttggacgagaagtctcggaccatgtctcgctcaggatccttcagagacggattcgaagaagtccacggatcttctctgtcactggtgtcttcaacttccagtgtctacagcactcctgaggaaaaatgccagtccgagatcagaaagctgaggagagagctggatgcctcccaagagaaagtgtctgcccttactacacaattgacagcaaatgctcatctggtagcggcctttgagcagtctttaggaaatatgaccatacggctgcagagcctcacaatgaccgctgagcagaaggacagtgaacttaacgaactgaggaagactatagaactactcaagaagcagaatgctgccgctcaggcggccattaacggggtcataaacacacctgagctcaattgcaaaggtaacggcacagcacaaagcgccgatctccgaatcaggaggcagcactcttcagactccgtgagttctattaactccgctaccagccatagttctgtcggcagcaacatcgaatctgactctaagaagaaaaagcgcaagaattggcttagatctagtttcaagcaggcgttcggtaagaagaagagtcctaaaagtgcttcaagccattccgacattgaggaaatgacggatagttccctcccaagcagtccaaagctcccacacaacggcagtactggcagtaccccattactacgaaattcccattcaaattctttgatctcagaatgcatggacagcgaggccgagacggtcatgcagctgagaaatgagctgagggataaggaaatgaagctcacggacatcaggctggaggccctgagttcagctcaccagctggatcagctcagggaggccatgaacaggatgcagtccgaaattgagaagctgaaggctgaaaatgaccggctgaagtctgagtctcagggcagcggctgtagtcgggctccttcacaagtgagtatatccgctagtcctagacagagcatggggctgtcacagcacagcctgaacctaactgagagcacttccttggacatgcttttggacgacaccggtgaatgtagcgctaggaaggaggggggcaggcacgtcaaaattgtggtttctttccaggaagagatgaagtggaaagaggatagcagaccccatcttttcctgattggatgcattggggttagtggaaagactaagtgggacgtcctggacggagtggtaagaagattatttaaggagtacataatacatgtggatccagtgtcccagctaggactaaattctgactcggtgctgggctacagcattggggagatcaagcgttccaatacttcggagacacccgagctgttgccgtgcggttacctggtgggcgagaataccactatcagcgtcaccgttaagggcctggccgaaaattcactggacagcctggtgtttgaaagcctgattcctaaaccgatcctccagagatacgtgtctctgctgattgagcatcggcgcattattttaagcggcccgagcggcactggtaaaacctacctggctaaccggctctcagagtatatcgttcttagagagggccgagaactgaccgacggggtcatagcaacattcaacgtagaccataaatcatcaaaggaactgcggcagtatctctcaaaccttgcagaccagtgcaattccgaaaacaacgctgtggatatgcccttggtgattatcctagataatcttcatcacgtaagttctctgggagagatctttaatgggctgctgaactgtaagtatcataaatgtccctacatcatcggcactatgaaccaagcaacttcatccacccccaatctgcaactgcatcataactttcgctgggtcctgtgcgcaaaccatacggagccagtgaagggatttcttggccgcttcctgcgccgtaagcttatggagactgaaatttcaggcagggtgcgcaacatggagttggtgaaaataattgactggatccccaaagtgtggcatcacctgaatcgatttctggaggcccactcctccagcgatgtgacaattggccccaggctctttttaagctgccctatcgatgtggatggatcacgagtgtggtttacagacctgtggaactattcaatcattccgtacctgctagaggccgttagagaaggactccagttatatgggcgtcgcgctccttgggaggatcctgcaaagtgggttatggatacgtatccttgggctgctagccctcagcaacacgagtggcctcctctcttacagcttaggcccgaagacgtaggctttgacggctattcaatgccacgcgagggtagcacctcaaaacagatgcctcccagcgacgccgagggtgatccattgatgaacatgctgatgcggcttcaagaagccgccaactattcctctccccagtcttacgactctgattctaacagcaatagccatcacgatgatatactagactcctcattggaaagtaccttgtag

SEQ ID NO: 126283 - DNA, 2451 bp, synthetic construct
  misc_feature 1..2451: note = Description of Artificial Sequence: Synthetic coding sequence
  source 1..2451: mol_type = other DNA
atgctctggccacggaatctgacatcctgggacgacagttccagtgtatcttccggcatcagtgataccattgataacctgagcactgatgatatcaatactagttcttctatctcaagctacgcaaatacgccagcttcatccaggaaaaatctggacgtgcagacagatgcagagaagcatagtcaagtggagagaaactccttatggagcggagacgatgttaagaaaagtgacggcggcagcgattctgggataaagatggagccaggatccaagtggcgtcggaaccccagcgacgtaagtgatgagagcgataaatctacaagcggaaaaaaaaaccccgtgatctctcagacaggttcctggcgtcggggtatgaccgcccaagtcggaatcacaatgccccgcaccaagccttctgccccagccggtgcgctgaaaactccaggaaccggtaagactgacgacgctaaagtatccgagaagggcaggttgtcacctaaggcttctcaggttaagcggtccccaagtgatgccggcaggagcagcggtgatgaaagcaagaagccgctgccatcctcaagccggactcccacagccaatgctaattcattcggcttcaaaaaacagagcggctcggcagccgggctggccatgatcaccgcctccggggtgacagtaacgagccgtagtgcaacccttggtaagatccccaagagttccgcactggtctctcgcagtgccgggcgcaagtcaagtatggacggagcgcagaaccaggacgacggctatctcgcgctctcttccagaaccaacctgcagtatcgcagcttgcctcggccctccaagtctaattctcgaaatggggccgggaacaggagcagcacgtcttcaattgatagcaatatctcatcaaagtccgcaggcctcccggtacccaagctgcgggaaccctccaaaacagctctcggatcgagtctgcctggcttggtaaatcagacagacaaagaaaaagggatttcgtccgataatgagtcggtggctagctgcaactcagtgaaggttaatcccgccgcacagccagtgtccagtcctgcccagacctccttacagcccggtgccaagtacccagatgtggccagccccactcttcgcaggctgtttgggggaaagcccaccaaacaggtgccaatagccaccgctgagaacatgaaaaacagcgtggtaatcagcaatcctcacgctactatgacccagcagggtaatttggattcgcccagcggtagcggtgtgctatcttccggcagctcctcacccttgtacagtaagaatgttgacctgaatcagagccctctggcctccagcccttcctctgcacattccgccccgtctaattccttaacctggggaacgaatgcctcttcatctagtgccgtctccaaggacggactgggatttcagtctgtgtcctccctgcatacttcatgtgagagtatcgatatctcattatcttccgggggagtgccctcacataacagcagcaccggcttgatcgcttcttcgaaagatgatagtctgacaccttttgtgagaacaaatagtgttaagacgaccttgagtgaaaggtacacaccgacaagccaactgcggacacaggaagatgccaaggaatggctcaggagtcactcagcgggagggctgcaggacacagcggctaactctccgttcagcagcggctcttcagtcacctccccctctggaactaggtttaatttcagtcagttggcgagtcccacaaccgtgacacagatgtccctcagcaaccctacaatgttgagaacccattctctttccaacgctgacgggcagtacgacccttatactgattctcggttcaggaactcaagcatgtcactagatgaaaaaagccgaaccatgtcacgatccggttcattcagagatgggttcgaagaggttcacggttcgtcactctcactggtttcaagtacctcctcggtgtactctactccggaggagaaatgccagtcagaaatcaggaaacttcgtcgggaactggacgcttcgcaggaaaaagtctctgcccttactacccaactaaccgctaacgctcatctggtagctgcatttgagcagtcgctgggaaacatgactatccgactgcagtccctaacaatgaccgcggaacagaaggattctgaactcaatgaactgagaaagaccatcgagttgctcaagaagcaaaatgcggctgcccaagccgctattaatggcgtcatcaacacccccgaactcaactgcaagggtaatggtaccgcacagtctgcagatctccgaatacgacgccagcactcatctgatagcgtcagtagtattaactccgccacatcacattcatccgtggggtctaatatcgagagcgattcgtag

SEQ ID NO: 126284 - DNA, 7260 bp, synthetic construct
  misc_feature 1..7260: note = Description of Artificial Sequence: Synthetic coding sequence
  source 1..7260: mol_type = other DNA
atggcaattgacctgtattgcggactagcctgtttgtggggcatccatgagcctagacaaatatacaccgactgggctaatcactacctggctaaatcaggccacaagcgactaatccgggatttacagcaggacgtaaccgatggagtactgctagcgcagatcattcaggtggtggcaaatgaaaagattgaggacataaacggctgccccaagaacaggagccagatgatagagaatattgacgcatgcttgaattttcttgccgccaagggtatcaatattcagggtctctccgctgaggagatccggaatggcaacctcaaagcgatcctcgggctctttttttccctgagccgatataagcagcagcagcagcaaccgcaaaaacaacacttgtcatccccccttcccccggcggtgagtcaagtcgcgggagcaccgagtcagtgtcaagcagggacacctcaacagcaagttcccgtgacaccacaggcaccgtgtcagcctcatcaaccagctccacatcagcagtccaaggctcaggccgaaatgcagagctctgcttcttccaaagacagtagccagtccaagattataagattcactctggggcagaagaaaatttcacggttaccaggccctacggctcgggtcagtgcagccggatccgaagcaaaaaccaggggtggctcgacaaccgcaaataatagacgctcgcaaagtttcaacaactacgacaagagcaagccagtgacctctcccccgccacccccttcatctcatgagaaagaacctctcgcttctagtgcctccagccaccctggaatgagtgataatgcaccagcctccctagagagcggaagcagctcgactcccactaattgtagtacctctagtgcgattcctcaacctggcgcagcaaccaaaccgtggaggtcaaaatccttgtctgtgaagcactccgctacagtctctatgctctccgtaaaacctccaggccccgaggcccccagaccaacacccgaagcgatgaaaccagctccgaacaatcaaaaaagtatgctggagaaacttaaactgtttaattctaaaggaggcagtaaggccggtgagggaccaggatcccgcgatactagctgtgaacgcctcgagacactgccctcatttgaagagtcagaagagctggaagctgcgagtcgaatgttaacaacagtgggcccagcttcctcctctcctaaaattgctctaaaaggcatcgcccagcggaccttcagtcgggctctgacaaataaaaaatcttctctgaaaggcaacgaaaaagaaaaggaaaaacagcagagagagaaggataaggagaagagtaaggacctagctaaacgtgcctccgtgacagaaagactcgacctgaaagaagagcccaaggaagatccaagcggagccgcagtccccgagatgccaaagaagtctagtaagatcgctagctttatccctaaaggcggtaagttaaacagtgccaagaaagagcccatggcccccagccacagcggaatcccaaagcccggtatgaagtccatgcccggaaagtcgccttccgctcccgccccatctaaggagggagaacgctcccgtagtgggaaactgtcaagcggtttaccccagcagaagcctcaacttgacggacggcactccagttccagttcctctctggcaagtagtgaagggaagggacccggcggcaccaccctaaatcattctatctcctcccagaccgtttcaggctctgttggaaccacacagaccaccgggtccaatacagtatctgtgcagctgccacagcctcagcaacagtataatcacccaaatacggctactgtggccccctttctgtacagaagccagacggataccgaaggaaatgtgaccgcagagtccagctctacaggagtgtctgtggagccatcccatttcactaagactggtcagcccgccctcgaagaactcaccggcgaagatcccgaggctcgacggctgcgaacagtaaaaaacatagcagacctgcgccagaaccttgaagaaacgatgtcttctctgaggggcactcaggtgacccattctactctggagactacattcgacaccaatgtcactaccgaaatgtcgggtagaagcattctgtctctgaccggaaggcccacccccctgtcctggagacttggccagtccagtccacggctgcaggcaggcgatgctccatccatgggaaatggctacccaccccgcgcgaatgctagccggtttattaacacagaaagtggcaggtatgtctatagcgctcctctgaggcgccagttagcatcccgcggctctagtgtctgccacgttgacgtctcggataaagcaggggatgagatggacctcgagggtatctccatggatgcacctggatatatgagcgatggcgatgttctcagcaagaatatccgcactgatgacatcacaagtgggtatatgactgacggcggtctggggctgtatacccggaggttgaaccgcctgccggatggcatggcagtagtgcgtgagactctgcaacggaacacctcactgggcctcggcgatgcagacagctgggacgattcttccagcgtaagctccggcatcagcgatacaattgataacctcagcaccgacgacataaatacttctagttcaattagctcatacgccaacacccccgcctcaagccgaaagaaccttgatgtgcagaccgacgccgagaagcatagccaagttgagcgaaatagtttatggagtggggacgatgtgaagaaatccgacggcggttccgactccggaataaaaatggaacctggctcaaagtggcgccggaaccccagcgatgtgagtgatgaaagcgacaagtccacttctggcaagaagaaccctgtaatctcccagaccggttcgtggaggcgggggatgactgcgcaggttggtataaccatgcctagaaccaaaccatcagcccccgcaggcgctcttaagacacctgggacgggaaagaccgatgatgccaaggtatcagaaaaaggccgccttagtcccaaggccagccaggtaaagcgaagcccaagtgacgccggccgatcaagtggtgacgaatccaagaagcctctcccctcatcctcccgaacacctacagccaatgcaaacagcttcggcttcaagaaacagagcggcagtgccgccggcctggctatgattaccgctagcggcgtgacggtgaccagtcgaagtgccacattaggaaagattcccaagagcagtgctcttgtaagtcggagcgccgggcgaaagtcaagcatggacggcgcccaaaatcaagacgacggctacctcgctctgtcttcacggactaatcttcagtatcggtccctaccccggccatcaaaatccaattctcggaatggcgcaggcaacagaagttccacctcctctatcgacagcaacatcagttctaagagcgcaggtctgccggtacctaaactgcgagaaccgagtaaaaccgccttgggtagtagtctgcctgggttggtaaatcaaaccgataaggaaaagggaatcagttctgacaatgagtccgtagcgtcatgcaactccgtcaaagtcaatccagcagcccaaccggttagcagcccggctcaaacaagtctccagcctggggccaaatacccggacgtggctagcccaacattgcggcgactgtttggcggcaagccgaccaaacaggtgccgatcgctactgcagaaaacatgaagaatagcgtcgtaatctccaatcctcatgcgactatgacacaacaaggcaatctggatagtccttccggatccggcgtgttgagcagcggcagcagctctcctctgtattcaaagaatgttgacctgaaccaaagtcctctggctagtagcccctctagcgctcactcggccccctccaactctctgacatggggaaccaacgcatcgtcttcatcagccgtgtcaaaagatggactcggattccagtccgtttcatcactgcacacatcttgcgaatcaatagatatttcactatccagtggcggggtcccctcacacaattctagcacggggctcattgcctcctccaaggacgactctttgactcctttcgtgcgcaccaattccgtgaagacgacgctgtctgaatctcccctcagttcacctgctgcctcgcccaagttttgtagaagcacactccctagaaaacaggacagcgatcctcatctggaccggaataccctaccaaaaaaaggcttgagatacactccgacctcccagcttcgcacgcaggaggacgcaaaggaatggctgcgaagccactccgccggcggactccaggatacagcggcaaacagccccttttcatccggaagttcagtgacctccccgagtgggacacggttcaatttctcacagcttgcaagcccgaccaccgtaacccagatgtctctgagcaacccaacgatgttacgcacgcattcactcagcaatgctgatggacagtatgacccgtatacggactccaggtttcgcaactcatctatgtccctggatgagaaaagccgaacaatgtcaaggagtggctcattcagggatggttttgaggaggaatcctgggagaaatcttccgtagacaattttgtgagccgactgcacagttcactgcatttcagccttccactgtttcatcacgctcgctacgaattagtacacggctccagtctgagcctggtttcctcaacttcgtcagtgtactctactccagaagagaaatgccaaagcgaaatcaggaagcttaggcgggaacttgatgcatcacaagagaaagtgtctgccctgacaacacaactgacagccaacgcccacctggtggccgccttcgagcagtctctggggaacatgactataagactacagagtctcacgatgactgcagagcaaaaagattccgagctaaacgagctcagaaaaaccattgaacttctgaagaagcaaaatgcagcagcccaggcagccatcaatggagtgattaacacgcccgagttaaattgcaaagggaatggtacagcccagagcgcagacctgcgaataagaagacaacactcaagcgattccgtaagctcaatcaatagcgcaacgtcacactccagcgtagggagcaatattgaatccgacagtaagaagaagaaaagaaaaaattgggtgaacgaactccggtccagttttaagcaggcgttcggaaagaagaaatcaccaaagtccgctagcagtcattccgatatagaggagatgaccgactcgtccctgccttcctcacccaaactgccccataacggctctacaggttccacaccgcttctacgtaacagtcattcaaattcgttaatctcagaatgcatggattctgaggctgaaacagtgatgcagcttcgcaacgagttgcgggacaaagaaatgaaacttacggatataagactggaagctcttagcagcgcccaccaattggaccaactgcgcgaggccatgaataggatgcagagcgagattgaaaagttgaaggcagaaaacgacagattgaaaagcgagtctcaaggttccggttgctcccgagctcctagccaagtcagtatttccgcttctccgaggcagtcgatggggctctcgcagcacagtctcaatctcactgagtccaccagcctggatatgctgttggatgataccggggagtgctctgcgcgcaaggaaggggggcgtcacgtaaaaattgtcgtgagcttccaggaggagatgaagtggaaagaggatagtcgccctcacctttttttgataggctgcatcggggttagcggtaaaacaaagtgggatgttctggacggggtcgttaggcggctcttcaaggaatatattattcatgtggacccagtgtcccagctggggctgaactctgactcagtgctcggctactccataggagaaatcaaaaggtcaaatacgagcgagaccccggagttgcttccctgcggctatctcgtcggcgagaacacgaccatcagcgtgaccgtgaaagggctggcagaaaattcactggacagcttggtttttgaatccctgatccctaagcccatcttgcagaggtacgtcagtctccttatagaacataggaggatcatcctttctggcccatccgggacggggaagacttacctcgccaataggctttctgaatatatcgtgttgagagaaggtcgggagctaacagacggcgttattgctactttcaacgtggatcacaagagtagtaaagaacttagacagtatctcagcaaccttgcagaccagtgtaatagcgagaataatgccgtggacatgcccctggtaattatcctcgacaaccttcaccacgtttcatcactcggtgagatcttcaatggtttgcttaattgcaaataccacaagtgtccatacatcattggcaccatgaaccaggctacttcctccacgcccaatctacagctgcatcataatttccgttgggtcctctgcgctaatcacactgagcctgtaaagggttttctgggtcgttttctgcgacgcaagctgatggagaccgaaattagcggtagagttcgcaatatggagcttgttaagatcatagattggatccctaaagtttggcaccatctcaaccggttcctcgaggctcattcctcttcggacgttacaatcggacctaggctgttcctcagttgccccattgatgtagacggaagtagggtctggttcacagatttatggaactacagcattatcccttacctactcgaagcggtacgcgaagggctacagttgtacggtcggagggccccgtgggaggaccctgccaagtgggtcatggatacatatccttgggccgcaagtccacagcaacacgagtggcctcctttactccagcttaggccagaagatgtcggctttgacggctatagtatgccacgcgaagggagcacgtcaaagcaaatgcccccttctgacgctgaaggggatccccttatgaacatgctcatgaggcttcaggaggcagcgaactattcttcccctcagagctatgactctgattctaattccaatagccaccacgacgacattctggattctagcctcgaatccaccctttag

SEQ ID NO: 126285 - DNA, 7098 bp, synthetic construct
  misc_feature 1..7098: note = Description of Artificial Sequence: Synthetic coding sequence
  source 1..7098: mol_type = other DNA
atggagagcgtgagtgaaagtagccagcagcagaagcgaaaaccggtgattcacggcctggaggatcaaaagcggatatataccgactgggctaatcactatctagccaagtcgggacacaagagattgattcgtgacctacaacaggatgtgacagatggcgtcctcttagcgcagatcattcaagtcgtcgccaatgagaaaattgaggatataaatggctgccccaaaaaccgaagccaaatgattgaaaacatcgacgcttgtctcaactttctggcagcaaagggaataaacatacaagggcttagcgctgaagaaattaggaacggcaaccttaaagccattctggggttattcttctcactctcaaggtacaaacagcagcagcagcagcctcagaagcagcatctaagtagcccactcccaccagccgtatcccaggtggcaggcgctccatctcaatgccaggcagggaccccccagcagcaggttcccgttaccccacaagccccttgtcagcctcaccagcctgctcctcatcagcagtctaaagcccaggccgaaatgcagagtcggctgccaggccctacggcccgggttagcgccgctgggtcagaggccaagacacgaggcggctctacaaccgccaacaacagacgttcccagagcttcaacaactacgacaaatcaaagccggtgacaagccctcctccccccccttctagccacgaaaaggagcctctggcatcttccgccagttctcatccgggaatgtcagataatgcccctgctagcctggagtctggctcatccagcacacccacaaattgtagcacctccagcgctatcccacagcctggagcagccaccaaaccgtggcgctctaagtccttaagtgtaaagcattctgcgaccgtcagtatgctttctgttaaaccccctggccctgaggcaccaagaccgacgccagaggcgatgaaacccgccccgaataaccaaaagtccatgctggaaaagctcaagctttttaattcgaagggtggctccaaggccggagaagggcccggcagcagggatacatcctgtgagcgtctggagaccctgccttcgtttgaagaaagcgaggagcttgaggccgcttcccggatgcttactactgtgggacctgccagctcaagtcctaaaattgcccttaaagggatagcacagagaaccttcagccgcgctcttaccaacaagaagagcagcctcaaaggaaacgagaaggaaaaagagaagcaacaacgggaaaaggacaaagaaaagagcaaggacctcgcaaagcgcgcctctgtgacagagagattggatcttaaggaggagcccaaggaagacccatccggagccgcagtgccagagatgccaaagaaatcaagcaaaattgctagcttcattcccaaaggtggcaagttgaatagcgccaagaaagaaccaatggcgccctctcatagtggaatccccaagccaggaatgaaatccatgcctgggaaatcacccagcgcccccgccccgtccaaagaaggtgagagaagtaggtcgggcaagttatcttctggtctgcctcagcagaaaccacagctggacggacgtcatagtagctcctcgtcatctctggcctccagtgaggggaagggcccaggcgggactaccctcaaccattctattagttctcaaactgtcagcgggtcagttggaaccacccagacaacagggagcaacaccgtcagcgtgcaattaccacagcctcagcagcaatacaatcaccccaatacagcgacagtggccccatttctctatcggtcccagaccgataccgagggaaatgtcaccgccgaaagcagttcaacaggcgtttcggttgagccaagtcacttcacgaaaaccggtcagccagctctggaagaacttacgggagaagaccccgaggcgcggcgtctgcggacagtcaagaatattgcagacctgaggcagaatctggaagaaacaatgagctctcttcggggcacacaggtgacacattcaaccctagagacaacattcgatactaatgtcactacagaaatgtctgggcggtctatactgtccctgaccggccggcccacaccattgtcgtggaggctgggacagagtagccccagactccaggccggggacgccccgtcaatgggaaatggttaccctcctagggcaaatgccagccgattcattaatacggagagcggcaggtatgtgtatagcgctccactgcgccggcagctcgcatcccgaggtagttccgtctgccatgtggatgtttcagataaagccggtgacgaaatggatctggaagggattagtatggacgccccggggtatatgtctgacggagacgtgctctctaaaaacatccggacagacgacataacctccggctatatgacagatgggggcttggggctttacacacggcgcctgaatagactgcccgatggtatggccgtcgtgagagaaaccctgcaaagaaatacatctctagggctaggcgatgctgatagctgggacgattcctcaagcgtctcttccggaattagcgatacaatagacaatctgagtaccgacgacatcaatacctcatctagtattagctcctatgcgaacacccccgctagctcaagaaagaatctggacgtccagacagatgccgaaaagcactcccaggttgagcgtaattccttatggagcggggacgatgtcaagaaatccgacggtgggtctgattccggcatcaaaatggaaccaggatctaagtggaggagaaaccctagcgacgtctccgatgagtctgataagtctacttccggtaagaaaaatcctgtgataagccagaccgggtcatggaggagaggaatgactgcacaagtcggaataacgatgccacgcactaagccaagcgctcctgccggagctttaaagactcctggcaccggaaagactgacgacgccaaggtgtccgaaaaaggaaggctgagtccgaaggcttcccaggtgaagcgatcaccttccgatgccggtagatcatctggggacgaaagcaaaaagcccttgccaagttcttcaaggacccctactgcaaacgccaatagcttcggcttcaaaaagcagagcggcagtgctgctggattagccatgattactgccagtggcgtgacagtgacatctcggtctgccacactgggtaaaatcccaaaaagtagtgcattggtctctaggtcagctggccggaaaagtagcatggacggagcccagaatcaggatgacggatatctggcgctgagctctcgaaccaatctgcagtatcggtcgctgcccaggccctccaaatcaaattcacggaatggggccggtaatcgttcttccacttctagcatagacagcaacatatccagtaagtccgccggtcttcctgtccctaagctgagagaaccaagtaagactgcactggggagcagcctacctgggctggtgaaccagacagacaaggagaagggcattagcagcgacaacgaaagtgtggcaagctgcaattcggtgaaagtcaacccggcagcccagccagtgtcaagcccagcgcaaacttcgctgcagccgggtgccaagtaccccgacgtggcttcacctacccttcgcagactatttggtggaaaacccaccaaacaggtccccatcgctactgcggaaaacatgaaaaactcagtggttatcagcaaccctcatgctaccatgacacaacaaggaaaccttgattctccctctggcagcggagtgttgagtagcgggtcttcttcaccactatattccaagaacgttgatctgaatcagtcccccctagccagctccccctccagtgcacattcagccccctccaattctctcacatggggaactaatgcaagttcaagttctgccgtctctaaggacggcttggggtttcagtccgtgtccagcctacacacctcttgtgagtcaatcgatatctccctatcctctgggggagtgcccagccacaattcttctacgggcttaatcgcctccagcaaagacgacagtctgaccccgtttgttaggacgaattctgttaaaactacgctgagcgagagcccgctttcctctcccgcagccagccccaagttctgccgaagtacactccctcgaaagcaggattctgacccacacttagatcgcaacactcttcctaaaaagggtcttcgctacacacctacttcccagctgcgtacccaagaagatgccaaggaatggttgagaagtcacagcgcaggtggactgcaagatactgccgccaattcccccttctcctctggtagtagcgtgacaagcccaagcggaactcgcttcaactttagtcagcttgcaagccccaccacagtcacacagatgtcactcagcaatccgaccatgctcaggacccacagcctgtcaaatgcagacggtcagtatgatccatataccgactcccgttttcgaaacagcagcatgtctctagacgaaaagtcgcgtactatgtctaggagcggtagctttagagacgggtttgaagaggtgcatggcagcagtctcagcctcgtgtcttccacatccagcgtttactcaacgcccgaggaaaaatgccaaagcgagattcgcaaactcagaagagaactggatgccagccaggagaaagtgtccgcactgacgacacagttaacagcaaatgcacaccttgtggccgctttcgaacagagtttgggaaatatgacaatacgattacaatctctgactatgacagctgaacagaaagacagtgagctgaatgaacttagaaagactatcgaactgttgaagaagcaaaacgcagcagcgcaagccgctatcaatggagttatcaacaccccagagctgaattgcaaaggaaacggaaccgctcagtcggcagatttacggatccgcagacagcattccagcgatagtgtgtcatccattaactccgcaacttcacacagtagtgtaggatctaatatcgagagcgattctaaaaaaaaaaagaggaaaaactggctaagatcctcttttaagcaggcatttggcaagaaaaaatcaccaaagagtgccagctcacacagcgatattgaagagatgactgattcttccttacccagctcccccaagctccctcataatggcagtactgggtctaccccgttactaagaaacagtcatagtaactccttaatcagcgagtgtatggattccgaagctgaaaccgttatgcaactgcgtaacgaactgagggacaaggagatgaaactgaccgacatcaggctggaggcactgtctagtgctcaccagttagatcaactgcgtgaggccatgaacagaatgcagagcgaaatcgaaaagttgaaggcagagaatgaccgcctcaagtcagagtctcaggggtcaggctgttcacgtgcaccttcccaggtctccatcagtgccagcccccgccagtccatgggactgagccagcatagcctgaatctaaccgaatccacaagcctcgacatgttacttgacgatactggtgaatgtagcgccaggaaagagggaggaaggcatgtgaaaatcgtggtgtccttccaggaagagatgaagtggaaagaggacagccgcccacacctgttcctaattgggtgcattggtgtatctggaaaaacaaagtgggacgtattagatggagttgtgcggcgcttgtttaaggaatacattatccatgtggaccccgtgagtcagttgggattaaattcagactctgtcctgggctactctataggagagatcaaacgctcaaacacttccgaaaccccagaactgcttccttgcggttacttggtgggcgaaaacaccactataagtgttaccgtgaaagggcttgcagagaactctttggactccctggtgtttgagtccctgatccctaagcccattctgcagcgctatgtgtcgctgctgattgagcataggcgaatcatcctaagtggtccgagtggaactggtaagacatacctggcaaatcgccttagcgagtacatcgtgttacgggaaggtcgcgaactaactgatggtgtcatagccacatttaacgttgaccacaaaagctcaaaggagttgaggcaatatctctcaaacctagcagatcagtgtaactcggagaacaatgcagttgacatgcctctggtgataatactggataatctacaccatgttagttctctcggcgaaattttcaacgggctgctgaattgtaagtaccacaagtgcccatacatcatcgggacaatgaatcaggcgacgtcaagcacccccaatctacagctgcaccataatttccggtgggtgctgtgtgcaaaccacaccgagcccgtcaaggggtttctgggacgatttcttagacggaaactgatggaaacagaaattagcggccgagtccgcaacatggagctggtcaaaatcatcgattggatccccaaggtgtggcatcaccttaatagattcctggaagctcatagcagctctgacgtgacgattgggccccgactgttcttgtcctgccccattgacgtagatggcagtcgggtgtggttcactgatctgtggaactactcaatcattccctatctgctcgaggctgtgcgcgagggcctgcagttatatggcaggcgggccccttgggaggaccctgcgaagtgggtgatggacacatacccctgggccgctagccctcagcagcatgaatggcctccccttctgcaactgagaccagaagacgtcggcttcgacgggtacagcatgccgcgcgagggtagtacaagcaagcagatgcccccatcagacgcagaaggcgatcccctcatgaatatgttgatgcgcttgcaagaggctgcaaattatagcagccctcaatcatacgacagcgatagtaactctaactcacaccacgatgacatcctggattcgtcactcgagtctacattgtag

SEQ ID NO: 126286 - DNA, 1089 bp, synthetic construct
  misc_feature 1..1089: note = Description of Artificial Sequence: Synthetic coding sequence
  source 1..1089: mol_type = other DNA
atgttttcctcagtcgcacatctggctcgtgccaatccatttaacacgccccacctgcagctggtccatgatggactgggagacctgaggtcaagctctcccggacccacaggacagcctcgtcgccccagaaacctcgccgcggcggccgtcgaagaacagtactcctgcgattacggcagcggaagatttttcattctttgtggacttggcggcatcattagctgtggaactacccacacagctttggtccccctggatctggttaagtgccggatgcaagtggacccacaaaagtataaggggattttcaatggcttctccgtgactctcaaggaggatggcgtccggggactcgccaagggttgggcccctacattcctcgggtattcaatgcagggcctgtgcaagttcggattctatgaagtttttaaggttctgtactcgaacatgcttggagaagagaatacctacctgtggcgaacttctctgtatctcgctgccagtgctagcgcagagttcttcgcagatattgctcttgcaccaatggaggccgctaaagtgaggattcagacacagccagggtatgcaaacacactgcgcgacgctgctccaaagatgtataaagaggaaggtctgaaggccttttataagggcgtggctccactgtggatgcgccagatcccatacacaatgatgaagttcgcctgctttgaaaggactgtggaagccctatacaagttcgtggtgcctaaaccaaggagcgagtgtagcaaacctgagcagcttgtggtgacctttgtggcgggctacatcgccggagtgttttgcgcaatcgtttcacatccagctgattccgtggttagtgttctgaacaaagagaaaggcagcagcgcttcactagtccttaaacgcctggggtttaaaggggtgtggaagggattgttcgcaaggatcataatgatcggaactctcactgcactgcagtggttcatttatgactcagtcaaagtctatttccggttgcccagaccgccaccacccgagatgcctgagagcttaaaaaaaaaacttggtctgacacagtag

SEQ ID NO: 126287 - DNA, 6561 bp, synthetic construct
  misc_feature 1..6561: note = Description of Artificial Sequence: Synthetic coding sequence
  source 1..6561: mol_type = other DNA
atgccagtcctgggagtggcctccaagttgagacagcccgccgttggcagcaaaccagtgcacactgctctccccatccccaacctaggcacaacgggatctcagcactgctccagcagaccactcgaactgaccgaaacggaatcgagtatgctgtcctgccagctggctctaaagagcacctgcgagtttggcgaaaaaaagcccctgcagggaaaagccaaggagaaggaagattctaagatttataccgattgggcaaatcactatctcgccaaatctgggcataagcgcctgatcaaagatctgcagcaggatatagcagacggcgtgcttctcgcagaaattattcagattatcgcaaatgaaaaggtggaagatattaacgggtgtcccaggtcccaatcgcaaatgatcgaaaacgtcgacgtctgtctgagctttctcgccgcccggggcgtcaacgtacaaggccttagcgcagaagagatacgaaatggtaaccttaaagccatcctgggtttattcttctccctcagtaggtataagcagcagcagcaccatcagcaacagtactatcagtcgcttgtggagctgcagcagcgggtgacacacgcgtccccaccctctgaagcatcacaggcaaaaactcaacaggatatgcagtctagcctggcagcgcgttacgccacccagagtaaccactccggcattgccactagccagaagaagcccacacgtctaccaggccccagtcgcgtcccagctgcaggctcttcaagcaaagtgcaaggtgcctcaaacctcaacaggcgctctcagtctttcaatagcatcgacaagaataaacctcccaactatgccaacggcaatgaaaaggactcaagcaaaggcccccagtccagctctggggtcaacggtaacgtgcagcccccgtccaccgcgggtcagcctccagcctctgcaattccttctccctccgcaagcaagccttggaggtccaagagcatgaacgtgaaacatagcgctacaagtacaatgttaactgttaaacagagctctacggccacttcacccacacctagttctgacaggctaaaaccccctgtgtcagaaggagtaaaaaccgcccccagcggtcagaagagcatgctggagaagtttaagctggtcaacgccaggactgctttgagacctccacagccgccctccagcgggccaagtgacggaggtaaagacgacgatgcattcagcgaatccggggagatggaggggttcaacagcggcctgaactcagggggctccacaaacagctcacccaaggtgtccccaaaactggcaccacctaaggccggatcaaaaaatctttccaataagaaatcactcctgcagcccaaggagaaagaggaaaagaacagagacaaaaacaaggtctgtacggagaaaccagtgaaagaagaaaaagaccaagtcactgagatggcaccaaaaaaaacaagcaagattgccagccttataccaaaaggatcaaagacaaccgcagctaagaaagaatctctgatccccagcagctctggcataccaaaacctggaagtaaggtccccaccgttaaacagacaatcagtccgggtagcacagcttctaaagagtctgaaaagtttaggaccactaaggggtcaccctcacagtcgttgtctaagccaattaccatggagaaggcaagcgcctcatcctgccccgcccctctggagggcagagaagctggccaagcatcaccgtcgggatcgtgcacgatgaccgttgcacaatctagcggccagtcaactggaaatggggctgtccaactacctcagcagcagcagcactcgcatccaaataccgccaccgtggctccctttatttacagagctcattctgagaatgaggggacagcccttccctccgctgacagctgcacctcccccaccaagatggacctgagttactctaaaaccgctaagcagtgtttagaggagatatctggagaggatcccgagacccgacgtatgagaactgttaagaatatcgccgacttacgacagaatctggaggagaccatgtcatctttgaggggtacacagattagtcattccaccctggaaacaacatttgatagcaccgtcacgaccgaagttaatgggaggacgatccctaacctaacgtctcgccccacacccatgacctggcgcctcggacaggcctgccctagattgcaggcaggggatgcaccctctctgggggcaggataccctcgatcgggtacctcgcgctttattcacacagatccatcaagattcatgtacaccacccctctgcgccgggccgccgtttctcggctcgggaacatgtcccaaatcgatatgagcgaaaaagcctctagtgatctggacatgtcctccgaggtggatgtggggggctatatgtctgacggagacatcttgggaaagagcctgcggacagacgacataaatagcgggtatatgaccgatggagggctgaatctgtataccagatctctcaataggatccctgataccgccacgtcccgtgacataatccagcggggtgttcatgatgtgacagtggacgctgattcatgggatgattcaagctccgtaagctccggcctcagtgacaccctcgataacatctctacggatgacttgaacactacaagctctgtgtccagctacagtaatataacagtcccatctcggaagaatacgcagttgagaactgactccgagaaaaggtctactactgacgaaacctgggatagtccagaggagttaaaaaagcccgaggaagattttgattcccacggagatgctggtggtaaatggaaaacagttagtagcgggctgcctgaggacccggaaaaggccgggcaaaaagccagcttatctgtcagccagactggaagctggaggcgcggtatgtccgctcagggcggggccccttccagacaaaaagccggcaccagcgcacttaagactcctggaaagaccgacgatgccaaggcttcagaaaaggggaaagcccctctaaaggggtcttcacttcagcgttcaccttctgacgcggggaagtcatcaggcgatgagggcaaaaagcctccctcaggtattggacggagtaccgcaacctcatcgttcggattcaagaaaccttccggcgttggaagttctgccatgataacaagcagcggggcaaccataacttccgggagcgctacactggggaagatccccaagagtgctgccatcggagggaagtctaacgctgggaggaaaacttctcttgacggcagccagaatcaggacgacgtggtgctgcacgtgagctctaaaactacccttcagtacaggagcctgcccaggcccagcaagtctagtacttctggaatccccggacgcggaggccaccgctcaagtacatcgtccattgattccaacgtgagcagtaagagtgccggagctacaacctcaaaactgcgggaacccaccaagatcgggtcgggccggtcctcccctgtcactgtgaaccaaacggacaaggaaaaagagaaggtagctgtgtctgactccgagagcgtgtcactaagtgggagccctaaaagttcacctacctctgcctccgcctgtggagcccagggcctgaggcaaccagggtccaaataccccgacattgccagccccaccttccgccggtatactccgtcgtctcgccaagctaatcaggaggagggtaaagaatggctacgttcccactccaccggagggctgcaggatacaggaaaccaatcccctctggtctctccgtcggctatgtcctcatcagcagcgggtaagtaccactttagcaacctggtgtctccaacaaatctgagtcagttcaacttgcccgggccatcaatgatgaggtcgaattccattccagcacaggactccagttttgacttgtacgatgattcacaactctgtgggtctgcaaccagtcttgaggagcgtccccgcgctataagtcattctgggtcctttcgagactccatggaggaggtgcacggctccagcctgtcactcgtctcatccacttcctctctgtactccacagccgaggccggggggtccttggagcaaatacacaaattgcggcgtgagctcgttgcttctcaggagaaagtcgcaactctgacctcccaactttcagccaacgcccatctggtagccgctttcgagaagtccttaggcaacatgaccggaagactccagtctcttacgatgactgctgagcagaaggagtccgagctgatagaactcagggagaccatcgagatgctcaaggcacagaatagtgcagcccaggccgctattcagggcgccttgaacggtccagaccaccctcccaaagatttgaggatacgtaggcaacactcttccgagtctgttagttctatcaactccgccacctcccacagttcaattggtagcggcaatgatgccgactctaagaagaagaaaaagaagaactgggtgaacagccggggctcggaactgagatcctcttttaaacaggcatttggcaagaagaagtcaactaagcctcccagctcccacagcgatatcgaggaactcacagatagctcgctaccagcctccccgaaactcccgcataacgctggggactgtggcagcgcttccatgaaaccatctcagtcggcatccgccatttgcgagtgtaccgaagctgaggcggagatcattctgcagttgaaaagcgaactccgtgaaaaggaactcaagcttaccgacattagactcgaggccctgtcgtccgcgcaccacctcgatcagatcagagaggcaatgaaccgaatgcagaatgagattgaaatcttaaaggcagagaatgacaggcttaaagccgagactggcaacacggcgaaacctaccagacccccttctgagagcagctcttccacatcatctagtagttccaggcaaagcctgggcttaagcctcaacaacctcaacattacagaggcagtatctagcgacattttactagacgacgcaggtgatgccacagggcacaaagatggaagatcggtgaaaataatcgtcagcatatctaagggctatgggcgggctaaagatcagaagtcccaggcctacctgataggtagcataggagtttccggtaaaaccaaatgggacgtgctcgacggcgtgattaggcgcctcttcaaggagtatgtttttcgtatcgacacttcaactagtttggggctttcttccgactgcatcgcatcatactgcatcggggacttgattaggagtcacaatcttgaggtgccggaattgctgccttgcgggtacctggtcggggacaacaacatcatcaccgtgaatttgaaaggagttgaggagaattcgctcgacagtttcgtgttcgacacattaattcccaaaccaatcacacagcgctactttaatttattaatggagcatcaccgcatcattctgtccgggcctagcggcactggaaagacctatctggccaacaaattagcggaatacgtgatcactaaatcaggccgtaaaaagacagaagacgctattgcaacctttaacgtcgatcataagtcaagtaaagagctccagcagtatctggcaaacctggcagaacagtgttcagctgataataatggtgtggagcttcccgtggtcatcatattagataatctgcatcatgtggggagcctttcggatatatttaacggctttttgaattgcaagtacaataaatgtccttacattattggaacaatgaatcagggcgtttcgtcaagcccaaacctggagctacaccacaactttcgctgggtgctgtgcgccaatcacactgagcccgtgaaggggtttcttggacgttatttgcgacgcaaattaatcgagattgagattgaacgaaacataaggaataatgacttggttaaaatcatcgactggatcccaaagacgtggcatcacctgaattccttcctcgagacacatagtagctctgatgtgacaatagggccgaggttgttcttaccatgcccaatggacgtggaaggatcaagagtatggttcatggatctgtggaactactctttggttccatacatattggaggctgttagagagggcctccaaatgtacgggaaacgcactccttgggaggatccctctaaatgggtgttggatacgtatccttggagctcagctacactgccacaggagtcacctgccctgctgcagctgaggcccgaagacgtcggctatgaatcatgtaccagcaccaaggaagcaaccacttccaagcacattccgcagacagacactgagggagacccattgatgaatatgcttatgaagctccaggaagcagccaattacagttcaactcaatcatgtgattcggaatctactagccaccacgaagacattctggactctagcttagagtcgacattgtag

SEQ ID NO: 126288 - DNA, 2376 bp, synthetic construct
  misc_feature 1..2376: note = Description of Artificial Sequence: Synthetic coding sequence
  source 1..2376: mol_type = other DNA
atgacaagtctgcacacttccagtgagtcaatagatcttcctctgtctcaccacggcagcctctccggcttaaccacgggcacacatgaagtgcagagcctcctgatgcggactgggtccgtccggagcactttgtccgagcgatacaccccgtcctcacgccaggcaaaccaagaggaaggcaaagagtggttgaggtctcattctactgggggcctgcaggataccggaaaccagagtcccctggtctcaccatcagcaatgtcaagtagcgctgctggaaaataccacttttcaaaccttgttagtccaacaaatctgtcacagtttaacctgcctggacccagtatgatgagatcaaacagcattcccgcccaggactcctctttcgacctctacgatgattcgcagctctgtggcagcgcgacttctcttgaggagcgcccccgggcaatatctcatagtggttccttccgggactccatggaagaagtgcatggatcctccctgtcactggtgagctcgacttcatctctgtactccacagccatacagaagcctaatattcagcagattcataagctgagacgcgaactggtcgcgagccaggagaaagtggctactcttacaagtcagttaagcgccaacgcacatctcgtggccgcgttcgagaaaagcctgggaaacatgacaggcagacttcagagcctgacaatgacagcagagcagaaagaatctgagctgatcgagctacgagagacaatcgagatgctcaaggcgcagaacagtgcagcacaagccgccatccagggagctcttaacggtcccgaccatccaccgaaagatttgcgtattcggaggcaacactcaagtgagtccgttagcagtattaactcagcaacctcccattcatccattgggagcggcaacgacgcagactcaaagaaaaaaaagaagaagaattggttgcgcagcagcttcaagcaggcctttggtaaaaagaagtcgactaagcccccatcatcccactctgatattgaagagctcacggactcatcactgcccgccagcccaaagcttccacacaatgctggggactgtggctccgcctcgatgaaaccatctcaatctgcatctgctatttgcgaatgtaccgaggcagaagcagagattatactccagttaaagtccgagttgagggaaaaagaactgaagctgactgatattagactggaggcactcagcagcgctcaccacttagaccagatacgcgaggcgatgaaccgaatgcaaaatgagattgagatcctgaaagctgagaacgatcgcctgaaagcggagaccggaaacactgccaagccaacccgcccaccgtctgagagcagcagttcaacaagctcctcctcctcacgacaaagcctagggctcagcctcaacaacctgaacatcacagaggccgtgagtagtgatatcctgctggatgacgccggcgatgcgactgggcacaaggacgggagaagtgtcaagatcatagtatccatcagtaaaggctacggtcgcgccaaagaccaaaagagtcaggcatacctaattgggtcaattggggttagcggcaaaacgaaatgggacgttttggacggggtcattcggcgactatttaaggagtacgtgttccggattgatactagcacctctctgggtctctcttccgactgcatcgccagctactgtattggggacctgatcaggagtcacaatctggaagtcccggagctgctgccttgcgggtatctcgtgggggacaacaatattattacagtgaacctaaaaggggtcgaagaaaattccctagattccttcgtgttcgacacacttattcctaagccgataacccagcgctactttaacctgttgatggagcaccatcgcattatcctgagcggtccatctggcaccggcaaaacctatttagcgaacaaacttgccgaatatgtgattactaaatcaggtcgaaagaaaacagaagatgccatcgccacattcaacgtggaccataaatctagcaaagagctccagcagtacctggccaacttggctgagcagtgctccgccgataacaatggtgtagagctaccagtggtgattatcttagacaacctgcatcacgtaggctctctctccgatattttcaacggatttctgaattgcaagtacaataaatgcccttacataattggaaccatgaaccaaggggtcagttcgagccccaacttagagctgcaccacaacttccggtgggtgctttgcgccaaccacactgagccagttaaggggttccttgggcgctatctgcgccgcaaactgattgaaatttag

SEQ ID NO: 126289 - DNA, 7158 bp, synthetic construct
  misc_feature 1..7158: note = Description of Artificial Sequence: Synthetic coding sequence
  source 1..7158: mol_type = other DNA
atgccagtccttggcgtcgcgtcgaaactgcggcagccagctgttggaagtaagcccgtgcatactgccttacccattccaaacttgggcactaccgggagccagcattgcagctcccggccactggagcttacagagaccgagtcgtctatgctctcatgtcagctcgctttaaagtctacctgtgagttcggcgagaagaagcctctccagggcaaggccaaggagaaagaggactcgaaaatctatacagactgggcaaatcattatctcgctaagagtgggcataaacgtcttattaaagacttgcagcaagacatcgctgacggcgtcctgctcgctgagattattcagatcatcgctaatgaaaaagtcgaggacataaacgggtgcccaagatcccaatcccagatgattgagaacgtcgacgtatgtctgagctttctggcggcccggggggtgaacgttcagggactcagtgccgaggagattaggaacggtaacttgaaggccatcctggggctcttcttctcactgagtaggtacaaacagcagcaacatcaccaacagcagtactaccaatccctggtggagttacagcagcgtgtcacccacgccagcccaccctctgaagcctcacaggccaagacccagcaggatatgcaaagttccctcgcggcacggtatgccacccaaagcaatcacagcgggatcgcaaccagccagaagaaacctacgcgcctccccgggccttcccgggtgcccgcagcaggatctagctcaaaggtacagggcgcctctaacctcaaccgccggtcacaatcctttaactctattgataaaaataagccccctaactatgcaaatggcaacgaaaaagactcctccaaaggaccccaaagttcaagcggggtgaatggcaatgtccagcctccaagcacagccggtcagccacccgctagcgccatccccagtccaagcgcctctaaaccttggagaagcaaaagcatgaacgtaaaacattctgccacctccactatgctgaccgtaaagcaatcatcaaccgcaaccagccctactcccagctctgaccgcctcaagcctcccgtgagtgaaggtgtgaaaacagccccttctggccagaagtctatgctcgagaagttcaagctggtgaatgcccgcaccgccctccggcccccccaacccccttccagcgggcccagcgacggagggaaagacgatgacgccttcagcgagagcggcgagatggaggggttcaattccggactaaatagcggaggcagcaccaattccagtcctaaagtatcccctaagcttgctcctcccaaggcggggtctaagaacctaagcaacaaaaaaagcctccttcagcccaaagagaaggaggaaaagaaccgcgataaaaataaggtctgcactgaaaaaccagtgaaggaggaaaaggaccaggttaccgagatggcccccaaaaagaccagcaaaatagcaagcctgatccctaagggctcaaagacgaccgctgcaaagaaggagtctctgatccccagttcttcggggattcctaaacccggtagcaaagtgccaaccgtgaaacagaccatttctcccgggtcaacggccagcaaagagagcgagaaattccggacgactaagggaagcccatcccagagcctctcaaagccaattaccatggaaaaggcgtccgcgtcctcctgcccggctcctcttgagggacgtgaagcaggccaggcttcgccttcaggttcatgcaccatgacagtagcccaaagctctggtcagagcaccggaaatggagccgtgcagcttcctcaacaacagcagcatagtcatcctaacaccgccacagttgccccctttatatatcgagcccatagtgaaaacgaaggtacggccctgcccagcgcagatagctgtaccagtccaactaaaatggatttgtcatatagcaaaacagccaagcagtgtcttgaggaaatatcaggcgaagacccggagacccgacgtatgaggactgtgaaaaacattgcggatctccggcagaatcttgaggagactatgagctcgctccggggcacgcagatatcacatagtaccttggaaacaaccttcgattccacagtaacaacggaggtgaacggtagaactataccgaacttgacaagccgacccactcctatgacgtggcgccttggtcaggcatgcccacggctccaggctggcgatgccccctctctgggagctgggtaccccaggagtggtacttcacgttttattcatacggatcctagtcgattcatgtatacgaccccactcagacgagccgcggtcagtcgcttgggtaacatgtcccagatcgacatgagtgaaaaggcttcctctgacttggatatgtcctccgaagtcgacgttggagggtacatgtcagacggggacatcctgggcaagtccctgaggacagatgatatcaatagcgggtacatgactgatggagggctgaatctgtacactcggtccttaaaccgtatacccgatacagccaccagccgagacatcatccagcgcggcgtgcacgatgtaactgttgatgccgacagctgggacgactcgtcctccgttagttctggactgtctgacacgcttgacaacattagcacagatgatctgaataccacatcatccgtgtcttcttacagcaacattaccgtcccatcaagaaagaatactcaactcagaacagacagtgagaaacgatccaccaccgatgagacctgggatagtcccgaagagctaaaaaaacctgaggaggactttgactcgcacggagacgctggggggaagtggaagacagtttcctctggcctgcccgaggatcctgaaaaagccgggcagaaagccagtctctctgtttcacagaccggaagttggcgtcggggaatgagtgctcagggtggcgctccatccagacaaaaagccggaacctccgcactgaagacccctggaaagactgatgatgcgaaggctagtgagaagggaaaggcgccactgaagggcagcagtctgcaaagatccccaagcgacgctgggaagtcaagcggagacgaaggaaaaaagccccccagcgggatcggccggagtaccgctacaagctcattcggatttaaaaaaccatcaggcgtcgggagctcagccatgattacctctagtggcgccaccataacctctggcagcgcaacgctgggaaagattcccaaatctgccgctatcggtggcaaaagcaacgccgggaggaaaacttcactggatggaagccaaaatcaggatgatgtagtgctacatgtgagcagcaaaactactctgcagtaccgcagccttccccgcccaagcaaatcctccacctcaggcatccctggtcggggaggtcaccgctcttcaacttcctccattgatagcaacgtatcctccaagtctgccggggcaaccacttccaagctacgggagcccaccaagatcggcagtggaaggtcatctcccgtcactgtgaatcagaccgacaaggagaaggaaaaggtcgctgtatcagattcagaatccgtctcgctgagcggcagtccaaagtctagccctacctctgcgtccgcatgtggtgcacaaggtctacgccagccagggtcaaagtatcctgatatcgcatctccgacttttcgcaggctctttggcgccaaggcagggggcaagtccgcctccgctccgaacaccgagggggtcaaatcaagttccgtcatgccctcaccttccaccactctcgcgagacaggggagtctcgaatctccgagctctgggactggttcaatgggctccgcgggcggactgagcggtagcagcagcccactcttcaacaagccttcagacttgaccacggatgtgataagcctgtcacactcgttggccagctcacctgcatctgtgcactcctttacgagcggaggcttggtctgggcagcaaatatgtctagctcctccgcaggatcaaaggacacccccagctaccagtcaatgacaagcttacacacctcatccgagtccattgacctgcctctcagccatcatggatccctctctgggctgaccacagggacacacgaagttcagagtctgctcatgagaacagggtctgttcgctctactctctccgaaagcatgcaattagacagaaacaccttaccaaagaaaggtctacggtatacacctagcagccgccaggccaatcaagaggaagggaaagaatggctgcgctcccattctactggcgggcttcaggacaccgggaatcagtccccactggtgagcccatccgctatgtccagcagcgccgccggcaagtatcatttcagcaacctggtttcacccaccaatttatctcagttcaacctgccagggccatcaatgatgcggtcaaatagcatacctgcacaggactcctcttttgacctgtatgatgatagccagctctgtggtagcgcgactagcctagaggaaaggccccgtgcaattagccatagcggtagtttccgcgacagcatggaggaggttcacggctcaagtctgtctctcgtgagctccaccagcagcctttattcaactgcggaggagaaagcgcacagcgagcagatccataaactgcgtagagagctggttgcctcacaggaaaaagtcgccacgctcacatcgcagctttctgcaaatgcacacttagttgctgcctttgagaagtcccttggtaacatgaccgggaggctgcaatccctgacaatgaccgctgaacaaaaggagagcgagctaatagaactgagagagacaattgagatgctgaaggcccaaaacagcgctgcgcaggccgcaatccagggagctcttaatgggcctgatcatcccccaaaggatctgaggattcggagacaacactcatctgaaagtgtatcctccatcaattcagccacttctcactccagcataggcagcggcaatgatgcagacagtaaaaaaaagaaaaagaaaaattgggtgaacagccgtggctctgagcttagatcaagctttaagcaagccttcggcaaaaaaaagtccacaaagccccctagcagccactcggatatagaagaactcaccgacagcagtcttccggccagtccaaagcttcctcataacgcgggcgactgtggctctgcttcaatgaagcctagtcagtccgcttctgcgtcgcccctggtttggccgcctaagaagcggcagaacggcccagttatttacaagcacaggtctagaatttgcgagtgcaccgaagcagaggcagaaatcatcctccagctcaaaagcgaactgcgcgagaaggagctgaaactgaccgacataagattagaggccttgagttcagctcaccatctggatcagattagggaagccatgaaccgcatgcaaaatgaaatagagattctgaaggcagaaaacgatcgcctgaaagctgaaacagggaacacggctaagccaactaggccaccttccgaatcatcctcttccactagttcctcgagctccagacagagcttggggctctcactgaacaacttaaatattactgaagctgtcagcagcgacatactgcttgatgacgccggcgatgccaccggccacaaggacggtaggtctgttaagatcattgtatcgatctctaaagggtacggcagagccaaagaccagaagagccaagcctatcttattggatcaatcggagtgagtgggaaaactaaatgggacgtgctcgacggcgttatccgtaggttatttaaagaatacgtgttccgcatagatacatccacttcactcgggttgtcttcagactgcattgccagctattgtatcggagatctgatcagatcgcacaacctggaagtccccgaactgctcccctgcggatatctggttggcgataacaacatcatcactgtgaacttgaagggcgtagaggaaaacagtctcgacagcttcgtttttgacacgctgatccccaaaccaatcactcagagatattttaatttgcttatggagcaccaccgcataattctgagtgggccctctggcacgggcaaaacatacctggcgaacaagctggcggagtatgtaatcaccaagagtggaaggaagaagaccgaagatgccatcgctacatttaatgtggatcacaagagctctaaagagctccagcagtacctcgctaaccttgccgaacagtgctctgctgataataacggtgtggaacttcccgtcgtaatcattttggacaacttacaccatgtcggatccctgagtgacatcttcaacggcttcctaaactgtaaatacaacaagtgtccatacattatcggaacaatgaatcaaggtgtctcatcttctccaaacctagaattgcatcataatttcaggtgggtgctgtgcgccaatcacactgagcccgtgaagggatttctgggtagatacctgaggaggaaattgattgagatcgagattgagcgaaatataagaaacaatgatttggtcaagataatagactggatcccaaaaacctggcaccacctgaattccttcctcgaaacccactcaagttccgatgtaaccatcggaccgcgtctgtttttgccctgccccatggatgtggaaggtagccgggtctggtttatggacctgtggaattactcgctggtgccctatatcctcgaagccgttcgtgagggtctccagatgtacggaaagcgcacgccctgggaagacccttctaagtgggttctagatacctatccttggagttcagccactctgcctcaggagagtcccgccctgcttcagctgagacccgaggacgtgggctatgagtcctgcacctccacaaaggaagcaacaacaagcaaacatatcccccaaaccgataccgaaggcgaccctctcatgaatatgctcatgaagctgcaggaggccgcgaattattcaagcacacaaagctgcgatagcgagagcacttctcaccacgaggatattttagacagctccctggagtccaccctttag

SEQ ID NO: 126290 - DNA, 7092 bp, synthetic construct
  misc_feature 1..7092: note = Description of Artificial Sequence: Synthetic coding sequence
  source 1..7092: mol_type = other DNA
atgcccgttcttggagtcgcttcaaagttacggcaacccgctgtcggatcaaagcccgtgcacaccgctctacccattcctaatctggggaccaccgggtctcagcactgcagcagccggccccttgagctcactgagactgaaagttccatgctatcatgccagttggcattaaaatctacctgtgagttcggagaaaaaaagcctctccagggtaaagcaaaggagaaagaggacagtaaaatttataccgactgggcaaaccactatctggccaaaagtggacataaaagactgatcaaagatctgcagcaagatattgccgatggggttcttctggcggagattattcagattatcgcaaatgaaaaagtggaggacataaatgggtgccctaggtcccaaagtcaaatgatcgagaatgttgatgtgtgtctgagcttcttggctgcccgaggcgtgaatgttcagggcctttcagccgaggagattagaaacggaaatctgaaagccattctaggtctcttcttcagtctcagtcgttataagcaacagcagcaccaccaacagcagtactaccagtctctcgtggaactccagcagagagtgacacacgcctcccctcccagcgaggcctcgcaggcaaaaacacagcaggatatgcagtcttctttggctgctaggtacgccactcaatcaaatcactctgggattgcgacttcccaaaaaaagcccacaaggttgccaggcccctctcgcgttccagctgcaggctcctccagcaaggtgcaaggcgccagcaacttaaaccggcgcagtcagtccttcaatagcatcgacaaaaacaagcctcctaactatgccaatggaaacgagaaagacagctcaaaaggtccccagtcctcttccggcgtgaacggaaacgtgcagccacctagtaccgccggccaacctccggcttccgcaatcccttctcctagtgccagcaaaccctggagatctaagtccatgaacgtgaagcactccgctacttctacaatgctcaccgtcaagcagtcctccacagccacttcccctactccaagtagcgatagactcaagccccccgtgtccgagggcgttaagacggccccctcgggccagaaatccatgctggagaagtttaaactggtaaacgcacgcacggcacttagacctcctcaaccgcctagctctggcccctctgacggaggaaaagacgacgacgccttcagtgagagcggggaaatggagggctttaactccggactcaacagcggcggaagcacaaactcttctcctaaagtgtccccgaaactggcccccccaaaagccggcagcaagaatttgagtaacaagaagtccctgttgcagcctaaagaaaaggaggaaaaaaacagagacaaaaataaagtgtgtacagaaaagccggtcaaggaggagaaagatcaggtaacagagatggctcccaagaagacgtctaaaattgcaagtctaattcctaagggctccaagaccacagccgcaaagaaagaatcacttatccctagctcttcagggattccaaaacctgggtccaaggtccccacagtgaaacagacaatatcccccgggtctacagctagtaaggagtccgagaaattcaggactacaaagggctcaccttcccagtctttaagcaagcctattactatggagaaagcttctgcttcttcttgccccgcgccactcgaagggagggaggcgggccaggccagcccaagtggctcctgcacaatgacagtcgcccagtcctctggccagtctacgggcaatggcgctgtgcagttgccccagcagcagcagcactcacacccaaatactgccaccgtggctccatttatttatcgagcacacagcgaaaacgagggcacagcgctcccatccgcagattcatgcaccagtcctacaaagatggatctatcctacagcaaaacagccaagcagtgcttggaggaaattagcggcgaagacccagaaactcgtcggatgaggactgtgaagaacatcgccgatcttcggcagaatctcgaagagaccatgtcatccctgcgcgggacccagattagccatagcaccttggagaccacatttgattcaaccgtgactacagaagtgaacggccgaacaattccaaacctgacgtcacggccaacccccatgacttggcgcttaggacaggcgtgcccacgtctgcaagctggtgacgcaccatcattaggtgctgggtatcctcggtctggcacctcacggtttatccacaccgacccctccagatttatgtacacgacgcctttacgccgagcagccgtatctaggcttgggaacatgtcgcagatcgacatgtccgagaaagcctcatccgacctagacatgagctctgaggtggatgtcggcggatacatgtcagacggtgacattcttggcaaaagcctccggaccgatgatataaactcgggatacatgaccgacggcggactgaacctgtacactcggagtctgaaccgaattcccgacaccgctactagccgagatatcattcaaagaggcgtacatgacgtgactgtggatgccgattcctgggacgactcatcatccgttagctccggactcagtgacaccttggacaacatatcgacagacgatctgaatacgactagcagcgtctcatcttatagcaatatcacggtgccgagcagaaagaatactcagttgaggacggattcagagaagcgatctaccacggatgaaacctgggattccccggaggaattaaagaaacccgaggaagattttgactcacacggcgatgcagggggcaagtggaaaacagtgtcctcagggctccctgaggacccagaaaaggcgggccagaaagcgagcctgagtgtatcccagacaggctcatggaggagaggcatgtctgcacagggcggagctccctcaaggcagaaagctggcacctctgccctgaagacccctgggaaaaccgatgatgccaaggcttcagaaaaagggaaggcccctctgaagggctcgtcactgcagaggagtcctagcgatgccggtaaatcctcaggcgatgaggggaagaagcctccttccggaatcggacgttcgacagcgacgtccagctttggctttaagaagccatccggtgtgggctcttcagcaatgatcacatcaagcggggccacaatcactagcggatcggctactctgggcaagatcccaaagtccgctgccatcggaggaaaatctaacgccggccgcaaaacctccctggatgggagccaaaaccaggatgacgtggttctacacgtcagttccaagacaacccttcagtaccgtagcttgcctaggccgtccaagtctagtacctcaggaattcctgggcgcggcggacatcgctcttccacttcctctatagactccaatgtcagcagcaaaagcgcaggcgcaactaccagtaaactgagagagcccactaagattggctcagggcgctcaagcccagtgaccgttaatcaaactgacaaggaaaaggagaaggttgctgtcagtgactcagaatcggtgtccctgtccggatctccaaagtcaagcccaacatccgcaagtgcatgcggcgcgcaagggctcagacagccaggttccaagtatccagacattgctagcccaacttttagaagattgttcggcgccaaagcaggcggtaaatcagcgagtgcacccaataccgagggcgtgaaaagctcgtccgtgatgccctctccttctaccaccttagcccggcaaggctctcttgagtcgccttccagcgggaccgggagcatgggctccgccggaggtctgtcgggtagctcctctcctctcttcaacaaaccatctgatctgacgacagatgtcatttccttgtcacacagcctcgcttccagtcctgcatccgtgcacagcttcacatcaggagggcttgtttgggcagccaacatgagtagctccagcgccgggagcaaggacaccccatcctaccagtccatgactagtttgcatacctcatcagaatccattgatctgcctctctcccatcatggatcattatctggtctaactaccggaacgcatgaagtgcaaagcctgctgatgcgcactgggtccgttcggtccaccctgtcagaaagcatgcagctcgacaggaatactctgcccaagaaaggactcagatatacgccaagcagtcggcaggcgaatcaggaggaaggtaaagagtggcttcgctcacactcaactggagggctgcaggataccggcaaccagtcacccttggttagcccctccgcaatgtctagcagcgccgcaggcaaatatcacttcagtaatttagtgtctccaacaaacctgtctcagttcaatctccccggtccaagcatgatgcgtagcaacagcattcctgctcaggactcctcgtttgatctttacgacgacagccagctttgcggatctgcaacatcgctcgaggagcgtccgcgtgcaattagtcactctgggagtttccgtgactccatggaggaggtacatggttcctccctgtctctggtttctagcacctcgtcactgtactccacagccgaggaaaaggcacattccgagcaaatccataagctgcggcgtgagctcgtggccagtcaggagaaggttgccaccctgaccagccagctcagtgcgaatgcccatctggtggcagcctttgaaaaaagcctcggaaatatgaccggacgtcttcagtccctgactatgactgcagaacagaaggagtccgaactgatagagttgagagaaacgatagagatgttaaaggcccaaaactccgctgctcaggccgctatccagggagccctaaatgggcccgatcatcccccgaaagacctccggatccgcaggcaacattctagcgagtctgtgtcctccatcaatagcgcaacctctcactctagcataggaagtgggaacgacgcagatagcaaaaagaaaaagaagaagaactgggtcaatagcagaggcagcgaactgagaagctccttcaagcaagcattcggaaaaaaaaagagcactaaacctccaagttcccattcggatattgaagagctgaccgatagttccttaccggcctctccaaagcttcctcacaacgccggcgactgtgggagcgcgtccatgaagccatcccagagcgccagtgctatctgtgaatgcactgaggccgaggccgagattattctccagctaaaaagtgaactccgagaaaaagaactcaagctaactgatatcagactcgaggctctgtcaagcgcacaccatcttgaccaaatccgggaggccatgaaccgcatgcagaacgaaattgagattctcaaagctgagaatgaccgcctgaaagccgagactggaaataccgccaaacctacaaggccaccgtcagaatcctccagctccacctccagcagttctagccgacagtctttgggactatcactgaacaacctgaatatcacggaggccgtgtccagcgatattttacttgatgacgctggtgacgctactggccataaggacggacggagtgttaagatcatcgtgagtatctccaaagggtacgggcgggcaaaggatcagaagagccaggcttacctcataggttccatcggagtcagcggaaagaccaagtgggacgttttagacggcgtgatcaggagactgttcaaggaatacgtgtttaggatagatacatcaactagtctaggattgagctccgactgcattgccagttactgcattggggatctgatccgttctcacaacttagaagtccctgagctgttgccatgtggctaccttgtgggcgacaataatattatcacagtcaacctgaaaggggtggaggagaactctttagactcgttcgtcttcgacacacttatacccaagccgattacacagcgctattttaacctcctgatggagcatcaccggatcatactttctggaccaagcggaactggcaagacctatctggcgaacaaacttgctgagtacgtgattacaaaatccggtaggaaaaagacggaggacgccatcgcaacatttaacgtcgatcataaaagttccaaggagcttcagcagtaccttgctaatttggcagaacagtgttcagctgataacaacggcgtcgaactgccagtcgttattatcctggataacttgcatcacgtgggtagcctgtccgatatattcaatggctttctgaactgcaagtataataagtgcccctacatcattggcaccatgaaccagggagtctcctcatcaccgaacctcgagctgcatcataatttccgctgggttctatgtgccaatcacaccgagcccgtgaagggattcctcggcaggtatctgagaagaaaactgatcgagatagaaattgagaggaatattaggaacaatgacttggttaaaattatagactggatccctaagacgtggcaccacctgaattctttccttgagacccacagcagctccgatgtaactattggcccccggctgtttctcccgtgtcccatggacgtcgaggggagtagggtgtggttcatggacctgtggaattatagtctcgtgccatacattctggaggctgtcagggagggattgcaaatgtatggtaaacggaccccttgggaggacccttcaaaatgggtcttagatacctacccctggagttccgccacactgcctcaagagagccccgctttgctgcaactgcggcccgaagatgtcggatacgagtcgtgcacaagcacaaaggaggccacaacgagtaaacacatccctcagacagacacagaaggtgaccctctcatgaacatgctaatgaagctacaggaagcagctaattattcaagcacacagagctgtgatagcgaaagtactagccatcatgaagatatcttggattctagcctagagagcaccctgtag

SEQ ID NO: 126291 - DNA, 648 bp, synthetic construct
  misc_feature 1..648: note = Description of Artificial Sequence: Synthetic coding sequence
  source 1..648: mol_type = other DNA
atgaagagatgggtcctctgcgctaaccatactgagcctgtgaaagggtttctcggtcgctacttgaggcgcaagctcattgagattgagatcgagcgtaatatccgcaacaacgatctggtgaagatcatcgactggatccccaagacttggcaccatttgaacagctttttagagacacacagcagctccgacgtcacgattggacctaggctgttcctgccctgtcctatggatgttgaaggctcacgggtgtggttcatggacctatggaactactcccttgttccttatatcctggaagccgttagagagggactacaaatgtacggaaagcgaactccctgggaagatccgtcgaagtgggtgctggacacatatccctggtcctccgctacgctcccacaggaatccccagccctgctccagctgagacctgaggatgtgggctacgagtcttgcacgtctaccaaagaagccacaacatctaagcatattccacagaccgacacggagggtgacccgctcatgaatatgttgatgaaactgcaggaggctgcaaattacagctccactcaatcatgcgattcagaatctacctcacatcacgaggatatcctggactccagtctcgaatcaacgctctag

SEQ ID NO: 126292 - DNA, 573 bp, synthetic construct
  misc_feature 1..573: note = Description of Artificial Sequence: Synthetic coding sequence
  source 1..573: mol_type = other DNA
atgggcaaaagcaatagtaaacttaagccagaagtcgttgaggagctcactcgcaagacgtattttacggagaaagaggtgcagcaatggtataaaggctttatcaaggattgtcccagcggacagctggatgcggctggattccagaagatttataagcaatttttccccttcggcgatcccacgaagttcgcgacttttgtgtttaacgtgttcgatgaaaacaaggacggacgaatagagttcagtgaattcattcaggcacttagtgtcaccagccgaggaacgctcgatgaaaaactacgctgggcctttaagttgtacgatctggataacgacggttacatcacaaggaacgagatgctggatattgttgacgccatctatcagatggtaggcaacacagtggagcttcccgaggaggagaatactcccgagaaacgggtcgaccggatctttgccatgatggacaagaatgcagacggcaagctcacattacaagagttccaggaggggtccaaggctgatcctagcatcgttcaggctctgagtctgtacgacggcctcgtctag

SEQ ID NO: 126293 - DNA, 519 bp, synthetic construct
  misc_feature 1..519: note = Description of Artificial Sequence: Synthetic coding sequence
  source 1..519: mol_type = other DNA
atggccacaatcacagagaaggaagtgcaacaatggtacaagggctttatcaaggactgccccagcgggcagctggacgctgccggctttcagaagatctacaaacagttttttccgttcggcgatccaacgaagttcgcaaccttcgtcttcaacgtgtttgacgagaataaggatgggcgcatcgaattttctgagtttatccaagccctgtccgttacaagtagaggaaccctcgacgaaaaattgcggtgggctttcaaactgtacgatctggataacgacgggtatattacaagaaacgagatgcttgatatcgtcgacgccatataccagatggtgggaaatacagtggagctaccagaggaagagaataccccagaaaagcgggttgaccgaatcttcgctatgatggataagaatgctgatgggaaacttacgttgcaggaattccaggagggcagcaaggccgacccctctattgtccaggcattgtcattgtacgatgggctggtttag

SEQ ID NO: 126294 - DNA, 3552 bp, synthetic construct
  misc_feature 1..3552: note = Description of Artificial Sequence: Synthetic coding sequence
  source 1..3552: mol_type = other DNA
atgcagctcaagattatgcccaagaaaaaacgattgtctgctggtcgcgtgccactgattctgttcctgtgccagatgatctccgcccttgaggtcccgctggacttagtgcagccacctacgatcactcaacagtcccctaaggattacattatcgatcccagggaaaacatcgtcattcaatgtgaggccaagggaaaacccccgccatcattcagctggacacggaacgggacccactttgacattgacaaggaccctcttgtgactatgaaacccgggacgggtacacttattataaacatcatgagtgaaggaaaagccgagacatatgagggcgtttatcagtgtacagcccggaatgagcggggggcagctgtgagtaataatatagtcgtacggccaagccgcagccccctgtggaccaaggaaaaactggagccaatcactctgcagagcggccaaagcctcgtgctgccctgtcggccccccattggccttccccccccaatcattttctggatggataactctttccaaagattacctcagtcagaacgagtgagtcagggtctgaatggggatctgtacttctctaatgtgctgcctgaagatacgcgggaagactatatttgctatgcccgtttcaaccatacccagaccattcaacaaaaacagcccattagcgttaaggttatatccgtggatgaactcaatgacactatcgcggctaacctgtccgacaccgagttctatggagcaaagtctagtagggagcggccaccaacttttctgactcccgagggcaatgctagcaataaggaagaactgagaggcaacgtgctaagtctggagtgtatcgccgagggcttgcccacccctatcatctactgggccaaagaggacggtatgctgcccaagaaccggactgtctacaaaaatttcgagaaaaccctgcaaatcatacacgtgtccgaggccgactctggtaattaccagtgtatcgctaagaacgcgttaggagcaatacaccacacgatctctgtgagagtgaaagccgccccatactggatcactgccccccagaacctggtcctgtcccccggcgaagacggcaccctgatttgtagagccaacggcaatcctaagccgagaatttcttggctgacaaacggcgtcccaatagaaattgctcctgatgatccgtcaaggaaaatcgatggagatacaatcatcttttcgaacgtgcaagaaaggtcttcggctgtgtaccagtgtaacgccagtaatgaatacggctatctgctagctaacgctttcgtgaacgttctggccgaacctccccggatcctgacaccagctaacactttgtatcaggtgatcgccaacagacctgctctgcttgattgtgcatttttcgggtctccactgcctactatcgaatggtttaaaggcgctaaaggaagcgctttgcacgaagacatctacgtgctccatgagaacggaacactggaaattccagtggcccagaaggactcaactggaacttacacgtgtgttgcacgtaataagctgggtatggccaaaaacgaggtgcacctggagatcaaggacccaacatggatcgtcaagcagcctgaatacgcagtggtgcagagggggtccatggttagctttgaatgtaaggttaaacacgatcatacccttagcctgaccgtgctgtggctcaaggacaatagggagcttcctagcgatgaacgcttcacggttgacaaagatcaccttgtggtggccgatgtgagcgacgatgactcaggaacctacacgtgcgtcgccaatacgaccctggactcagtgtcggccagcgccgtcctgtccgtagttgatgttcctaatcccccgtttgaccttgaacttacagatcaactggacaaaagtgttcagttgagctggacaccaggagatgataacaactccccaatcaccaagttcatcatagagtatgaagatgcgatgcataagcctggcctgtggcaccaccaaacggaagtgtcgggaacacagaccacagcccagttgaagctatccccttatgtcaattacagttttcgcgtcatggcagtgaattccatcggaaagagcctgccaagcgaagcgagcgagcaatatctaacaaaggcgagcgagcccgataaaaacccgacagccgtcgaggggttggggagcgagcctgacaacttagtaataacatggaagcccttgaacggcttcgaatcaaacgggcctgggcttcagtacaaggtgtcatggcggcaaaaagacggcgatgacgagtggacctctgtggtcgtggctaacgttagcaaatacattgtgtctggaactccgacatttgtgccttatcttattaaagttcaagcactgaacgatatgggatttgctccagagcccgcagtcgtcatgggccatagcggtgaggatctgccaatggtagcgcccggcaacgtgagggtgaacgttgttaacagtactttggctgaagtgcattgggaccccgtcccattgaaatctatccggggacacctgcagggatatcgcatttactattggaagactcagagtagttcaaagcggaatcgacgccacatcgagaaaaagatactgacatttcagggaagcaagacccatggtatgctacccggactcgagccattctctcattacaccctgaatgtcagagttgtgaacgggaaaggggaaggcccagcttctcccgatagggttttcaatacacctgaaggcgtcccttccgcaccctcaagtcttaaaatcgtcaaccccaccctggactccctgaccctggagtgggacccaccaagtcaccccaatggaatcctgactgaatatacactgaagtaccagccaattaatagtacccacgaacttgggcctctagtggatttgaagattccagcgaataagactcgttggacactcaaaaatctcaatttttcaactcgctacaaattttatttctacgcgcagacaagtgccggttcagggagtcagatcacagaggaagccgtgactacggtggatgaggcaatggccagccggcaagtggatatcgctacccagggctggttcatcggccttatgtgtgctgtcgctttactcattctgatactactcatcgtctgcttcataagacgcaataagggaggcaagtatcctgtcaaggagaaggaggatgcccatgccgaccccgagatccagcctatgaaggaagacgacggcacttttggggaatatagcgatgctgaagaccataagcccctgaagaagggctctcgcaccccgagcgatcgtacagtaaagaaggaagacagcgacgatagtctcgtagactacggcgagggagtgaatggacagtttaacgaggacggatcctttattgggcagtactctggaaagaaagagaaggaaccagccgagggtaatgaatcaagcgaggctccatcccctgtcaacgcaatgaactcgtttgtttag

SEQ ID NO: 126295 - DNA, 3711 bp, synthetic construct
  misc_feature 1..3711: note = Description of Artificial Sequence: Synthetic coding sequence
  source 1..3711: mol_type = other DNA
atgcagctcaagataatgccaaagaagaaaaggctaagcgctggaagggtcccattaattttgttcctgtgtcagatgatttctgcattggaagtccctttggatcagaaatcaacggaggtgatggtgcagccccccactatcacccagcagtcacccaaagattatatcatcgaccctcgtgagaatatcgtcattcaatgcgaagcaaaaggcaaacctccgccatcattctcgtggaccaggaacgggactcatttcgacatcgacaaggacccactggtgacaatgaaaccaggaactggaacactgattattaacattatgagtgaagggaaggctgagacatatgagggcgtttaccaatgcacagctcgaaatgaaagaggggccgccgtgagtaacaacatcgtggtacgaccctctcggagtccactgtggacaaaagaaaagctcgaacctattacccttcagtccggccagagcctggtgttaccctgccgcccgcccattggtctgccacccccgattattttttggatggataatagcttccagagattgccgcaatctgagagagtgagccaagggttgaatggcgatttatacttcagtaacgtgctgccagaggatacccgggaagactacatttgctatgcacgtttcaaccacacgcagacaatccagcagaagcaacctattagcgtgaaggtgattagcgtcgacgaactgaacgatacgattgctgctaacctcagcgacacggaattctacggcgccaagtcatccagggaacgacctccaaccttccttacacccgagggaaacgcttccaataaggaagagctgcgggggaacgtgcttagcctcgagtgtattgctgaaggccttcctacccctatcatctattgggccaaagaggacggcatgctgcccaagaacagaacagtttacaaaaacttcgaaaaaacactgcagataattcacgtcagcgaggctgattctggtaattatcagtgcattgcaaaaaacgctctgggagctattcaccacaccatcagcgtgcgtgttaaggcagccccctactggatcacagctccccaaaatctcgtactttcaccaggcgaggacgggacactcatatgccgcgctaatggtaaccctaagccccggatctcatggctaacgaacggcgtgcccattgaaatcgccccagacgatcccagtaggaaaattgacggcgacacaattatatttagcaacgtgcaggagaggagttccgctgtataccagtgtaacgccagcaacgagtacggatacctacttgcaaatgccttcgtaaatgttctggcagaaccacccaggattcttacacctgcaaatacactgtatcaagttattgccaatcgaccagccctgcttgattgtgcgttctttgggagtccccttccgacaatcgagtggttcaagggcgccaaggggtccgcactccatgaggacatttacgtcttacatgaaaatggcacactcgaaattcccgttgctcagaaagattctaccggcacatacacgtgcgtggccagaaataaattgggcatggccaaaaacgaagtgcatctagagattaaggacccaacctggatcgtcaagcaaccagaatatgccgtagtccagcgaggttccatggtgagcttcgaatgtaaagtgaagcatgatcacactctctcactgacagtgctttggttgaaagacaatagggagctgcctagcgatgagagatttaccgtggataaggaccacttggttgtcgccgacgtaagtgatgatgacagtggaacctatacctgcgtggctaatacaaccctggattctgtcagtgcctcagctgtgctgagtgtagttgccccaacccctaccccagcccctgtgtatgacgtgcccaatccacccttcgatctggaattaacagatcagcttgacaaaagcgtgcagctgtcatggaccccaggcgacgacaacaattccccgatcacaaaatttattattgagtacgaggacgcgatgcacaagccaggtctgtggcatcaccagacagaagtatctgggacacaaaccactgcgcagctcaaactctccccctatgtgaattactcattccgagtgatggctgttaactctatcggtaaatctctgccctcagaagcctcggaacagtaccttacgaaagctagtgagcccgataaaaacccaactgctgtagagggtctgggatccgagcctgacaacctggttattacctggaaaccccttaacggtttcgagtccaatgggcccgggctgcaatataaggtcagttggagacagaaggacggcgatgatgagtggacctctgttgtggttgcaaacgtctctaaatacatcgtgtccggaacccctacttttgtgccctatctgatcaaagtgcaggcgctgaacgacatggggttcgcccccgaacctgcagtcgtgatgggtcactctggtgaagatctccctatggtcgcacctggaaacgtcagagtaaacgtcgtgaactccactctcgccgaagtccactgggaccctgttcctctcaagtccatccgggggcatctgcagggatatagaatatattactggaagacccagtcttctagtaagcggaatcgcagacatattgagaaaaaaatcctaacctttcaaggctcaaaaacacatgggatgctgcccgggctcgagcctttcagccactatacactcaacgtccgagtcgtcaatgggaagggagagggcccagctagtcccgaccgcgttttcaacactccggagggagttccgagcgcaccctcctcactgaagatagtgaatccaactttggacagcctgaccttagaatgggatccccccagccacccaaacgggatactcactgagtatacgcttaagtaccagcccattaattccacacatgaactgggtccattagtcgatctgaaaatccctgccaataaaacccgctggacactcaaaaatctaaatttcagtacacggtacaaattctacttctacgcacagacctccgcaggtagtggctcacagatcacagaggaggctgttaccacagtggatgaagccgggattctcccacctgacgtgggggcaggaaaggttcaggccgtgaacccaagaattagcaatcttacggctgccgccgcagagacctatgcaaatatatcctgggaatacgagggcccagaacacgtgaacttctatgttgaatacggtgtggctgggtccaaggaggaatggagaaaggaaattgtgaatggatcaagatcctttttcggcctgaaaggacttatgcccggcacagcctacaaggtgagagtaggggcagtcggggactctggattcgtgtcctccgaagatgtcttcgagactgggccagctatggcaagcaggcaggttgacatcgctacgcaggggtggttcattggccttatgtgcgccgttgccctgttgattctcatactcctgattgtgtgctttatccgacgcaacaaagggggcaagtacccggtcaaggaaaaggaggatgcacacgccgatccggaaatccagccgatgaaggaggacgatggaactttcggcgaatacaggttattttccttcgtttccagcgcatcgttttag

SEQ ID NO: 126296 - DNA, 3579 bp, synthetic construct
  misc_feature 1..3579: note = Description of Artificial Sequence: Synthetic coding sequence
  source 1..3579: mol_type = other DNA
atgcagttaaagataatgcctaaaaagaaacgcctctcagcagggagagtgccgttgatcctctttctgtgtcagatgatttctgctttagaggtgccattagatccgaagttgctggaagacctggttcagcctcccaccattacccaacagagccccaaggattatatcatagaccctcgcgagaatatagtgattcaatgcgaagccaaaggtaaacctcccccaagcttcagttggaccaggaacggcacccactttgatatagacaaagatcctttagtcacaatgaaacccgggaccggaactcttatcatcaatatcatgagtgaaggcaaggcggagacgtatgagggcgtttaccagtgcacagctcgtaatgagagaggggctgccgtgtcaaataacatcgtcgtccgaccttccaggtcacccttatggactaaggagaaactggagccaataactttgcagagtggacaaagcttagttttgccatgcaggcccccgatcggcctgccaccaccaataattttttggatggacaacagctttcagcgcctgccccagagtgaacgggtgtcacagggcttaaatggagatctgtattttagcaatgtgctacccgaagacacccgcgaggactatatatgctacgcgcgattcaaccatacacagacaatccagcagaagcagccaatcagtgtcaaagtaatttccgctaagtcctcgagggaacgccctccaacattccttactcccgagggcaacgcctccaacaaggaagagctgcgcggaaacgtccttagtctagagtgtatcgcagagggtctcccaacacccatcatatattgggccaaagaggacggcatgctgcctaagaaccgcactgtttacaagaattttgagaaaacacttcagattatccacgtcagcgaggccgattcagggaactaccaatgtattgccaagaacgcactaggggcaatccaccataccatatcggtaagagtgaaggctgcaccctactggatcactgccccacagaacctcgtgctcagtccaggcgaggacggcacgttgatttgtcgagcaaatggtaaccctaagccccgtatcagctggctgaccaacggcgtgcctattgagattgctcctgacgacccctcacgcaagatcgatggagataccatcatcttctccaacgtgcaagaaaggtcaagcgccgtgtatcagtgtaatgcctcgaacgaatacggctacctgttggccaacgcttttgtgaacgttctagcagaaccacctcggattctcacacctgctaacacactttatcaggtaattgcaaatagacccgcactgttggattgtgcatttttcggttctcctctgccaactatcgaatggtttaagggcgcaaagggaagtgccttacatgaggacatctacgtgctgcacgaaaacggcacgttggaaatccctgtggcgcagaaggacagcaccgggacctatacttgcgtggcccgcaataaacttgggatggccaaaaatgaagtgcatctggaaatcaaagacccaacatggatcgtcaagcagcctgaatatgccgtggtccagcgcggatctatggtgagttttgagtgcaaggtcaagcatgatcataccctgtctctcaccgttctgtggttaaaagacaatcgagagctcccaagtgatgagcggttcacagttgacaaagatcacttggtggtcgcagacgtgagcgacgacgactctggaacgtacacgtgcgttgcaaacactactttggattccgtgagtgcttcggccgttctgtctgtggtggcacctactcctacccccgcccccgtgtatgatgttccaaatcctccgtttgatcttgaactgaccgatcagcttgataaatctgtgcaactgagttggaccccaggtgatgataacaactcccccatcaccaaatttatcatcgaatatgaggatgcaatgcataaacccggactgtggcaccaccagactgaagtctcaggaacccagaccacagcccagttgaagctatcaccctacgtcaactactcatttcgggtgatggcagtgaactcaattggcaaaagtctgccatcggaagcctccgaacagtacctcacaaaagcctctgaacccgacaagaaccccactgccgtcgagggcctgggaagtgagcctgacaatttggtcattacttggaaaccattgaatggcttcgaatctaacgggccaggacttcagtacaaagtgtcatggagacaaaaggatggtgacgatgaatggacatctgtggtggttgcgaatgtctctaaatacatcgtaagtgggacccccacattcgtgccttatctcatcaaagtgcaggccttaaacgacatgggattcgctcctgaacccgcagtggtaatgggacactcgggggaggaccttccaatggtcgctcccggaaacgtgcgcgttaacgtggtcaactctacactggccgaggtccattgggacccagttcccctgaagtcgattcgcggacatctacagggctacaggatctactattggaagacgcagagttcttccaaacgcaatagacggcatatagagaagaaaatcctcacctttcaggggtcaaagactcacgggatgctgcccgggctagaaccgttttcccactacacgttaaatgtccgggttgttaacggaaaaggggagggtcccgcatcgcccgatcgggtgttcaatactccagagggagttccgtctgcccctagctcacttaaaatcgtcaaccccaccttggactctctcactctggagtgggacccccccagccaccccaatgggattctgactgagtatactctgaaataccagcctattaactcgacccacgagctgggtcccctcgtagatctgaaaatcccagcgaataagactcggtggacactaaagaaccttaatttctccactaggtacaaattctatttctacgcccagacgagcgcaggatcaggtagccagatcaccgaggaggccgtcacgacagtagatgaagcagggatcttgccaccagatgtcggagccggcaaggctatggcttccaggcaggtggacattgccacccagggatggttcatcggccttatgtgcgctgtcgcccttttaatcctcatcctgctgatagtatgcttcatccggcggaataagggcggaaagtatcccgttaaggagaaagaagacgcccatgccgatccggagattcagcccatgaaggaggacgacggtacattcggagaatattccgacgccgaagatcacaagcccctgaagaaaggttccaggactcccagtgatagaactgtgaaaaaggaagattccgacgattcactggtggactacggggagggcgtaaacggtcagttcaatgaagacggcagttttattggtcagtacagcggcaaaaaggaaaaggaacccgcagaggggaacgaatcttctgaggccccatcacctgtaaacgccatgaactcttttgtgtag

SEQ ID NO: 126297 - DNA, 3915 bp, synthetic construct
  misc_feature 1..3915: note = Description of Artificial Sequence: Synthetic coding sequence
  source 1..3915: mol_type = other DNA
atgcagctcaaaatcatgcccaaaaagaagagactaagtgcaggccgggttcctctgatcctcttcctctgtcagatgatctctgccctcgaagtacctttggaccctaagcttctggaggatctggtgcaaccacctacaatcacccagcaaagcccgaaggattacattattgacccccgggagaacattgtcattcagtgcgaagccaaggggaagccaccccctagttttagttggacacgcaatggcacccatttcgacatcgacaaggacccactggttacaatgaaacccggaacaggtacccttatcattaacattatgtccgaaggcaaggcagagacctacgagggagtgtatcagtgcacggctaggaatgagaggggcgctgccgtgtcaaacaatattgtggtgcgtccttcccggtcccccctctggaccaaggaaaaattagaacccataacactccagtctggccagagcttagtgcttccttgtaggcctccaattggtctgcccccaccaattatattttggatggataatagctttcaacgccttccacaaagtgaaagggtctcccagggcttgaatggagacttgtatttttcaaatgtgctcccagaagataccagagaagactatatttgctacgctaggtttaaccacacacagactattcaacagaagcagccgatcagtgttaaggtgatctcagtggatgagctaaacgatacaattgctgccaatctcagtgacaccgagttttacggggctaagagctcaagggagcgacctcccacattcttgactcctgagggcaacgcatctaacaaggaggagttgcgcggaaacgttctctcactggagtgcatagcagagggcctaccaaccccaattatatactgggcaaaagaagacggaatgctgccaaagaaccgcactgtgtacaaaaatttcgaaaagactcttcagatcattcacgtctctgaggccgactctggaaactatcagtgtatcgccaaaaatgctttaggagcaattcatcacactatttctgtgcgcgtgaaagccgccccatattggatcacagccccccagaaccttgtgttgtccccaggggaggacgggactctcatctgtagagcaaacgggaatcccaaacccagaatttcctggcttaccaatggtgtacctatcgaaatcgcacctgacgatccaagtcgaaaaattgacggagacaccatcattttttctaacgttcaggaacgttcatcagcagtgtatcagtgtaacgcatccaacgaatacgggtatctgctcgctaacgcctttgtaaacgtccttgccgagcccccacggatcctgaccccggctaataccctgtaccaggttattgctaatcgccccgccctgttagattgcgccttcttcggttctcccctgcccacaatagagtggttcaaaggcgctaagggaagtgcacttcacgaagacatctacgtgctccatgaaaatggaacattggagatccctgtggctcagaaagattccacaggaacctacacatgtgttgccagaaacaaattgggaatggccaaaaatgaggtacacctagaaatcaaagatccaacatggattgtgaagcagccagagtacgctgtggttcagagagggtcaatggtttcgtttgagtgcaaggttaaacacgatcatactctgtccctgacggtattgtggctgaaggataatcgtgagctgcccagtgatgagaggttcacagtggacaaggaccacctagtggtcgcagacgtttctgacgatgattctggcacatatacttgcgtcgctaataccactctggatagcgtctctgccagcgccgtgctgagtgtagttgctccaacccctacacccgcccccgtctatgatgtgcccaacccgccctttgaccttgaactgacagatcagctcgacaagtctgtgcagctatcctggacgccaggagacgacaataattcacctatcaccaaatttatcattgagtacgaagacgcaatgcacaaacccgggctatggcatcaccagactgaggtttctgggactcagacaactgctcagctgaagctcagcccgtacgtcaactactctttccgagtgatggccgtcaattctattggaaagagcctcccctcagaagcatctgaacagtatctaacgaaagcatccgaacctgacaagaaccctaccgccgtcgaaggcctaggtagcgagcccgataatttggttatcacgtggaagccgctgaatggtttcgagagcaacggaccgggcttgcagtataaggtcagctggcgacagaaggacggagatgatgagtggaccagcgtggtagttgcaaatgtatccaaatacatcgtatccggcacacccacgtttgtcccatatctgatcaaggttcaggctctgaacgatatgggttttgcgcctgagcccgccgtggttatggggcatagcggcgaggaccttcccatggtggcccccgggaacgtgcgggtcaacgttgtgaatagcactcttgccgaagtgcactgggatcccgtgcccctgaaaagcatacggggacacctacaggggtatagaatttattactggaaaacccagtctagcagcaagcgtaacaggcgccatattgagaagaagatattgacattccaaggaagcaaaacccatggaatgctcccgggcttagaacccttctctcattacactctgaatgtccgcgttgtgaacggcaaaggtgaagggccggcttccccagaccgtgtgtttaacacccctgagggagttccgagcgcaccaagcagtttgaaaatagtgaatcctacattggactcactgactctggagtgggaccccccttctcaccccaatggcattttgaccgaatacacacttaagtaccagcccattaactctacacacgagctcggaccccttgtagacctgaagattccggctaacaagaccagatggaccttgaagaacttgaacttttccacacgttataagttctatttttacgcccaaacctctgccgggagcggttcccagataactgaggaagccgtcactacggtggatgaggcgggcattctccccccagatgtcggagccggcaaagttcaggccgtaaaccccaggatttctaacctcaccgccgctgctgccgaaacatatgccaatataagctgggagtacgaaggacctgagcacgtaaatttctacgtggagtacggggtcgctggttccaaggaagaatggaggaaggagattgtcaacgggtcccggagtttctttgggctcaaaggcttgatgcccggtacagcgtataaagtgcgagtcggcgccgtaggggatagcggctttgttagttccgaggacgtctttgaaactggtcctgcgatggcttctagacaagtggacatcgctactcaaggatggttcattggcctgatgtgcgccgtggctctcctgatcctcatcctgctcatcgtgtgtttcatccgcaggaacaagggcggcaagtacccagtgaaggaaaaggaggacgcacacgctgaccctgaaatacaacccatgaaagaggacgatgggactttcggcgagtattcagatgcagaggatcacaaacccctaaagaaaggctccaggacaccatcggaccggactgtgaagaaggaggactcggacgactccctggtggactatggggaaggtgtgaatggccagttcaacgaagacggctcatttatcgggcagtacagcggcaagaaagagaaggaaccagccgagggcaacgaatccagcgaggccccatcaccggttaacgctatgaactcatttgtgtag

SEQ ID NO: 126298 - DNA, 3927 bp, synthetic construct
  misc_feature 1..3927: note = Description of Artificial Sequence: Synthetic coding sequence
  source 1..3927: mol_type = other DNA
atgcaactgaagattatgccgaagaagaagcggctcagtgccgggcgggtgccactgatcctgtttctgtgccagatgatctctgctctggaagtgccccttgatcagaaaagtactgaggtgatggtccagcctccaacaattacccaacagtcacctaaagactatattatcgacccaagagaaaacatcgtgatccagtgtgaagctaaggggaaacctcctccttcattcagttggacaagaaacggcacccattttgatatagataaggatccgctggtgacaatgaaaccagggacaggaacactgataataaatattatgtcagagggcaaagctgagacttatgagggagtctatcagtgtaccgcccgcaatgagaggggggcggctgtgtctaacaatatcgtggtgcgaccatccaggtcacctctgtggacaaaggagaaactggagcctataactttacagagcggtcagagtctcgttcttccatgtagacctccaatcggcctgccaccaccaattatcttttggatggacaattcctttcaacgcctgcctcagtcagaaagagtctcacaaggcttgaacggggatctttacttttccaacgtgctgccagaggatacaagggaggactatatatgttacgctcggttcaaccacacacaaacaatccagcagaagcagcccatttccgtaaaggttataagcgtggacgaactgaatgacacaatcgcggcgaatctcagcgatactgagttttacggggctaagagctctagagaacgccccccgacttttttgacacctgaaggtaatgcttcaaataaagaggagctgcgaggtaatgtgctgagcttggaatgcattgcggagggtctgcccacacctatcatttattgggcaaaggaagacggaatgctcccaaagaatagaacagtttataagaattttgagaagaccctgcagattatccacgtcagtgaggcggacagtggcaactaccagtgtattgctaaaaacgctctaggtgcaattcaccatacaatatccgtgagagttaaagcagcgccgtattggatcactgcaccccagaacctggtgctgagccccggtgaggacgggacccttatctgccgggccaatgggaaccccaagcctagaatctcttggctgactaacggagtgcccatcgagattgcccccgacgacccttcccgcaagattgatggtgatacaatcatcttttctaatgtccaagagagaagctcagcagtataccagtgcaatgccagtaatgagtacggctaccttctagcaaatgcttttgtcaatgtgctcgcggaaccgccgaggatcttaactccggctaacaccttgtaccaagtgatagctaacagaccagctctgctggactgcgcattctttggcagccctttgccaaccatcgaatggttcaagggggcgaaggggtccgcgctgcacgaagacatctacgtgttgcacgaaaacgggacgctcgaaattcccgtggcccagaaggactccacaggaacgtacacatgcgtcgcccgaaacaagctgggcatggccaagaatgaagtgcacttggaaatcaaggaccccacatggatcgtgaagcaaccagagtatgctgtggtccagcgggggtccatggttagttttgagtgcaaagttaagcacgatcacactctatccctgacggtcctctggcttaaggacaaccgggagctcccatctgatgagcgctttactgtagataaagatcacctggtcgtggctgatgtgtcagacgacgattctggaacgtacacttgcgttgcaaacactaccttagacagcgtgtcagcctcagccgtgctaagtgtggtcgctcctacgccaaccccagccccggtctacgacgttccaaatcctccatttgatcttgagctaacagaccagctggacaaaagcgtgcagctgagttggacgccaggggatgacaataatagtccgattactaagttcataattgaatacgaagatgccatgcataagcctggcctctggcaccatcagaccgaggtgtccggaacccagacgacagcccagcttaagctttccccgtacgtcaactattccttcagagtgatggcagtgaactccatcgggaaaagcctgccctccgaggcaagcgagcagtacctcacaaaagcctctgaacccgacaagaaccccacagcggtggaagggttgggttctgagccagacaatttggtaattacgtggaagcccctcaatggtttcgaatccaacgggccaggcctgcagtataaagtaagctggcgccaaaaggacggggacgacgagtggacgtctgtcgttgtggcaaatgtaagtaagtatatcgtgtccgggacaccaaccttcgtcccttatttaatcaaggtacaggcgctgaacgatatgggcttcgcaccagagccagccgttgtgatggggcacagcggggaagatttgcccatggtcgctcctgggaatgtgagagtgaacgtggtaaattccaccctggccgaggttcattgggatccggtacctctgaagagtattcgcggccatctgcagggctacaggatttattactggaaaactcagtccagtagtaagcggaatcgacgccacattgagaagaaaattctgacctttcaggggtccaagacccatgggatgctgcccggcctggaaccttttagccactacacgctaaacgtgagggtggtcaacggtaagggagagggtccagcatccccagatcgcgtctttaatacccctgagggggtaccatcggcacccagtagtctcaaaatagttaatcccaccttagattctctgactttagagtgggatcctccatcccaccctaacggtatcctgacagagtatactttaaagtatcagccaattaattccacacacgagcttggaccactcgtggatttaaagatacccgccaacaagacccggtggaccctcaaaaacctaaacttctccacaagatacaagttttacttttatgcgcagacaagtgctggctccggctctcagattacggaagaggccgttaccacagtcgacgaagcaggaatcctcccccccgatgtaggcgctggcaaagtacaggccgtcaatccccggatctccaatctgaccgccgccgcagccgaaacatatgccaatatctcttgggagtatgagggccccgagcatgttaacttttatgttgaatatggcgtcgctggttctaaggaggagtggcggaaagaaattgtgaacggcagccggtctttcttcggcctcaaggggctgatgcctggcacagcatataaggttcgggtcggagccgtgggtgacagtggcttcgtgtcctctgaagacgtgtttgagactggccccgctatggccagccggcaagtagatatcgccacgcagggatggttcatcggactgatgtgcgcggttgccctcctgattctgattttgctaatcgtctgttttatccgccggaataaaggaggaaagtatcctgtcaaggagaaggaggacgcacacgcagatcccgaaatacagcccatgaaagaggacgacgggacttttggagagtattctagtctgaaaaacgacgctgaagaccataagcccctcaagaaggggtcgaggacacctagcgatcgcaccgtcaaaaaagaggacagcgacgattcacttgtggactacggcgagggggtgaacggccagttcaatgaggatggatcctttattgggcagtattccgggaaaaaagagaaggagccagcagagggaaatgaatctagtgaggccccatcgcccgtaaatgctatgaatagcttcgtctag

SEQ ID NO: 126299 - DNA, 3543 bp, synthetic construct
  misc_feature 1..3543: note = Description of Artificial Sequence: Synthetic coding sequence
  source 1..3543: mol_type = other DNA
atgcagctcaagattatgccaaagaagaaaaggctgagcgctggccgggtgccactgattttgttcctatgccagatgatttctgccctggaagtcccattggaccagaagagcacagaagttatggtgcagcctccaactatcacccaacaatctcccaaagactacattattgatcctcgcgagaatatcgttatacagtgcgaggccaagggcaagccacccccgagcttcagctggacccgaaacggtacccatttcgatatcgataaggatccactggtgaccatgaagcctggaactggaaccctgatcatcaacatcatgtcggaagggaaagccgaaacttatgaaggcgtgtatcagtgtacagcccgcaatgagcggggtgctgccgtatcgaacaacatcgtggtccgaccgagccggtcacctctgtggactaaggagaaattggagcccataaccctgcagtctggacagtccctagtgctgccatgcagaccgcccatcggactgccaccacccatcatcttttggatggacaactcttttcagagactgccacaaagtgaaagggtgagccaaggactgaatggagacttgtacttctccaatgttctccccgaggacacacgggaggactatatctgttacgcacggttcaatcacactcagaccatccagcaaaagcaacctatctccgtaaaagtcatctctgccaagagctcccgagaaagacctcccacctttctcacacctgagggaaatgccagtaataaggaagagctccgcggaaatgtgctgagtctcgaatgcatcgccgaagggctgccaacccccatcatatactgggctaaggaagacgggatgttgccaaagaatcgcaccgtttataagaacttcgaaaagaccctgcagattattcatgtcagtgaggctgatagcgggaattaccagtgtattgctaagaacgcactcggagcaattcatcacaccatttccgtccgcgtcaaagcggcaccatattggatcaccgccccacagaatctggtgctgagcccgggcgaagacggaactctgatatgtcgagccaatggaaatcccaagccccggattagctggctgactaatggggtcccaattgaaatcgcccctgatgacccctcccgaaagattgatggtgatacaataatattttcaaacgttcaagaaaggagtagtgccgtctaccaatgtaacgcctctaatgagtatggatatctgctggctaatgcatttgtaaatgttctggccgaacctcctcggatcctcacgcctgccaacacactataccaggtgattgcgaataggcccgcactgctggattgtgccttcttcggatccccactgcctacaatcgagtggtttaagggggccaaggggtctgcgctgcatgaggatatctatgtcctgcacgaaaatggcactttagagataccagtcgcgcagaaggactccacaggtacatatacttgcgtagccaggaataagttaggaatggcaaaaaatgaagtgcacttggaaattaaagaccctacttggatcgtcaaacagcccgagtatgccgtggttcaaaggggaagcatggtgagtttcgaatgcaaggttaagcacgatcatacattgagcctgaccgtcctgtggcttaaagataaccgggaactgccttccgatgaacgatttacagtggataaggaccatctggtcgtcgcagatgtgtccgatgacgactccggaacatacacatgcgtggctaatacaaccctggatagcgttagcgcttctgcggtactcagcgtcgtagcacctactcccacacctgccccagtgtacgacgtgcctaaccccccctttgatttggaactgactgatcagcttgataaatcagtacagctgagctggactcccggcgacgataataattcccccataactaagttcataattgagtacgaagacgccatgcacaagcccggcctttggcaccaccagaccgaggtgagtggaacacagactactgctcaactgaagctgtctccttatgtcaactactcttttcgcgtaatggcagtcaatagcatcgggaagtcgctcccctccgaggcctccgagcaatatctaacgaaggcctctgaacccgataaaaacccaacagccgtggagggcctgggcagcgagcctgataatctggtcatcacctggaagcccctgaatggcttcgagtccaatggccctgggctgcagtacaaggtctcatggcggcagaaggatggagacgacgagtggacatctgttgtggtcgctaacgtatcgaagtacatcgttagtggcaccccgacattcgtcccctaccttatcaaggtgcaggcacttaacgatatggggtttgcgccagaacccgctgttgtgatggggcatagcggcgaggacctgccaatggttgcccctggcaatgtccgggtaaatgttgtgaacagcaccttggcggaagtgcattgggacccagtcccactaaagagcatccgcggccacttgcagggttaccggatctattattggaaaacgcagtctagtagtaagagaaatcgcaggcacatcgagaagaaaattctgaccttccaggggagcaagacccacggaatgttacctggattagagcccttcagccactacaccttaaatgtgcgggtcgtcaacggtaagggggaagggcctgcgtctcctgacagagtgtttaacactccagagggcgttccatcagccccaagctcgttaaagatcgttaaccccacacttgactctctgaccttagaatgggatccaccttcccacccaaacggaattctgactgagtatactctgaaataccagccaataaacagtacgcatgagctgggtccactggtggatttgaagattcctgcaaataagacacggtggacattaaaaaacttgaattttagcactcggtacaagttctatttctatgcacagacctccgcaggctctggtagtcagatcacagaggaggccgtcaccactgttgacgaagcaatggcatctcgccaggtggatatcgctacacaagggtggttcatcgggctgatgtgtgctgtggcactattaattttgatcctgctcatcgtgtgcttcatcagaaggaacaagggggggaagtacccggttaaggaaaaggaagacgctcatgcagatcccgaaattcagccaatgaaagaagacgatggaacgttcggagaatattctgatgccgaggaccacaaacccctcaagaaaggttctagaacccccagcgataggacggttaagaaagaggacagcgatgatagccttgtcgactatggagagggcgtgaacggtcagttcaatgaggatggttcctttatcggtcagtactccggcaaaaaggagaaggagcccgccgaggggaatgaatcatccgaggctccttctccagtgaatgcaatgaattctttcgtctag

SEQ ID NO: 126300 - DNA, 1296 bp, synthetic construct
  misc_feature 1..1296: note = Description of Artificial Sequence: Synthetic coding sequence
  source 1..1296: mol_type = other DNA
atgcaactgaagatcatgcccaagaagaaaaggctctctgccggaagagtgccgctcatcctctttttatgccaaatgatttcggcattggaagtaccgctggacctagtgcaaccccccaccatcacccaacagtcgccgaaggactacatcattgatccccgcgagaacatcgttatccagtgcgaggccaaaggtaagccacccccgagtttttcctggacacggaacggcacgcatttcgatattgataaggatccactagttaccatgaagcctggaactgggacactgataattaatatcatgtctgaaggcaaagccgagacatacgaaggggtgtaccagtgcactgcccggaacgaacgaggagcagccgttagtaacaatatcgttgttcggccttcacgaagcccactgtggactaaggagaaactcgagcccatcaccctccagagcggtcagagtctagtgctgccctgtcgaccaccgatcggcctcccaccccccattatcttttggatggacaacagttttcagcggctcccgcagtcagagagggtttcccaagggttaaacggagacctgtacttcagtaatgtgctgcctgaggatacccgtgaggactacatatgctatgcccggttcaaccacactcagacaatacagcagaagcaacctatttcagtcaaagtgatctcagtggatgaactcaacgacacaattgctgccaacctgtcagacacagaattctatggggcgaagagcagccgcgagcggcccccaacttttctgacccccgaggggaacgccagtaacaaggaggaattgcgcggaaatgtgctctcactggaatgcatcgctgaaggcctccccacgcctattatttattgggctaaagaggatggcatgctccccaaaaatcggacggtctacaaaaacttcgaaaagaccttgcagatcattcatgtgtccgaggctgactccggcaattatcaatgcatcgccaagaacgccttgggcgcaatccaccatacaatctctgtgcgggtgaaggcagccccctattggatcactgctcctcagaacttagttttgagtcctggcgaggatggaacactaatctgtcgggcgaatggaaaccccaagcctcggatcagttggttgacaaacggggtccccatcgaaatagcacccgacgatccctcgcgcaagatcgacggggacacgattattttttctaatgttcaggaacgcagtagcgctgtgtaccagtgcaatgcatccaacgagtag

SEQ ID NO: 126301 - DNA, 186 bp, synthetic construct
  misc_feature 1..186: note = Description of Artificial Sequence: Synthetic coding sequence
  source 1..186: mol_type = other DNA
atgcagcttaagatcatgcccaagaaaaaaagactgtccgccggaagggtgcccttgatcctcttcctatgccagatgatcagtgcactcgaagttccattggatccaaagcttctggaggatctcgtacaaccccccaccatcacacagcagagcccaaaggactatattatcgacccccgctag

SEQ ID NO: 126302 - DNA, 321 bp, synthetic construct
  misc_feature 1..321: note = Description of Artificial Sequence: Synthetic coding sequence
  source 1..321: mol_type = other DNA
atgcagctgaagatcatgccaaagaaaaaaagattgagcgccggacgggtgccactgatacttttcctgtgccagatgatttccgctctggaggtgccgctcgacttggtgcagccacccactatcacccaacagagtcccaaggactacatcatcgacccaagagaaaatatcgtgattcaatgtgaggccaagggaaaaccccctcccagcttctcatggacacgcaatggaacacacttcgacatcgacaaagaccccctggttacaatgaaacctgggacgggcacccttatcatcaatatcatgagcgagggctag

SEQ ID NO: 126303 - DNA, 3915 bp, synthetic construct
  misc_feature 1..3915: note = Description of Artificial Sequence: Synthetic coding sequence
  source 1..3915: mol_type = other DNA
atgcaactcaagataatgcctaagaagaaaagactgagtgcggggcgggtgcccctcattctttttttatgtcagatgattagtgccctagaggttccactcgatccaaagctgctcgaggacctggtccaaccacctactattactcagcagtctcctaaggactacattatagaccctcgagagaacattgttattcagtgtgaggccaagggtaagccaccaccttccttctcatggacgcgcaatggcactcacttcgatattgataaagacccactggtgactatgaagcctgggaccggcactctcatcattaatataatgagcgaagggaaagccgagacatacgaaggcgtataccaatgcacagcacggaatgagagaggcgccgcggttagtaacaacatcgtagtacggcctagtaggagtcctctctggactaaggagaagttagagccgattacgctccagagcggacagtctctggtgttgccctgtcgaccgcctatcgggctgccaccacccattatcttctggatggacaattctttccagcgtctgcctcagtccgagcgcgtatctcagggtctgaacggcgatctttacttttcaaatgttctccctgaggacacacgagaagattatatctgctatgccagatttaatcatactcagacaattcagcagaaacagcctatctctgtcaaggtgatctccgtggacgagttgaatgataccatagccgcgaacttgtccgatacagagttttacggcgcgaaatcgtctcgggaaagaccccctacatttttgactccggaaggcaatgcctctaacaaggaggaactaagagggaatgtgctgagcctcgagtgcatcgccgaggggctgcccacgcctatcatctactgggcaaaggaggatggaatgcttcccaagaatcggactgtgtacaagaacttcgagaaaactctgcaaattattcacgtgtcagaggctgactcgggcaactaccagtgtatagccaagaatgcactcggcgcgattcaccataccatttcggtccgcgtgaaagctgcaccatactggattacagcccctcagaatcttgtgttgtcacctggagaggatggcactttgatctgccgcgctaacggaaatcctaagcctcggattagttggctgactaacggtgtccccattgagatcgcccctgacgacccttccagaaagatcgacggcgacaccatcatcttcagtaatgtgcaggaacgcagtagcgccgtatatcagtgcaacgcctccaacgagtacggttacttgctcgcaaatgcttttgttaatgtactcgcggagccacccaggatcttaacaccagccaacaccctgtatcaggtcatcgcgaaccgtcccgcgctactcgactgtgcgtttttcggctctccgttgcctaccattgagtggtttaagggggccaaggggagcgccttacacgaggacatttatgtgctgcacgaaaacggtacgctggagattcccgtggcccagaaggacagtaccggcacttacacatgtgttgcccgcaacaagctgggcatggcaaaaaatgaggtgcacctggaaataaaggacccaacgtggatcgtcaagcagcccgaatacgccgtcgttcagcgcgggagcatggtgtcctttgaatgcaaagttaaacatgatcatacactgtccctgaccgtactttggctgaaggacaaccgcgagttgccctccgacgagcggttcacggtcgacaaagaccacttggtcgtggctgacgtcagcgacgacgattccgggacatacacgtgtgtggccaacacaaccctggatagcgtctcagcttcagcggtgctctccgttgtggctcccacccccacccccgcaccagtgtacgatgtccctaacccacccttcgacctggaattgacagaccagctggacaaaagtgtgcagttgagttggacccctggggacgataacaatagcccgattaccaagtttataatcgagtatgaagatgcaatgcacaagcccggtctgtggcatcatcagactgaggtttcagggacccagacgactgcccagctgaagctgagcccttacgtgaattactcctttagggtgatggctgtgaattccattgggaaatccttaccatctgaagcaagcgagcagtacctgacaaaagcctccgagcctgataagaatcccactgccgtagagggcctcggctcagaacccgataatctcgtgatcacatggaagcctctgaatggatttgagtccaacgggcccggattgcagtataaagtctcatggcgccagaaagatggggatgatgagtggacctcggtcgttgtggccaacgtcagtaaatatatcgtgtctggaactccaacatttgtcccttacctaatcaaagttcaggccctgaatgacatgggcttcgctcccgaaccagctgtggtgatgggccattccggggaggacctgcctatggttgctccgggtaatgtgagagtaaacgtggtgaactctactttggctgaagtgcattgggatccggtgccgctgaaatctattagaggtcacctgcaggggtacaggatctactactggaaaactcagtcatctagtaagcgcaacaggaggcacattgaaaagaaaatactcacatttcaggggtctaaaacccacggtatgctgcccgggctggaaccgttctctcattacaccttaaatgtgagagttgtcaatggtaagggcgaagggcccgcctcgcctgatcgtgtgttcaataccccagaaggagtgccctcagccccttcctcgctcaaaattgtgaatcctaccctggactccctgacccttgaatgggaccccccttcccatcccaatggcatcctgaccgaatacacactcaagtatcagcccataaattccacacacgagctgggtccactggttgacctgaagataccggctaacaagacgcggtggactcttaaaaacctgaacttctcaacccggtacaaattctacttttacgctcagacatctgccggaagtggttcccagatcacagaggaggctgtgactaccgtcgatgaggcgggtattctgcccccagatgtgggcgctggcaaggtccaggcagtgaatccaagaatctccaatcttacagccgccgccgccgaaacttatgcgaacatcagctgggaatacgaaggccctgagcacgttaatttttatgtggagtatggggttgccgggtcaaaggaggaatggcggaaggagatcgtgaatggctcccggtctttctttgggctcaagggcttgatgccagggactgcttacaaagtgcgggttggtgctgtgggtgactccggattcgtatcgagtgaagatgtgtttgaaacagggcccgcaatggcatccaggcaagtggacatcgcaacccagggctggttcatcggcttaatgtgcgccgtggccctattgattttgatccttttaatagtgtgttttatccgtcgaaacaagggcggcaaatacccagttaaggaaaaggaggacgcccacgctgatccagagatccaacccatgaaagaggacgatgggactttcggcgaatacagtgacgcagaagatcacaagcctctgaaaaagggctccagaaccccctctgacagaacagtgaaaaaggaggactctgatgatagcctggtcgactacggcgaaggagttaacggccagtttaacgaggacggctcctttatcggccaatatagtgggaaaaaggagaaggagcccgcagagggcaatgagagcagcgaggcccccagtcccgtgaatgccatgaattcgttcgtgtag

SEQ ID NO: 126304 - DNA, 447 bp, synthetic construct
  misc_feature 1..447: note = Description of Artificial Sequence: Synthetic coding sequence
  source 1..447: mol_type = other DNA
atggcatcacggcaggtcgacatcgccacccagggctggttcatcgggctcatgtgcgcagtggcccttcttattcttatcctcctcatcgtgtgtttcatcaggagaaacaaaggcgggaagtacccggtaaaggagaaggaagatgctcacgccgatcccgagatacagcctatgaaggaggacgacgggacttttggtgagtacagcgatgcagaggaccacaaacctttgaagaaaggcagccggaccccctcagaccgaacagtcaagaaggaggacagcgacgatagcttagtggactacggagaaggggtaaatggacagtttaacgaagatggtagtttcatcggccagtattctggcaaaaaagaaaaggagccagccgagggtaacgagtcttcagaggctcctagcccggttaacgccatgaattcctttgtatag

SEQ ID NO: 126305 - DNA, 357 bp, synthetic construct
  misc_feature 1..357: note = Description of Artificial Sequence: Synthetic coding sequence
  source 1..357: mol_type = other DNA
atgcagttaaagattatgcccaaaaaaaaacgactctctgcgggacgagttcccctaatcctcttcctctgccagatgatctccgcactggaggttccattagatcctaaactgttggaggacttggttcagccccccacaataacccagcaatcccctaaggactacattattgatcctagagaaaacatcgtcattcagtgcgaggccaagggaaaaccgccgccctccttttcttggacaaggaacggtactcacttcgacattgataaggaccctctggttacaatgaagccaggtaccggtaccctgattatcaatatcatgtccgaaggcaaggccgagacatatgaatag

SEQ ID NO: 126306 - DNA, 2316 bp, synthetic construct
  misc_feature 1..2316: note = Description of Artificial Sequence: Synthetic coding sequence
  source 1..2316: mol_type = other DNA
atgcagctcaaaataatgcctaagaagaagaggttgagcgctggcagagtccccctgatactcttcctctgccagatgatctccgccctggaggtaccgttagatttagtccagccacctacaattacccaacaaagtccgaaggattatatcattgaccctagagagaacatcgtgattcagtgtgaggccaagggcaagccaccaccatcttttagctggacgagaaacggcacgcactttgacattgacaaggatccactggtgaccatgaaacctgggacaggcacattgattattaatataatgtccgagggcaaagccgagacctatgagggggtctaccagtgtacagcgcggaacgaaaggggggcagctgtctctaacaatatagtggtgcgcccaagcagatctccactgtggactaaagagaagttggaaccaatcactcttcagtctgggcagtctcttgttcttccgtgcagaccacctattggccttccaccaccgatcattttctggatggataattcattccagagactgccccaatcagagcgggtaagccaggggcttaatggtgatttgtatttctctaacgttttacccgaagacaccagagaggactacatttgttacgccaggtttaatcatactcagacaatacagcaaaagcagcctattagtgtgaaggtgattagcgtggacgagctgaacgacactatcgcggcgaaccttagcgatacagaattctacggggccaaatcatctagagagcggccacccacatttcttactcccgagggaaacgcgtctaataaagaggagctcagaggtaatgtcctctccctcgagtgtattgccgaagggctccctacaccaattatttattgggccaaagaggacggcatgctgcctaagaaccgcacagtttataagaatttcgagaagactcttcaaatcatccacgtcagtgaggccgattcagggaattatcagtgcatcgctaaaaatgctctgggcgcaattcaccataccatttccgtgagagtgaaagccgcaccatactggattactgcacctcagaacctcgtcctgagtcctggggaagacggtacgcttatttgtcgggcaaacggaaaccctaaacctcgaattagttggcttacaaatggagtccccatcgagatcgccccagacgaccctagccggaagatcgacggcgacactatcattttcagcaatgtgcaggagcgatccagcgccgtatatcaatgtaatgcatcaaatgagtatgggtatttactggcaaacgcctttgttaatgttctggccgagccacctcgcatcctcacaccagctaacaccttgtaccaggtgattgccaaccgaccggcccttttggattgtgctttttttggatctcccctaccgaccattgagtggtttaaaggagccaaaggatctgctctgcatgaggatatatatgttctccacgagaatggaacgctcgagatacctgttgcacagaaggacagcacaggtacatacacatgcgtggctcgaaacaaattgggaatggccaagaacgaggtgcatctggagattaaagatccgacctggatcgtgaagcagcccgagtatgctgtcgtccagagaggatctatggtgtcttttgagtgtaaggtaaaacatgaccacacactatccttaacagtgctgtggctgaaggacaatcgcgaactaccctctgacgaacgctttacagttgacaaagatcacttggtggttgctgatgtttctgatgatgactctggtacatacacttgtgttgcaaacacaacccttgacagcgtgagcgcctctgcagtccttagtgtggttgatgttccaaacccaccttttgacctggaacttactgatcaattggacaagagtgtccagttaagttggacaccgggcgatgacaataactcacccatcacaaaattcatcatcgagtacgaggacgctatgcataaacccgggttatggcaccaccagaccgaggtaagtggtacgcagaccaccgctcagctgaagctgagtccttacgtgaattactcattccgggtgatggctgtcaatagtattgggaagagcctgccaagtgaggcttccgagcagtacctgactaaggcttctgagcccgataagaatccaaccgctgtggaggggctcggttctgagcctgacaacctcgtcattacttggaaaccgctcaacggtttcgaatccaatgggccgggattacagacttccaccgcgtctttctag

SEQ ID NO: 126307 - DNA, 321 bp, synthetic construct
  misc_feature 1..321: note = Description of Artificial Sequence: Synthetic coding sequence
  source 1..321: mol_type = other DNA
atgcagcttaaaattatgcccaagaagaaaagactgagtgcaggtcgcgtcccattgatccttttcctatgccagatgatctcggctctggaagttcccctggatctggtgcagccgccaactatcacacagcagtcaccaaaggactatattatcgatcctcgggagaatatagtcatccaatgtgaggctaaaggaaagcctccaccttctttttcctggactcggaacgggacccactttgacatcgataaagatccacttgtcactatgaagcccgggactggaacactgataattaacattatgagcgagggatag

SEQ ID NO: 126308 - DNA, 3462 bp, synthetic construct
  misc_feature 1..3462: note = Description of Artificial Sequence: Synthetic coding sequence
  source 1..3462: mol_type = other DNA
atgcagttgaaaatcatgccaaagaagaagcgcctgtccgcaggccgcgtcccgttgatattgtttttgtgccagatgattagcgctctggaagtcccactggatcaaaagagcaccgaggtgatggttcagcctccaacaataacccaacagtcccccaaggattatatcatagaccccagagagaacattgttatccagtgcgaggccaaaggcaagccaccccccagtttttcctggaccaggaatggaacgcactttgacatcgacaaggatcctctagttacaatgaagcccgggacaggcactctgataataaacatcatgtctgaaggcaaagcagaaacctacgagggcgtctatcaatgcactgcaagaaacgaacgcggcgcagctgtaagcaataatattgtagtccggccctcacgttcacctttgtggactaaagagaagttggagcccattaccctccagtctggccaatccctggtgctgccctgccgacctcctatcggcctgccaccccccattatcttctggatggataatagctttcagagactgcctcaatcggagagagtatcccaaggactaaacggggacctctactttagcaatgtgctaccagaagacacacgcgaggactacatctgttacgcgcgtttcaaccatactcagaccatacaacaaaaacagcccatcagtgttaaagtcatctccgtggacgagctgaacgacaccattgccgcaaatttgtctgacacagagttttacggcgctaagtctagccgagaacgacccccaaccttcctgacacccgaaggcaacgccagcaataaggaggaactgagaggaaacgttttgagtttggagtgcatcgcagaaggcctgcctactcccatcatttattgggccaaagaggatggcatgctgcctaagaaccggactgtatataagaacttcgagaaaactctgcaaataattcacgtgtctgaagctgactccggaaattatcagtgcattgcaaagaacgcgctcggggctattcatcacactatctccgtgcgagtaaaggccgctccatattggatcactgcaccacagaatttggtccttagtcccggagaggacggtacactgatctgccgagcaaacggcaaccctaagcctcggataagctggctgactaatggcgtgcctatcgaaatcgcccctgatgatccctcaagaaagatcgatggagatacaattattttcagcaacgtgcaggaaaggtcaagtgccgtgtatcaatgtaacgctagtaacgaatacggatacctgctggccaatgcgttcgtgaacgttctggccgaaccaccgcgcatcctcacacccgcaaatactctgtaccaggtaatcgccaaccgaccagctctgcttgactgcgcgttttttgggtccccattgccgaccattgagtggtttaagggggccaagggatctgctctgcatgaagacatctacgttctccacgagaatggaacactggaaatcccagtggctcaaaaggactccactgggacctatacttgtgtcgcacggaacaagctggggatggccaaaaatgaggtgcacttggagattaaagatcccacctggatcgttaagcagcccgaatatgcagtggttcagaggggcagcatggtgagcttcgagtgcaaggtgaaacacgaccacaccctgagcctaacggtcctgtggctaaaggataatcgggagctgccatcagatgaacgtttcacagtggacaaagatcacctggttgtagccgatgtctcggacgacgattcaggtacctacacatgcgtcgccaacaccaccctcgactccgtgagtgccagtgcagtgctcagcgttgtagcccccacccctacccccgccccagtgtacgacgttccaaacccgccattcgacctcgagctgacagatcaactcgataaatctgtccagctgagctggactccaggggatgacaacaactcccctatcacaaagtttatcattgagtacgaggatgcgatgcataagccgggactttggcatcatcagacagaggtgtctggcacccaaacaaccgctcagctgaagctttcaccgtacgtgaactactcattcagagtgatggctgtcaattctattggaaagtctttgccctctgaagccagcgagcaatatttaaccaaagcgtccgaacccgataagaaccccaccgccgtggaggggctgggtagtgagcccgataatctggttatcacctggaagcctctgaacgggttcgagagcaatggaccaggtctgcagtataaggtatcctggcgtcagaaggatggtgacgacgaatggaccagcgttgttgttgctaacgtgtccaagtatattgtgagcggcacgccaacctttgtgccctacttaatcaaggtacaggccctgaacgatatgggtttcgcccccgaaccggcagtggttatgggacattctggagaggatctgcctatggtggcgcccgggaacgtgcgggtgaatgttgttaactccactctcgccgaagtccattgggaccccgtcccgctgaaatctattagagggcacttacaagggtaccgaatatattactggaaaacgcagagttcttcaaagagaaaccgccgacacatagaaaagaagattttgacctttcagggcagcaagacgcacggaatgctaccgggtctggagcccttctcacactatacactgaatgtccgggttgtgaatggaaagggtgaggggcccgcttctccggaccgggtatttaacacaccagaaggtgtgccatcggcccccagttctctgaagattgtcaaccccactcttgattctttgacgctggaatgggatcccccttctcaccccaacggtattctgactgaatacacattgaaataccagccgattaatagcacacatgaattgggacctttggtcgacctgaaaatacctgccaataagactcgctggacgctgaaaaacctgaattttagtactcggtataagttctacttttatgcacagacctccgccggctccggttcacaaatcacagaagaagctgtcacaaccgtggatgaagccggaatcctccctccagatgtaggcgctgggaaagccatggcatcccgacaggtggatattgcaacgcagggctggttcatcggattgatgtgcgctgtggccctgctcatcctcatcctcctgattgtgtgctttataagaagaaataagggcggaaaataccctgtaaaggagaaggaggatgcacatgccgaccctgagattcagccaatgaaggaggacgacgggaccttcggagaatattccgatgcggaggatcataaacctctcaagaaaggtagtaggactcctagtgatcggacagtgtag

SEQ ID NO: 126309 - DNA, 681 bp, synthetic construct
  misc_feature 1..681: note = Description of Artificial Sequence: Synthetic coding sequence
  source 1..681: mol_type = other DNA
atgcaagtccatctgacagtacaggtcccccccaaaatctatgatatctcaaacgacatgacagtgaacgaggggaccaatgtcacgctgacttgcctggccactggcaaacctgagccctccatttcttggcggcacattagcccttcagccaagccatttgaaaacggccagtatttggatatttacggcattaccagagaccaggctggcgaatacgagtgtagtgccgaaaatgatgtgtcctttccggatgtgcggaaggttaaagtagtagttaattttgcacctactattcaggaaattaagagtggaaccgtgaccccgggaaggtctggcttgatccgatgtgaaggcgctggagtaccacccccagcattcgaatggtataaaggtgaaaaaaagctcttcaacggccagcaaggaatcatcatccaaaacttcagtaccagatcgatattaaccgttaccaatgtgacgcaggaacacttcggaaattacacctgcgtcgccgccaataaattaggtactaccaacgctagcctgcctctgaatcccccatccacagcccagtacggaatcaccggtagcgcagacgtgctgttctcctgctggtacttagtcctgactctatcctctttcaccagcatcttctatctaaaaaatgccatacttcaatag

SEQ ID NO: 126310 - DNA, 1065 bp, synthetic construct
  misc_feature 1..1065: note = Description of Artificial Sequence: Synthetic coding sequence
  source 1..1065: mol_type = other DNA
atggacatgatgctactggtgcagggcgcatgttgtagcaaccagtggctcgcggccgttctgctgagcctgtgttgtctgctgccatcctgcctcccagccggacagtcagtggactttccatgggccgctgtggataatatgatggtgaggaagggtgacacggccgtgttacgctgctatctggaagacggtgccagcaaaggcgcatggctcaatagatcaagcatcatctttgcaggaggcgacaaatggtcagtagaccctagggtctcaatctccacccttaataaaagagactacagtttgcagattcaaaacgtggacgtgaccgatgacggaccttatacatgctctgtgcagacccagcacacaccaagaacgatgcaggtacatcttactgtgcaggtgccacccaaaatatacgatatctccaatgatatgaccgtgaacgagggaacaaacgtaacactgacctgcctggccaccggaaaacccgagccaagcatttcatggcggcatatttctccctctgccaagcccttcgagaacggccagtacctcgatatctatgggattacccgggatcaggccggcgagtatgagtgctccgcggagaacgatgtgtccttcccagacgtaagaaaagttaaggtagttgtaaacttcgcacctacaatacaggagatcaaaagcgggacagtcacacctggtcgctcagggcttatcagatgcgaaggtgcaggggtgcctcctcctgcatttgaatggtataagggcgagaagaaactcttcaatggtcagcaaggtattattatccaaaactttagtactcggtcgatcctgacagtaaccaatgtgacacaggagcatttcggcaactacacatgtgtggctgccaataaattgggtaccaccaatgccagcctgcccctgaacccgccaagcactgcacagtacggaattacggggtctgccgatgtgctgtttagctgctggtacctcgtcctcacgctctcatcctttacctccatcttctatttgaagaatgctattctgcagtag

SEQ ID NO: 126311 - DNA, 927 bp, synthetic construct
  misc_feature 1..927: note = Description of Artificial Sequence: Synthetic coding sequence
  source 1..927: mol_type = other DNA
atgatgttgctggtacagggcgcctgttgcagcaatcagtggctggcagccgttctgttgagcctctgctgtctcctgcctagctgtctgcccgccggccaatctgtggatttcccctgggccgctgttgataacatgatggtgcggaagggtgacacggccgtactgcgctgctacctggaggatggcgccagtaaaggggcatggctgaaccgaagtagcatcatctttgcggggggggacaagtggagtgtggatcccagagtaagtataagcaccctgaataagcgggactattccttgcagatacagaatgttgacgtgactgacgacggcccttatacttgctccgttcaaacacagcatactccccgcaccatgcaggtgcaccttaccgtccaagtgcctcctaagatctacgacatctctaatgacatgacagtcaacgagggaaccaacgtaaccttgacctgtctggccacgggaaaacccgaaccaagcatcagttggcgtcacattagcccctcagtggcgccgaccatacaggaaatcaaaagcgggacagtaactccagggaggtctggcctcatacgctgcgaaggcgccggggttccgccaccagccttcgaatggtacaaaggggagaagaagctgttcaacgggcagcaaggcatcataatccagaattttagcaccagatccatactgaccgtgaccaacgtgactcaggaacatttcgggaactacacatgtgttgccgcgaacaagctcggcacaaccaatgccagccttcctctaaatcccccctcgactgcgcagtacgggataaccggctcagccgatgtcctgttcagttgttggtacctggtccttacattatcatcatttacgtccattttctacttgaaaaatgctattttacaatag

SEQ ID NO: 126312 - DNA, 2133 bp, synthetic construct
  misc_feature 1..2133: note = Description of Artificial Sequence: Synthetic coding sequence
  source 1..2133: mol_type = other DNA
atggaaacacgggaaagtgaagatctggaaaagacacggaggaagagcgcgtctgaccagtggaacacagataatgagcccgccaaggttaaacctgaattgctgcctgaaaaggaggaaacttcacaagccgaccaagatattcaggacaaagagcctcactgtcacattcctataaagcgaaacagtatttttaatcgatctattcgacggaaaagtaaagccaaagctagagacaatcccgagcgcaatgccagctgcttagcagacagtcaagacaacggtaagtcagttaatgagccgctgactctaaatatcccatggtcccggatgcctccctgtcgcacagctatgcagactgatcctggcgctcaggagatgtctgagtcatcatcaacaccaggcaacggagcaacgcctgaagagtggccagctctcgcagactctcccacaactctgactgaggcccttaggatgattcatcctataccggcagactcttggcgcaatctgatcgagcagattgggcttctgtaccaggaatacagggataagtcgacacttcaggagattgagactcggcggcagcaagacgctgaaatcgaagataatacaaatgggagcccagcaagcgaggacacccctgaggaagaggaagaggaagaggaggaggaggagcctgcatcacctccagagagaaagacgctcccgcagatttgccttttgtcaaacccccacagtcggttcaacctctggcaggacctacctgaaatccgcagcagtggcgttttggaaatactgcagccggaggagatcaagctgcaggaggctatgttcgagctggtgacatccgaagcctcctactataagtctctgaacctgctggtcagtcacttcatggagaacgagaggatcagaaaaatcctacatccctctgaggcccacattttgtttagtaacgtgctggatgttctcgcagtctccgaacgcttcttgctggaacttgagcataggatggaggagaatattgtaatcagcgatgtttgtgatatcgtgtaccgatacgccgctgaccacttctcagtgtatatcacatacgtctcgaaccaaacgtatcaggaacgcacttacaagcagcttctccaggaaaaagccgctttcagagagctgatcgcccaactggaactggacccgaaatgcagaggacttcccttcagcagcttcctgatattaccattccaacggattacacggctgaagttgttggtgcagaacatcctcaaacgggtagaagagcgctcagagagggaatgcacagctctggacgcccataaggaactggaaatggtagtgaaagcctgcaatgaaggcgtgcgcaaaatgtctcggactgaacagatgatttcaattcagaaaaagatggaatttaaaatcaaatcagtgccgattatctcacactcaaggtggctcctgaaacagggcgaactgcagcagatgtctggtccgaaaactagccgaaccctcaggaccaagaagctgttccacgagatatacctgttcctattcaacgacctgctggtgatttgtcggcaaattccaggcgacaagtatcaggtgttcgactcggccccgcgtgggctcttgcgggtggaggagttggaagaccagggccaaactctggcgaatgtgtttatcctgcgtctgctggaaaacgcagacgatagagaggccacgtatatgctgaaagcatcatctcaatctgaaatgaagcggtggatgacctctctcgctcctaatcggcgaaccaaatttgtgtccttcacgagccggctcctcgattgccctcaggtgcaatgcgtgcatccttatgtggcacagcagcccgatgagttaacactggaattggccgacatcctgaatattctcgataagacagatgatggatggatctttggggaacgcttacacgaccaggaacgtggttggttccccagctctatgaccgaggagattctgaacccaaaaatcagatctcagaacctgaaagagtgcttcagggtccacaaaatggacgacccacaaaggagtcagaacaaggacagacgcaagttggggtccaggaaccgtcagtag

SEQ ID NO: 126313 - DNA, 1857 bp, synthetic construct
  misc_feature 1..1857: note = Description of Artificial Sequence: Synthetic coding sequence
  source 1..1857: mol_type = other DNA
atggagttactggctgctgcgttttcagctgcttgtgcagtggatcatgattcctcaacatccgagagcgatgccagagactctgctgctggccacctgccaggatcggagtctagttcaacgcctggaaatggcgctacccctgaggagtggcccgcccttgccgacagccccacaaccctgacagaagcacttcggatgattcatcccatacccgctgacagctggaggaacctcattgagcagataggcctgttgtaccaggaatacagggacaaaagtactctgcaggaaattgagacccgaagacagcaagacgccgagatcgaggataataccaacgggagtcctgcaagcgaagacaccccagaggaggaagaggaagaggaggaagaagaggagcctgcttctcctcccgagcgcaaaacactaccacagatttgcctgctgagcaaccctcattccaggtttaacctctggcaggatttgccagagatcaggtcctcaggggtgttagagatcctccagccggaagagatcaaactgcaggaagccatgttcgagttggtgacatccgaagctagctattacaaaagcttgaacctgctggtgtctcatttcatggagaacgagcgcatccggaaaattttacatccctctgaggcccacattctgtttagtaacgtgctcgatgtgctggccgtgtccgaacgattcttgctggagttagagcatcggatggaggagaatattgttatcagtgatgtatgtgatattgtgtaccggtacgccgccgatcatttctccgtgtatatcacttatgtgagcaatcagacataccaggaaagaacttacaaacagctcctgcaggaaaaagctgccttccgagagctgatcgcccagctcgaactggaccccaagtgcaggggcttacccttttcaagcttcttaatactccccttccagaggatcacaagactgaaactcctcgtacaaaatattcttaaaagagtggaagaacgaagtgaacgtgaatgcacggcacttgacgctcacaaagaattggaaatggtggtcaaggcctgcaacgaaggagtgagaaagatgtcccggacagagcagatgatctctatccagaaaaagatggagttcaagatcaagtccgtccccataatttctcatagtcgctggctgcttaagcagggggagttgcagcagatgtctggtccgaaaaccagccggactctgaggaccaagaagttgtttcacgagatttacctgttcctattcaacgaccttctggtgatctgccgccaaatcccaggagataagtaccaagtgtttgactcggctccccgaggcctccttagagtggaagagttggaggaccaaggtcagacactggccaacgtctttatccttcgcttgctggagaacgccgatgatcgcgaggccacatatatgttgaaggcctcttcccagtccgaaatgaagaggtggatgacatctctcgccccaaacaggcgcactaagtttgtctcttttacatcccggcttcttgattgcccacaggtgcagtgtgttcacccctatgtggcccagcagcccgatgagctgaccctcgagctggccgacatactgaatattctagataaaaccgacgatgggtggatctttggcgagagactccatgatcaggagcgtgggtggtttccttcaagcatgactgaggagatcctaaaccctaaaatacgctcccaaaacctgaaagaatgttttcgagtacataaaatggacgacccccagcgcagccagaacaaagacaggaggaagctcggatcccggaatcgccagtag

SEQ ID NO: 126314 - DNA, 717 bp, synthetic construct
  misc_feature 1..717: note = Description of Artificial Sequence: Synthetic coding sequence
  source 1..717: mol_type = other DNA
atggagctgctcgcggccgcattttccgcggcttgcgcagtggatcatgattctagcacctcagaatctgatgcgcgagactcagcagccggccatctccctggatcagagtctagctccactccaggcaatggagctacccccgaggaatggcctgcgcttgcagactcaccaaccactctgacagaggcccttaggatgattcaccctatccccgccgactcctggaggaacttgattgagcagattgggttactgtatcaagagtatagggacaagagcacgcttcaggagatcgaaacccggcgacagcaggacgcagagattgaagacaataccaacggttcaccagcttcggaggatactcctgaagaagaggaggaggaggaggaagaagaggagcccgcttcccctcctgagagaaagacactcccccagatttgtctactttccaatcctcatagccgtttcaacctgtggcaggacttaccagagatccggtctagcggcgtcctggaaattctacagccagaggaaattaaactgcaagaagccatgtttgaacttgtgacaagtgaagcaagctactacaaatccttgaatctgttagtaagtcattttatggaaaacgagcggattcgcaaaatcttgcatccaagcgaagcccatattctgttctccaatgttttggacgtgctggccgtcagcgagaggtag

SEQ ID NO: 126315 - DNA, 1302 bp, synthetic construct
  misc_feature 1..1302: note = Description of Artificial Sequence: Synthetic coding sequence
  source 1..1302: mol_type = other DNA
atgtttgagctggtgacttcagaggcctcctattacaagtcgttgaatctgctcgtgtcccactttatggagaatgagcgaataagaaagatcctgcacccatcagaggcgcatattctgttttctaacgtcttagatgttctcgccgtctctgagcgatttcttctcgaactcgagcaccgcatggaagagaacattgtcatttctgacgtttgcgacatagtctaccggtatgctgccgaccacttctctgtctacataacttacgtaagtaatcaaacttaccaggagcgtacatacaaacaactgcttcaggagaaagctgctttccgcgagctgatagcccagctggaactggatcctaaatgcaggggactaccgttctcttccttcctgattttgccatttcagcgcataactaggttaaaactgctggtgcaaaacattctaaagcgggtcgaagagaggtcagagcgcgagtgcacagctctggatgcccacaaggagctcgagatggtcgttaaggcctgtaacgaaggcgttcgtaagatgtcacgcaccgaacagatgatttcaatacagaagaaaatggagtttaagattaagtctgttccaatcatcagccacagcagatggctactgaagcagggggaactgcagcagatgtcagggcctaagactagcagaacgttgagaaccaagaaactgtttcacgagatttatctgttcctgtttaacgacttactggtgatctgtagacagatccctggggataaatatcaagtgtttgacagcgccccgagaggcctgttgcgggtggaagagctcgaagatcaggggcagaccctggccaatgtttttattctgcgactcctcgagaacgcggacgatagagaagcaacgtacatgctgaaagcttctagtcagtcggagatgaagagatggatgacctccttggcgcccaacaggaggaccaaattcgtctccttcacgagccggctgttggactgcccgcaggtgcagtgcgtgcacccttatgtggcacagcagcccgacgaattaacgctggaactcgctgatatcctgaacatacttgataaaactgacgatggctggatttttggcgagcgacttcatgaccaggaacgcggatggttccctagcagtatgacagaggaaattctgaaccctaaaatacggtctcagaacctcaaagagtgctttcgggtgcacaaaatggatgacccacagagatcacagaacaaagaccgcagaaaattgggaagccggaataggcagtag

SEQ ID NO: 126316 - DNA, 1803 bp, synthetic construct
  misc_feature 1..1803: note = Description of Artificial Sequence: Synthetic coding sequence
  source 1..1803: mol_type = other DNA
atgcccccatgccgtactgccatgcagaccgatccgggagcacaggaaatgtccgagtccagcagcaccccagggaacggcgcgactcctgaagaatggccggccttagctgacagccctacaaccctgacagaagctctccggatgatccaccccattcctgcagattcttggcgaaacctgatagaacaaatcggtcttctctaccaggaataccgtgacaaatctactctgcaagagattgagacccgcaggcagcaggatgctgaaatcgaggacaatacgaacggcagccctgcctccgaggacactcccgaggaggaagaggaggaggaagaggaggaggagcctgcctcaccacctgaacgaaagacccttccacagatttgcctgctttccaatcctcattctagatttaatctgtggcaggatctcccagaaatccgcagctccggtgtgcttgagatccttcagcccgaggaaattaaactgcaggaagccatgttcgaacttgttacaagcgaagcttcgtattacaagtccctgaatcttctggtctcgcactttatggaaaacgagcggatccgcaagatactgcatccatctgaggcccacatactcttctctaacgtcttagatgtactcgccgtatctgaacgtttcttgctggagcttgaacaccgcatggaggagaacatcgttatttccgatgtatgcgacatcgtttatcgttatgctgctgaccacttttctgtctatataacatacgtgagcaatcagacttaccaggaacggacttacaagcagctcctgcaggaaaaggctgccttccgagagctcatagcacagctggaacttgatcctaaatgtcgtggtctcccattctcaagtttcctgatcctgcctttccaaaggattacaagacttaagctcttagtccagaacattcttaagagggtcgaagagcgcagcgaaagggaatgcacagcgctggatgcgcacaaagagctggaaatggtcgtgaaggcctgcaatgagggagtgaggaaaatgtcccgaaccgagcagatgattagtatccaaaagaaaatggaattcaagattaaatctgtgcctattatatcacacagccggtggcttctgaagcagggcgagctgcagcagatgtccgggcccaaaacatcccgtactttgcgtacaaaaaagttgtttcatgagatctacttgttcctgtttaatgacctcctagttatatgcagacagattccaggtgataaatatcaggtgttcgactccgctccacggggcctgctgcgtgtagaagagctggaagaccagggccaaacgttggcaaacgtgttcattctcagattactggagaacgccgatgacagagaagctacttacatgctcaaggcctctagccagagcgagatgaaaagatggatgacgtccctggcaccgaatcggaggactaaattcgtcagctttacgtcccggcttctggactgccctcaggtccagtgcgtgcatccatacgtggctcaacagccagatgaattgacgctggagctcgccgacatcttgaacatcctagacaagacagatgatgggtggatctttggcgaaagactgcatgatcaggagcgcggctggtttccaagtagcatgacggaagagattctgaaccctaagatcagatctcagaacctcaaagagtgtttccgcgtgcataaaatggatgatccgcagcgctcccagaacaaggacaggcggaagctagggtcccgtaaccgtcagtag

SEQ ID NO: 126317 - DNA, 705 bp, synthetic construct
  misc_feature 1..705: note = Description of Artificial Sequence: Synthetic coding sequence
  source 1..705: mol_type = other DNA
atgacaggatccagcgtgttcgattacatccaccccggtgatcatagtgaagtgctggaacagttgggtctgaggactcctacgccaggtcctcccactcctccatctgtcagcagtagctcctccagttcttcatcgttagctgacacaccagaaattgaagcttccctgaccaaggtgcccccatccagtcttgtgcaggaacgatccttctttgtgagaatgaaatcaaccctcacaaagaggggtctgcacgtgaaggcttcaggatacaaagtgattcatgtcacaggccgtctgcgcgctcatgcacttggcctcgttgccctgggccacacactgccccccgctcctctggcagagctgcccttgcacgggcacatgatcgtgttcaggcttagcctcggactgaccattttggcctgtgagagcagggtctccgaccacatggacctcgggccttccgaattagttggccgctcctgttaccagttcgtccacggccaggacgcaactaggatacgacaatcacacgtggacagttgccgcggcctcagagtcgcagccgtatgtggacatagtggctgggagcgggaggagccacggggcgccccttgcgccctcggacagccgagggcccagccctcccgtgggtggccgaacagtttcggctgtttacccgctagctcccagagaggcctctag

SEQ ID NO: 126318 - DNA, 1773 bp, synthetic construct
  misc_feature 1..1773: note = Description of Artificial Sequence: Synthetic coding sequence
  source 1..1773: mol_type = other DNA
atggctgctccttatcctgggtctggagggggtagcgaagtcaagtgcgtggggggacgcggggcgtctgtgccatgggattttctccctggtctcatggtgaaggccccaagtggtccttgcctgcaagcccagcgaaaggagaaaagtagaaatgccgctcgctcccgtcgcggtaaagagaacctagagttcttcgagctagcaaaactgctcccactgccaggcgctatcagcagccagctggataaagcatccatcgtgcggctgtccgtcacctaccttagacttcggagatttgctgccttaggcgctccaccttggggcctgagagccgccggaccacccgccgggctagcccccggtcgcagggggcccgccgctctggtcagcgaagtctttgaacagcatctgggcggacatattttgcagtcgctggatggcttcgtgttcgccctgaaccaggagggaaaattcttatacatctcagaaacagtcagcatttacttgggtttgtcccaagtggagatgacgggtagctctgttttcgattacattcatcccggtgatcactcagaggtcctcgaacagctgggattgcgaacgcccaccccagggccccctactcccccgtctgtaagcagttccagctcttccagtagcagcctcgccgatactcctgagatagaggcatcgctgactaaagtccccccaagctcgctcgtgcaggagcgcagcttcttcgtgaggatgaagtccactctcaccaaaaggggcttacacgtgaaagcatcgggctataaggttatccacgtgacagggagactgcgtgcgcacgccctgggtctcgtcgcattggggcacaccctccccccggccccgcttgctgaattgccgctccatgggcacatgattgtgttccgcctgtcactgggtctaacaattttagcctgcgagtcacgcgttagtgaccatatggatttgggacctagtgaattagtggggcgctcatgctatcagtttgtgcatggccaggatgctaccagaatcaggcagtcccacgttgacctgctcgacaaggggcaggtgatgacagggtactaccgttggctgcagagagccgggggctttgtctggctgcagtctgtcgcaacagttgcagggagtggtaagtccccaggcgaacatcatgtgttgtgggtctcacatgtgctgagccaggcagagggaggacagacgccactggatgcttttcagctccccgcatctgtagcttgtgaagaggcttcatcaccgggccccgagcctacagagcccgaaccgcctaccgaaggaaagcaagcagcccccgctgagaacgaggcaccacagacacagggtaagcgtattaaggtggagccaggccccagagaaactaaggggtcggaagactctggagatgaagatcccagctctcacccggccacccccaggcccgaatttacctccgtcatcagggcaggcgtcctaaaacaagatcccgtgcgaccctgggggttggccccccccggtgaccctccgcccacgctgctccacgctggtttcctgccacccgtggtgagggggctttgtacccccggaacaattcgctatgggccggccgagcttggcctggtgtacccacacttgcagaggttagggcccggaccagcgttgcccgaggccttctaccctccccttggcttgccctacccaggtccagcgggcacccggttgcctcgtaaaggcgactag

SEQ ID NO: 126319 - DNA, 2475 bp, synthetic construct
  misc_feature 1..2475: note = Description of Artificial Sequence: Synthetic coding sequence
  source 1..2475: mol_type = other DNA
atggacgaggatgaaaaggatcgagcaaagcgcgcctccaggaataagtctgagaagaaaaggcgcgatcaattcaacgtcctcattaaagagttgtcttccatgctgccgggcaacaccaggaagatggacaagacaaccgttctggagaaggtgatcgggttcttgcagaagcacaacgaggtttcggcccagactgagatttgtgacatccagcaagattggaaaccatcctttctgtcaaatgaagaatttactcagctgatgctggaagcgctcgatgggttcatcatcgccgttactacagacggctcgatcatctacgtgagtgactccataaccccattgctggggcatttgccttcagacgtgatggatcaaaacttacttaatttcctgcctgaacaggaacatagcgaggtatataaaattctctcaagccatatgctagtcaccgattccccatcccccgaataccttaaaagcgatagcgacctggagttttattgtcatctcctgcgaggctccctgaacccaaaggagtttcccacctacgaatacatcaaatttgttgggaatttcaggtcatataataacgtcccaagcccgagttgtaacggtttcgacaatacactgagcagaccatgtagagtgcccttaggtaaagaagtgtgtttcatcgccacagtgagactggccacaccccaatttctcaaggagatgtgtatcgtggacgagcctttggaggagttcacctcacggcactctctagagtggaagttcctcttcctggaccatagagccccacctatcatcggatacttgccattcgaagtactcggcacaagcggatacgactattaccacattgacgatctcgagctccttgccaggtgccaccagcaccttatgcagtttgggaaaggtaaatcctgctgttataggtttctgaccaaaggccagcagtggatctggctccagacccactattatataacttaccatcagtggaatagcaagcccgagttcattgtctgcacgcatagcgtggtgtcttacgcggacgtccgtgtcgaaaggcgccaggagcttgccctggaagatccaccctcagaagccttgcactcctccgccctgaaggataaaggatcctcccttgagccccgccagcattttaacaccctcgacgttggggcctccggcctcaacacatcacactctccttctgcttcttctagaagcagtcataagtcatcccatacggctatgtccgaacctacttctacccctacaaaattaatggccgaagcctcgaccccagccttaccacggagtgccacattacctcaggagctccccgtgccgggtctctcacaggcagccacaatgcccgcccctttgccatctccaagcagttgcgatttgacacagcagttgctgcctcagaccgtacttcagtccactccggccccaatggcgcagttttcagctcaattttcaatgttccagaccataaaagaccagctcgagcagagaacccggatccttcaggctaatattcgctggcaacaagaggagcttcataaaatccaagagcagctgtgtctcgttcaggactccaacgtgcagatgttcttgcagcagccagcggtatcactaagttttagttcaactcagcggcctgaggctcagcaacaacttcagcaaagaagtgcagccgtaacccagcctcagctaggcgcaggacctcagctgcctggccagatctcctcagctcaggtcacaagtcagcacttgctgagagaaagcagcgtgatttcaacccagggacctaaacctatgcggtcaagccagctgatgcaaagttctgggagaagcggctcatctttggtgagcccgttttctagcgccaccgccgcactcccgcccagtctaaacctgaccacccccgcctctaccagccaggacgcgagccagtgtcagccatctcccgatttttcgcacgaccggcagctgaggttactgctcagtcagcccattcagcccatgatgccaggaagttgtgacgcacgtcagcctagtgaggtctcgcggacaggcaggcaggtaaaatatgcacagtcacagaccgtgtttcagaatcctgatgcccacccagctaattccagctccgccccgatgcccgtgcttctaatgggacaggccgtcctacaccccagcttccccgcttcacaacccagccctcttcagccggcccaagccaggcaacagccgccacagcattatctacaagtgcaagcacctactagcctgcacagcgagcagcaggatagcctgttactatccacttactcccagcagccggggacacttggttatccccagccaccccctgcacagccacagccccttaggccacctagaagagttagtagcctctccgagagcagcgggctgcagcagccgcccagatag

SEQ ID NO: 126320 - DNA, 2670 bp, synthetic construct
  misc_feature 1..2670: note = Description of Artificial Sequence: Synthetic coding sequence
  source 1..2670: mol_type = other DNA
atgtatgcatatggattcgtgggccggtgtgccccgttccccgccgaggagggacggacgtttgatctttcagaggaattgggccgttcggtgacccgcgaggggacagggactactcgattaaattccgagccggttccgcttctgtgtttgccccttctgaactgctcccggaagaactgcatcgagaatctaatggatgaagacgagaaagatagggcaaaaagggcctcaagaaataagtctgaaaagaagcgaagggatcagttcaacgtactgatcaaagaattgtccagtatgttacccggaaacacaaggaagatggacaaaaccactgtcctggaaaaggtgatcggtttcctgcagaaacacaacgaggttagcgctcagaccgagatttgtgatatccagcaggattggaagccgtcctttctgtcaaatgaggaattcacacagttaatgctcgaagcgctcgacgggtttatcattgccgtcaccacagatggaagtataatttacgtatctgactccatcaccccgcttctaggacatctgcccagtgacgtgatggaccaaaatcttctcaacttcctcccagaacaggagcactccgaagtgtataagatacttagctcacacatgcttgtcaccgatagtccttcccccgagtatctcaagagcgactccgacttggaattttactgccacctgctgcgcggttcgctcaacccgaaagagttccctacatacgagtacatcaagtttgtagggaactttaggtcttacaataatgtgccatccccaagctgcaacgggttcgacaacactctcagccggccttgcagggttcccctcggtaaagaagtgtgctttattgcaaccgtacggctggcaactccccagttcctgaaggaaatgtgcattgtggatgaaccacttgaggaatttacctcccgtcatagcttggaatggaagtttttgttcctggatcatagagcaccgccgattattggatacctgcctttcgaagtgctgggcactagcggttatgactattatcacattgatgacctggagctcctggctagatgtcaccagcatctcatgcagtttggtaagggcaaatcgtgctgctatcgctttctgaccaagggccagcagtggatttggctccaaactcattactacatcacgtaccaccagtggaatagcaaacctgagtttatcgtttgtacccacagtgtggttagctatgccgatgtccgtgtcgagcgtcgtcaggaactggcccttgaggatccaccttctgaagccttacactctagcgcgctgaaggacaagggctccagtctggagcctcgccagcactttaacaccttggacgtcggggcgtccggattgaatacaagccattcccccagcgcgtcatccagatccagtcacaagagcagtcacacagctatgagcgaaccaactagtacacccacaaagctgatggccgaggctagtactcccgcgctgcccagaagcgccaccttaccgcaagaattaccagtacccgggctcagccaggccgccacaatgcccgcaccattgccatccccctccagttgcgacttgactcagcagttactgccgcagacagtactgcagagcaccccagcccctatggcccagttctcagcgcagtttagcatgttccagaccataaaggatcagctggaacaaagaactaggattttgcaggcaaatattaggtggcagcaggaggaacttcataagattcaagagcagctgtgtctggtccaggactccaacgtgcaaatgttcctgcaacagcctgccgtatcactgtccttttccagtacacaacgtcccgaggctcagcagcagttgcaacaaaggtcagcagcggtgactcaacctcagttgggcgcaggcccccagttgccaggacagatctcttcagcccaagtgacatcccagcatctcttaagggagtccagtgtgatttcaacccagggccctaagcctatgcggtcgagtcagcttatgcagtcctctggacgctcaggcagtagcttggtatcaccattcagttccgcaaccgcggcattgccaccctccctgaatcttacaactcctgcatcgacgagccaggatgcaagccaatgccaaccttcccctgatttttcccacgacagacaactgagactactcttgtctcaaccaatacagcccatgatgccaggtagctgtgatgcacgccaaccctccgaggtgagccggacaggaaggcaggtgaagtatgcgcagtctcagacagtcttccagaaccctgatgctcacccggccaatagctcctcggccccaatgccagtgcttttaatgggacaggctgttctgcaccctagtttcccagcctctcagcccagtcccctgcagcccgctcaagcccggcagcagcccccccagcactacttgcaggtgcaggctccgaccagcttgcacagcgaacagcaagactctctactcttgtcgacctacagccagcagcctggcacccttggctacccccaaccaccccccgcacagcctcagccattgcgcccccccagacgggtgagctccctttccgaaagtagtggattgcaacagcctccccggtag

SEQ ID NO: 126321 - DNA, 774 bp, synthetic construct
  misc_feature 1..774: note = Description of Artificial Sequence: Synthetic coding sequence
  source 1..774: mol_type = other DNA
atggcccctaccaaacctagctttcagcaggaccccagtcgaagggaaaggatcacagcgcaacaccccctgcctaatcagtccgaatgcagaaaaatctatcggtacgatggaatttattgtgagtcaacttaccagaatttacaggctctgcgcaaggagaagagccgagatgcagcacggtccagacgggggaaggagaatttcgaattttatgaattggccaagctgttacccctgccggccgccatcacatcccagctcgataaagccagcattatacgtctgacaatcagttacttgaaaatgcgtgatttcgctaaccagggggacccaccctggaacctgagaatggaagggccaccaccgaacacaagcgtgaaagtgataggcgcccagagacgccggagccctagtgcactagcgatcgaagtgttcgaggcccatctgggttcgcacatattgcagagtctggacggatttgtttttgccctgaaccaagaggggaaatttttatacattagtgagaccgtgagcatctacctgggtctgagtcaggttgagctaacagggagcagcgtctttgactacgtgcacccgggtgatcatgtggaaatggcagaacaactgggaatgaaattgccccccgggcgtgggttactgtcccaaggcaccgccgaggacggtgcctcttcggcgagtagtagctcccagagcgagacaccagagcctgtcgtctgcttccctccagcatctgatcagttcctgctctag

SEQ ID NO: 126322 - DNA, 2706 bp, synthetic construct
  misc_feature 1..2706: note = Description of Artificial Sequence: Synthetic coding sequence
  source 1..2706: mol_type = other DNA
atggcgcctaccaagccctctttccagcaggacccgagtagacgcgaacggctacaggcgctccgcaaggaaaagagtagagacgcggccagatcccggcgcggtaaggagaattttgagttctacgagctagctaaattgctccctctccccgccgcaatcacttctcagctagacaaggcatcaattatccggctgactatctcatatctcaaaatgcgagactttgcaaatcagggcgatcctccttggaatctccggatggagggccccccgcccaacacaagcgtgaagggtgcccagagaagacgttctccatctgccctagccatcgaggtgttcgaggctcacttgggctcccacatccttcaatccttggacgggtttgtgtttgcactgaatcaagaaggcaagttcctctatatctccgagacggttagtatctacttgggactcagccaagtcgagctaaccggctcatccgttttcgattatgttcaccctggggatcacgtggagatggccgaacagctcgggatgaagcttccacctggacggggcctcttgtcgcagggcactgccgaggacggcgcttcaagtgcatcttctagcagtcagagcgagacacccgaacctgtggagtccacgtctcctagcctgttgactacggataacaccctggaacgtagttttttcattcggatgaagagcacccttacaaaaaggggggtacatattaaatctagtggctacaaggttattcacatcaccggtagactccgcctccgggttagtttatctcacggccgcacagtgccaagccagatcatgggactggttgtggtggcccatgccctgcccccccccacgataaacgaggtcagaattgactgccacatgttcgttacacgtgttaacatggatctgaacattatttattgcgagaataggatcagcgactatatggatctcaccccggtggatatcgtggggaaacgctgctaccactttattcacgccgaagacgtggagggaattcgccactcgcatcttgatctgctgaataagggacaatgtgtgaccaaatactatcgttggatgcaaaaaaacggaggttatatttggattcagtcctcagctaccatcgcaataaatgctaagaacgccaacgagaagaatattatctgggtcaattatttgctgtctaatccggaatacaaagacacgccaatggatatcgcacaactgccccaccttcccgagaagacttccgagagctcggagacttctgacagcgagagtgattctaaggacacgtcaggaatcaccgaggataatgaaaactcaaagtcagacgagaaaggtaaccaatcggaaaactctgaggatccagaacccgacaggaaaaagagcggcaacgcgtgtgacaatgatatgaattgtaacgatgacggccacagcagctcaaatcctgattcccgggattcagatgattcctttgagcactctgactttgagaaccctaaggcgggcgaggacggctttggtgccctgggagcgatgcagatcaaggttgaacggtacgtcgaaagcgagagtgacttacgcttacagaactgcgaaagccttacttctgactccgctaaagactcagacagcgcgggcgaggccggggcacaagccagctctaaacatcagaaacgcaaaaagaggcggaaaagacaaaagggcggaagtgccagccgtcgtagactatcgagcgctagttcaccggggggcctcgatgctggtcttgtggaacctccaagactccttagcagcccaaactctgcgtccgtgctgaaaattaaaactgagatctcggagccaatcaatttcgacaatgatagttctatttggaattatcctcctaatagggaaatatcacggaatgaaagtccctactctatgacaaaaccaccatccagcgagcacttccccagcccacaagggggcggaggcgggggagggggtggggggggccttcatgttgctattccggatagtgtgctcactcctccaggagccgatggcgccgctgcgcgcaagacgcaatttggggcaagcgcaaccgctgccctggcacccgtggccagtgaccccctctcccctcctctctcagcctccccacgggataagcaccccggaaatgggggaggaggaggtgggggcggcgggggggctggaggcggtggcccctcagccagtaactctctgctttacactggcgacttagaggccttgcaaaggttgcaggctggcaacgtggtgttacccctggtgcatcgggttacgggtacgctggctgccacatcaacagccgctcagagggtctacaccaccggaactatcaggtacgccccagccgaggttaccctcgccatgcagtccaaccttctgccaaacgctcatgctgtgaatttcgtggacgtcaatagccccgggttcggcctcgaccctaaaacgccaatggagatgctgtatcaccacgtgcataggctgaatatgagtggaccctttggtggcgccgtgtcggctgcatctttgacccaaatgcctgccggaaatgttttcacaaccgcagaaggattgtttagtactctcccttttcccgtgtactcaaacggcatccacgcggctcagacactcgaacggaaagaagattag

SEQ ID NO: 126323 - DNA, 2802 bp, synthetic construct
  misc_feature 1..2802: note = Description of Artificial Sequence: Synthetic coding sequence
  source 1..2802: mol_type = other DNA
atggctccaacgaagccatcattccaacaggacccctcccggcgggagcgaattacagcccaacatcctctgcctaaccagtctgagtgccgtaagatttacagatatgatgggatatattgcgagtctacttatcagaacctccaggcacttagaaaggagaaaagccgtgatgccgccagatctcgccgcgggaaggagaattttgaattttacgagctggccaagctgttgccgctgcctgctgctatcacatcccagctcgataaggcctctataattcgcctcacaatcagctacttaaagatgcgggatttcgccaaccaaggcgatccaccctggaaccttagaatggaggggccccctcctaatacgtccgtgaaagtcatcggagcgcaaagacgcagaagccccagcgccctcgcgatcgaggttttcgaggcccatctgggcagccatatacttcagagtctggatggctttgtgtttgccctaaatcaagagggcaagtttctatatatctccgagaccgttagcatttatctgggtttgtcgcaagttgagctcacaggtagttccgtgtttgattatgtgcacccaggcgatcatgttgagatggccgagcagctcgggatgaaactgcctccaggccgcgggctcctctcacaaggaactgccgaggacggggccagcagtgccagctcatctagccagagtgagactcctgagcccgtggagagtacaagtccctctctgctgaccacagacaacacacttgaacgctccttcttcatccggatgaagagcaccctgaccaaacgcggtgtccacatcaaaagttccggatacaaagttatccatatcaccgggaggctgagattgagagtttcactgtcccatggtcgtactgttccaagtcaaattatgggcctggtggtggtggcacacgcgctcccacccccaaccatcaatgaggtgagaatcgattgtcacatgttcgtgacacgtgtaaatatggacttgaatattatttattgcgagaatagaatcagtgattacatggatttaacacctgtggatatcgtgggcaaaaggtgttaccatttcatccatgctgaggacgtggaaggaattaggcactcacacttggacttgctgaacaaaggccagtgtgtgaccaaatactaccgctggatgcagaaaaatgggggttacatttggattcagtcctctgccactatcgcaatcaacgccaaaaacgcaaatgaaaagaacatcatctgggtcaactacctgctcagtaatccagagtacaaggacacacccatggacatcgcccagctccctcacctccctgaaaaaacatctgagtccagcgaaacgtcagacagtgaatcggactcaaaggacacatccggtatcacagaggacaatgaaaactctaagtccgatgagaaaggtaatcagtccgagaactccgaggatcctgaaccagaccggaaaaagagcggcaatgcttgcgacaacgacatgaactgcaacgacgatggccactctagcagcaacccagactcacgcgattccgatgattcgttcgaacactctgacttcgagaacccaaaggccggggaagatggattcggcgctttgggtgccatgcagatcaaggtggagaggtacgtcgagtccgaatcagaccttcgactgcaaaactgcgagtcgctgacgagcgactctgccaaagactcagactctgcaggagaggccggagcacaggcatccagtaagcatcagaagcggaagaagcgccggaagcggcagaagggtgggtccgcttcaaggagaagactgagctccgcatcctcaccaggtggtctggacgccgggctggtggagcccccccgtctgttatcaagcccgaactctgcgagcgtactgaaaatcaaaaccgaaatttcagagcctatcaactttgataatgactcatccatctggaactacccccctaatagggagatcagccggaatgaatctccctatagcatgactaaaccaccctcgtccgagcatttcccaagtcctcagggtgggggcgggggcggcggaggaggaggcggcctccatgtggccattcctgacagcgtgctgacaccaccaggcgctgacggggctgcggcccgtaaaacacagttcggagcgtcagccaccgccgcactcgcacctgtggcttcagacccattaagcccccctctgagcgcaagtcccagggataaacaccctggaaatggaggaggaggtgggggtggcggcgggggagccggcggagggggacctagcgcatccaatagtcttctttatacaggtgacctggaggcactccagaggttacaggccggcaacgtcgtgttgcctctggtgcatcgggttaccgggaccttagccgctactagtacggcagctcaaagagtttataccactggtactattagatatgctcccgccgaggttaccctcgccatgcagagcaacctcctgccaaatgcccacgccgtcaactttgtggacgttaacagtcccggttttggacttgaccccaaaacgcctatggagatgttataccaccacgttcaccggttgaatatgagcgggcccttcggtggtgctgttagtgcagcatctctgactcagatgcccgccggaaacgtattcaccactgcggaggggctgttttcgacgctgcccttccctgtttactccaacggcatccacgcagcccagactctggaacggaaagaagactag

SEQ ID NO: 126324 - DNA, 2763 bp, synthetic construct
  misc_feature 1..2763: note = Description of Artificial Sequence: Synthetic coding sequence
  source 1..2763: mol_type = other DNA
atggctcccacgaagccatcttttcagcaagacccctctcgaagggagcggctgcaagccctgaggaaggagaaaagccgggatgcagcccgctctaggcgcggcaaggagaactttgaattttacgaactcgccaaactgctgccgttacccgcagctattacttctcagttggataaggcttcaatcattcgtctcaccattagctacttaaagatgcgcgatttcgccaaccagggcgaccccccatggaacctaagaatggagggtcccccgccaaacacatccgtaaaaggcatacagatgtggaaatctgagctttgcatgagaaagaccccttgtgaagtaattggggcccagcggcggcgctccccttcagccctggctattgaagtgttcgaggcccacctgggtagtcacattcttcagtcactggatggctttgtgtttgctttgaaccaagagggtaagtttctttacatcagtgaaacggtgtctatttacctcgggctgtcccaggtggagctaacaggcagctccgttttcgactacgtgcaccctggagatcacgtggagatggctgaacagctgggcatgaaactgccgcccggaagaggactcctgtcgcaggggaccgctgaggacggcgcgagttccgcgtcaagttcatctcagagcgagactcctgagccagtggagtctacatccccttcactgttgaccacggataatacactagaaagaagtttctttatacgaatgaaatccaccctcactaaacggggcgttcacattaaatcttccggctacaaagttatccacatcaccggaaggctgagactccgcgtaagcctgagccacggtagaactgttccgtcccagattatgggattggttgtcgttgcgcacgccctcccaccccccaccatcaatgaggtgcgcattgattgccacatgttcgtcaccagagtgaatatggatctgaatattatttactgtgagaataggatctcggactacatggatctaacacctgtggacatcgtcggtaagaggtgctaccatttcatacatgctgaagatgtggagggcatcaggcattcacatctggaccttctgaataagggacagtgtgtgaccaaatattatcgctggatgcaaaaaaacgggggctatatctggatccaatcgtccgctactatagcaatcaacgcaaagaacgctaacgaaaaaaacataatctgggtgaattacctgttgtcgaaccctgaatataaggacactccaatggatattgcccagctgccacacctgcccgagaaaacatccgagagcagcgagacttccgattccgagtccgattccaaagacacaagtggcatcaccgaggataatgagaacagcaagtctgatgagaaaggcaatcagtcggagaatagcgaagatcctgaacctgataggaagaagtctggcaacgcctgcgacaacgacatgaattgcaatgacgacggccattcctcttcaaacccggatagtagggatagtgacgattcttttgagcacagtgatttcgagaaccccaaggccggcgaagacggttttggcgcactaggggccatgcagatcaaagtggaaaggtacgtcgaatctgaatcagaccttcggctgcaaaactgcgagtccctcacaagcgacagtgctaaggactccgactctgccggcgaagccggcgcccaagccagttccaagcaccagaaacgcaagaagaggcgaaagcgtcaaaagggcggctccgcctcccgacgccgcttatcatctgcttccagccccggtggtcttgatgccgggctggttgaaccaccgaggctgttatcatcacctaatagtgcctcagtgctgaagatcaaaactgaaatcagcgaacctatcaattttgacaatgactccagcatatggaactatccgccgaatagggaaatatcgcgaaatgagagcccgtactccatgacgaagcctccctctagtgaacatttccctagtccacaaggaggtggcgggggaggggggggaggaggaggactacacgtggctatcccagactccgtgcttacacctcctggggccgacggcgctgcagctcggaaaacccagttcggcgcttctgccactgctgctctagctccagttgcatccgaccctctatccccacctctgtctgcctctcccagagacaaacatcctgggaacggcggtgggggggggggcgggggtggaggtgccgggggaggaggaccatccgcctcaaacagcctgttatataccggagacctcgaggctctgcagcgtctgcaggcaggaaacgtcgttctgcctttggtgcaccgggtcaccggaacgctggccgctacttctacagcagcccagcgggtgtataccaccggcacaatcaggtatgcgccagcggaggttaccctcgccatgcagtccaatctgctaccaaatgcccacgccgtgaactttgtcgacgtcaattcccccggcttcggcctggatcctaaaacgcctatggagatgctgtaccatcacgtccataggctgaacatgagcggcccctttggcggagctgtgagcgcggcttctctaacacagatgcccgcgggaaatgtattcacaaccgccgaaggcctgttcagcacacttccgttcccggtgtactccaatggcatacatgccgcccagacactggagaggaaggaggactag

SEQ ID NO: 126325 - DNA, 462 bp, synthetic construct
  misc_feature 1..462: note = Description of Artificial Sequence: Synthetic coding sequence
  source 1..462: mol_type = other DNA
atgagagactttgcaaaccagggcgatcctccttggaatctgcgtatggaggggccgccgcctaatacatctgtgaagggcgcacaaagacgccggtctccctctgctcttgccattgaggtgttcgaggcacacctgggatcccacatccttcagagtttagacggtttcgtgtttgcactgaaccaggaaggaaagttcctgtacatctctgaaacagttagcatctatctggggctgtcacaggtagaactcaccggaagtagcgtcttcgactatgtgcatcctggcgatcacgtggaaatggctgaacaactgggcatgaagctgccccctggcagaggtctactgagtcaaggaacagccgaggacggcgccagctccgcttcctctagttcccagtccgagacccctgagccagtggtgtgctttccaccagccagcgaccagtttctgctgtag

SEQ ID NO: 126326 - DNA, 2712 bp, synthetic construct
  misc_feature 1..2712: note = Description of Artificial Sequence: Synthetic coding sequence
  source 1..2712: mol_type = other DNA
atggcgccaactaaaccgtctttccagcaggatccttcaaggagggagcggctgcaggccttgcggaaagaaaagtcacgcgacgctgctcgatcaagacgcggaaaagagaatttcgagttttacgagctcgccaaattgttacctttacctgccgcgattacctctcaacttgacaaggcatccatcattcgactcacaattagctatctgaagatgagagacttcgccaatcagggggatcccccatggaacctgcgaatggagggacccccacccaacacttcagtgaaagtgattggagcgcagagaaggagatctcccagcgccctggcaatagaggtcttcgaggctcacctggggagtcacattctccagagccttgacggatttgtctttgcacttaatcaagaggggaaatttttgtacattagtgaaactgtgtcaatttacctaggcctgagtcaagtggagctgacaggctctagcgtattcgactatgtccatcctggcgatcacgtggagatggccgaacagttgggtatgaaactgccacccggccgcggcctgctttctcagggcacggccgaggatggagcaagctcggccagcagctcatcacagtcagaaacccctgagcctgtagagtccacatcgccctcgctactgacaacagataatactttagagcggtctttcttcatcaggatgaaatccacacttacaaaacgaggtgtccatatcaaaagcagcggatacaaagtcatccacataacgggacggctgagacttagggtgtcactgtcccacggcagaacagtcccctctcagataatgggtctcgtggtcgtcgctcatgctttgcccccgcccacgattaatgaggtacggatcgattgtcatatgttcgtgactcgagtgaatatggacctgaacattatctactgcgaaaataggatcagtgattacatggacctgacacctgtagacattgtcggaaaaagatgctatcacttcatacacgccgaggatgtggagggaatacggcacagccatctagacttgctaaacaaaggccagtgcgtgactaaatattaccgctggatgcagaaaaacggtgggtatatctggattcagtccagcgctactatcgcaattaacgccaagaacgcaaacgaaaagaacatcatctgggtgaactatctgctttccaaccctgagtacaaagacactcccatggacattgcccaactgcctcacttgccagagaaaacctcggaaagctctgaaaccagtgactccgagtcggattctaaagacactagcggtatcacagaagacaatgagaattccaaatccgatgaaaagggcaaccagtcggagaatagcgaggatcctgagcccgaccgtaagaagtcaggcaatgcctgcgataacgacatgaattgtaacgacgacggccactccagttccaaccccgacagcagagactcagacgacagcttcgaacattccgattttgaaaaccctaaagctggcgaggacggttttggggctctaggagcgatgcagatcaaggtcgagagatatgtggagtctgagtcagaccttagattgcagaattgcgagtcgctgacaagtgattctgccaaggattccgatagcgccggggaggccggcgcgcaggcttcgtctaagcaccagaagagaaaaaaacggagaaagagacagaaaggaggatccgcaagcaggagacgtctttcctccgcgtccagccctggagggctagacgcggggctcgtggagccacctagacttttatcgtcccccaattcagctagcgtgctaaaaattaaaaccgagatcagcgagcctattaactttgataatgactccagcatctggaactacccaccaaacagggaaatctcccgaaatgagtccccctacagcatgactaaacccccctcctctgaacacttcccaagtccccagggaggcggcggcggagggggtggggggggtggtctgcatgtggccatccctgacagtgtgctgactccacctggtgcagacggcgctgctgcaagaaagacccaattcggggcctccgcgaccgcagcccttgcacctgttgctagcgacccactgtccccccctctgtctgcctcccctcgagataaacaccccggtaacgggggcggagggggcggcgggggtggaggcgccgggggaggcggcccaagtgcaagtaattctctcttatataccggggatctggaagcacttcagaggttacaggccggtaacgtggtattgcccctggttcaccgcgtgaccggaaccctggccgcaacctccaccgccgctcagcgggtttatactacaggtaccattaggtacgcccccgctgaagtgacgctcgccatgcagagtaacctcctgccaaatgctcacgcagtgaattttgtggatgttaactcacctggctttggtctcgacccaaagacaccaatggagatgttgtaccatcatgtgcaccggttaaacatgagcgggcccttcggtggagcagtgtctgccgcttcccttacccaaatgcctgctggtaacgtgttcactacagcagagggtttattctccaccctgccattcccagtttattccaatggtatccatgccgcccaaaccttagaacgtaaggaggactag

SEQ ID NO: 126327 - DNA, 2409 bp, synthetic construct
  misc_feature 1..2409: note = Description of Artificial Sequence: Synthetic coding sequence
  source 1..2409: mol_type = other DNA
atgtataggtcaaccaaaggggcgtccaaggcaaggagagaccagatcaacgctgagattcgcaatctgaaagaacttctaccactggcagaagcagacaaagtcaggttaagttacctgcacataatgtcactcgcctgtatttacaccagaaagggagtgttcttcgcgggggggacgcctttagccggacctactggccttctgtctgctcaggagctggaagatattgtggctgctctcccgggcttcttgctagtgttcaccgccgaagggaaacttttatatctgtcagaatccgtgagtgagcacctggggcactctatggtggacttggtggcccaaggcgactccatctacgacattatcgatcctgccgaccatctcacagtgaggcagcagttgacactgcctagcgcactggataccgaccgactctttcggtgtagatttaacacttccaaatctcttcgcaggcagtctgcggggaataagctagtcttgatccgcggccggtttcacgcccaccctcccggggcctattgggcaggaaacccagtttttacggccttctgcgcacctctcgaacccaggcctcgccccggacccggtccgggaccagggcccgcgagtcttttcttggctatgtttcaaagcagacacgctaaggatttggcactgctggatatcagcgagtctgtgcttatctacctgggtttcgaacgaagtgaactgctttgtaagagctggtacggattgcttcatccggaagacttggcccatgcaagtgcacagcattataggttgctggctgagtctggagacatccaggctgagatggtcgttcggctgcaggcaaagacggggggctgggcctggatttactgcttactgtatagtgaaggaccagaagggcctatcacggccaacaattaccctatctcagatatggaagcgtggtccctgcggcaacagttgaattctgaagatactcaagcagcatacgtgctggggacacctaccatgctgccttcattcccggagaacatcctgtctcaggaggaatgctcctccacaaaccccctcttcacagccgccctcggagcgccaaggtccacttcttttccttccgccccagagctcagtgtggtgtcagccagtgaggagctgccacggccctccaaagaactcgatttcagttacctaacattcccgtcgggacccgaaccaagcctgcaggccgaactgtcaaaagacttagtgtgtacgccaccctatacaccgcatcagcccggtggctgtgcgtttctcttctcactgcatgagccctttcagacacatctccctactccctcatcaactctccaagagcaactgaccccttctactgccaccttttcggatcagctgacccccagctcagcaactttccccgatcctctgacctccccacttcagggacagctcacggagaccagcgtgcgttcctatgaggatcaattgaccccttgtacctcaacctttccagatcagctgctgccttcaactgcaacattcccagagccgctgggatctcctgcccacgaacagctcaccccaccttccaccgccttccaggcacaccttgactctccaagccaaaccttcccagagcagttatctcctaatcccaccaaaacttactttgcccaggaaggttgttcatttctctacgaaaagctcccaccatctccatccagccctggcaatggtgactgcactctgctagctctcgcccaactgagagggccgttgtccgtcgacgtacctctcgttcctgagggcctgctgacgcccgaggcaagtcccgtcaagcagagcttcttccactattcggagaaggagcaaaatgagatagatcgcttaattcagcagatttcacagctggcccagggcatggaccgcccctttagtgccgaggccggaaccggcggcctcgagcccctggggggactggaaccactagactcgaacctatcactgtcaggcgccggtccacctgtactgtccttggacttgaagccctggaagtgtcaagagctggacttcttggccgacccggataatatgtttctagaagagacacctgtcgaggacatttttatggatctgagcactccagacccctccgaagagtggggcagtggggatccagaggcagaagggccaggcggcgccccaagcccttgtaacaatttgagtcccgaggaccattcctttctggaggacctggccacttacgagaccgccttcgagacaggagtcagcgctttcccctacgatgggttcacagacgagcttcaccaactgcaaagccaggtccaggatagctttcacgaagacggcagtggcggcgaaccgactttctag

SEQ ID NO: 126328 - DNA, 705 bp, synthetic construct
  misc_feature 1..705: note = Description of Artificial Sequence: Synthetic coding sequence
  source 1..705: mol_type = other DNA
atgtaccgcagtactaaaggcgcaagtaaggccaggcgggaccagattaatgccgagatcaggaatctaaaggagttgttgcccctagccgaagccgataaagtgcgactgtcatacttacacatcatgagcctggcatgcatttacacaaggaagggcgtgttcttcgcaggcggcaccccactggccggtccaaccgggcttctgagcgcacaagagctcgaggacattgtggctgccttgcccggcttcctgctggtctttacagcagagggcaagttgctttatttgagcgagagtgtcagtgagcatttgggccactctatggttgatctggtagcgcagggcgactccatctatgatatcattgatccagcggatcacctcactgtgaggcagcaattgaccctcccgagcgcactggatacagaccgcctgtttcgatgtagatttaacacttccaagagtctcagacgccaaagcgcgggcaataaactggtcctgattcgcgggagatttcacgcacaccctcccggagcctattgggccggtaatcctgtgtttacggctttctgcgcaccactggagccaaggccaagaccgggccctggacctggtcccggtccagcaagcctgttccttgccatgtttcagagccgccatgccaaggatctcgcgctgctggacatttccgaaagcgggtag

SEQ ID NO: 126329 - DNA, 1299 bp, synthetic construct
  misc_feature 1..1299: note = Description of Artificial Sequence: Synthetic coding sequence
  source 1..1299: mol_type = other DNA
atgcccgcaggacgagccgcccgaacatgtgctctgctggccctgtgcttgttgggggccggcgcccaggattttggccccacaaggtttatctgtacttcagtgcccgtagatgctgacatgtgcgccgcctctgttgccgccggcggcgccgaagagctgcggtcgtcagttctgcagctgagagaaaccgtgctgcagcagaaggagactatcctgagtcaaaaagagaccatcagagaactgactgcaaagcttggaaggtgtgaatctcaatccacgctggacccaggcgcgggcgaggccagggcaggggggggtcggaagcagcccggcagcggcaagaacaccatgggagacctgtcccggacccccgcagctgaaaccctttcacaacttggacagacactgcagtccctcaaaacaagactggagaatctcgagcagtactcaagactaaattcctcgtctcaaaccaatagcctgaaagatttactgcagtcgaagatcgatgagctggaacggcaggtgctgtcacgcgtaaacactctggaggagggaaaaggcgggccacggaacgataccgaggagcgcgtgaaaatagagacagccttgacatccctgcaccagagaatctccgaactagaaaaagggcagaaggataacagaccaggggataaattccagctgacctttccactgcggacaaactatatgtatgccaaggtcaagaagagcctccccgagatgtatgctttcacagtgtgcatgtggctgaagagttcggcaacaccgggagtcggaaccccttttagttacgccgtgccaggtcaggcaaacgaactggtcctgatagagtggggaaataaccccatggaaattctaataaacgacaaggtcgctaaactgccttttgtgataaacgatggcaaatggcaccatatctgtgtgacatggacaacccgagatggcgtctgggaagcataccaagatggtactcaaggcggcagcggcgagaacctggcaccatatcaccccatcaaacctcagggagtccttgtgctgggtcaggagcaagatactcttggagggggctttgatgctacgcaggccttcgtgggggaattggcacactttaatatctgggatagaaagctgacaccgggcgaagtatataacctggcgacgtgttctaccaaagctttgtcagggaacgtgatcgcctgggccgagagccatatagagatatatgggggggctacaaagtggacgttcgaagcttgtcggcagattaactag

SEQ ID NO: 126330 - DNA, 585 bp, synthetic construct
  misc_feature 1..585: note = Description of Artificial Sequence: Synthetic coding sequence
  source 1..585: mol_type = other DNA
atgtacgccaaagtgaagaaatcactgcccgagatgtatgcctttacagtctgcatgtggcttaaaagtagcgctactccgggggtcggcacgccattcagttatgctgtcccgggtcaggctaatgaactggtcttgatcgagtggggtaacaatcccatggagattttaattaacgataaggtggctaaactgccgtttgttataaatgacggcaaatggcaccacatttgtgtgacctggacaacacgggatggagtgtgggaagcatatcaagatgggacacagggaggctcaggggagaacctcgccccttaccatccgatcaaaccccagggcgttctcgtgcttggacaggagcaggacactcttggtggaggatttgacgccactcaagcgttcgtaggggagctagcacattttaacatatgggataggaagctgaccccaggggaagtatacaacctcgcgacctgcagcactaaggcactctcaggaaacgtgatagcctgggctgagtctcacatcgagatttacgggggcgcgactaaatggacatttgaggcttgtcggcaaatcaactag

SEQ ID NO: 126331 - DNA, 1296 bp, synthetic construct
  misc_feature 1..1296: note = Description of Artificial Sequence: Synthetic coding sequence
  source 1..1296: mol_type = other DNA
atgctggcgttgctcgcagctagcgttgcactggcggtggcagcaggggcccaggattcccccgccccgggttccagattcgtctgcacggctctgccacctgaggctgtgcacgctggatgcccacttcctgccatgcccatgcaagggggcgcccagagtcctgaggaggaactcagggctgctgtcctgcaactgcgtgagacagtagttcagcaaaaagagacgctcggcgcccagcgcgaggccatccgagagctaaccgggaaactggcacgatgcgagggcttagccggaggcaaagcccgaggcgctggggctacaggcaaagataccatgggggacttgccgcgtgaccctggccacgtagtggaacagctctcgagatcactgcagacactgaaagaccgcctcgaatcgctggagcaccaattacgcgctaacgtgagcaacgctggattacccggtgactttcgcgaggttctccagcagagactcggagagctggagagacagctgctgcggaaggtcgcagagttggaagacgagaagtccctccttcacaacgagacctctgcgcaccgacaaaagacagagagtaccttgaatgctctactgcagcgggtcacagaactggagcgaggaaactctgcttttaaaagtccagatgcatttaaagtgagtctgcccctgcgcacgaattatctgtacggtaagatcaagaaaaccctccccgaactttatgcattcacaatatgcctgtggctccggagctccgcctcccctggaataggtacacccttctcctatgccgtgcctggccaggccaacgaaattgttctgatcgagtggggaaataaccctattgagttgcttattaatgataaggttgctcagttacctctgttcgtgtcagacgggaaatggcaccatatctgtgtaacgtggactactcgcgatggcatgtgggaagcattccaggacggcgagaagctgggcacaggcgagaatctcgccccttggcaccccatcaagcccggcggggttctcatccttggtcaagagcaagatacagttggcggtagatttgacgctacccaggcattcgtgggggaactttctcagtttaatatttgggaccgggtcttgcgtgctcaggaaatcgtaaatattgcaaactgttccaccaacatgcctggcaatataattccatgggttgacaacaacgtggatgtgtttggaggtgcaagcaagtggcccgttgaaacctgtgaggaacgcttgctggacttgtag

SEQ ID NO: 126332 - DNA, 246 bp, synthetic construct
  misc_feature 1..246: note = Description of Artificial Sequence: Synthetic coding sequence
  source 1..246: mol_type = other DNA
atggcagccgtggcggcggccagcgcagagctacttatcatcgggtggtacatcttccgggtgctgctccaagtgtttctggagtgttgtatctactgggtgggtttcgcattccggaatcccccgggcacccaacccatcgcaaggagcgaagtgtttcgttacagtcttcagaaactcgcttacacagtctctagaaccggaagacaagtactaggagagcggcgccagagggcacccaattag

SEQ ID NO: 126333 - DNA, 165 bp, synthetic construct
  misc_feature 1..165: note = Description of Artificial Sequence: Synthetic coding sequence
  source 1..165: mol_type = other DNA
atggccgctgtagccgctgcctccgccgagcttttgattatcgggtggtacatttttagggtgctgctccaggtatttcggtatagcttgcagaagctggcatacactgtgtcacggacggggcgtcaggttttaggagaacggagacagagagcccccaactag

SEQ ID NO: 126334 - DNA, 270 bp, synthetic construct
  misc_feature 1..270: note = Description of Artificial Sequence: Synthetic coding sequence
  source 1..270: mol_type = other DNA
atgataagtagcgtcaagctgaacctgattctggtgctgtccctctctaccatgcacgttttttggtgctaccccgtcccctcctcaaaggtgtccgggaaaagtgattactttctgatcctgcttaatagctgcccgactcgtctggacaggtcgaaggaactagctttcctgaagcctatcctagagaagatgttcgtgaaacgttcgttccggaatggcgtgggcacagggatgaaaaaaacctcattccagcgggccaagtcttag

SEQ ID NO: 126335 - DNA, 525 bp, synthetic construct
  misc_feature 1..525: note = Description of Artificial Sequence: Synthetic coding sequence
  source 1..525: mol_type = other DNA
gtggtgttgctgtacgcctccacctacgtgctggtctcccttagtatagacaggtaccacgccattgtatatcccatgaaggtgttgatcgtcatcgcttggtctttgtcctttctatttagtattcccaccctgataatttttggaaaacgaactttatctaacggcgaggtccaatgttgggcactgtggccagacgattcttactggaccccatatatgaccatcgtcgctttcctaggatccctcattacatttatttgctgctggtctccatatttcctgtttgatattttagacaattttaacctgctccccgacacacaagagagattttacgcttccgtcattattcaaaacctgccagcactcaacagcgccatcaaccctcttatttactgcgtgttttcgtcatcaatctcattcccttgcagagaacagcgatcacaggatagccggatgaccttcagggagcggactgagcgccacgaaatgcaaattctctctaagccggagtttatttag

SEQ ID NO: 126336 - DNA, 1134 bp, synthetic construct
  misc_feature 1..1134: note = Description of Artificial Sequence: Synthetic coding sequence
  source 1..1134: mol_type = other DNA
atgcctgcaaacttcaccgaaggatcattcgatagctccggaacaggccagaccttggactctagccctgtggcctgtacagagacggtgacgtttactgaagtcgtggaggggaaggaatggggttcattctactactcattcaagactgaacagcttattacactgtgggtcctttttgttttcactatagtggggaattcagtcgtcctgttctccacatggagacggaaaaagaagagcagaatgaccttctttgtgacccagctggctattacagatagctttaccggcctggttaatatattgacagatatcaattggcgattcaccggtgatttcacagctcctgatctggtatgtagggtggtccgctatttgcaggttgtcttactttacgcctctacctatgtcctggtgtccctgagcatcgatcgataccacgctattgtgtacccgatgaagttccttcagggtgagaaacaagcaagggtccttattgtgattgcctggtcactctccttccttttctcaatccctacactcattatttttggaaaacgcacactgagtaatggcgaggtgcaatgctgggccctctggccagacgattcctactggaccccatatatgacaatagtagcgttccttgtgtactttataccacttactataatcagcattatgtacgggatcgtcataaggacgatttggataaagtccaaaacctacgaaacagtcataagtaactgctctgacggcaaactgtgttcaagttacaacaggggcctgattagcaaagctaaaatcaaagctattaaatactctatcataatcatcttggcatttatctgctgctggtcaccttatttcctctttgacatcttggacaatttcaatctgcttccagacacacaggaacgcttctacgccagtgtgatcatacagaatttaccagccctgaacagcgccattaatcctctcatttattgcgttttctcttcttccatctcattcccctgcagggtgatccgactgcggcaactgcaagaggcagctttgatgctctgtccacaacgggagaattggaagggtacctggcctggcgtgccctcctgggccctgcccaggtag

SEQ ID NO: 126337 - DNA, 1116 bp, synthetic construct
  misc_feature 1..1116: note = Description of Artificial Sequence: Synthetic coding sequence
  source 1..1116: mol_type = other DNA
atgcctgccaacttcacagaggggtccttcgacagctccggcactggacagaccctggatagctcacctgttgcttgcacagagactgtgactttcacggaggtggttgagggaaaggagtgggggtccttttactacagtttcaaaacagagcagctcatcacattatgggtcctctttgtttttaccattgtgggaaactcggtcgtcctcttcagcacatggaggaggaagaaaaaatccagaatgactttcttcgtgacacagctcgcaattacagacagttttacgggcctggtgaacatccttaccgatattaactggcgctttacgggagacttcacggcccctgacctggtttgcagagtggtcaggtacctccaggtggtcctcttatatgcctccacctacgtactggtcagcttgtctattgacagataccatgccatcgtctatcccatgaagtttctacagggggagaagcaggcgagagtgctcatagtgatcgcctggtctctgagcttcctgtttagtatcccaacacttatcatcttcggaaagcgcactctgtctaatggcgaggtgcagtgttgggcactgtggcctgacgactcgtattggaccccatatatgacaatcgtggcttttcttgtttattttatccccctcaccattatttctattatgtacgggattgttattcggaccatttggatcaaaagcaaaacttatgaaactgtcatcagtaactgtagcgacggaaagctgtgctccagctataataggggtctgatatccaaagctaaaatcaaggcaatcaaatattctattatcataatcttggcgtttatttgctgctggtctccttactttctcttcgatatcctcgacaactttaatcttctccctgatacgcaggagaggttttacgcatctgttattattcagaacttacccgcactgaacagtgctattaaccctctgatttactgcgtgttttcaagctccatcagtttcccatgccgggaacaaagatcccaagactcacgcatgacgttcagagagcggaccgaacgacacgagatgcaaattctgtcaaagccagagttcatctag

SEQ ID NO: 126338 - DNA, 1173 bp, synthetic construct
  misc_feature 1..1173: note = Description of Artificial Sequence: Synthetic coding sequence
  source 1..1173: mol_type = other DNA
atgcctgctaatttcaccgagggaagcttcgacagctcagggaccggtcagacactagattctagcccagttgcatgtaccgagactgtcacattcaccgaagtcgttgagggcaaggagtggggttctttttactacagtttcaaaaccgaacagctgattaccctctgggtgctatttgtatttaccatcgtgggtaacagcgttgtgctgttctccacatggaggagaaagaaaaaatcacgcatgaccttctttgtaacacagctggccattacagactcctttaccggcctggtaaatattctgactgacatcaattggcggttcacgggggatttcacagctcctgatcttgtgtgccgcgtggtgcgctatctgcaggtggtgctgctgtatgcctctacctatgtgctggtcagtctgtccatcgacaggtaccatgctatcgtgtatccaatgaaattcctgcaaggtgagaagcaagcccgggtgcttattgttatcgcctggtccctgagctttctattcagcattccaacactcatcatcttcgggaagcggacgttgagtaacggtgaggtccaatgctgggccctttggccggatgattcttactggacaccttatatgacaattgttgcatttctggtctacttcatccccctcaccattatcagtatcatgtatgggattgttatccgcacgatttggatcaagtctaaaacctacgagacagtgatctccaactgctcagacggtaagttgtgtagttcgtacaataggggacttattagtaaggcgaagatcaaggcgattaagtattcaatcattatcatccttgcgttcatatgttgctggtcgccctatttcctgtttgatattctcgataatttcaacttgctgcctgacacacaggaaaggttttacgcgagtgtgataatacagaacctgcctgcattgaactcagcaataaatccgttgatctattgtgtttttagctcatccatatcattcccttgccgcgcgaattctagtgtctatttgttggcatgcgacgtgagcgtgctgtgggctcttgtactcactagcgagaaagaatcctgcgaatcctggagacgtaaaggggccaagatcaccggcttccagaacgacgtgcccggggagaactag

SEQ ID NO: 126339 - DNA, 918 bp, synthetic construct
  misc_feature 1..918: note = Description of Artificial Sequence: Synthetic coding sequence
  source 1..918: mol_type = other DNA
atgccagcaaactttaccgaagggagtttcgatagtagtgggaccgggcagaccctggattcgagccccgttgcctgcactgaaaccgtgactttcaccgaagtagtggaaggcaaggaatgggggtcattttattactccttcaagacggagcagctgatcaccctgtgggtgctgtttgtgttcacaatcgttggtaattccgtggtactcttctcaacttggagaagaaagaaaaagtccagaatgaccttcttcgtgacccagcttgctattaccgagaaacaggcacgtgtcttaatcgttattgcttggagcctctcattcctgttctccatccccactctgatcatcttcggcaagcgtactctatcaaatggggaagttcagtgctgggccttgtggccagatgacagctactggactccatacatgaccatcgtggctttcctggtctacttcattcccttaactatcatttcaatcatgtatggtatcgtgattagaactatctggatcaaaagcaagacttacgagactgtaattagtaattgcagtgacggtaagctatgctcttcttataataggggcctgatctctaaggcaaagatcaaagccatcaaatattcgattatcattatcctggcttttatctgctgttggtcaccctattttcttttcgacattctcgacaactttaatctattgcctgatacccaggaaaggttttacgcttccgttataattcagaacctgcctgcacttaattcagctataaatccattgatctactgtgtgttctcaagttcaatcagcttcccttgcagagagcaaaggtctcaggacagcagaatgaccttccgcgagcgaacagagcgtcacgaaatgcagatactgagcaaaccggaatttatctag

SEQ ID NO: 126340 - DNA, 432 bp, synthetic construct
  misc_feature 1..432: note = Description of Artificial Sequence: Synthetic coding sequence
  source 1..432: mol_type = other DNA
atgccggcaaatttcacagagggttcgttcgactcaagcggaacgggtcagactttggacagtagccctgtggcctgtacagaaacagtgacgtttacagaggtcgttgaaggcaaagaatgggggtccttttattatagttttaagacggaacagctgattaccttgtgggttctgtttgtgttcactatcgttggcaattccgtggtcctcttttcaacatggcggagaaagaaaaagagtagaatgacattcttcgtaacccagctcgccatcacggatagcttcaccggcctggtgaatatcctgacggacattaactggcgtttcactggtgactttacagcccccgacttggtgtgccgtgtcgtgaggtatctgcaggtcatggtgatgaaattatttcacatccagaagatgaatatggaatag

SEQ ID NO: 126341 - DNA, 285 bp, synthetic construct
  misc_feature 1..285: note = Description of Artificial Sequence: Synthetic coding sequence
  source 1..285: mol_type = other DNA
atgcccgccaacttcactgagggcagcttcgattctagtggaacaggccagaccctcgattcgtctcctgtagcatgtacggagaccgttacattcacagaagtcgttgaaggtaaagagtggggaagcttctactattccttcaaaacagagcagttaattacgctgtgggtcctcttcgtgttcacaattgttggcaatagcgtagtgttattttccacgtggagacgcaaaaagaagtccagaatgactttcttcgtaacccagctggcgataaccgtctag

SEQ ID NO: 126342 - DNA, 294 bp, synthetic construct
  misc_feature 1..294: note = Description of Artificial Sequence: Synthetic coding sequence
  source 1..294: mol_type = other DNA
atgctgggtaacaaaaggcttgggctgtccggattaacactggccctttctctgctggtgtgtcttggggctctcgcagaagcctatccatccaagccagacaatcccggcgaggacgctccagcagaagacatggcccgctattattctgcgcttcgtcattacattaacctgatcacacgacagcggtacggcaaaaggtccagtcccgagactctcatctccgatctgttaatgcgggagagtactgaaaatgtacctcgaacacgccttgaggatccggccatgtggtag

SEQ ID NO: 126343 - DNA, 294 bp, synthetic construct
  misc_feature 1..294: note = Description of Artificial Sequence: Synthetic coding sequence
  source 1..294: mol_type = other DNA
atgctgggaaacaagaggctggggctctcaggactcacgctagccctgagtctgctcgtgtgtctgggcgctttggccgaggcctatccctctaagcccgacaacccaggtgaggacgcccccgccgaagacatggcacggtactatagtgcgttgaggcactatatcaacctgatcacccgccaaaggtatgggaaacgctcctccccagaaaccctcatctccgatctgctgatgagagagagcacagaaaacgtgcctcgcactagattagaagaccccgccatgtggtag

SEQ ID NO: 126344 - DNA, 294 bp, synthetic construct
  misc_feature 1..294: note = Description of Artificial Sequence: Synthetic coding sequence
  source 1..294: mol_type = other DNA
atgctgggcaataaacgcctgggactgtccggattgaccctcgccctctctttattggtctgtctgggggccttggctgaggcgtaccccagtaagccagataatcccggggaggatgcccctgccgaagacatggccagatactactccgccttgaggcactatattaacctaattacgaggcagaggtatggaaagcgttcatcccccgaaacactgatttcagacctgctgatgagggaatccaccgagaatgttcccagaaccagacttgaggacccagcaatgtggtag

SEQ ID NO: 126345 - DNA, 1155 bp, synthetic construct
  misc_feature 1..1155: note = Description of Artificial Sequence: Synthetic coding sequence
  source 1..1155: mol_type = other DNA
atgaacagtacattattcagtcaggtcgagaatcacagtgtccatagcaacttcagtgagaagaatgcccagttattggccttcgagaatgatgactgccatctcccactggccatgatcttcacgctggcactcgcttacggagctgtcatcatactgggtgtgtctggtaacctggccttgattatcattatcctcaagcagaaggaaatgcgcaatgtaaccaacatccttatagttaacctaagttttagcgatttgctcgtggcaatcatgtgtcttccctttacatttgtttataccctgatggaccattgggtcttcggtgaagccatgtgcaagctcaacccatttgtccagtgcgtctccatcacagtaagtatcttctctcttgtactcattgctgttgagagacaccaactgatcatcaaccctcgtggctggcgtcccaacaaccggcacgcatatgttggcatcgcagtgatttgggttctggctgtcgcatcgagcctcccattcctaatctaccaggtgatgacagatgaacccttccaaaatgttaccctcgacgcctacaaagacaaatatgtttgcttcgaccagtttccctcagactctcatcgattatcctacacaactttactcctggtgctgcaatatttcggacctctgtgtttcattttcatttgctacttcaagatatacatccgcctgaagaggcggaataatatgatggacaagatgcgagataacaagtatagaagtagtgaaacgaagagaatcaatattatgctactgtcaatcgttgtggcatttgccgtttgctggcttcccctaaccatctttaacacagtctttgattggaaccaccagataattgcaacatgtaaccacaacttgctgtttctcctctgccacctcacagcaatgatttctacttgcgtcaacccgatattctacggattccttaacaaaaactttcagcgagaccttcaattcttttttaatttttgcgacttcagatctagggatgatgactacgaaacaattgctatgagcacgatgcatactgacgtttcgaaaacatcactcaaacaagcatcacccgtggcattcaaaaaaatcaacaataatgacgataacgagaagatttag

SEQ ID NO: 126346 - DNA, 186 bp, synthetic construct
  misc_feature 1..186: note = Description of Artificial Sequence: Synthetic coding sequence
  source 1..186: mol_type = other DNA
atgaactccactctgttctcccaagttgagaaccatagtgtgcactctaatttctcagaaaaaaacgcccagttgttggccttcgaaaacgacgactgccatttgcctctagcaatgatctttacgctggccctggcttacggcgccgtcatcatcctgggtgttagcggtaacctggcactctag

SEQ ID NO: 126347 - DNA, 426 bp, synthetic construct
  misc_feature 1..426: note = Description of Artificial Sequence: Synthetic coding sequence
  source 1..426: mol_type = other DNA
atgatggacaagatgcgtgacaacaagtaccgctcaagcgagactaaacggatcaacatcatgctcctgtcgatcgtggttgcatttgctgtgtgctggctgcccctgaccattttcaacacagtctttgactggaatcaccaaatcatcgccacctgcaatcataatcttctcttcctactttgccacttgactgcaatgatttcaacgtgtgttaacccgatattctacggattcctcaacaaaaacttccagcgcgacctgcaattcttcttcaacttctgcgacttcagatcccgcgatgatgactacgagactatcgcaatgtctactatgcatacagacgttagcaaaacatccctgaaacaagctagcccagtcgccttcaagaagatcaataataatgacgataatgagaagatatag

SEQ ID NO: 126348 - DNA, 78 bp, synthetic construct
  misc_feature 1..78: note = Description of Artificial Sequence: Synthetic coding sequence
  source 1..78: mol_type = other DNA
atgaacagcacactgttttcacaagtggaaaaccacagcgtgcacagcaactttagtgaaaagaacgcacagttgtag

SEQ ID NO: 126349 - DNA, 183 bp, synthetic construct
  misc_feature 1..183: note = Description of Artificial Sequence: Synthetic coding sequence
  source 1..183: mol_type = other DNA
atgaacagtacacttttcagtcaggttgagaaccattcagtgcactctaactttagtgaaaaaaacgcacagctgcttgcttttgagaatgacgactgtcatctgcctctggcaatgatcttcaccctcgccctagcgtatggagctgtgattatactcggggtgtcagggaatttggcatag

SEQ ID NO: 126350 - DNA, 1146 bp, synthetic construct
  misc_feature 1..1146: note = Description of Artificial Sequence: Synthetic coding sequence
  source 1..1146: mol_type = other DNA
atggggcccatcggagccgaagccgacgaaaaccaaaccgtagaagaaatgaaagttgagcagtacggccctcagacgactccacggggggagctcgtccccgatccagaacctgagctaatcgattctacaaagttaatagaggtacaggtcgtgctgatactcgcctattgcagcatcatcctgttgggtgtaatcgggaattctttggtgatccatgtcgtcattaaatttaaaagtatgagaacagtgactaatttttttatagcaaacctagccgtggcagatctgcttgtaaataccctttgcctaccattcacactcacttataccctgatgggagaatggaagatgggccccgtcctgtgccacttagtgccgtatgcccagggtttggccgtgcaggtgagcaccataaccctaaccgtgattgcccttgacagacacaggtgtatcgtgtaccacctggaatcaaaaatctcaaaaagaatcagcttccttatcattggccttgcctggggcatctccgccttgttagccagccctttagcgatcttccgcgaatactcacttattgagattattcctgactttgagatagttgcctgtacggaaaaatggccaggggaagagaagtccatctatggtacagtatacagtctgagctctttgctgatcttgtacgtgttgccgcttgggattatttccttttcgtacactcgaatctggagcaagctgaaaaatcatgtctccccgggagccgccaatgaccactaccatcagcgccgccagaagaccactaaaatgttggtgtgtgtggtggtcgtttttgccgtatcttggctgcctctgcatgcatttcagctggccgttgacatcgatagccaagttctagatctcaaggagtataagttgatctttaccgtgtttcatatcatcgccatgtgctccacttttgccaacccacttctttatggctggatgaacagcaactatcgcaaagccttcctgagcgcctttcgatgtgaacagcgacttgacgccattcattccgaggtgtccgtgacatttaaggccaagaagaacttggaagtccgcaagaacagcggaccaaatgactccttcactgaggcaacgaacgtgtag

SEQ ID NO: 126351 - DNA, 1146 bp, synthetic construct
  misc_feature 1..1146: note = Description of Artificial Sequence: Synthetic coding sequence
  source 1..1146: mol_type = other DNA
atgggtccaatcggtgccgaagcagatgaaaaccagactgttgaagaaatgaaggtggagcagtatgggcctcaaactacgccacgtggagaactggttcccgatccggaacctgagctaatcgactctactaaactaatcgaagtacaggttgtcctaatccttgcctactgttccattattctcctgggcgtcattgggaactcattagtgatccatgtggttatcaaatttaaatccatgcgtaccgtgacaaatttctttatagccaatttagccgtggccgaccttctcgtcaacacactttgcctgcctttcactttgacatacacccttatgggagaatggaaaatgggacccgttctgtgccacctcgtaccatacgctcagggtctcgctgtgcaagtaagcacaataacactgacggtgatagctttggatagacaccggtgcatcgtgtatcacctcgaaagcaaaattagcaagcgcatcagctttctgatcatcggcctggcatggggtataagcgccctgttggcatcaccacttgccattttccgggagtacagtctgattgaaattatacccgatttcgaaattgttgcatgcactgagaaatggcccggagaagaaaaatcaatctatggcacagtgtactccctgtcctccctactgatcctgtatgtgctgcccctggggattatctccttttcgtatactcggatatggagcaaactgaagaatcatgtgagcccgggggccgccaacgaccactaccaccaacgccgacagaagacaaccaaaatgctggtatgtgtagtggtagtattcgctgtatcatggttgccattacatgcttttcaactggcggttgatatcgattcccaggtcctggacctgaaagaatataaattgatttttaccgtgttccacataatagccatgtgtagtacatttgctaatccacttctgtatggttggatgaattctaattaccggaaagcattcctgtcggccttcagatgcgagcagcggctggacgccatacacagcgaagtaagcgttaccttcaaggccaagaagaatctggaggttcggaagaattccggtcccaacgattcgtttaccgaagccacaaatgtatag

SEQ ID NO: 126352 - DNA, 1338 bp, synthetic construct
  misc_feature 1..1338: note = Description of Artificial Sequence: Synthetic coding sequence
  source 1..1338: mol_type = other DNA
atggacctggagctggatgagtactataataagactctcgcgacagaaaacaatacggcggctaccagaaactccgacttccccgtgtgggatgactataagtcatctgtcgacgatctgcagtatttcctcatcggactgtacacattcgtatccttattgggtttcatgggaaatctgctaatcctgatggccctcatgaaaaagcggaatcagaaaaccacagtgaactttctgataggtaatcttgccttctctgatatcctcgtggtactattttgctcacccttcacgttgacatccgtacttctggaccagtggatgtttgggaaagtcatgtgtcatatcatgccatttcttcagtgcgtgtctgtgttggtgtctactctcatcctgatcagcatcgccattgtgaggtaccatatgatcaagcatccaatctcaaacaacctcactgctaatcacggctatttccttatcgcaaccgtgtggacgctgggattcgccatttgtagccccctgcctgtgttccattccctggtggagttacaggagacgttcgggagcgcacttttgtcttcaagatatctctgtgtggagtcttggcccagtgacagctatcgtattgcttttactattagcttgctgttggttcagtatatcctgcctctggtgtgcttgactgtgagccacacgagtgtctgtcgctcaatatcatgtgggctgagtaacaaggaaaataggctcgaggagaatgagatgattaatttgacattacatccctccaaaaagagcggaccacaggtcaagctctccggatcccacaagtggagctattcatttatcaagaagcaccgccggcgctactccaaaaagaccgcttgtgtcttacccgcccctgagcgaccctcacaggagaaccacagccgaattcttcctgaaaactttggtagtgttcggagccagctctcttcttcctccaaatttattcccggagtccctacatgtttcgagataaaacccgaggaaaatagtgatgttcacgaactgagggtgaagaggtccgtgaccaggatcaaaaaaaggagccggtccgttttctaccgactgaccatcctgattttagtcttcgcagtaagctggatgcccctgcatctatttcacgttgttaccgactttaatgataatctgatctcaaacagacattttaagctcgtttattgcatatgtcacttgcttgggatgatgagctgttgcttgaacccgatcttatatggattcctgaataatgggatcaaagcggatctggtgtcactgattcattgcttgcacatgtag

SEQ ID NO: 126353 - DNA, 1338 bp, synthetic construct
  misc_feature 1..1338: note = Description of Artificial Sequence: Synthetic coding sequence
  source 1..1338: mol_type = other DNA
atggacctggaactggacgaatactacaataagactctggccacggagaacaataccgcagctacccgcaattcagacttccccgtgtgggacgattacaagtctagcgtcgacgacctccagtattttttgatcgggctctacactttcgtgtctctgcttgggtttatgggtaatcttctaatactaatggccctaatgaaaaagcggaatcagaaaactacggtgaatttcttgattgggaatctggctttcagcgatatcttggttgtcctgttttgttccccgttcacactaacctcagtcctgttagatcagtggatgttcggcaaagttatgtgccacatcatgccctttttacagtgcgtttcagtgttggtgtccaccctcatcctgattagtattgctatagtgcggtaccacatgataaagcaccctatctctaataaccttaccgccaatcatggctactttctgatcgccaccgtgtggaccctaggattcgccatctgctctcccttgcccgtgttccattccctggtggagctgcaagagacatttggctccgccttattatcctcgaggtacctgtgcgtcgaatcctggccatctgactcttatcgcatcgcctttaccatctctctcctgttggttcaatatatattacctctcgtctgtctgaccgtgtcacacacgtctgtgtgcagaagcatatcatgcgggctctctaataaggaaaacaggctggaagaaaatgagatgattaacctgaccttgcatccatcaaagaagagcggaccacaggttaagcttagcgggtctcataagtggagttatagtttcatcaagaaacataggagacgctattccaaaaagacggcgtgtgtgcttcctgcccccgagagacccagccaggaaaaccacagccgaattttacctgaaaactttggaagcgtccgcagccagctgtcgtcttcaagtaaatttatcccgggagtccctacatgcttcgagattaagcccgaggagaactcagatgtccacgagctacgtgtgaagcgctccgtcactaggattaaaaaacgctctcgcagcgtcttttacagactcacaattctaatcttagtgtttgccgtgagctggatgcccctacacctgttccacgtcgtgacagatttcaatgataatctgatctctaaccgccatttcaagctcgtgtattgcatttgccaccttctggggatgatgagttgttgtctcaacccaatcctctatgggtttctgaataacggcatcaaagccgacctcgtcagcctcattcactgcttgcatatgtag

SEQ ID NO: 126354 - DNA, 1338 bp, synthetic construct
  misc_feature 1..1338: note = Description of Artificial Sequence: Synthetic coding sequence
  source 1..1338: mol_type = other DNA
atggatctggaattggatgagtattataataagacattggctaccgaaaataatacggctgccacccgtaattcagatttcccagtgtgggacgactacaaatcctcggtggatgatctccagtacttcctgattggcttatacactttcgtcagcctgctgggattcatggggaacctgctcatcctgatggctcttatgaagaagcgtaaccagaagactaccgttaattttctgatcggcaacttggctttctcagacatcttggttgtactgttctgcagccccttcactctgacctctgtgctcttggaccagtggatgttcggcaaagttatgtgtcatatcatgccctttctccaatgtgtctctgtgctcgtttcaacgctgatactaattagcatcgcaatagtccgatatcatatgataaaacacccgatctctaataacctgacggccaaccacggctactttctgatcgctacagtgtggaccctggggtttgcaatctgcagcccgctgccggtgtttcattcactggtcgagctccaagagactttcggctcagcattgctctccagccgctacttgtgcgtcgagtcatggcctagcgatagctataggattgcctttaccatttccctgctcctcgtccagtatattttgccgctggtatgcctcaccgtgagccatactagcgtttgccggagcatcagttgcgggctgtccaacaaggagaacagactggaggaaaatgaaatgattaatctgactttacatccttccaaaaagtccgggcctcaggtcaagctttccgggtcccacaagtggtcctacagctttatcaagaagcaccgccggagatactcaaagaaaacggcttgcgtgctccctgcaccagaaagaccaagccaggaaaatcactccagaatacttcccgaaaactttggatcggtgcgctctcagctgagtagcagttccaagttcatccccggcgtgccaacatgctttgagataaaacccgaggagaactcagatgtgcacgagctcagggtgaaaaggagtgtgacccgaataaaaaagagatctcggagtgtgttctatagactcacaatcttgatccttgtgttcgcagtttcatggatgcccctgcacctatttcatgtggtaaccgattttaacgataacctgatttccaacagacattttaagctcgtgtactgtatatgtcatctgctgggtatgatgtcatgctgcttaaaccccatcctgtacggtttcttaaataatgggatcaaggcagatttggtcagcctgatacactgcctgcatatgtag

SEQ ID NO: 126355 - DNA, 987 bp, synthetic construct
  misc_feature 1..987: note = Description of Artificial Sequence: Synthetic coding sequence
  source 1..987: mol_type = other DNA
atggataacgcttccttttctgaaccgtggccggccaacgcttctggcccagacccggctctttcatgttcgaatgcctcgactcttgcacctctgcctgcacctttagcagttgccgtccctgttgtatatgccgtgatctgcgctgtggggcttgctggcaattcagctgtgctatacgttctgttgagggccccacggatgaagacagtcaccaatttgtttatactgaatctggcaatcgccgatgagctgttcacactggtgttgcccattaacatcgccgatttcctgctcagacagtggcctttcggggaactgatgtgcaaactcattgtggccattgaccagtacaacaccttctcttcattgtacttcctgacggtcatgtccgccgatcgatatctagtcgtgttagctacagcagaatccagacgagttgcaggaagaacctacagcgccgctcgcgctgtgtcactggcagtgtggggtattgtgacccttgtcgtactcccatttgctgtattcgccaggctcgatgatgagcagggccgccgccaatgtgtgctcgtgtttccacagcctgaagctttctggtggcgagcctcacggctttatacattggtgcttggctttgcgattccagttagtacaatctgcgtcctctatactaccctgctctgccggttgcacgctatgcgcctggattcccatgctaaagctttggaaagggccaagaagcgggtcacctttttggtcgtggcaattctggcagtgtgtcttctgtgctggacaccttatcatctctcaactgtagtagcattaactaccgatctgcctcaaactcccctggtgattgccatctcttactttattacaagcctcagctacgctaacagctgtctgaacccctttttgtatgcttttctggatgcatcattcagaagaaacctcaggcagctgatcacatgcagggctgcagcctag

SEQ ID NO: 126356 - DNA, 1599 bp, synthetic construct
  misc_feature 1..1599: note = Description of Artificial Sequence: Synthetic coding sequence
  source 1..1599: mol_type = other DNA
atgcttgcggagcctttccccaaagtagtggcgagcctgatcatcctgcacttgagtggggccaccaaaaagggtaccgagaaacagaccacctctgagacacagaaaagcgttcaatgcggtacgtggaccaagcatgccgagggtggcatctttacctcaccaaattatccatccaagtaccccccagatcgggagtgcatatacatcatcgaagctgcccctcgtcagtgtatagaattgtacttcgacgagaaatattccatcgaaccaagctgggagtgcaaattcgatcatattgaggtgcgggacggcccattcgggttctctcccataataggacgcttctgtgggcagcaaaaccccccagtgatcaagagtagcggccgattcctatggatcaagtttttcgcggacggggagctggagtctatgggcttcagtgcacggtacaattttacaccagaccccgatttcaaggatctgggggcactgaagccccttccggcctgcgagttcgagatgggcggatcggaagggatcgttgaaagcattcagataatgaaggaaggcaaggccacagcctcagaggccgtggactgtaagtggtatatccgagcccctcctagaagtaaaatctacttgaggttcctggactatgaaatgcagaacagcaatgaatgtaagcgcaactttgtggccgtgtatgatgggtccagtagtgtcgaggatctgaaggctaaattttgttctaccgtagctaacgacgtcatgctacggactggactgggagttattaggatgtgggctgacgagggtagccgcaactccaggtttcaaatgttgttcacatccttccaagagcctccctgtgagggaaacacgttcttctgccatagcaacatgtgcattaacaacacattggtctgtaatggcctgcagaactgcgtctatccttgggacgagaatcattgcaaggaaaagcggaagaccagcttgctcgatcagctaactaatacttctggcacagtgatcggagtcacttcttgcattgtaataatcctgatcatcatcagcgtgatcgtacaaattaaacagccgcgaaagaaatacgtccaacgtaagagtgattttgatcagaccgtgttccaggaagtgtttgaaccaccacattacgaactgtgcacactgcgaggcactggggccaccgctgatttcgctgacgtggctgacgacttcgagaattaccataaactcagacgatcgtcttccaaatgtatccacgatcaccactgtgggtctcagctgtcctctacaaaaggtagtaggtccaatctatccaccagggacgcgagcatattaacagagatgcctacccagcctggcaagcccctgattccacctatgaaccggcggaacattctcgtcatgaaacacagctactcccaggacgccgccgatgcgtgtgatatcgatgagatcgaggaggtgcctactacttcacacaggctgtccaggcatgacaaggccgtacaaagattttgcctcattggctcgctgagcaagcacgagtccgaatataatacaactagagtgtag

SEQ ID NO: 126357 - DNA, 1602 bp, synthetic construct
  misc_feature 1..1602: note = Description of Artificial Sequence: Synthetic coding sequence
  source 1..1602: mol_type = other DNA
atgattcacgggaggagcgttctgcacatagtggcaagtctgattattctgcacctcagcggcgctaccaagaagggcacagagaagcaaaccacctctgagacccagaagagtgttcagtgcggtacctggacaaaacatgcagaagggggcatattcacgagccctaactatccttctaaataccctcctgaccgtgagtgcatttatattatcgaagccgcccctcgccagtgcattgagctgtactttgatgaaaagtactccatcgagccctcatgggagtgcaagtttgaccatatagaagttcgcgacgggcctttcggtttcagtcctatcatcgggcgcttctgtggccaacagaatcctcctgtgattaagagcagcggaagattcctgtggatcaaattctttgcagacggcgaactggagagcatggggttcagcgcacgttataactttacccctgatccagacttcaaggatcttggagcactgaagccccttcctgcatgtgagttcgagatgggcgggagcgaaggaatcgttgaatccatccagatcatgaaggaaggtaaggctactgcttcagaggccgtggactgcaagtggtacatacgcgcccccccccggtctaaaatatacctgcgcttcttggattatgagatgcaaaattctaatgaatgtaaacggaatttcgtagcagtgtacgacggatcaagcagcgttgaagacctcaaggcaaaattctgtagcaccgtagctaatgacgtaatgctgagaactgggctgggagttatcagaatgtgggcggacgagggtagcagaaattctcggtttcagatgttgtttacttctttccaggaaccgccatgtgagggcaatacgttcttctgccacagtaatatgtgcataaataatacactggtgtgtaacggcctgcaaaactgcgtgtacccttgggacgagaaccattgcaaggaaaagcgcaaaacatctctgctcgatcagctaactaacacgtctgggacggtgatcggcgtaaccagctgtattgtcatcatcctgatcattatctctgtcattgtccagatcaagcagccgaggaaaaaatatgtacagcgcaaaagcgacttcgaccaaactgtcttccaggaagtatttgagccgcctcattacgagttgtgcactctcagaggaaccggtgccacggccgactttgctgacgtcgccgacgacttcgagaactaccacaagcttcgcaggtcctcttccaaatgcatccacgaccatcattgcggcagccagctgtcttcgacgaaaggcagtaggtccaatctttcgacccgggacgcttcaattctaaccgaaatgccgactcagcctgggaagccgctcatcccgcctatgaaccggcggaatatcctagtcatgaagcactcatacagtcaagatgcagccgatgcgtgcgatatagatgaaattgaagaggtgccaaccacttcccaccgtttgagccgccatgataaagccgtccagagattctgcctgattggatcccttagtaagcatgagagcgaatataatacgaccagagtatag

SEQ ID NO: 126358 - DNA, 471 bp, synthetic construct
  misc_feature 1..471: note = Description of Artificial Sequence: Synthetic coding sequence
  source 1..471: mol_type = other DNA
atgctggccgaaccattccccaaggtcgtagctagtctcatcatcttgcacctgtcaggtgccactaagaagggaacggagaaacagactacctccgagactcaaaaatccgtgcagtgcgggacttggaccaagcacgcggaaggggggatttttacttcacccaactatccatctaaataccctccagacagggaatgcatttatatcatcgaggcagcaccccgacagtgcattgagctgtattttgatgaaaagtacagcattgagccgagctgggagtgcaagttcgaccacatcgaggttcgcgacggtcccttcggatttagccccataatcggaaggttttgcggccaacaaaacccacccgtcataaagtctagtggaagatttctttggattaagttcttcgccgacggggagttagagtctatgggtttctcagcacgttataacttcaccccagaatag

SEQ ID NO: 126359 - DNA, 1602 bp, synthetic construct
  misc_feature 1..1602: note = Description of Artificial Sequence: Synthetic coding sequence
  source 1..1602: mol_type = other DNA
atgatccatggtcggtcggttttgcatattgtcgcttccctaatcatcttgcacctgagtggcgctaccaaaaagggcacagagaaacagaccacttctgaaacccagaagagtgtgcagtgcggtacctggacaaagcacgcggaaggggggatcttcacctctcctaattacccctccaagtatcctcccgatagagaatgtatttatatcatcgaggcagcgcccagacagtgcatcgaactgtacttcgatgagaagtactctattgagccctcatgggagtgcaaatttgatcacatcgaagtcagagatggccctttcggcttctcaccgatcattggccgcttctgtggacagcagaatccacctgtgatcaagtcctcagggagattcctgtggataaaattttttgctgatggtgagctcgagtcaatgggcttcagcgctagatacaacttcacacctgaccccgatttcaaggacttaggagctctcaaacctctgcccgcatgtgagttcgagatggggggatctgagggcattgtggagtcaatccagattatgaaagagggaaaagccaccgccagcgaggcggttgattgtaaatggtacattagagccccgccaaggagtaagatctacttaaggttcttggattatgagatgcagaatagcaatgaatgcaagcgcaacttcgtggccgtgtatgatggttccagtagtgtggaggacctcaaagccaaattctgtagcaccgtagccaacgatgtgatgcttcgaacaggcctcggagtgatccggatgtgggccgacgaaggctctcgcaattcacggtttcagatgttgtttactagttttcaggaaccaccttgtgaaggcaacactttcttctgtcattctaatatgtgtatcaacaatacactggtgtgcaatgggctccagaactgcgtgtacccatgggatgagaaccactgcaaagaaaagcggaaaacgtcactcttggatcaacttactaacactagcggcactgtgatcggcgtaaccagctgcatagtgataatcctaatcattattagcgttattgtgcaaataaagcaaccaaggaaaaagtatgtgcagaggaaaagcgattttgaccagaccgtgttccaagaagtgtttgaaccaccgcactacgagctgtgtaccctacggggaacaggagctacggccgacttcgccgatgtcgccgacgatttcgaaaactatcataagcttcggcggagcagctcaaaatgcatccatgaccaccattgcgggagccaactgagctctaccaaaggcagccggtcgaaccttagcacccgcgatgcctctattttaaccgagatgcctacccagcccggaaagcctctgatccctcctatgaacaggcgtaacattctagtcatgaagcacagttattcacaggacgccgctgatgcctgcgatatcgatgaaatagaagaggtgccgactacttcccataggctgtctagacacgataaagcagtccagaggttctgtctcatcggctctctgtctaagcacgagagcgagtacaatacaaccagagtgtag

SEQ ID NO: 126360 - DNA, 1017 bp, synthetic construct
  misc_feature 1..1017: note = Description of Artificial Sequence: Synthetic coding sequence
  source 1..1017: mol_type = other DNA
atgtcaggaagcagtctgcctagcgctttagctctctccctgctcctcgtgtccggcagcttgctgccaggacccggtgcagctcagaacgcagggtttgtgaaatcccctatgtctgagaccaagttaaccggcgacgccttcgaactctattgtgacgtggtagggagtcctacccccgagattcagtggtggtatgctgaagtcaatagagctgagtcttttaggcagctgtgggatggagctcggaaacgacgcgttacagtgaatactgcatacggttctaatggcgtgagcgtgctgcgcattacacgcctgacactggaggattcagggacatacgagtgcagagcttccaacgatcctaagagaaacgatctccgccagaatccatctattacctggatacgtgcacaggccactatcagtgtcttgcagaagcccagaatagtgacctccgaggaagttatcattcgggattcccctgtcctgcctgtgacactgcagtgtaacctgacctcctcttcccatacactgacctattcttattggaccaagaacggagtagaactgtcagccacccggaaaaacgccagcaatatggagtatcgcatcaataagccccgggcagaagacagtggggagtatcattgtgtctatcactttgtgagtgcacctaaggctaatgcaactatagaagtaaaagccgcccccgacattacaggtcataaaaggagtgaaaacaaaaatgagggacaggacgctacaatgtactgcaagagtgtggggtacccccacccagactggatttggcggaagaaagaaaacggcatgcccatggacattgtgaatacgagcgggaggtttttcattattaacaaagaaaattacaccgaactcaacattgtcaatctccagatcaccgaggaccctggagagtacgagtggtgcggtgctacatggccacactctggactctcgtgggagttctggttgaaactttcctcactgtggtag

SEQ ID NO: 126361 - DNA, 1197 bp, synthetic construct
  misc_feature 1..1197: note = Description of Artificial Sequence: Synthetic coding sequence
  source 1..1197: mol_type = other DNA
atgagcggaagcagcttacccagcgctctcgcactatctctacttctggtctctgggtctttactgcctggaccaggcgcggctcagaatgctggattcgtgaagtcccctatgtccgagaccaagcttacaggagacgcttttgaactgtattgcgatgttgtcgggagccctacaccagagatccagtggtggtatgcagaggtgaatagagcagagagcttccggcaactgtgggatggtgccaggaaacgcagggttacggtaaacaccgcctatggaagcaacggagtgtccgtgttgcgaatcactcggttaacattggaggactcagggacttatgagtgtagagcctctaacgaccccaaacgtaatgacttgagacagaacccatctattacgtggatccgagcccaggccaccatttcggtcctccagaagccgcgcatcgttacgtccgaggaagtgattattcgggactctcccgtgctccccgtgactctacagtgcaatcttacgtcctcatctcatacccttacgtacagctattggaccaaaaacggagtggagttaagcgccacaaggaaaaatgcctcgaacatggagtatcgtattaacaagccacgcgcagaagacagcggcgagtatcactgcgtttaccatttcgtgtccgcccctaaggctaacgctacaatcgaggtcaaggccgcccccgacatcacaggccataagcggagtgagaacaagaacgagggacaggatgcaaccatgtattgtaaatctgtcggataccctcaccccgattggatttggagaaaaaaggaaaatggcatgcccatggatattgtgaatacatccggacggttcttcataattaataaggagaactacactgagcttaacatagtgaatttgcaaatcacggaggaccccggagaatatgagtgtaatgcaacaaatgcaattgggtcagcaagtgtggtgactgtgctgcgcgttagatcgcatttggccccactgtggccctttctgggcattctcgcggagatcatcattttggtggtgattatagtggtgtacgaaaaacggaagagaccagacgaagtccccgacgacgacgaacctgccggtccaatgaagaccaactccaccaacaaccataaggataagaacctgagacagagaaacaccaattag

SEQ ID NO: 126362 - DNA, 849 bp, synthetic construct
  misc_feature 1..849: note = Description of Artificial Sequence: Synthetic coding sequence
  source 1..849: mol_type = other DNA
atgagcggttcatcccttccctccgctctagcactctctctcctcctagtcagcgggtcactacttcctgggcctggggcagcgcagaacgaacctcggatcgtgactagtgaggaagtgatcatccgtgactcacccgtcctgcctgtgacccttcagtgcaatttgacctctagctcacatactctgacgtacagctattggactaaaaacggcgtcgagctgagcgccactcgcaagaacgctagtaatatggagtacaggattaataaaccccgagccgaagactctggggagtaccactgcgtgtatcattttgtgtcggcaccaaaggcgaacgctacaatcgaagtgaaggccgccccagatattactggacacaaacgaagcgaaaacaaaaacgaaggccaggacgccaccatgtactgcaagtccgtgggttatccccaccctgactggatctggcgtaagaaggaaaacggaatgcccatggacatcgtgaacacttctggacggttttttatcattaataaggagaactatacagagttgaacatcgtgaatctgcaaattaccgaagatccaggcgagtacgagtgtaatgccacaaacgctataggcagcgcctcagtggtgactgtgttacgcgtgcgttctcaccttgctccactgtggcctttcctgggcatactggctgaaattatcatcctcgtggtgatcatcgttgtgtacgagaaacggaaacggccagatgaggtgcctgatgatgacgaaccggcaggtccaatgaagacgaatagcaccaataaccataaggataagaacctgcgccagcggaacacaaactag

SEQ ID NO: 126363 - DNA, 582 bp, synthetic construct
  misc_feature 1..582: note = Description of Artificial Sequence: Synthetic coding sequence
  source 1..582: mol_type = other DNA
atgagcggtagttccctgcccagtgccctcgccctatctctgctgttggtgagcggttctctcttgcctggacccggtgccgcccagaatgcggcccctgacattaccggccacaagcgctctgaaaataagaacgaaggtcaagatgcaacaatgtactgcaaaagcgtcggctacccccatcctgactggatctggaggaagaaagaaaacgggatgcctatggatatagtcaacacctctgggagattttttataatcaataaggagaactataccgagttgaatattgtgaacttgcagatcaccgaggacccgggagaatatgagtgtaatgccacaaacgcaatagggagcgccagcgtggttacggtgctaagagtccggtcacatctggcgcctttatggcccttcttgggtattcttgccgaaatcatcattcttgtggtgatcattgtggtgtacgagaaacggaagcggcccgatgaagtgcccgacgacgatgagcctgcagggccaatgaagacaaacagtacgaacaaccacaaggataagaaccttcgccagcgcaacaccaattag

SEQ ID NO: 126364 - DNA, 1185 bp, synthetic construct
  misc_feature 1..1185: note = Description of Artificial Sequence: Synthetic coding sequence
  source 1..1185: mol_type = other DNA
atgagcgggagcagtctgccaagcgctcttgcactgagcctactgctcgtgtctgggagtttgctacctggccccggtgctgcacaaaacgccggctttgtgaaatcccccatgtccgagacgaagttgaccggcgacgcgtttgagctttactgtgacgtcgttgggagcccaactcctgagattcaatggtggtacgccgaggtcaatcgagccgaaagctttagacaactctgggacggggcacgaaaaaggagggtgaccgttaacaccgcctatggcagcaacggggtaagcgtgctgcgcatcacgagactaacgttggaagactcaggcacctatgaatgcagagcaagcaatgatccaaagagaaatgatttgaggcaaaatccttcaattacctggatcagggcgcaagctactatttctgtgttacagaagccacgcatcgtgacttcagaagaggtcattatcagggactctccagtattacctgtgacattgcagtgcaacctcacttccagctcacacaccctgacatattcttactggacgaaaaatggggtcgagttgtctgcaacacgcaaaaatgcttccaacatggaatacagaatcaataagcccagagccgaagacagtggagaataccactgcgtctaccactttgtgtcagcacccaaagctaatgccacaatagaggtcaaggctgcacctgatatcacgggacataagaggagcgagaataagaatgaaggtcaggatgcaactatgtattgtaagagcgtagggtatccccaccccgattggatctggagaaagaaggaaaacggtatgcctatggacatagttaacacctcaggtaggttttttatcatcaataaagagaactataccgagctgaacattgtgaatctgcagatcacagaggaccctggcgagtatgaatgtaatgctacaaatgctatcggaagtgcctctgtcgtgacagttctgcgtgttcggagccatctcgcaccgctttggccgttcctgggcatcttggcagagatcattatcctggtggtcattatcgtggtttacgaaaagagaaaacgcccagacgaggtaccggatgttcctccgagaaagacaaactctaccaataatcacaaggacaaaaacttgaggcaaagaaatacaaactag

SEQ ID NO: 126365 - DNA, 513 bp, synthetic construct
  misc_feature 1..513: note = Description of Artificial Sequence: Synthetic coding sequence
  source 1..513: mol_type = other DNA
atgatggcgggtatgaagatccagctcgtgtgcatgctcttgctggccttctcttcttggtcgttgtgtagcgattcggaggaagagatgaaagccctggaggctgatttcttgaccaacatgcatactagcaagatatcaaaagcacatgtcccgagttggaagatgaccctccttaacgtgtgctccctggttaacaacctcaactctcctgctgaggaaaccggcgaggtccacgaggaagaattggtggctagacggaaattgcccactgcattggacggtttctccttggaggccatgttgacaatttaccagctgcataaaatttgccattctcgcgctttccagcattgggaattgatccaggaggatattttggacaccggtaacgacaagaatgggaaagaggaggtcatcaagcgaaaaatcccatacatacttaaacgccagctgtacgagaataagcctcgtcggccttatatactcaaacgggatagttactactattag

SEQ ID NO: 126366 - DNA, 348 bp, synthetic construct
  misc_feature 1..348: note = Description of Artificial Sequence: Synthetic coding sequence
  source 1..348: mol_type = other DNA
atgaccctcctgaatgtgtgctccctggtcaataacctgaattcccctgccgaagagactggtgaagttcatgaggaggagcttgtggcacgaaggaagctgcctaccgccctggacggatttagtctggaagctatgctgacaatctaccaattgcataaaatttgtcactccagagcatttcagcactgggagttaatacaggaagatatacttgatacggggaacgacaagaacggtaaggaagaagttattaagcgcaagattccctacatccttaagcggcagttatacgaaaataagccgcgtagaccctacatcctcaagagagactcctactactactag

SEQ ID NO: 126367 - DNA, 288 bp, synthetic construct
  misc_feature 1..288: note = Description of Artificial Sequence: Synthetic coding sequence
  source 1..288: mol_type = other DNA
atgatggccgggatgaagattcagctggtctgtatgcttctcctagcgttctcatcatggtctctttgttccgacagtgaggaagagatgaaagcactggaagcagactttctcacgaatatgcacacctccaagctaattcaggaggatattttagatacagggaatgacaaaaacggcaaggaagaagttatcaagcgtaaaattccgtacatcctgaagcgccagctgtacgagaacaagccgaggcggccttatattttgaagcgcgattcttactactattag

SEQ ID NO: 126368 - DNA, 1257 bp, synthetic construct
  misc_feature 1..1257: note = Description of Artificial Sequence: Synthetic coding sequence
  source 1..1257: mol_type = other DNA
atgaggctgaacagcagtgcgccagggacgcccggaacccccgctgccgacccattccagagggcacaagctggtctggaagaggcccttctggcacccggcttcggtaatgcatctgggaacgctagcgaacgcgttctggccgcgccatccagcgagctcgacgtgaatactgacatttactccaaagtcctggtgacagcagtttacctcgctttgtttgttgtggggacagtgggcaataccgttaccgcgttcacactcgccagaaagaaaagcctgcagtctctccagagtaccgtgcactatcacttaggatcgcttgcgctgagcgacctgctgacactcttgctagctatgcctgttgagctgtataactttatctgggtccaccatccctgggcatttggagacgccggttgtagaggctattacttcctgcgcgacgcctgtacctacgctactgcgctgaatgtggccagtctgtcagttgagagatatctggctatatgccacccttttaaggcaaaaactctgatgtcgcgatcccgtactaaaaaattcatatcagccatatggctcgccagcgctctactggctgtgcctatgttgttcaccatgggtgagcagaatagatccgcagacgggcaacatgctggaggactcgtctgcacccccactatacatacagctacggtcaaggtcgtcattcaggttaatacttttatgtcctttattttccctatggtggtcatttccgttctgaacaccattattgcaaacaagctgaccgtgatggtgaggcaggcagccgaacagggtcaagtttgcactgttgggggagagcattcaactttcagtatggccatcgagcctgggagggtgcaggccctcagacacggtgtgcgcgtgctccgggctgttgtcattgcgttcgtggtgtgctggttgccttaccacgtgcggcgtctcatgttctgttacataagtgatgagcagtggaccccgtttttgtacgatttttatcactacttctacatggtcactaatgccctattttacgtctcctcaacaatcaacccgattctttacaacctggtcagcgctaatttccgccacattttcttggcaaccctagcctgcctatgccccgtttggcgaagacgaagaaagcgtcccgccttctccagaaaagccgacagcgtgtcttcgaaccacacgcttagttccaatgctacccgggagaccctgtattag

SEQ ID NO: 126369 - DNA, 951 bp, synthetic construct
  misc_feature 1..951: note = Description of Artificial Sequence: Synthetic coding sequence
  source 1..951: mol_type = other DNA
atgggcgtgtgcggttacttgtttctgccatggaagtgtcttgtagtggttagcctgcgcttactgtttttagtgcccacaggagtgccagtgaggagcggggacgccaccttccctaaagccatggataatgtcaccgttcgccagggtgaaagcgccacactccggtgtaccattgataatcgcgtgacccgggtggcgtggctcaaccgtagcacaatcctatatgccgggaacgacaaatggtgtcttgatcctcgcgtcgtgctgctgagtaatacgcaaactcagtacagtatcgaaatccagaatgtggacgtgtacgacgaggggccgtatacctgttctgtccagactgataaccacccaaaaacttctcgtgtccacctcattgtccaggtgagccccaagatagtggagatttcttccgacatctcaatcaacgagggcaataatatttcgttgacatgcatcgctaccgggcgacccgagcctactgtgacttggcgccacatatcaccgaaggctgtgggtttcgtatctgaagacgaatacctagagatccaaggcatcacccgcgaacaaagtggtgactatgagtgttccgcttcaaacgacgtggccgcacctgtggtaagaagggtgaaggtgaccgtgaactaccccccatatatatctgaagccaagggcacaggagtcccggtgggacagaagggcaccctccagtgtgaggcctccgccgttccatccgctgaatttcaatggtacaaggatgacaagcggcttattgaagggaaaaagggtgtgaaggtagagaaccgccctttcttgagcaagttaatcttcttcaacgtcagtgaacacgactatggcaattacacgtgtgtcgcgagcaacaagctaggacacacaaatgcaagcattatgctttttggcgaaacggtgctgtag

SEQ ID NO: 126370 - DNA, 1035 bp, synthetic construct
  misc_feature 1..1035: note = Description of Artificial Sequence: Synthetic coding sequence
  source 1..1035: mol_type = other DNA
atgggagtgtgcggatatctctttctgccttggaagtgcttggttgtggtctcactccgcctgctgtttctcgtcccaacaggcgtgccagtgaggtcaggggacgctacgttcccaaaagcaatggataatgtcaccgttaggcagggggagagtgccactctgcgttgcacaatcgataatcgtgttacaagagtcgcctggctgaataggtccaccattctgtacgccggaaacgacaaatggtgcttggatccccgtgtcgtattgttatctaacacacagacacagtattccatcgagatccagaatgtggatgtgtatgacgaggggccgtacacttgcagcgtgcagacagataatcatccaaagacgtctagagtgcatctaattgtccaggtgtcaccaaagattgtagagatctcgagcgacataagtataaatgaaggaaataatatctctcttacctgtatcgctaccgggagacccgagcccacagtgacttggagacatatctcacctaaggctgttgggtttgtctccgaagacgaatacctggagatacagggcattactcgcgagcagagcggtgattatgagtgttctgcaagcaacgacgtggcggccccagtggttaggagagtgaaagttaccgtgaactaccccccatatatcagcgaggctaaaggcactggggtgccagtcggtcaaaaggggactctccagtgtgaagccagtgccgttccctctgccgaatttcagtggtacaaagatgacaaacgcctgatcgagggaaaaaaaggcgtaaaagtggagaaccggccttttttgtccaaacttatattcttcaatgtctcagagcatgattatggcaactatacttgcgtcgccagcaacaaactaggccataccaatgcaagtattatgctttttgggcctggtgccgttagtgaagtctcaaatgggacctccaggcgtgctggttgcgtgtggcttctgcctctgctagtgctgcatctgctgctcaagttctag

SEQ ID NO: 126371 - DNA, 1035 bp, synthetic construct
  misc_feature 1..1035: note = Description of Artificial Sequence: Synthetic coding sequence
  source 1..1035: mol_type = other DNA
atgaaaacaattcaacccaaaatgcataacagtatctcgtgggccatcttcaccggcttggcagccttgtgtcttttccagggggtgcctgtgagaagcggagacgccacctttcccaaggcaatggataatgtgacggtcagacaaggggaaagcgccacgctacggtgtacgattgataatagagttacccgcgtggcctggctcaaccgaagcaccattttgtacgcgggcaacgacaaatggtgcctcgatccccgtgtcgtgctcttatccaacacccagactcagtacagtatcgaaattcagaatgtggacgtgtacgacgagggcccttacacatgtagtgtgcaaacagacaaccatccaaaaacaagccgtgtgcacctcatcgtgcaagtgagccctaagattgtagaaatcagttctgatatcagcatcaacgaaggaaataatattagcctaacatgcatagctactgggaggcccgaacctactgtcacgtggagacatatcagtccgaaggccgtgggcttcgtctcagaggatgagtacttagagatccaaggcattacacgggagcagtcgggtgactacgagtgctctgcttcaaatgatgttgctgcccctgttgtcagaagagtcaaggtgaccgtgaattatcctccctatatttccgaggcaaaaggcacaggggtgccagttggccagaagggaacattgcagtgtgaggctagcgcagtccccagtgctgaattccagtggtacaaggatgacaagcgactgattgagggcaaaaagggtgtaaaagtggagaaccggcccttcctgagcaagcttatttttttcaatgtatctgaacacgactatggcaactacacatgtgttgcatctaataaactaggacatacaaatgccagtatcatgctctttggtcctggcgccgtcagcgaagtttctaacggcacgtctcggagggccggttgtgtttggcttctgccgcttctggttcttcacttactgctgaaattctag

SEQ ID NO: 126372 - DNA, 1041 bp, synthetic construct
  misc_feature 1..1041: note = Description of Artificial Sequence: Synthetic coding sequence
  source 1..1041: mol_type = other DNA
atgaatggcaagcgaaacggggagggaggcaaacggtggaagtggaaagggactggggtgcccgtgcggtcaggcgatgcaacttttccaaaagctatggacaatgttacagtaaggcagggcgaatctgccacccttcgatgcactatcgacaaccgcgttactcgcgtcgcctggctgaaccgatccacaatactctacgccggaaacgataagtggtgtttggatcccagggtcgtgcttttgtccaatacacaaacccagtattcaattgagattcagaatgttgacgtgtacgacgagggcccttatacctgctctgtacaaaccgacaatcaccctaaaacttctcgtgtacacctaatagtacaagtttcaccaaaaattgtcgagatttcctctgacatcagcataaatgagggtaacaacattagcctaacctgtatcgctacgggtcgacccgagccgaccgtgacgtggcggcacatcagcccaaaagcagtgggcttcgtgtctgaagacgaatatcttgagatccagggcattacacgggagcaaagcggagattatgagtgctccgcaagtaatgatgtagccgcccctgtagtccgaagggtgaaggttactgtgaattaccccccttatattagcgaagctaaggggaccggtgtccccgtgggccagaagggaacactgcagtgtgaggcttccgccgtcccatccgccgagttccaatggtacaaggatgataagcgtctgattgagggcaaaaagggggtgaaggtcgaaaacagaccatttctgagcaaactgatcttttttaatgtctctgagcacgattatgggaactacacctgcgtagcctccaataagctgggacacaccaatgcctctatcatgctgttcgaggtgaagacaaccgcactcactccgtggaagggaccgggagctgttagcgaagtcagtaacggaactagccggcgggcgggatgcgtctggttactgccccttctcgtgttacacctgctcttgaagttctag

SEQ ID NO: 126373 - DNA, 1068 bp, synthetic construct
  misc_feature 1..1068: note = Description of Artificial Sequence: Synthetic coding sequence
  source 1..1068: mol_type = other DNA
atgaaaacgatccagccgaaaatgcacaactctatctcatgggccatttttacagggttggccgcgctatgcctgttccagggggtccctgtgagaagtggtgatgccacttttccaaaggccatggacaacgtcacagtacggcagggagaatctgccacattgcgctgcaccatcgacaaccgcgtaacacgtgtcgcttggttgaaccgctcgaccattctctatgctggcaacgataagtggtgcttggatcctagagtcgtccttctgagcaacacacagacccaatacagcatagagatacagaacgttgacgtgtatgatgagggcccgtacacatgcagtgttcagactgataatcacccaaagacaagccgggttcatctaatcgtccaggtgtcacctaagatagtggaaatttcttccgatatatctattaacgaggggaacaatattagtctgacatgcatcgctactggccgccccgaacccactgttacgtggaggcatatctcacctaaggcggttgggtttgtcagcgaggacgagtacctcgagattcaaggaattactagagaacagtctggtgattacgagtgttccgcgtctaatgacgtagcagctcccgtcgttcgccgggtgaaggtgaccgtgaattaccccccgtacatctccgaagcaaaaggtaccggggttccagttggccagaaggggaccctccagtgcgaggcttccgcggtccccagtgccgagtttcagtggtataaggacgacaaaaggttgatcgagggaaaaaaaggtgtaaaggtagagaatcggccttttctgtctaagctgatcttctttaacgtgtccgagcatgactacggcaactatacctgcgttgcatcgaataaacttggccatactaatgcttccattatgttattcgaggtcaagaccacagccctgacaccctggaagggccctggcgccgtctccgaggtgtccaacggaacgtcccgacgggccggatgcgtgtggctgctgccgctcctggtgctccatcttctgctaaagttttag

SEQ ID NO: 126374 - DNA, 1068 bp, synthetic construct
  misc_feature 1..1068: note = Description of Artificial Sequence: Synthetic coding sequence
  source 1..1068: mol_type = other DNA
atgggggtgtgtgggtaccttttcctgccttggaaatgcttggtggtggttagcctacgcttgttatttttggtgcctacaggggttcccgtacggtcaggggacgcaacttttccaaaagcaatggataacgtgacagttcggcagggcgagtctgctacactgagatgcacaattgataaccgcgtgacccgcgtcgcctggctaaataggtcgactatactctatgctgggaatgacaagtggtgccttgatccccgcgtggtccttttaagtaacacacagacccagtacagcatcgaaatccagaatgtggatgtgtatgatgaagggccttacacttgtagcgttcagacggacaaccatcctaaaacctcacgcgtgcatctgattgtccaggtcagccctaagatcgtcgaaatcagcagtgacatatcaatcaatgagggaaacaatattagcctgacttgtattgcgactggtcgtcctgaacctaccgtcacttggcgccatattagccctaaggctgttggcttcgtaagcgaggatgagtatctggaaatccagggtataactagggagcagagcggggactatgagtgttcagcaagtaacgacgtggccgccccagtggtacgaagggtcaaagttacagtgaactacccaccatatatatcagaagcaaagggtactggcgtgccagtgggacaaaagggaactctccagtgcgaagcgagtgccgtcccatccgccgagttccaatggtacaaggacgataaacggttaattgagggtaagaaaggagtgaaggttgagaaccgcccgttcctgagtaagttgatctttttcaatgtatcagaacacgactatggcaactacacctgtgtggcttctaacaaactgggccatacaaacgcatctattatgctgttcgaagtgaagaccaccgcactgaccccatggaagggacccggtgcagtcagcgaagtcagtaatggcacaagtagacgggccggttgtgtctggctccttcccctgctggtgctgcatctcttgctgaaattctag

SEQ ID NO: 126375 - DNA, 2373 bp, synthetic construct
  misc_feature 1..2373: note = Description of Artificial Sequence: Synthetic coding sequence
  source 1..2373: mol_type = other DNA
atgctgagagggggacgtcggggacagctcgggtggcatagttgggcagccgggccaggaagcctgctggcatggctgatcctagccagcgccggtgccgccccttgcccggacgcttgctgtccccacggcagttccgggttaagatgcactagagatggagcattggacagcctccaccatttaccaggagcagaaaatctcacggaactgtacattgaaaaccagcagcacctgcagcatctggaactgcgcgatctgagaggcctgggtgaattgcgtaacctgaccatcgtcaaaagcggcttaagatttgtggcacctgacgccttccacttcacgccaagactaagccggctgaacctttcattcaacgctctagagagtctgagttggaaaacagtacaggggctgtctctgcaagagctcgtgcttagcggtaacccactgcattgttcctgcgcacttaggtggctccagcggtgggaggaagaaggcctgggaggagtaccagagcagaagctacagtgtcatggccaggggcctctagctcacatgccaaacgcctcctgtggggtgccgactctcaaagtacaggtacctaacgccagcgtggatgtgggggacgacgtgctgctgcgctgccaggtcgagggcagaggactggagcaggctggttggatacttacagaactggaacaaagcgccacagtcatgaagtccggaggccttccctcactggggctaacccttgccaacgtcacttcggacctgaaccgaaaaaacgtgacttgctgggctgaaaatgatgtggggcgagccgaggtgagtgtccaggtgaatgtgtcgttcccggctagcgtgcagctgcataccgctgtggaaatgcatcattggtgcatacccttttccgtcgacggccagccagctccaagtcttaggtggctgttcaacggttcggtgttaaacgagacatcctttatttttacagagttcttagagcctgccgccaacgagacagtgaggcacggctgtctgcggctgaatcaaccaacccatgtcaacaacggcaactacacccttttagccgcaaacccattcggccaggcttcagcgtctattatggcagccttcatggataatccattcgaattcaatcccgaagaccctattcccgatactaacagtacgtccggcgaccctgtggagaaaaaagatgaaacaccttttggtgtctctgttgccgtcgggctggcggtgtttgcttgccttttcctcagcacgcttctgctggtcctcaataaatgcggccggcgcaataaattcggtatcaaccgcccagccgtcctcgccccagaggacggattggccatgtctttgcatttcatgactttggggggcagctccctctcacccacggagggcaaagggtcaggactgcaaggccacattatagagaacccacaatatttctccgatgcatgcgtgcaccacatcaaacgcagggatatcgtcttgaaatgggagttaggggaaggtgcttttggtaaggtctttctggccgagtgtcacaatctcctgcctgagcaggacaagatgctcgtcgcggttaaagcattaaaagaggcaagcgaatctgctcgccaggacttccagcgggaggccgagttattaacaatgctgcagcaccaacacatcgtacgattcttcggggtctgtactgagggtaggccgcttctgatggtattcgagtacatgaggcacggagatctgaataggttcctgagaagtcacggaccagacgccaagctgctagctggaggagaagatgtcgccccaggtcctttggggctggggcagctgttggctgtggcgtcccaggttgctgccggaatggtgtatcttgccggactgcactttgtccatcgcgatctggctacccgtaattgtttggtcggacagggacttgttgtaaaaatcggcgactttgggatgtctcgtgatatttattccacagattactacagagtcggaggtcggaccatgctgcctataagatggatgccgccagagagcattctgtatcggaagtttactactgagtcagacgtgtggtcgttcggagtggtactgtgggagatttttacatatggcaagcagccgtggtaccagctgagcaataccgaagccatagactgtatcactcagggccgggaactcgaaaggccccgggcgtgtccgcctgaggtgtatgctattatgagagggtgttggcagagagaacctcaacagcgtcatagtatcaaggatgtgcacgcaagactgcaagcactggcccaggctccaccggtgtacctcgatgtgctgggctag

SEQ ID NO: 126376 - DNA, 2283 bp, synthetic construct
  misc_feature 1..2283: note = Description of Artificial Sequence: Synthetic coding sequence
  source 1..2283: mol_type = other DNA
atgaaagaagctgcactaatctgcttggctccctccgtgcctcccattctcaccgtcaagagttgggacactatgcagctgagggctgcacggagcagatgtaccaatctccttgctgcgagttacatcgagaaccagcaacatctgcagcatctagaacttcgtgacctcagagggcttggggaacttcgaaacctgaccattgtgaaaagtggcctccgatttgttgccccagacgccttccactttactccccgactctcccggttgaacctcagcttcaatgcattggaaagcctgtcttggaaaactgtgcagggattatccctccaggaactcgtgctgtctggcaatcctcttcactgctcatgcgcgctgaggtggttacagcgatgggaggaggaggggttagggggagtgccggaacagaagctccagtgccacggccagggaccccttgcccacatgcctaacgcctcctgcggcgtgcccacactgaaggttcaggtaccaaacgcttccgtggatgtaggggacgacgtgctgcttcggtgccaggttgagggccgaggcctggaacaggcagggtggatcctgacagagctcgagcagtccgccactgtcatgaaatccggcggcctcccttctctgggtttaacattggccaacgtaacctccgacttgaaccggaagaacgttacttgctgggctgaaaatgacgtcggcagagccgaagtgtcagtccaggttaatgtgagctttccggcgagtgtgcaactgcatacagctgttgaaatgcaccactggtgcatcccttttagtgttgatggtcagccggctccctctctgagatggctgtttaacggttcagtgctgaacgagaccagctttatctttacagaatttctggaaccagctgccaatgagaccgtccggcatggctgccttaggctgaaccagcctactcatgttaacaacggcaattacactcttcttgcagccaatccattcggacaagcctctgcgtccattatggcagcattcatggataacccctttgagtttaatcctgaggatccaatcccagacacaaactccacaagtggcgaccctgtggaaaagaaagatgaaacaccctttggagtgtccgttgccgtaggtttggcggtcttcgcatgtctcttcctctctaccctgttgctcgtccttaacaagtgcggaaggcgaaataaatttgggatcaatagacccgccgtacttgctccggaggacggattagctatgtccctccacttcatgaccctcggcggcagctctctaagtccgaccgagggcaagggtagcggtctgcagggacacataatcgaaaacccgcagtatttttcagacgcttgcgtgcatcacatcaagcgaagagatatagtgctaaagtgggaactgggagagggcgcatttggcaaagtgtttcttgcagagtgccacaacctgctccccgaacaagacaagatgctggtcgctgtcaaggctctgaaagaagcctcagagtctgcccggcaggatttccagcgagaggcagagcttcttacgatgttgcaacatcagcatatcgtgaggtttttcggtgtgtgtaccgaaggacgaccactgctgatggtttttgaatatatgagacacggtgatctgaataggtttctgcggtctcacggaccagatgcgaagcttctagcaggtggtgaggatgttgctcctggccctcttggactgggccagttgctcgccgtggctagccaggttgccgctggtatggtttacctggccggattgcattttgtccacagggacttggccacacgaaactgtttagtcggccagggcttagtcgtgaagatcggtgacttcggaatgtccagggacatttactccaccgactattatagggtaggcgggcgcacgatgctgcccatcagatggatgccccctgaaagtattctgtaccgcaagtttacaacagagagtgatgtgtggtcctttggagtagtgctctgggagatcttcacttatgggaagcagccgtggtaccagctgtccaacactgaagcaatcgactgcatcacccaagggcgtgagcttgaacggcctcgagcttgtcctcccgaggtgtatgccattatgaggggatgttggcaaagggaacctcagcaaagacacagtatcaaagatgtccatgctagactccaagccctggcccaagctccacctgtgtacctggacgtcctcggttag

SEQ ID NO: 126377 - DNA, 2391 bp, synthetic construct
  misc_feature 1..2391: note = Description of Artificial Sequence: Synthetic coding sequence
  source 1..2391: mol_type = other DNA
atgctccgaggaggccgacgtgggcaactgggatggcatagctgggctgccggcccagggtcccttctggcctggctaatactggccagcgccggggccgccccatgtcctgatgcttgctgtccgcacggtagctccggtctccgctgcacgcgagatggggccttagacagcctgcaccatcttcctggcgccgagaatctcacagagctatacatcgagaatcagcagcatctgcagcacctggaactgcgcgacctccgtggcctgggtgaattaagaaatctcaccatcgtgaagtcaggtctgcgattcgtggctcctgatgcatttcactttacccccaggttgtcccggctcaacctaagctttaatgctctggaatctctgagctggaaaaccgtgcaaggcctttctcttcaggagctggtgcttagtggtaatccgcttcattgttcttgcgccctgcgctggctgcagagatgggaggaggagggactggggggcgtccctgagcagaaattgcagtgccatggtcagggaccgcttgcacatatgcccaatgccagctgtggcgtgccgactttgaaggtacaggtgcccaatgcctccgtcgatgtcggggacgatgtcctgctccgttgccaggttgagggtagaggcctggagcaggccggatggatcctaactgagttggagcagagcgcaaccgtgatgaagtctggtggcctaccgagcttgggtcttactctcgcaaacgtcacatctgacctaaaccgcaagaacgttacgtgctgggcagagaacgatgttggacgcgccgaggtgtccgtgcaggtgaatgtttctttccccgcgagcgtccagttacataccgctgtggagatgcatcactggtgcatccctttctctgttgacgggcagccagccccttcattgcgctggttattcaatggcagtgttctgaacgagacatcctttatctttaccgaattcttggaacctgccgcaaatgagactgtgcgccacgggtgcctgaggttgaaccaacctacacatgttaacaatggaaattacactctacttgctgccaatccattcggccaagcaagtgcgagcattatggcagcatttatggataatccctttgagttcaaccctgaagatccgatccccgtgagcttcagcccggtcgatactaactcgacctcaggggatcctgtggagaagaaagacgagacccccttcggggtctcagtagccgttggactggcagtgttcgcctgcctgttcctgagtaccctgttactggtccttaataagtgtggccgccgaaataagtttgggatcaaccgtccagctgtgcttgcccccgaggatgggctcgctatgtccctacacttcatgaccctgggcggttcgtctctatccccgactgaggggaaaggcagcgggctccaggggcatataatagaaaacccacagtacttctctgacgcttgtgtccaccacatcaagcggagagacatagtgcttaaatgggaactcggtgagggcgctttcggcaaagtgttcctggccgagtgccacaatcttctgcccgaacaggataaaatgctggtggcagttaaggcccttaaagaggcctccgaaagcgccagacaggatttccagcgcgaggcagagcttctaaccatgctgcagcatcagcacatagtacgattcttcggagtatgcactgaggggcgaccactcctaatggtctttgagtacatgaggcatggggacctgaatagattcctgaggagtcacgggcccgatgccaagctgctggccggtggggaggatgtggctcctggtcccctgggactcggccagctgctcgccgtcgcctcgcaggtggccgccggcatggtctacctagctggactgcatttcgtgcatcgagatctcgcgacccggaactgcttagtgggacaggggcttgtcgttaaaattggcgactttggcatgagccgcgatatctactccaccgattactaccgagttgggggcagaactatgcttcccatccgatggatgccccccgagtctatcttatatcgaaagttcacaactgagtctgatgtttggtccttcggtgtggtgctttgggaaatttttacttatggcaagcagccctggtatcaactgtccaacactgaggcaatagattgcatcactcagggccgggagttagagagaccaagggcctgccccccagaggtttatgctatcatgagggggtgttggcagcgggagcctcagcagaggcatagcatcaaggacgtccatgcccggctgcaggctctggcacaggcccctcccgtgtacctggacgtgcttggatag

SEQ ID NO: 126378 - DNA, 2517 bp, synthetic construct
  misc_feature 1..2517: note = Description of Artificial Sequence: Synthetic coding sequence
  source 1..2517: mol_type = other DNA
atgagctcgtggatccgatggcacggccccgctatggccagactgtgggggttctgttggttagttgtgggcttttggcgggccgccttcgcctgtcctacgtcatgcaagtgctcagcctcgaggatttggtgctctgatcccagcccgggaatcgttgccttcccgagactggagcccaatagcgtggatccagagaatattacagaaatctttatcgcaaaccagaaacgactggagatcatcaacgaggatgatgtcgaggcctatgtcggtcttagaaacctgactattgtagactccggcttgaagttcgtggcacacaaagccttcctgaagaattccaatcttcagcacatcaactttactcggaacaaattgacctctctcagtcgcaagcacttccggcacctggaccttagcgaattaattctggttggcaacccattcacctgttcttgcgatataatgtggattaagactcttcaggaggccaaatcctctccagatacacaggacctctactgcctaaacgagagtagcaaaaatatacctctggccaacctacagatccctaactgtggcctgccttccgcaaatcttgctgcaccaaatctgacagtggaagaggggaagtcaatcactctgagctgctccgtcgccggcgaccctgtgcccaatatgtattgggacgtgggaaatctggtttcaaagcatatgaatgagacctcgcacacacaggggtccttacgaatcaccaatatttctagtgatgattcaggcaagcaaataagttgcgttgcagaaaacttagtaggggaggatcaggactcagtaaacctcacagtacacttcgctccaaccattacatttctagaatccccgactagcgaccaccattggtgcatcccatttaccgtgaagggcaacccaaagcccgctctccagtggttttataatggcgcaattctcaatgaatcgaagtacatctgtactaaaattcatgtaactaatcacactgagtaccacgggtgtctccaattggacaaccccacacatatgaacaacggagactacaccctgatagctaagaacgagtacggcaaggacgagaagcagattagcgcccactttatggggtggccaggaatagatgatggcgccaatcctaactaccctgacgtaatttatgaggattatgggaccgctgccaacgatataggcgacacaaccaataggagcaatgagatacccagcaccgacgttacagacaaaactggacgggaacatctctccgtgtacgcggtggttgtgatagcttcagttgtcggcttttgcctcttagtcatgctattcctactgaagctcgccagacactccaaattcgggatgaaagatttttcctggtttggttttggcaaggtgaaaagcagacagggagtaggaccggcatcagtcatttctaacgacgacgattctgcttctccattgcaccacatttcaaatggctctaacactccatcctccagcgagggaggaccagacgctgtaattattggcatgaccaaaattccagtaattgagaatcctcagtacttcggaatcactaactctcagctgaagcctgacacgtttgtccagcatatcaaaagacacaatattgtcctaaagcgggaacttggagagggtgccttcggcaaggtgttcctcgctgagtgttacaacctgtgtccagaacaggacaaaatacttgtggcagtgaaaacccttaaggacgctagcgataacgcccgcaaagacttccacagggaggcggagttgttaaccaatctccagcatgagcatattgtgaagttctacggcgtctgtgttgaaggcgatcctctcatcatggtcttcgaatacatgaaacacggcgatctgaataaatttctgcgcgcccacggaccagatgccgtgcttatggccgaaggaaatccacccacagagctgacacagtcccaaatgctccatattgcgcagcagatagcagcaggaatggtctatcttgccagccagcactttgtgcacagagacttagccacaaggaactgcctggtaggagaaaatttactcgtgaagattggcgactttgggatgtcacgagacgtttattccaccgattactacagagtcggaggacatacgatgctcccaatccgttggatgcctcccgagagtatcatgtatcgaaagttcaccacggaatcagatgtgtggagcctaggggtcgtcctgtgggaaatctttacatacggaaagcagccctggtaccaactttcaaacaacgaagtaatcgagtgtataacccaggggcgagtgctccagagacctagaacatgcccacaggaggtctacgagctgatgttaggttgctggcagagggagccacacatgcgcaagaacatcaagggtatacacactttactgcagaacctcgccaaggctagcccggtctatctagacatcttgggctag

SEQ ID NO: 126379 - DNA, 1662 bp, synthetic construct
  misc_feature 1..1662: note = Description of Artificial Sequence: Synthetic coding sequence
  source 1..1662: mol_type = other DNA
atgtcatcctggataagatggcatgggcccgcaatggcgcgcctttgggggttttgttggctggtggtcggcttctggcgtgccgcgttcgcttgtccaacttcctgtaaatgcagtgcctctaggatctggtgttcagatcctagtcctggtatcgtcgcatttccccggctagagccgaactccgtcgatcccgaaaacatcactgaaattttcatcgccaatcagaagagattggaaattattaatgaggacgatgtcgaggcttatgtaggtctaagaaacctgacaatagtcgacagcgggctcaagtttgtggcacacaaggcctttctcaaaaacagcaaccttcagcatatcaatttcacacgcaacaaattaacgagcctgtcgcggaaacacttcagacacctagacctctcagaacttattttagtcggcaacccattcacatgtagctgcgacatcatgtggattaagaccttacaggaagcgaaatcgtcccccgacacgcaggatttatattgtcttaatgagtcctcgaaaaatatcccactggccaatctccaaatccctaactgcggattgccaagcgccaatctggcagcgccaaacttgactgtcgaagaaggaaagagtatcactctgagttgttccgtcgcaggggaccccgttccgaatatgtactgggatgtaggcaacctcgttagtaaacacatgaacgagacttctcacacacagggctctctgcgcatcacgaatataagcagcgacgatagtggtaaacaaatttcatgcgtggccgaaaatctggttggcgaggatcaggattccgttaacctgacagtacatttcgcccccaccataaccttcctcgaaagtccaacatctgaccatcattggtgcatccccttcaccgtgaagggcaaccctaaacccgccttgcagtggttctacaatggcgcgatacttaacgaatctaaatacatatgtaccaagattcatgttactaatcataccgaataccatgggtgccttcagctggacaaccccacccacatgaacaacggagactacactcttatcgctaagaacgaatacgggaaggacgaaaaacagattagcgcacactttatgggttggcctggcatcgacgacggcgcgaatcccaactacccagatgttatttacgaagactacggcaccgcagccaatgacatcggcgataccactaatcgcagcaacgagattccatcgaccgatgtgaccgataagaccgggagggagcatctgtcggtctacgcagtggtggtgattgcaagcgtggtcgggttttgtctcctggtcatgctcttcctgctcaagctggccagacacagtaaattcggcatgaaagatttctcctggttcggatttggaaaggtgaagagcaggcagggcgtgggtccagccagtgtgatctcaaatgatgacgatagtgcaagtccacttcaccatattagcaacgggagcaacaccccgagtagctccgaaggaggccccgatgcggttatcattgggatgactaaaatcccagtgatagagaacccgcaatacttcgggattacaaactctcaactcaaacccgatacttggccgaggggaagtccaaaaacggcctag

SEQ ID NO: 126380 - DNA, 2469 bp, synthetic construct
  misc_feature 1..2469: note = Description of Artificial Sequence: Synthetic coding sequence
  source 1..2469: mol_type = other DNA
atgtcatcatggattcgttggcacggtccagcaatggccaggctgtggggcttttgctggcttgttgtgggattctggcgggcagcatttgcctgcccaacgtcttgtaagtgttcagcttcccgtatttggtgtagcgatccctcaccaggaatcgtggcttttccacgtctggagcccaactccgtcgaccctgagaacattaccgaaatcttcatcgccaaccagaagaggctcgagattatcaatgaggatgacgttgaagcctatgttggcttacgcaatcttaccatcgtggacagcggcttgaaatttgttgcacacaaggcgttcttgaagaactctaatctccaacatattaattttaccagaaacaagctcactagtctctcgaggaaacactttcggcacctagatctgtctgagctgattctcgtcgggaatccctttacatgctcctgcgatatcatgtggatcaagaccctgcaggaggccaaatccagccctgacactcaggacttatactgcctgaacgaaagctctaagaacatccccctggctaatcttcagattccaaactgcgggctgccctccgcgaatctcgccgcccctaacctgacggtcgaggaaggtaagtctataaccctttcctgttcagtggctggcgatcctgtgccgaacatgtattgggatgtgggaaacctagtgagcaaacacatgaatgagacgagtcatactcagggttcactgcgaataactaatatatcctcagatgatagtggcaagcagatatcatgcgttgcagaaaatttagtcggcgaagatcaggattctgtgaatctcactgtacattttgcccccaccataactttcctggagagtcccacatccgaccatcactggtgtatcccctttaccgtgaaagggaacccaaagcctgcattacagtggttctataatggcgcgattttgaacgaatctaaatacatatgtaccaaaatccacgttaccaaccacactgaataccacggctgcctccagctggacaatccaacccacatgaataacggagattacaccctcattgccaaaaatgagtacggcaaggacgagaagcagataagcgcacacttcatgggttggccagggattgacgacggtgccaaccccaactaccctgacgtgatatatgaagactatggaacggccgcaaatgatattggcgacactaccaaccgatccaacgagataccctcgacagatgtcactgacaagacaggtagggagcatcttagcgtgtatgcagtggtggtgatcgcctcagtggtcggcttttgcttactggtgatgcttttcctcctcaaattagcccggcattctaagttcgggatgaaaggacccgcttccgtcatttccaatgacgacgattctgcttcacctctgcaccatatcagtaatgggtcaaatacaccatcctccagtgagggaggcccggacgccgtgatcattggtatgacaaaaattcccgtaatcgagaaccctcagtatttcggcatcacaaattctcagctgaaaccggataccttcgtgcaacacatcaaaaggcacaacattgtgctgaagcgagaactgggggagggcgcttttgggaaagtgtttctggctgagtgctataatttgtgtccagaacaggataagattctggtcgccgttaagacgctcaaagacgcctctgataacgctagaaaagatttccatagggaggcagaactcctcactaacctgcagcacgagcatatcgtcaagttctacggtgtgtgcgttgagggcgacccactgattatggtctttgagtatatgaagcacggcgatttaaacaagttcctaagagcccacggacccgatgcagtgctcatggccgaggggaatccgcccaccgaactgacacagagccaaatgcttcatatagcccaacaaatcgccgccggcatggtttaccttgcgtcccagcattttgtccatcgagacctggcgacaaggaactgtcttgtgggcgaaaacttgctggtgaagattggggacttcgggatgtcaagagacgtgtacagcaccgattactacagggttggcgggcataccatgctgcctatccggtggatgcctccggagagtataatgtaccgaaaatttacaacggaatcagacgtttggtccctgggagttgtgttgtgggaaatctttacgtacggcaagcagccctggtaccagctctctaacaacgaagtgatcgaatgtatcactcagggacgggtactccaacgtccacgcacctgcccccaggaggtctacgagttgatgctgggctgctggcagcgggaaccccatatgaggaagaatattaaggggattcacacactgctccaaaacttagcaaaggcgagccctgtataccttgatattctaggttag

SEQ ID NO: 126381 - DNA, 1434 bp, synthetic construct
  misc_feature 1..1434: note = Description of Artificial Sequence: Synthetic coding sequence
  source 1..1434: mol_type = other DNA
atgtcttcctggattagatggcatggtccggccatggctagactgtggggcttttgctggctggtggtaggattttggagggccgcttttgcctgccctacctcctgtaaatgttctgccagccggatttggtgtagcgacccaagcccggggatcgtggcttttccccgactggagccaaatagcgtcgatccggaaaatatcaccgaaatttttatagcaaaccaaaaacgtctcgaaattatcaatgaggacgacgtcgaggcatatgtgggcctccggaatctcaccatcgttgacagtggcttaaaattcgtagcccataaagctttcctgaaaaattccaatcttcagcacattaattttacacggaacaaattaaccagcctgtcaagaaaacatttcaggcacctcgacctgtccgagctgatcctggttggcaaccccttcacctgcagttgcgacatcatgtggataaagacgttgcaggaagcaaagtcttcccctgacacgcaagacctttactgcctgaatgagagtagtaaaaatattcctctggcaaatcttcaaatccctaattgtggcctaccctccgccaatttagccgcaccaaacctgaccgtggaggaggggaaatccattacactgtcgtgctccgtggccggcgaccccgttcctaatatgtactgggacgtaggcaaccttgtgagcaaacacatgaacgaaaccagtcatacccagggctcccttcgcataacgaacattagcagtgacgatagcggaaaacagattagctgtgtggccgagaatttagttggtgaggatcaggattccgtaaaccttacggtacacttcgcccccacgattacgttcttagaatctcccacttccgaccatcactggtgtatacccttcacagtgaagggaaacccaaagcccgccctccagtggttctataatggcgcaattttgaacgagtccaaatatatttgcactaagatccatgtgactaatcatacagagtatcatggatgcctgcagctcgacaatccaacgcacatgaacaacggcgattataccttaattgccaaaaatgagtacggaaaagatgagaagcagatcagcgctcactttatgggctggcccggcattgatgacggagccaaccccaactacccagacgtcatctacgaggattatggaaccgctgcaaatgacattggagacacaactaatcgcagcaatgagatccccagcaccgatgtaaccgacaaaacagggcgcgagcacctcagtgtgtatgcagtcgtcgtgattgcttcagtggtgggattctgcttacttgtgatgctgtttcttctgaagctggccagacactctaagtttggaatgaagggttttgtgttattccataagattcctttggacggttag

SEQ ID NO: 126382 - DNA, 1614 bp, synthetic construct
  misc_feature 1..1614: note = Description of Artificial Sequence: Synthetic coding sequence
  source 1..1614: mol_type = other DNA
atgagctcatggatcaggtggcacggaccagcgatggcgagactctggggcttctgctggctcgtcgtgggcttctggagggctgcttttgcctgccccacctcctgcaagtgctccgccagtagaatatggtgctcggatcccagccccggcattgtcgcatttcctcgtctggagcctaactcagttgatcccgaaaatatcaccgaaatttttatcgccaaccagaaaaggctcgaaattattaacgaggacgatgtggaagcatacgtaggattgcggaacctcaccattgtggattccggtcttaagttcgtggcccacaaggccttcctcaagaatagcaacctccagcacatcaactttacccggaataagctcacctctctctccagaaaacatttcagacacctcgatctgtccgaactcattttggttggcaatccctttacttgtagttgcgatatcatgtggatcaagaccctacaggaggccaagtcatcccctgatactcaagacttatattgcctgaatgaaagctctaaaaatattccactagcaaatcttcagattccaaattgcgggctgcccagtgctaatcttgcagctcctaatctcaccgtcgaagaggggaagtctataaccctctcatgttccgtcgccggagaccctgtccctaacatgtattgggatgtgggcaatctggtgtctaaacacatgaacgaaaccagccacacacagggcagtttgcggattactaacataagcagcgacgatagtggcaaacagattagctgtgttgccgagaacctagtgggcgaggatcaggacagcgtgaacctaacagtgcatttcgcccccacaatcacttttttggagagcccgaccagtgaccaccattggtgtatcccttttacagtgaaaggtaatccaaaaccggcactccagtggttctacaacggggctatattgaatgagtcaaaatacatctgcactaagattcacgttactaaccacacggagtatcatggctgcctgcagctggataatcctacccatatgaacaatggagattataccttaatcgccaaaaatgagtatggcaaagatgaaaaacaaattagcgctcatttcatgggatggccaggaattgacgacggcgccaacccgaactaccctgatgtgatatatgaggactacggcactgcagcaaacgacatcggtgatactactaatcgttccaacgagattccatccactgacgtcactgataaaactggcagggagcatctctcggtttacgccgtcgttgtgatagcaagtgttgtaggcttctgtctgctagtaatgctgttcctgctgaagttagcaagacatagcaaatttggaatgaaggggcccgccagtgtgattagtaacgacgatgattcggcatcccctttacatcacatttcaaatggctccaacaccccaagctcctcggaagggggtccagatgctgttatcatcggaatgaccaaaattccagtgatagagaacccccagtactttggaattacaaactcacagctgaagcctgacacttggccacgagggtccccgaaaactgcatag

SEQ ID NO: 126383 - DNA, 2469 bp, synthetic construct
  misc_feature 1..2469: note = Description of Artificial Sequence: Synthetic coding sequence
  source 1..2469: mol_type = other DNA
atgagctcatggataaggtggcatggcccagccatggccagattgtggggcttttgctggttggttgtcggattctggcgtgccgctttcgcctgtcccacttcttgcaaatgctcagcatccagaatttggtgctccgacccatctcctggaatcgtggcgttccctcggctcgaaccgaattccgtggaccctgagaacataacagagatctttatagctaatcagaagcgtctggagattatcaacgaagacgatgtggaagcctacgtggggttacggaaccttacaatcgtggactcaggcctaaagtttgtggctcataaggcctttctgaaaaactctaatctccagcatatcaacttcacccggaacaaactgacatccttaagtcgcaaacactttcgacacctggatctcagcgaactaatactcgttgggaacccatttacttgcagctgtgacatcatgtggataaagacactgcaggaggctaaatctagtcccgatacccaagatctgtactgcctgaacgaatcgtcaaaaaacatcccactcgccaacctgcagattccaaattgtgggttgccttcagctaacttagctgcaccaaatcttaccgtagaagaggggaagagcatcacattaagttgttctgtcgccggtgaccctgtccctaacatgtattgggacgttgggaacctggtgtcaaagcacatgaacgaaaccagtcatacccagggctcactgagaatcacaaacatctcctcagacgattcagggaaacagatttcttgcgtggccgaaaacctggtcggagaagatcaagactccgtgaaccttaccgtgcactttgctccgaccataacatttctggagagccctacatcagaccatcactggtgcatcccattcactgtgaaaggaaatcctaaacccgcactgcaatggttctacaatggcgcaatattaaacgaatctaaatatatttgcaccaagattcatgtgactaatcacacagaatatcacggatgtctccaattggataatccaactcacatgaataatggagactacacactgattgccaagaacgaatacggaaaagacgaaaagcagatctccgcccattttatgggatggccggggattgatgacggagcaaaccctaattatcccgatgtcatctacgaagattacggcaccgcagctaatgacataggagacaccaccaaccgcagtaacgaaattccctccacagatgttaccgacaagacgggccgcgagcacctctctgtgtatgctgttgtggtcatcgcaagcgttgtgggtttctgccttctggtcatgttgttcctcttgaaactggcccgacactcaaagttcggaatgaaggggccagccagtgtgatctctaatgacgatgattcggcttcacccctgcaccacatctccaacggctcaaacactccttcaagctccgaaggcggacccgatgcggttatcattgggatgacaaagatccccgtgatcgaaaacccccagtactttgggatcactaactcccagctcaaaccagacactttcgtgcaacacataaaacgccacaacatcgtgctgaaaagggagctgggtgagggcgcttttggtaaagtgtttttggccgaatgctacaacctgtgcccagaacaggacaagatcctggtcgcggttaaaacattaaaggacgcgtctgacaacgccagaaaggatttccatcgcgaggccgagctattaaccaacctccagcatgagcacatagtcaagttttatggtgtgtgcgtcgagggtgacccccttatcatggtcttcgagtatatgaagcacggcgacttgaacaagtttctgcgcgcacacggccccgatgcagttctgatggctgaagggaatcccccaacggaactgactcagtcacaaatgcttcatatcgcccagcagattgccgcgggaatggtgtacctggccagccagcatttcgtgcaccgggacttagctacacgtaactgcctagtcggcgaaaacctgctggtcaaaattggggactttggaatgagtcgggacgtgtactcaacggattactacagagtaggcggtcacactatgctaccaatcagatggatgccccccgagtctattatgtatagaaaattcaccacggagtcagacgtgtggagcctgggcgtggtcctgtgggaaatctttacgtacgggaaacagccatggtaccagttatcaaacaacgaagtgatcgagtgtatcactcagggaagagtgctgcagcgccctaggacctgtccccaggaggtgtacgaactgatgcttggatgctggcaaagggaacctcacatgaggaagaacatcaagggcattcacacgttgctgcagaatttagctaaggcatcacctgtgtatctcgatatccttggttag

SEQ ID NO: 126384 - DNA, 2517 bp, synthetic construct
  misc_feature 1..2517: note = Description of Artificial Sequence: Synthetic coding sequence
  source 1..2517: mol_type = other DNA
atgagttcttggatcagatggcatggtcctgcgatggctcgcctatgggggttctgttggctagtcgtcggcttctggcgtgcagccttcgcctgcccaacgtcttgtaagtgttccgccagcaggatctggtgttccgatccatctcctgggatagtggctttcccccggttggaaccgaattccgtcgatccggagaatatcactgaaatcttcatcgcaaatcagaaacgcctcgagattataaacgaagacgacgttgaggcctacgtgggcctcaggaacctgaccattgtcgacagcgggctcaagttcgtagcccacaaggccttccttaaaaacagtaatcttcagcacattaactttacgagaaacaagctaaccagcctgtccaggaaacacttcaggcacttagacctgtctgaattgattttggtcgggaacccgttcacctgttcatgtgatataatgtggatcaagactctccaagaagccaagtcctccccagatacccaagacttatactgcctcaacgagagctcaaagaacattccactggccaatcttcagattcccaattgtggactgcctagcgccaacctcgctgcaccaaatctgacggtggaagagggcaaaagtattaccctctcatgtagcgtagctggggatcctgtgccgaacatgtactgggacgtgggaaatctcgtgagcaaacacatgaacgagacctcccatacacaggggtctctccgtattacaaacatttcctccgacgattccggcaagcagatcagttgtgttgccgagaatctggtcggcgaggaccaagacagcgtgaaccttactgtacatttcgctccaacaatcacgtttctggaaagccctacgagtgaccaccattggtgcatcccattcaccgtcaaggggaaccctaagcctgcactgcagtggttttataatggcgccattctgaacgaaagtaagtatatatgcactaagattcacgtaaccaatcacaccgagtaccacgggtgcttacagctggataacccaacacatatgaataacggggattataccctcatagctaagaacgagtacggtaaggatgagaaacagatcagcgcccatttcatgggttggcctggaatcgatgatggcgcaaaccccaactatcccgatgtgatatacgaggactacggaactgcggccaacgatatcggtgacacaacgaatcgctccaacgagatccctagcacggatgtgacagacaagaccggccgtgagcacttatcagtgtacgcggtggttgttatcgcaagcgtggtgggtttttgccttttagtcatgcttttccttctgaaactcgcccggcactctaaatttgggatgaaggatttctcatggtttgggttcggcaaggttaagtctcgtcagggggttggtcccgcgagtgtgatctcaaatgatgatgactctgcctcaccccttcatcatatatcaaacggcagcaacacccccagttcttccgagggtggaccagacgcagtcatcattggaatgaccaagattcctgtgattgagaatccacagtattttggtatcaccaacagccagttgaaaccagatacctttgttcagcacataaaacggcacaatatcgtgcttaagagagagcttggagaaggagccttcgggaaagtgttcttggccgagtgttacaacctgtgccccgagcaggataaaatcctggtggcagttaagaccctgaaggacgctagtgataacgctcggaaggatttccacagggaagccgaattgctgacgaatctccagcacgaacacattgtgaagttttatggagtatgcgtcgagggagaccctctcattatggttttcgagtacatgaaacatggcgacttgaataagttcctcagggcccacggtcctgacgccgtgctgatggccgaggggaatccacctactgagctaactcagagccagatgctgcacatcgctcagcagatagcagcaggtatggtatatcttgcctcgcaacacttcgtgcatcgggacctagccacccgcaattgcctcgtgggtgagaatctgttggtgaaaattggagatttcggcatgtcgcgagacgtgtactccacggactactaccgggtagggggacataccatgctcccaattagatggatgccacctgaaagcattatgtatcgcaagttcactacggagtctgacgtgtggtctctcggcgttgtcctttgggaaatttttacctatggaaagcagccatggtaccaactgtcgaacaatgaggtgatcgagtgcatcacacagggacgggtgctgcaaaggccacggacctgcccacaggaggtttacgaattaatgcttggctgttggcaacgggagccccatatgcggaagaatattaagggcattcatacactccttcagaatttagctaaagcttcaccagtctatctggatattcttggttag

SEQ ID NO: 126385 - DNA, 966 bp, synthetic construct
  misc_feature 1..966: note = Description of Artificial Sequence: Synthetic coding sequence
  source 1..966: mol_type = other DNA
atgtggatcaagacactacaggaagctaagtcgtccccagacacccaagacttatattgcctaaatgagagtagcaagaatattccactcgctaacctacagattccaaattgcgggctgcccagtgccaatctcgccgcacctaacctaaccgtagaggagggaaaatctataacactttcctgctccgtggccggagatcctgtgccaaatatgtactgggacgtgggaaatttggtgtccaaacatatgaacgaaacgtcccacacgcaaggctctttaagaataactaatatctcctctgacgattccggcaaacagatatcctgtgtcgcggagaatttagttggcgaggatcaggatagcgttaatctaacagtacacttcgcccccacaattacgttcctggagagccctactagcgaccatcattggtgtattcccttcaccgtgaagggaaacccgaagccagcactgcagtggttctacaatggggctatccttaacgaatcaaagtacatctgtacgaagatccatgtgaccaaccacacagagtaccacggatgtctgcagctcgacaatccaactcacatgaacaacggagactatacactcatcgcaaagaatgagtacggaaaagacgagaaacagattagcgcccattttatgggatggcctggtatagatgatggagcgaacccaaactaccctgatgttatttacgaggattacggtacagccgccaatgatatcggagacaccaccaatcggtcaaatgagattcccagcaccgatgttactgacaagacggggagagagcacttaagcgtgtacgccgtggtggtgattgcctccgtggttgggttttgcctccttgtcatgctcttcctattaaaactggctagacactccaagtttggcatgaagggttttgttcttttccacaagatccctcttgatggctag

SEQ ID NO: 126386 - DNA, 1434 bp, synthetic construct
  misc_feature 1..1434: note = Description of Artificial Sequence: Synthetic coding sequence
  source 1..1434: mol_type = other DNA
atgtctagctggattaggtggcacggacctgctatggctcgactgtggggcttctgttggttggtcgttggtttctggcgcgccgcattcgcttgtccaacaagttgcaagtgttccgcttcaaggatttggtgctcggatccttctcctggtatcgtggcttttcccaggctcgaacctaattccgtcgaccccgaaaacatcaccgaaatttttattgcgaatcagaagcgtctcgagatcatcaatgaggatgatgtggaagcctacgtagggttgcgtaacttaactatcgttgacagcgggcttaaattcgtggctcataaggcttttctgaagaatagcaacctccagcacatcaactttactcgcaataagcttacaagtttaagccgcaaacactttcgacacttagatttgtcggaactgattctggtaggcaatccctttacctgctcctgtgatattatgtggataaaaacactacaagaggccaaaagcagccccgacacacaggatctctactgcctgaatgaaagctccaaaaatataccactcgctaatctccagatccccaattgtggcctaccaagtgcgaatctggccgcgcccaacctgaccgtcgaagagggtaaaagcataacactgtcttgctccgttgctggcgacccagtgccaaacatgtactgggacgtgggaaacctcgtgtcaaaacatatgaacgaaacatcgcacacccagggctcgctgagaattactaacatctctagcgacgattccggaaagcagatatcttgcgttgccgagaacttggtgggagaggaccaagacagcgtcaacctcactgttcattttgcgccgacaataacgttcttggaaagccccaccagcgatcaccattggtgtattccttttactgtaaagggtaacccgaagcctgccctccaatggttctataatggcgctatcttgaacgagtccaagtacatttgcactaagatccacgtcactaaccacacagaataccacggctgcctgcagctggacaatcccacccatatgaataacggagactacactctcattgccaagaacgaatatggtaaagacgaaaagcagataagtgcccactttatggggtggccagggatcgatgacggagctaacccaaattacccagacgttatctatgaggattatgggacggctgccaatgatattggtgacaccaccaataggtccaacgagattccttcaacagacgttacagataagactggacgggagcacctatctgtttacgccgtggtggtgattgcttccgttgtgggcttctgcttactggtaatgctgttcctcctgaagctggcaagacattccaaatttggaatgaagggcttcgtactcttccataaaattcctttggatggctag

SEQ ID NO: 126387 - DNA, 1839 bp, synthetic construct
  misc_feature 1..1839: note = Description of Artificial Sequence: Synthetic coding sequence
  source 1..1839: mol_type = other DNA
atggacgtttcactctgccctgcaaaatgcagtttctggcgcatcttcttgctaggtagtgtgtggttagactacgtgggaagcgtgctcgcttgtcccgcgaattgcgtgtgttcgaaaaccgagatcaattgtcgccggcccgatgacggcaatcttttccccctgctggaggggcaggattcgggcaatagcaacggcaatgcttctattaacattacagatatcagtagaaacatcacgagcatacatattgaaaattggagaagtttgcatacactgaacgctgtcgacatggaactgtacaccggtctccagaagcttacaattaagaactccggcctgcgctcaatccagccccgggctttcgcaaaaaacccacaccttcgatatataaacctaagtagcaatcgactgaccactctgtcatggcagctatttcagacactcagcctgcgggagcttcaactggaacagaatttttttaactgttcttgcgacattagatggatgcaactgtggcaagagcagggcgaagccaagctaaacagccagaacttatactgcatcaacgccgacggctcccaactgccactttttcggatgaatataagccaatgtgacctacccgaaatctcagtgagccacgtcaatctcacggttcgcgagggggacaatgccgtgattacctgtaatggctctggtagccccctgccagacgtcgactggatcgtgacagggctccaaagtattaatacacaccagaccaacttgaattggacgaatgtgcacgctattaatctgacactagtaaacgtgacctctgaggataacggttttaccctcacatgtatcgccgagaatgtcgtcggaatgagcaacgcttctgttgcccttacggtgtattatccaccacgggtcgtctctctggaggagcccgaactgagattggaacactgcatcgagttcgtcgtgagaggcaatcctcctcccaccctccactggttacacaatggccaacctttgcgggagtccaagataatccacgttgaatattaccaggaaggagagatctccgaggggtgtctgctgttcaacaaaccaacgcattacaacaacgggaactacaccttaattgcaaagaatcctttggggactgccaatcagaccatcaatgggcactttctgaaggagccgttcccagaatcaactgataactttatcctcttcgacgaggtgtcccccacccctcccattactgttacacacaagcccgaggaggatacatttggagtctccatcgccgtgggactggcagcgtttgcatgtgtattgctggtcgtgctctttgtgatgataaacaaatatggccgcagatctaagtttggaatgaaaggtccagttgccgtcatcagtggcgaagaggacagcgcctcccctttacaccacatcaatcacggcatcaccactccatcgtctctggatgccggacctgacaccgtcgtcatcggaatgacgcgcattcccgtcatcgaaaacccccagtattttcggcaagggcacaactgccacaagccagacacttgggttttcagtaacatcgacaatcacgggattctgaaccttaaggataaccgtgaccaccttgtgccttctacgcactacatctacgaagaaccagaagttcagtcaggggaagtgagctatcctcggtcgcacgggttccgcgagattatgttgaaccctattagcctgcctggacattctaagccactgaatcacggaatctatgtcgaagatgtgaacgtatattttagcaaaggccgtcacgggttttag

SEQ ID NO: 126388 - DNA, 414 bp, synthetic construct
  misc_feature 1..414: note = Description of Artificial Sequence: Synthetic coding sequence
  source 1..414: mol_type = other DNA
atgacacgcatccccgtgatagagaatccacagtacttcagacagggtcacaactgtcacaaaccagacacttatgtgcagcatataaagcgacgagacatcgtgcttaaacgggagttaggggagggggctttcggtaaggtgttcctggcagaatgttataacttgtcgccaactaaggacaaaatgctcgtcgccgtaaaagcactaaaagatccaaccctggcagctagaaaagattttcagcgcgaagctgagttattgacgaatctgcagcacgagcacattgtgaagttctacggggtctgcggagacggcgatcccctcataatggtgtttgagtatatgaagcacggcgacctgaataagttcctgtcctccatatcttccccaaagtcacaccagcaagggtag

SEQ ID NO: 126389 - DNA, 2478 bp, synthetic construct
  misc_feature 1..2478: note = Description of Artificial Sequence: Synthetic coding sequence
  source 1..2478: mol_type = other DNA
atggacgtgtccctttgtcccgcgaaatgttcgttctggcgtatcttccttctcggttctgtctggctggactacgtgggcagtgtattggcctgccccgctaactgtgtgtgttcaaagaccgagattaactgtagacgccccgatgacggaaacctgttcccactgctcgaggggcaggattctggtaactcaaacggaaacgcttccataaacatcacagacataagtcgcaacataacctccatccatattgaaaattggcgtagtctccatactctcaatgctgttgatatggagctgtacaccgggctgcagaaactcaccataaaaaattctggcctccggagcattcagcctcgcgccttcgcgaaaaatccccaccttcgctatattaacttgtccagtaatcgactgacaactttgtcctggcagctttttcagacactttctctcagggaattgcagcttgaacaaaattttttcaattgtagctgcgatatccgctggatgcaactgtggcaggaacaaggcgaggccaagctgaatagtcagaacctctactgtatcaatgcggacggctcacagctgccactttttcgtatgaatatcagccagtgtgacctgccagaaatatcagtctcccatgtgaacctgactgtgcgggagggcgacaatgctgtgattacgtgtaatggtagcgggtccccgctgccagacgtggattggatagtcaccggccttcagagcataaacacacaccagacaaaccttaattggacaaacgtgcatgctatcaatctgacacttgtcaatgttacttctgaggataatgggtttaccctcacctgtattgctgaaaatgtcgtggggatgtcgaacgctagcgtggccctgacagtatattatcctccacgcgtggtatcgctagaggaaccagagctgcgtttagaacactgtatcgagttcgtcgttcgcggaaaccccccccctacactgcactggctccataacggacagccactgcgagagtccaagataatccatgtggagtactaccaggaaggggaaatctccgaagggtgcctcttgttcaataaacctacccactataacaacggcaattatacactgatcgccaaaaatccgcttggtacggccaatcagaccattaacggccacttcctcaaggaacccttcccagaaagtacagacaattttatactcttcgacgaggtttccccgactccgcctatcaccgtcacacataaaccagaagaagataccttcggcgtatccatagctgttggcttagcagcctttgcatgcgtgctcttggtagtgctctttgtgatgattaataagtatggtagacgatccaagtttgggatgaagggccccgtcgctgttatctccggggaggaggatagtgcgagccccctgcaccatatcaatcacggcattaccacgccaagttctttggatgccggacctgatactgtggttattggtatgacacggatccccgtcatcgagaatccccagtatttccgccagggccacaattgtcacaagccagacacatacgtgcagcacattaaaaggcgagacatcgttctcaagcgcgagctgggcgagggagccttcgggaaggtgttcttagctgaatgttataatctcagtcctacaaaggataaaatgctggtcgcagtgaaggcgctgaaggatcccacgctggctgccaggaaggattttcagagagaggccgagcttctgacaaatctccaacacgagcatattgtgaaattctacggggtgtgtggtgatggcgatcctttgatcatggtgttcgaatacatgaaacacggagatttaaacaaatttctgcgagctcatggccccgacgccatgattcttgtcgacggccagccaagacaggcgaagggagagctcggcctttcccaaatgctacatatcgcttcccagatcgcctctggaatggtctatctagctagccagcattttgttcaccgcgacctagctacaaggaattgcctcgttggagccaacttactggttaagataggggacttcggaatgtcacgagacgtctacagtaccgattactatagggttgggggtcataccatgctgccaattcgttggatgcccccggagtccatcatgtatcgcaagtttaccactgagagcgatgtgtggagttttggcgtgattctttgggagatcttcacctatggcaaacagccctggtttcagttgtccaacactgaggtgatcgaatgcatcacccagggtcgcgtgctcgaacggccgcgggtttgccccaaagaggtttatgatgtcatgctggggtgttggcagcgggaaccccagcagcggcttaacatcaaagagatttacaagattctgcatgcacttggaaaagcgacccctatctatctggacattctcggatag

SEQ ID NO: 126390 - DNA, 2496 bp, synthetic construct
  misc_feature 1..2496: note = Description of Artificial Sequence: Synthetic coding sequence
  source 1..2496: mol_type = other DNA
atggacgtctctctctgtccagccaagtgcagcttctggcgtatattcctgctcgggtcggtgtggctggattacgtgggatccgtacttgcctgtccagctaattgtgtttgttccaaaactgaaatcaattgcagacgccccgacgatggaaatctatttcctctgctggagggccaggatagcggcaacagtaacgggaacgctagcatcaacattaccgatatttctagaaatataacttcaattcatattgagaattggcggtctctccacacacttaatgctgtggacatggagctctacacaggtctccaaaaactgactattaagaacagcggcctgaggagcattcaaccccgggcctttgccaaaaacccccaccttagatacatcaacttgagctccaatagacttactaccctgagctggcaactgttccagacgctcagtctccgggaactccaactggagcagaatttcttcaactgttcttgcgacattcgatggatgcagctgtggcaggagcagggagaggcaaagcttaacagccagaatctgtactgcattaacgccgatggttctcagctcccgctgtttaggatgaacattagccagtgcgatttgcccgagatctctgtgtctcatgtgaatctgactgtgcgcgaaggcgataatgccgtcataacctgtaatggtagtggcagccctttaccggatgtggactggatcgtgactggtctccagagtataaatactcatcaaactaacctgaactggaccaacgtgcatgccatcaacttaacactcgtcaacgtgacttctgaagacaacggttttaccctgacttgcatcgcagaaaatgtggtgggtatgagtaatgcatctgtggctcttaccgtatactatccacccagagtggtcagcctggaggagcccgaactccgtctggagcactgcattgagttcgtggtcaggggtaacccacctcctactttgcactggctgcacaacggccagcccctgcgcgaaagcaaaatcatacatgttgaatactatcaggaaggcgagatttctgagggatgcctactgttcaataagcctacacactataataacgggaattatacattaattgctaaaaaccccctgggcaccgccaaccagacaatcaatgggcacttcctcaaggagccttttcctgtggatgaggtgagcccaacacccccaatcactgtgacacacaaaccagaggaagacactttcggtgttagcatcgcggtgggattggcagcctttgcctgtgtgctgctggtggttctgttcgtgatgatcaataagtatggccggcgctcaaagtttggaatgaagggccccgtggccgttatatcgggcgaagaggatagcgcctcaccattacatcatatcaatcacgggataactacaccctcttcattggacgccggtccagatacagtggtcatcgggatgacacggattcccgtcattgagaacccccaatattttagacaggggcataactgtcacaagcccgacacatacgtgcagcacataaaacggcgggacatcgtgcttaaacgcgaacttggggaaggtgccttcggcaaggtgtttctagccgaatgttataacctcagtcctaccaaggataaaatgctggtcgctgttaaggccttgaaggaccctactctggctgcccggaaagatttccagcgtgaagcagaactgcttaccaacctacagcacgagcatatcgtgaaattctatggtgtgtgcggcgacggagaccccctcatcatggtcttcgaatacatgaagcacggagatctcaacaagtttctgagagcacacggcccagacgcgatgatcctggtggacgggcagccacgccaagccaagggggagctgggtctctctcaaatgctccacatagcctcacagatcgcctcggggatggtgtacttggccagtcagcattttgtccatcgcgatctagccaccaggaactgcctcgttggagccaatttgctcgtgaaaatcggcgacttcggcatgagcagagatgtctacagcaccgattactatcgtctgttcaaccctagcggaaacgacttttgcatctggtgtgaggttggcggacataccatgcttccaattcgttggatgccgccagagagcattatgtataggaagttcactacggagagcgacgtctggtccttcggtgtgattctttgggaaatcttcacctacggcaaacaaccttggtttcagctgtccaacaccgaagttatagaatgcattacacagggtcgcgtgcttgaacgtcctagggtgtgtcccaaagaggtgtacgacgttatgctcgggtgctggcagcgggagcctcagcagagactcaatattaaggagatttacaaaattttacacgcacttgggaaagctacccccatctatctagatattctggggtag

SEQ ID NO: 126391 - DNA, 2520 bp, synthetic construct
  misc_feature 1..2520: note = Description of Artificial Sequence: Synthetic coding sequence
  source 1..2520: mol_type = other DNA
atggatgtttcattatgtcccgccaagtgttctttttggcgcatcttcctgctgggatccgtttggctcgattacgtgggctccgttctcgcatgcccggctaactgcgtctgtagtaaaacggaaattaattgtcgccggcccgacgatggaaatctctttccactactcgagggtcaggactcaggtaactctaatggcaatgcctcgattaacatcacagacatctctcgtaacataaccagtattcacatagagaattggcggtctctgcatacattaaacgctgtggacatggaactgtatactggccttcagaaactgactatcaagaattctggactcagatccattcagccaagagcatttgcaaagaatccccatctccggtacatcaacctttcctctaaccgtctgacaacgctgtcctggcagctgtttcagacgctatcccttcgcgaactgcagctggaacagaacttctttaattgttcctgcgacatccggtggatgcagctttggcaggagcagggcgaagctaaactgaactcccagaacctttattgtattaatgcagacggttcacagctcccattgtttcgaatgaatatctcccagtgtgatctgccagaaatttctgtcagtcatgtgaacctgacagtgcgggagggggataatgccgttatcacttgtaacggctccggtagcccactgccggacgtcgattggatcgtcacgggtctgcagagtattaacacccaccagaccaatcttaattggacaaacgtgcacgccatcaacctgacactggtgaacgtcacctcggaggataatggcttcacgctgacttgcatagctgagaacgtcgtgggaatgagcaacgcctccgtggcgcttaccgtctattaccccccacgcgttgtgtctctcgaagagcctgaacttcggctggaacattgtatagagttcgtggtcagggggaatccgccccctaccctgcactggcttcacaacggccagcctctgcgagagtccaaaataatccacgtggaatactaccaggagggcgagatctcagaggggtgcctgctgttcaacaaaccaacgcactacaataatgggaactatacacttatcgccaagaatcctctcggaaccgctaaccaaaccattaatggccatttcctgaaagaaccatttcctgagagtaccgacaattttatccttttcgacgaagttagcccaacccccccgatcacagtgacacacaagcctgaggaggatacttttggcgtatctattgccgtcgggctcgccgcattcgcatgcgtgctcctggtcgtgctgttcgtaatgattaataagtatggacggaggagtaaattcggcatgaaggggccggtggcagtcattagcggagaagaggattctgcttcacccctccatcatattaatcacgggatcaccactccgtcttcattggacgccggacctgataccgtggttattgggatgacaagaattcctgtaattgaaaatccacagtacttccgacagggccacaactgtcacaagccagacacttacgttcagcacatcaaaaggcgggacatcgtgctgaagagggagctgggagaaggggctttcgggaaggtgtttctggctgagtgttacaatctttctccaactaaggataaaatgttggtggctgtgaaagccctgaaggaccctactttggctgcccgcaaggattttcagcgcgaggcagagctgctgaccaaccttcaacatgagcatatagtaaaattttacggggtttgtggagacggcgatcctctgatcatggtcttcgagtatatgaaacacggggatctgaataaattcttacgtgctcacggccccgacgcgatgatcctggtcgatgggcagccacggcaagccaagggagagctcgggctgagccaaatgcttcatatcgctagccagatcgcctccggcatggtctatcttgcctcacaacactttgttcaccgcgacctagctacccgcaactgcctggttggcgccaatctgttggtcaagatcggtgactttgggatgtcacgtgatgtgtacagtacggattactaccgactgtttaacccgtccggaaacgacttctgtatttggtgcgaagtcgggggacacactatgctgccaatccggtggatgccacccgagtctattatgtaccggaagttcaccacggaatctgatgtttggtccttcggagtgattctgtgggagatatttacctatggcaaacagccttggttccagctgtccaatactgaggttatcgaatgtataacccaggggcgagtccttgagcggccacgagtctgcccaaaggaggtgtacgatgttatgctggggtgctggcaaagagaaccccagcagcgcctgaacattaaggagatttacaaaattttacatgccttaggaaaggccactccgatttacctggatattttggggtag

SEQ ID NO: 126392 - DNA, 2478 bp, synthetic construct
  misc_feature 1..2478: note = Description of Artificial Sequence: Synthetic coding sequence
  source 1..2478: mol_type = other DNA
atggacgtgtccctttgtccagcgaagtgttctttctggcgtatcttccttctggggtcagtgtggctggattacgtgggatcagtgttggcctgtccggctaactgcgtctgtagtaagactgaaattaactgccgcagacccgatgacggcaacctgtttcccctgctcgaaggacaagacagcgggaactcaaacggaaacgcctccatcaatatcaccgatatcagccggaacatcacctccatccacattgaaaactggcggtcactgcacacactaaacgctgttgatatggagctgtacaccgggttacagaaactgactattaaaaactctggactgcggtcaatccaacccagggccttcgcaaaaaacccacacctgcggtacatcaatctgagctccaaccggttaaccaccctttcatggcagctgtttcagactctgagcctgcgggagctgcagttggagcaaaatttcttcaactgtagttgcgatattcgttggatgcaactgtggcaggagcaaggcgaagcaaagctcaactcccaaaacttgtactgtatcaatgccgatggtagtcagctccctttgttcagaatgaatatctcacagtgtgatctgcctgagatttcggtgtcccacgtcaatctaactgtgcgggagggggacaacgctgtcattacttgtaacggcagcgggtcccctttgccagatgtcgattggatcgtcacaggtctgcagtccatcaatacccaccaaacgaacctgaactggaccaacgttcacgccatcaatctgactctagtcaatgtcaccagcgaagataacgggttcacactaacttgcatagccgagaatgtcgtgggtatgagtaacgccagcgtagctctcacagtgtactatcctcctagagtggtgtcattggaggagcctgaacttcggttagagcactgcattgaattcgtcgtgcgaggtaatccccctcctactctccattggctccacaatggacaaccactgcgcgagtccaaaatcatccacgtcgagtactatcaggagggggaaatcagcgaggggtgcctgctgttcaacaaaccaacacactataacaacgggaactacaccctcatcgccaaaaaccccctcggaactgccaaccaaacaatcaatggccactttctgaaggagccttttcctgagtccactgataatttcatcctctttgacgaagtgagtcccacgcctcctattaccgtgacacacaagccagaagaagatacatttggagtgtccatcgccgttgggctggctgccttcgcatgtgtgctactcgtcgtgctgtttgtgatgatcaacaagtacggaagaagatctaaatttgggatgaagggacctgtggcggttattagtggagaggaggattccgctagccctctgcatcacattaaccatggcataactaccccttctagcttagacgccggcccagataccgtcgtgattgggatgacgaggattcccgtcatcgaaaatcctcagtatttcagacaggggcataactgccacaagccggatacttatgtgcagcatattaagcgacgggacatcgtactgaaaagggagctcggtgagggagctttcggcaaggtgtttctggccgagtgttataatcttagccctaccaaagataagatgctggtggctgtgaaagcacttaaggatcccaccttggccgcgcgcaaggacttccagagagaggccgaacttctgaccaacctgcagcacgagcacatagtcaaattctacggtgtttgcggagacggcgatccattgatcatggtctttgaatatatgaagcacggagatctgaataaattcctcagggcccacggccctgacgctatgattctggtggacgggcagcctaggcaggcaaaaggtgagctgggtttaagccagatgttacatatcgcctctcagatcgcatcaggaatggtgtacctcgctagccaacactttgttcatcgggacttagccaccagaaactgcctggtcggcgccaacctcttggtcaagatcggggatttcgggatgagtcgggatgtctatagcaccgattattacagggtgggcggccatactatgctgccaattagatggatgcctccagagtctatcatgtaccgcaaattcactacagagagtgatgtgtggtcctttggtgtgattctctgggagatctttacttacggcaagcagccctggtttcagttgtctaataccgaggtcatagagtgtattactcaaggaagggttcttgagagaccgagggtttgcccaaaggaggtgtatgatgttatgctagggtgctggcagcgggagccacagcaacgattgaacattaaagaaatttataaaatcctccacgcactcggaaaggccaccccaatttacctagacatactaggatag

SEQ ID NO: 126393 - DNA, 1839 bp, synthetic construct
  misc_feature 1..1839: note = Description of Artificial Sequence: Synthetic coding sequence
  source 1..1839: mol_type = other DNA
atggatgtttctctgtgtcccgcgaagtgttccttttggaggatcttcttattaggctccgtttggctcgattatgtgggatccgtcctagcttgccccgcaaattgcgtctgcagtaaaacagagattaactgccgcagaccggatgatgggaatttatttccactgcttgagggccaggatagcggtaattcgaacggaaatgcctccatcaacatcacagacattagccgaaacatcacatcaatccatatagaaaattggcgctccctgcataccctcaatgcagtcgatatggaactgtataccggcctccagaagctgactatcaaaaactcaggtctcaggtccatccagccacgcgcattcgctaagaatcctcatctgcggtatattaatctgagtagcaaccgtctgaccacactgtcttggcaactcttccaaacgctttctttaagagagctccagctggagcagaatttcttcaactgctcttgcgacatccgatggatgcagttgtggcaggagcaaggggaggctaaactgaactcacagaatctgtattgtattaatgctgacggctcacagctgccattattcagaatgaacattagtcagtgtgatttaccggagatttcggtttcccacgttaatcttaccgtccgggagggagacaacgccgtgattacctgcaatggctctgggtcccccctgccagacgtcgattggatagtcactggcctccaaagcataaacacacaccagaccaatctcaattggacaaatgtccatgccattaacctcactttggtcaacgttacgtctgaggacaacggattcactcttacctgcatcgcagaaaatgtggtgggtatgtctaatgcctcagtggccctgactgtatactacccacctagggtggtgagcctggaagagcctgagttacggctggaacattgcatcgagttcgtggtgcggggcaatccaccgccaaccctacattggctacataatggccagcctctccgcgaaagcaaaatcatacatgtcgagtattaccaagagggcgagataagtgaaggttgtctcctcttcaacaaacctacccattataataacgggaactacaccctgatcgctaagaacccactgggcaccgcaaaccagacgataaatggccattttctgaaagagccgttccctgaatctaccgacaacttcattcttttcgatgaagtgtcacccacccccccaataacagtcacccacaaacctgaagaggataccttcggggtgagcatagcggtcggactggctgctttcgcttgcgtcctgctcgtcgttctgttcgtcatgattaacaaatatggcaggaggtccaagtttggaatgaaggggcccgttgccgtcatctccggcgaggaggacagcgccagccccttgcaccacatcaaccacggcatcacgacgccgagtagcctagatgccggacccgacactgtggtgatcggaatgactcgtatcccggtaatcgagaacccccaatacttccgtcagggccataattgccacaagcctgacacctgggtctttagcaacattgataatcatgggatccttaaccttaaagataatcgtgaccatctggtaccttctacccactatatttacgaagaaccagaggtgcagagtggggaggtgtcctatccacggtcacacggattcagggaaataatgctcaacccgataagcctccctgggcattcgaagccgctgaaccatggcatttatgtggaggatgtcaatgtatatttttcaaaggggcggcacggattctag

SEQ ID NO: 126394 - DNA, 1854 bp, synthetic construct
  misc_feature 1..1854: note = Description of Artificial Sequence: Synthetic coding sequence
  source 1..1854: mol_type = other DNA
atggaactgtataccgggttacagaagcttaccataaagaatagcggcctcagatctatccagccccgcgcattcgccaagaatccgcacctccggtatattaatctttcctctaatcggctgaccacattgtcatggcagctctttcaaaccctgtccttacgtgaattgcagctcgaacagaatttcttcaattgctcctgtgacatacgctggatgcagctctggcaggaacaaggcgaagctaaactgaattcgcagaatttgtactgtattaacgccgatggttctcagctgcctctatttcgaatgaacatttcccaatgtgacttacccgaaatttctgtttcacacgtgaatttgaccgtgagagaaggcgataacgcagtcatcacctgcaacggctccgggtccccactgcccgacgtggattggattgtgactggactacagagcattaatactcatcagacgaacttaaactggacaaatgtccatgcgatcaatttgacactcgtgaatgttacatccgaagacaatggctttactctgacctgtatcgctgaaaacgttgtcggaatgtccaacgcgagcgtggctctgactgtgtattacccccccagagtggttagcctggaagaacccgaattaagactcgaacactgcattgaatttgtcgtgcgcggtaatcctccgcctacactccattggctgcacaatgggcagccactgcgggagtctaaaattattcatgtggaatactatcaagaaggggagatcagtgaagggtgtcttttattcaataagcctacgcattataataatgggaattatacgctcatagcaaaaaatccactaggcaccgccaaccagacaattaatggacatttcctgaaggagccctttcccgagtctaccgacaatttcatactgttcgatgaagtatctcctacgcctcccatcaccgtaactcataagcctgaggaagacacatttggcgtatccatcgccgtgggcctggcagccttcgcatgcgtgctgctggtggttttgttcgtgatgatcaataagtacggccgtcggtcgaagttcggaatgaaagggccagtggccgtcatcagcggcgaggaggactcggcctctccgttgcaccacattaatcacggtattactacaccaagcagcctggacgccggcccagacactgtagtgatcgggatgacgaggattcctgtgattgaaaacccacagtattttagacaggggcacaactgccataaaccagacacatacgtccagcacattaagcgtcgggacattgtgttaaagagagagttaggagagggagcttttggaaaggtatttctagccgagtgttataatctgagccctaccaaggataagatgctggttgcagtgaaggccctcaaagacccaacactggcagcccggaaagactttcagagggaggccgaattattaaccaacctgcagcatgagcatattgtcaagttctatggggtatgtggggatggggaccctttgattatggtgttcgaatacatgaagcacggtgacctgaacaagttcctccgtgcacatggccctgatgctatgatcctggtggacgggcagcctcggcaagccaaaggagagctgggactgtctcagatgctccatattgcctcacagatcgcaagcgggatggtgtatcttgcttcccaacacttcgtacaccgggaccttgccaccagaaactgcttggttggtgcaaacctcctcgtcaaaatcggcgattttggcatgagtagggatgtgtatagcacagattactaccgagttgtacaagcatag

SEQ ID NO: 126395 - DNA, 774 bp, synthetic construct
  misc_feature 1..774: note = Description of Artificial Sequence: Synthetic coding sequence
  source 1..774: mol_type = other DNA
atgagcattctgttttatgtcatctttttggcatacctgagggggatacaggggaacaatatggatcaacgttccctgcccgaggactcactgaacagtttgatcattaagttgattcaggcagacatactgaagaataagctgagtaaacaaatggtcgacgtaaaggaaaattatcagagcacactacccaaagctgaggcccctcgtgaacccgagagaggtggtcctgcaaaaagcgcttttcagccagtcatcgccatggatacagagctcctgaggcagcagaggaggtataatagtccccgagtgttgcttagcgacagtaccccgttggaacctcccccactgtatttgatggaggattacgtgggatcccccgtcgtcgctaataggacatctcgccggaaacgatacgccgagcacaagagtcaccggggggaatatagcgtgtgtgattcagagagcctgtgggtcacagacaagtctagcgcaatcgatatccgggggcatcaggtgacagtcctcggtgagatcaaaacagggaattcacctgtgaaacagtatttctacgaaacacggtgcaaagaagccaggccagtaaagaacggatgtagggggatagacgacaagcactggaactctcagtgcaagacttcccagacttacgtgagggcactgaccagcgagaacaacaagctggttggctggaggtggatccgcatcgacacctcatgtgtttgtgccctctcgcgcaaaatcggcagaacttag

SEQ ID NO: 126396 - DNA, 813 bp, synthetic construct
  misc_feature 1..813: note = Description of Artificial Sequence: Synthetic coding sequence
  source 1..813: mol_type = other DNA
atggtgaccttcgccaccatcttgcaggtcaataaggttatgtccatcctattctacgtaatcttcctggcttacctgagaggaattcagggcaacaatatggaccagcggtctctccccgaggattcattgaactcattaattatcaaacttattcaggcggatattcttaagaataagctgtccaaacagatggtcgatgtgaaggagaactaccagagtacactaccaaaggctgaggcgcctagagagcccgagcgcggtggccccgccaaaagtgcctttcaaccagtcatagctatggataccgagctcttacgtcaacagcgtcggtataactccccgcgtgttctgctttcggattccaccccgctggaaccgcctccactctaccttatggaggactatgtgggcagccccgtcgtcgccaaccggactagcaggcggaaaagatacgcagagcataaatcccacaggggcgagtactcagtgtgtgacagtgagtcactctgggtgacagacaaatcctcagccatcgatatcaggggccaccaagtgactgtgctgggcgaaatcaaaactggcaattcccctgtgaaacagtacttctatgagacccggtgcaaagaggccagaccagtgaagaacggctgtcgagggattgacgacaagcactggaatagccagtgcaaaacaagccaaacctacgtgcgggcacttactagcgagaacaacaagctggtgggatggcgctggattcgcatcgacactagctgcgtatgtgcactaagccgtaagattggccggacctag

SEQ ID NO: 126397 - DNA, 633 bp, synthetic construct
  misc_feature 1..633: note = Description of Artificial Sequence: Synthetic coding sequence
  source 1..633: mol_type = other DNA
atgctccccttgccctcctgctcactgcctattctgctgctgtttctcctcccatcggtgccgatcgagagccagccccctccctccactctcccaccctttctagcccctgagtgggacctgctgagtccacgcgtggtcctttcaagaggcgcccctgctggacctcccctcctgtttctgctggaagccggtgcctttcgtgaatcagctggagcgcctgctaatcgaagcagacggggtgtatcagagacagctcctgcttcacggcggggcgaactggctgtttgtgacgctgtgagcggctgggtgaccgatcgtcgtaccgccgtcgacttaaggggccgcgaggtagaggtcctgggtgaggtgcccgccgctggtggtagccctctgaggcagtattttttcgagacgagatgtaaggcagataatgccgaggaaggaggacccggggcaggaggtggcggttgtcgcggagtggaccggcggcattgggtcagcgagtgcaaggcaaaacaaagctacgtgagggctttgacagccgacgcacaggggcgtgtggggtggagatggatccggattgatacagcttgcgtctgtaccttgctgtccaggactggccgggcctag

SEQ ID NO: 126398 - DNA, 594 bp, synthetic construct
  misc_feature 1..594: note = Description of Artificial Sequence: Synthetic coding sequence
  source 1..594: mol_type = other DNA
atgcagcggtggaaagccgccgcacttgcatctgtgctgtgttcttccgtccttagcatatggatgtgcagggaagggttactgctgagccacagactgggtccagctctggtacctttacatcgcctgccaaggacgctggacgcgcgtattgctcgactcgcccaatatagagctctgcttcaaggggccccagacgccatggagctcagggagctgacgccttgggctggacgacccccaggtccacgccgacgggccggcccacggcggcgacgtgcgagagccaggctaggcgccaggccgtgcggactgcgtgaactggaagttagggtgagcgagctgggacttgggtacgcctctgatgagacggtcctattccgctattgtgcgggtgcctgcgaagccgccgcgcgtgtttatgatctgggcctgagacgcctgaggcagcgccgaaggttgaggcgggaacgggtacgggcacagccttgctgtaggcccacagcctacgaggacgaggtatcatttctagacgctcacagccggtaccacacggtgcacgagctatctgcacgagaatgcgcatgtgtgtag

SEQ ID NO: 126399 - DNA, 1323 bp, synthetic construct
  misc_feature 1..1323: note = Description of Artificial Sequence: Synthetic coding sequence
  source 1..1323: mol_type = other DNA
atgtccagctgcagggggcagaaagtcgccggaggcctcagagtcgtaagcccattcccactgtgtcagcctgccggcgaaccgtcccaggggaaaatgcggtcctcttgcgtgctgctcactgctttggtcgcgctggccgcttattacgtgtacattccacttccagggtccgttagcgacccatggaagcttatgttgttagacgccacgttccggggtgcacagcaagtctcaaacctgatccactacctagggctgtcacaccatctcctggcgctgaatttcattatcgtcagcttcggaaagaagagtgcctggtcctcggctcaggtgaaagtcactgacacggacttcgatggagtggaggttcgagtgtttgagggacccccaaagcctgaggagccgctgaaaaggtccgtggtgtacattcatggaggggggtgggcactggcaagcgccaagattcgctactatgacgagttgtgcaccgccatggcagaggagcttaatgcagtcatagtgagcattgagtatagattggtccctaaggtgtactttcctgaacagatccacgacgtcgtacgcgcaaccaagtattttctgaagccagaagtgttgcagaaatatatggtagaccctggcaggatctgcataagcggagactctgccggtggaaatcttgccgccgctctcgggcaacaattcactcaggacgcatcactaaaaaacaaactgaaactccaggctttgatctatcctgttctccaggccctggattttaacacaccatcataccaacagaacgtaaatactccaattctcccaagatacgtgatggtcaaatactgggttgactattttaaaggcaactatgattttgttcaagccatgatcgtcaataaccatacatcactcgacgttgaagaggccgccgctgtgcgagcccggttgaattggacttccctgctaccagcttcattcaccaaaaactataagccagtggttcagaccacgggaaacgcccggatagtgcaggaattgccccagctcctggatgcaagatccgctcctctaatcgctgatcaggccgtgttgcagctactccctaagacatacatactgacctgcgagcacgacgtgctccgggatgatgggataatgtacgccaagcggctggagagcgcgggcgtcgaggtgacgctggatcatttcgaggatggcttccatggctgcatgattttcaccagctggcctacaaatttctccgttggaatccgcacacggaatagctacattaagtggttggaccagaacctgtag

SEQ ID NO: 126400 - DNA, 1227 bp, synthetic construct
  misc_feature 1..1227: note = Description of Artificial Sequence: Synthetic coding sequence
  source 1..1227: mol_type = other DNA
atgcggagtagctgcgtactgctcaccgccctagtcgctttggctgcctattacgtgtacatacccctccccggctccgtcagtgacccctggaaattaatgctgctggacgcaacgttccggggcgcccagcaggtctccaacttaatccattatctaggactgtcacaccatctgctcgctctgaattttatcatcgtgtccttcgggaaaaagtccgcctggtcctccgcccaggtgaaggttaccgacaccgactttgatggggtggaggttagagttttcgagggtcctccaaagccagaagaacctctgaagcgctctgttgtctacattcatggaggcgggtgggccctcgccagcgccaagatcagatactacgacgaactttgcacagccatggctgaggagttgaatgctgttattgtgagcattgaataccgactggtgccgaaagtgtattttcctgagcaaattcacgacgtcgtgagggctaccaagtacttcctgaaaccggaggtgctccagaaatacatggttgacccaggacgcatctgtatcagcggagactctgccggagggaacttagctgccgcactcggacagcagtttacccaggatgcatctttgaagaacaagctgaaacttcaggccttgatctatccggtcttacaggccctggatttcaacacgccatcatatcagcagaatgtgaacacacctattctccctaggtacgtgatggtaaagtactgggtcgactatttcaagggaaattatgattttgtacaggccatgatcgtgaacaaccatacctccctggacgtcgaggaagccgccgccgtcagagctagacttaattggacttcactactgccagcaagcttcaccaagaactacaaacctgtcgtgcaaacaaccggcaatgcacgcattgttcaggagctcccccagctgctggacgccagatctgccccactgatcgccgatcaagcagtcttgcaactgctccctaaaacatatatcttaacttgtgagcatgacgtgctgcgggatgacggaattatgtatgccaaaaggttggaatccgcaggcgtggaggtgaccttagaccactttgaagatgggtttcacggttgcatgatttttacgagttggcctaccaatttttctgtgggcattcgcacccgaaattcttacattaaatggttggaccagaacctgtag

SEQ ID NO: 126401 - DNA, 1347 bp, synthetic construct
  misc_feature 1..1347: note = Description of Artificial Sequence: Synthetic coding sequence
  source 1..1347: mol_type = other DNA
atgagttcttgtcgtggccagaaagtcgccggaggtctgcgcgtggtgagcccatttcccctctgccagcctgccggggagccttctcaaggtaagatgcgtagcagctgcgttcttctaactgctctcgtggcactcgccgcgtactacgtgtacatcccgctgcccggcagcgtctccgatccgtggaagctcatgcttctagatgccacttttaggggcgcccaacaggtgagtaacctgattcattatctcgggttatcacaccacctcctggccctaaacttcattatcgtgagtttcggcaaaaagtctgcttggagtagcgcccaggtcaaagtgacagacacagactttgacggggtggaagtcagggtctttgagggccctcctaagcctgaggagcctctgaagcggagtgtggtctacatccacgggggcggttgggcactcgccagtgcttctgcatcctggagtccttctgatgaaattcggtactacgatgaactctgtacggcaatggcggaggagcttaatgccgtcatcgtgagcatcgagtaccgcctcgtgccaaaggtgtactttccagagcagatccacgacgtggttagagctaccaagtacttcttgaagccggaagtgctccaaaagtatatggttgatcccggccgcatctgcataagcggggattctgccggaggtaacctggctgcggcactggggcaacagttcacacaggacgctagcttgaagaataaattaaagctgcaggctctgatctacccagtactccaggccttagatttcaacaccccctcttaccagcagaacgtgaatacccctattctgcctagatacgtcatggtgaagtattgggtcgactatttcaagggtaactatgactttgtccaggctatgatcgtcaacaatcacacctctctggacgtagaggaggccgccgcggttcgcgccagactgaactggacctccctcctgcctgcctcatttactaagaactataagcccgtcgttcagaccaccggcaacgcacggatcgtacaggaactacctcaacttctggatgcacgtagtgccccgcttatcgctgatcaggccgttctgcaactgcttcccaaaacctatatcctgacctgtgagcacgacgttttacgggacgatggcattatgtacgctaaacgcctcgaatctgccggcgtggaagtcaccctggaccactttgaggatggatttcatggatgcatgattttcaccagttggcccacaaatttctcagtgggaattagaaccaggaacagctatatcaagtggttagatcaaaacctctag

SEQ ID NO: 126402 - DNA, 828 bp, synthetic construct
  misc_feature 1..828: note = Description of Artificial Sequence: Synthetic coding sequence
  source 1..828: mol_type = other DNA
atggcagaggagttaaacgctgtgattgtgtcgatcgagtatcgactggtgcccaaggtctacttccctgaacagatccatgatgttgttcgagctactaaatacttcctgaagcctgaagttcttcagaaatatatggtagaccctgggcgtatctgtatctcgggcgacagtgcaggcggaaaccttgcagctgcgttaggccagcaattcactcaggatgcctcactgaaaaacaagctgaagttacaggccttgatatacccagtcttgcaggctcttgattttaatactccctcgtaccagcagaatgtgaatacacccatcctaccaagatacgtgatggttaaatattgggttgactacttcaagggcaactacgactttgtccaggccatgattgtcaacaaccacacgtccctggatgttgaggaagccgccgccgtccgggcaagacttaactggacctcattactccccgccagttttaccaaaaactataagcccgttgtgcagaccacaggcaacgccaggatcgtgcaggaattacctcaactgttggacgcccggagtgcgcctctcatagccgaccaggcagtattgcagcttcttcctaagacctatattctcacatgtgaacatgacgtattgagagacgacggcattatgtacgcaaaaaggctggaatcagcaggcgtagaagtaacactggatcatttcgaagacggttttcacggctgcatgatctttaccagctggccaacaaatttctctgttggtatcagaactcgaaatagctatattaagtggctcgaccagaacctgtag

SEQ ID NO: 126403 - DNA, 2754 bp, synthetic construct
  misc_feature 1..2754: note = Description of Artificial Sequence: Synthetic coding sequence
  source 1..2754: mol_type = other DNA
atggcctttatccgtaaaaagcagcaagaacagcagcttcagctctatagtaaggagaggttcagtctgctcctccttaatcttgaagaatattactttgaacagcatcgcgcaaatcatatccttcacaaggggtcccaccatgaaagaaaaataagagggtccctgaagatttgttccaagtccgtcatctttgagcccgacagtatatcacagcccatcatcaagattccacttcgtgactgtatcaagatagggaaacatggtgaaaatggcgcaaatcggcatttcacaaaagctaagtccggcgggatctccctgattttctcacaagtgtacttcatcaaagagcataacgtggtggctccctacaagatagaacgggggaagatggaatatgtttttgaattggatgtgcctggcaaggtcgaggacgtcgtggaaacgcttctccaactgcatagggctagctgtctggataagctgggtgaccagaccgccatgattaccgcgatcctccaatcacgcctagccaggacctcattcgacaaaaatcggtttcagaacatctccgagaaactgcatatggagtgcaaggccgagatggtgaccccactcgttacaaaccccggccacgtgtgcatcaccgacactaacttgtacttccagccgttgaatggttaccccaaacccgttgtgcagatcaccttgcaagatgtaagacgtatctacaaacggcgccatggtcttatgcccctgggactggaggtcttttgtacggaagatgacctctgttccgacatctatctaaagttctatgagccgcaggacagggacgacttgtacttctatatcgccacgtaccttgaacatcacgtcgctgaacatacagctgaatcatacatgttacagtggcaacgggggcacctttctaactatcagtacttgctgcaccttaataatctcgccgatcgttcctgcaatgacttgagccagtacccagtcttcccttggatcattcacgattattcctcctccgagctagacctgagcaacccaggtactttcagagacctgtccaagccagtcggcgctctgaacaaggaacgcctagaaagattgctcacaagataccaggaaatgcctgagccaaagtttatgtacggatcgcattactccagcccgggatacgtgctgttttatcttgtgagaatcgcgcccgagtatatgctttgtttacaaaacgggagatttgacaatgctgataggatgtttaacagcattgctgagacctggaagaattgcctcgacggggccacggacttcaaagaactaatccctgaattctatggcgacgacgtttcttttctggtaaattcactgaaacttgacctggggaaaaggcagggggggcaaatggtggacgacgtggagctccccccctgggcgagctcaccagaagactttctccagaagagcaaagatgccttggaatctaattacgtgagcgagcatctgcacgaatggatcgatctgatctttggctataaacagaaggggtccgacgcagtcggagctcacaacgtgttccaccctctgacttacgagggtggggtagaccttaactctattcaagatcccgatgaaaaggttgctatgctgacccagattttggaattcggacagaccccaaaacagctgttcgtgaccccacatcccaggcggatcacacccaaattcaagagtctttctcagacttcctcctacaacgcgtctatggcggactcccctggagaggaatcctttgaggacctcactgaagagtcgaagacactggcgtggaacaacattacaaagttgcagctgcacgaacattataagattcataaagaagccgtaaccggcattaccgtgtctagaaacgggtcctctgtattcacgacctctcaggactctactctgaagatgttcagcaaggaaagcaagatgctgcagcgaagcatttcgtttagtaacatggccctgtcatcatgcctactgctccctggggacgctacagtgattacctcgtcatgggacaacaatgtatatttctactccatcgcctttggccgccggcaggacacccttatgggccacgacgatgccgtgtccaagatctgctggcatgataaccgactctactcagccagttgggactctacagtgaaagtctggtccggcgtgcctgccgagatgccaggtaccaagcgtcatcattttgatctcctggccgagcttgagcatgacgtgagcgtggacactatttcgctcaacgctgcaagcacattgctggttagtgggaccaaagaaggtaccgtgaatatctgggatttgacaactgcgaccttgatgcaccagattccgtgccactcagggattgtgtgtgacactgccttcagccccgattcccgccacgtactctctactgggactgacgggtgcttgaatgttatcgacgttcagacgggcatgttgatcagtagcatgactagcgatgaaccacagcgttgctttgtgtgggatggtaattctgtcttgagtgggagccagtccggcgagttacttgtttgggacctgctgggcgcaaaaattagcgagcgcattcaaggacacactggcgccgtgacatgcatctggatgaacgagcagtgttcgtcaatcataacaggcggtgaggaccgtcagatcatattctggaaactgcagtactag

SEQ ID NO: 126404 - DNA, 2847 bp, synthetic construct
  misc_feature 1..2847: note = Description of Artificial Sequence: Synthetic coding sequence
  source 1..2847: mol_type = other DNA
atgactggccaggctcgctttcacaggggggcggaagcgtgccgggctatcaggcagtgccgctctagacggcctcgggctgcgcatcctgaaggccgagctggaagtgggaggggcagccggcacgcgagtccaggggtccgacgaggcgggttttcattattactacttaatctcgaggaatactattttgagcagcatagggccaatcacatcttgcataagggatcacatcacgaacgtaaaatccgcgggtcgctcaaaatctgctccaaatctgtgatcttcgaacccgattccatcagccaaccaatcatcaagatccccctgagagactgtatcaaaataggcaagcatggcgaaaatggtgccaatcgacactttaccaaggctaaaagcggcggaataagtctgatctttagccaagtatatttcatcaaggaacataacgtagtggccccatacaaaatagagagaggaaagatggaatacgtgtttgagcttgatgttccaggaaaggtggaggacgttgtagagactttactccagctgcacagggctagttgcctggataagctcggcgaccaaacggctatgataacagccattctccagagccgcctagcccgtacttcttttgacaaaaacaggtttcagaatattagtgagaagctgcatatggagtgtaaggcggaaatggtgacccctctcgtcaccaatccaggccatgtgtgtataacagacaccaatttatatttccagcctctgaacggctaccccaaacccgtcgtgcagatcacactccaggatgtccgaaggatctacaagagacggcacggcctcatgccccttgggctggaagtattctgcactgaggacgacctatgctcagatatttacctcaaattctatgagccacaggacagagacgacctttatttctacatagcgacatatttggagcaccacgtcgccgagcatacagccgaatcctatatgctgcagtggcagaggggccatcttagtaattaccagtatttgttacacttaaataatctcgccgacagatcatgcaacgacctgtcccagtacccagtgttcccctggattattcacgactactcctcttctgagcttgacctctcaaatcccggaacattcagagatttatcaaaacctgtgggcgcactaaacaaggagagattggaacgtctcctgacaaggtatcaggagatgccagaacctaagtttatgtatggctcacactatagctctcctggatacgtccttttctacctagtgcggatagccccggaatacatgttgtgccttcagaatggcaggttcgacaacgccgatcgaatgtttaacagcatcgctgagacctggaaaaattgcctagacggggccacagattttaaggagctgattcccgaattttacggagatgacgtgtcatttctggtgaactctctgaaactggacctgggcaaaagacagggaggacaaatggtggatgatgtggagctccctccttgggcctcatcaccagaagacttcttgcagaagtcaaaggacgctctggagagcaactacgtgagcgagcatctccatgagtggatcgacttgatattcggctacaagcaaaagggcagcgatgccgtgggcgcacacaatgtctttcatccgctgacttacgaaggtggcgtggacctcaatagtatccaagatcccgatgagaaggtggccatgctgactcagatcctcgaattcggccagacccctaagcagttgttcgttacccctcatcccaggaggataacaccaaagttcaagagtttgtctcaaacatcatcatataatgcctccatggctgattcacccggcgaagaatccttcgaagatttaacagaagaaagcaagactcttgcttggaataatatcaccaagctacaattgcacgagcattacaagatccataaagaggcagttactggcatcacggttagcagaaatggatcttccgttttcacaactagccaggacagtaccttgaagatgttctctaaagagagcaagatgctgcagcgaagcataagcttctctaacatggcattatcctcctgcctcctcctgccgggggacgccaccgtgattacgtcatcatgggataataacgtgtatttttattcaatcgcgttcgggcggcgacaggatacactgatgggacacgacgatgctgtgagcaagatatgctggcacgacaacaggctttattcagcaagctgggattccacagtgaaagtgtggagcggtgttccagccgagatgcccggtacaaagaggcatcattttgatctgctggctgagctggagcatgacgtgtccgtggacaccatctcccttaacgcagctagcacgttgttggtctctgggactaaggaaggcactgtcaacatttgggaccttacaactgccaccctcatgcatcagatcccgtgccattctggcattgtatgtgatacagcattctctcctgacagtcgacatgtgctatctacagggacagacggctgtctgaacgtgatcgatgtgcagacaggaatgttgatcagctctatgacatcagacgagccacagaggtgcttcgtctgggacggcaattccgtgctgagtggctcccagagtggggagctcttagtatgggacctcctgggggctaagatcagcgaacggatacaggggcacacgggggccgtgacttgcatttggatgaacgagcagtgttcatccattataactgggggcgaggatcgacagattatcttctggaaactgcagtactag

SEQ ID NO: 126405 - DNA, 1173 bp, synthetic construct
  misc_feature 1..1173: note = Description of Artificial Sequence: Synthetic coding sequence
  source 1..1173: mol_type = other DNA
atgggggacactttcattaggcacatcgccttgttgggctttgagaagaggtttgttccgagtcagcattatgtctacatgtttcttgttaaatggcaggatttgtctgaaaaagtcgtatacagaaggtttacggaaatctacgaattccataaaactctgaaggagatgtttccaatagaggctggggcgataaatccggagaatagaataataccgcacctaccagcaccgaagtggttcgacgggcagagggccgcggaaaatcgccaaggcaccctgacggagtactgcgggaccctgatgagcctgccaactaagatcagccgctgcccccatttgttggatttcttcaaagtgaggcctgatgatcttaaactccctacggacaatcaaacaaaaaaacccgaaacatacctgatgccgaaggatggtaagagcacagcgactgacatcaccgggcctatcatactgcaaacttatcgcgctattgcgaactatgagaagacaagtggatcggaaatggccctctcaacaggcgacgttgttgaagtcgtggagaaatctgagtcgggctggtggttttgccagatgaaggccaagcgtggctggatccccgcttcctttttggagcccttagacagccccgatgagactgaagacccagaaccaaattatgcaggggagccctatgttgccattaaggcctacactgccgtggagggtgacgaagtctccctgttggaaggagaagccgttgaagtaatccacaaactccttgatggatggtgggtgatccggaaagacgacgtgacaggctactttccttcaatgtacctgcagaagagcggacaggatgtgtcccaggctcagcgtcaaatcaaaaggggagccccacccagacggagtagcataagaaatgcgcacagcattcatcagcgaagccgaaagagattgtcccaagacgcctatagacgaaactcagtgcgctttctccagcagcgccgcaggcaggcgaggccaggtccccagtctcccggctctcctctggaggaggagcgacaaacgcagcgatcgaagccgcagccagcagtccctccgaggccgtctgcagatctgatcctgaaccgatgtagcgagagtaccaagaggaagttggcatccgccgtatag

SEQ ID NO: 126406 - DNA, 444 bp, synthetic construct
  misc_feature 1..444: note = Description of Artificial Sequence: Synthetic coding sequence
  source 1..444: mol_type = other DNA
atgacgaaaaaaccagaaacctatctgatgccaaaggatggtaagagcaccgcaacggacattacgggtcccattatattgcagacatatagagctatcgcaaactatgagaaaacttccggctctgaaatggcgctgagtaccggggatgtcgtagaggttgtggagaaatccgaaagtggacagacctctcaccttaccggcctcctgccactggtgctgagaaatccgcaacctcaggccccttgccagggctctgggagcttggcaccagggagaacccccgctctgctcggcgcgcttaacgttcttcccaccctgtgggtggcattctgcctgagtgtccatccagtggtcgcggtggggatttgtgcctggcaagcgggggccggccatgtgtgcgttttctgcctggatggctatggcacagtgtgctccctgtag

SEQ ID NO: 126407 - DNA, 759 bp, synthetic construct
  misc_feature 1..759: note = Description of Artificial Sequence: Synthetic coding sequence
  source 1..759: mol_type = other DNA
atgggcgatacctttatcagacatattgcactcctcgggttcgagaaaaggttcgttccttctcagcattacgtgcacgtgcccggggagatggccggtccggtgggggagggcgggctgcctgcgctgcatcgggatctaagggtgccttctcctaaatggttcgatgggcagagagccgccgaaaaccgacaaggaacactcaccgaatactgtggcacgctgatgtcactcccgacgaagatatctaggtgtccccatctactggatttttttaaagtgcgtcctgatgacctaaaactccctactgacaaccaaaccaagaagcccgagacttatctgatgcctaaagatggcaagagcaccgccacggatattaccggcccaatcatcttacaaacatatagggcaattgccaactacgagaagacttccggttcggaaatggcactttccaccggagacgttgtggaagtggtggagaagagcgaaagcggacagacctcccatctgacaggactgcttcctctcgtgcttcgcaacccccagccacaggccccctgccagggttccgggagtttagccccgggccgaactccagccctcctcggggcccttaacgtcctgccaactctctgggtggccttctgcctgtctgtgcaccccgttgtggccgtggggatatgtgcttggcaggccggagcaggacacgtgtgtgtattctgtctcgatggatacggtaccgtgtgctctctttag

SEQ ID NO: 126408 - DNA, 1581 bp, synthetic construct
  misc_feature 1..1581: note = Description of Artificial Sequence: Synthetic coding sequence
  source 1..1581: mol_type = other DNA
atgagcctggtagaggcaatcagcctttggaatgaaggcgttcttgccgccgataagaaggattggaaaggcgctctggatgcattttctgccgtccaggatccacactctagaatctgcttcaatatagggtgtatgtatactattctgaagaacatgaccgaggccgaaaaggcgtttactagaagtattaatcgtgacaaacaccttgccgtcgcctacttccaaagaggcatgctgtattaccagaccgaaaagtacgatttggccataaaggatctgaaagaggccctgatccagttgagaggaaatcagctgatcgattacaaaatcctcggcttgcaatttaaactcttcgcctgtgaggtactttacaatattgcattcatgtacgcaaagaaagaagagtggaaaaaagctgaggaacaacttgctctggcgacgtctatgaaaagcgagccgcggcatagcaagattgacaaagcgatggagtgcgtttggaagcaaaagctatatgagccagtggttattccggtgggcaagttgtttcgccccaacgaaagacaggtggctcagctggccaaaaaagattacctggggaaggccaccgtggtggcctctgtcgtcgaccaggacagcttttctggttttgcaccccttcagccacaggccgcggagccgcctccccggccgaagactccagaaatatttcgcgcactagagggcgaagcacatcgcgtgctgttcggattcgtgccagaaaccaaggaagagctgcaggtaatgccaggcaatattgtcttcgtgctgaagaagggaaatgacaattgggccactgtgatgtttaacgggcaaaaaggactagttccctgcaactatctggaacccgtcgagctaaggatccacccccagcagcagccacaggaggagtcgtcaccacagagtgacattccggctcccccatctagcaaggctcccggtcgaccccagctcagccccggccagaaacaaaaggaggagccgaaggaggtgaaattgtcagtcccgatgccgtataccctcaaggtccactacaaatatacggtagtgatgaagactcagccgggtttgccgtactcccaggtgcgggatatggtgagcaaaaaacttgagctgaggttagagcatactaaactttcctatcgaccacgcgattctaacgaactcgtacctttgtccgaggactcgatgaaagatgcatggggacaagtgaagaactattgcctgactttatggtgcgaaaacacagtcggggatcaaggtttcccggatgagcccaaggagagtgagaaagcagacgcgaataaccagactactgaaccacagctgaagaaaggaagtcaagtggaggctctcttttcttacgaggctactcaaccagaagacttggaatttcaggagggcgatattatactggtgctgtccaaagtaaatgaagagtggcttgagggcgagtgtaagggaaaggtaggtatttttccgaaggtcttcgtggaggattgtgctacgaccgacctggaaagtactaggcgcgaggtttag

SEQ ID NO: 126409 - DNA, 1581 bp, synthetic construct
  misc_feature 1..1581: note = Description of Artificial Sequence: Synthetic coding sequence
  source 1..1581: mol_type = other DNA
atgtccctggtcgaagctattagtctgtggaatgaaggcgttctggcggctgataaaaaagattggaaaggcgccttggacgccttctctgctgtccaggacccacactcgcgtatatgcttcaatattggctgtatgtacactatccttaaaaatatgaccgaggccgagaaagctttcaccaggtcaatcaatcgtgacaaacacctggcagtcgcgtattttcagagggggatgctttattaccaaaccgaaaagtatgatctcgccataaaggacctgaaagaggccctgattcagttgcggggaaaccagctgatagattacaagatccttggcctccagttcaaactgtttgcatgtgaagtgctgtataacattgcatttatgtatgctaaaaaggaggaatggaaaaaggcggaggagcagctggcattagccacttcaatgaagagcgagccacgacactctaaaatagacaaggcaatggaatgtgtctggaagcagaagctttatgaacctgtggtcattccagtgggcaaactgttccgaccaaatgagaggcaagtggctcaactggcaaaaaaagactacctggggaaggccacagttgtggcctccgtagtcgatcaggatagtttttccgggtttgccccactgcaaccacaggccgccgagccgcctccccgacccaagacccccgagattttcagagccctcgagggggaagcgcacagagtgttgttcggcttcgtaccagagaccaaggaggaactgcaggtgatgcctgggaatatagtatttgttctcaaaaagggaaatgataattgggccacagttatgttcaacggacagaagggactggtgccatgcaattacctggaaccagtcgagctccggatccatccccagcaacagccacaagaagaatccagcccccagtctgacatcccggcaccaccaagtagcaaggcccccggccggccccaactgagcccggggcagaaacagaaggaggagccgaaagaagttaagctttctgtgcccatgccttataccctgaaggtacactataaatatacagttgtaatgaaaacccaacctggccttccatactcccaagtgagagacatggtgagtaagaaactggagttgagacttgagcacaccaaattgtcatatcgcccacgtgactccaacgagctcgtgcctctctccgaagactctatgaaggacgcgtggggacaggtgaagaactattgcctcacactttggtgtgaaaacaccgtgggagaccaaggctttccagacgaaccaaaggagtccgaaaaggccgacgcaaacaaccagactactgagccgcagctgaaaaagggatcccaggtcgaggcccttttctcctacgaggccacccaaccagaggatctagagtttcaggaaggtgatataatcctggtcctttccaaggtgaatgaggagtggctggagggagaatgcaaagggaaggtcgggatttttcccaaggtgttcgtggaggactgcgccaccacagatctcgaatctacccggagggaggtgtag

SEQ ID NO: 126410 - DNA, 1797 bp, synthetic construct
  misc_feature 1..1797: note = Description of Artificial Sequence: Synthetic coding sequence
  source 1..1797: mol_type = other DNA
ggctcccccgcccgaggcgatgccccaacatgtctgctcagcgtgagttggcaactgtcctggccacccagcttctacctcattatgtctctggtggaagcaatttccttatggaacgagggcgtgctcgccgcggacaagaaggattggaagggcgcattagatgccttttcagccgtccaggacccgcactcgagaatttgctttaacatcggatgcatgtacacaatattaaagaacatgaccgaggctgagaaagctttcacccggagcatcaatcgtgataagcacttggccgtcgcgtacttccaacggggcatgctgtactatcagacagaaaaatatgatctagctatcaaagacctaaaagaggccctgattcagcttaggggcaatcaactgatcgattataaaattttggggcttcagttcaagctgtttgcttgcgaggtgctctacaacatagcctttatgtacgccaagaaggaagagtggaaaaaggctgaagaacagctggccctggccacctcaatgaagagtgagccacgccacagtaaaatcgacaaagccatggagtgcgtgtggaaacaaaaactatacgagccagtggttatccctgtggggaagttgtttaggccaaatgagagacaggtggcccagctggctaagaaagactacctcggtaaagcgaccgttgtggctagtgtcgttgaccaggatagcttcagcggatttgctcccctccagccccaggtgcgtcaatctgatctgttgggagctcaggcgggctctgtgagctctaggcaactgcagcttgacgtggaactggaaccagggtggtctcaagtgcctggcagcaagttcagcgttttcgctccttggcatcacgtgaggggatgggggctggacctggtctctatcctgtgcagggcgttggagggtgaggcccaccgcgtcttgttcggatttgtaccggaaaccaaagaagaactccaggtgatgccagggaacatcgtttttgtgttaaagaaaggcaacgataattgggccacggtgatgttcaatggtcagaagggactggtcccttgtaactacctggaaccagtggagctgaggattcatccccaacagcagccccaggaggaatcttcgcctcagagtgatattcccgcgcctccatcttctaaggcgccgggcagaccacaattaagtcctggccagaaacagaaagaagagcctaaggaggtgaagctgagtgtgcccatgccctacactctcaaggtgcactacaagtacacggtagtgatgaagacccagccaggactcccttacagccaagtgagggacatggtgagtaagaagcttgaactgcgcttggaacacactaagctgagctacaggccacgggactccaacgaattagtccctctgtccgaggatagtatgaaggatgcttggggccaagtaaagaactactgtcttacactgtggtgtgaaaacacagtaggagaccaaggcttccctgacgagcccaaagagagcgagaaagccgacgctaataaccagacaacggaacctcagctgaagaaaggtagccaggtggaggcgcttttctcatacgaggctacccagccagaggacctggagtttcaggaaggagacattattctcgtgctaagtaaagtaaatgaagagtggcttgaaggcgagtgcaaaggaaaggtggggattttcccaaaggtctttgttgaggattgtgcaaccactgatctcgaatctacccggagagaagtgtag

SEQ ID NO: 126411 - DNA, 1446 bp, synthetic construct
  misc_feature 1..1446: note = Description of Artificial Sequence: Synthetic coding sequence
  source 1..1446: mol_type = other DNA
atgtcccttgtcgaagccattagcctgtggaacgaaggtgtgttagccgctgacaagaaggattggaagggggcgttggatgcgttttcggctgtgcaggatcctcatagccgcatctgttttaatatcggatgcatgtacactattttgaaaaatatgacagaggctgaaaaggctttcacacgctcaatcaaccgtgacaagcatctggccgtcgcctatttccagcgcggcatgctgtactaccagaccgaaaagtacgaccttgcaatcaaggatctgaaagaagcgctgatccagctgcggggaaaccagctgattgactacaagattctggggcttcagttcaagctgtttgcatgcgaaaaacagaaactatacgagcccgtagtgattccagtaggcaaactcttcaggccgaatgagagacaggtggctcagcttgccaagaaagactacttagggaaggctaccgtagtggcatctgttgtggatcaggacagtttttccggctttgccccgctgcagcctcaagcggccgagcccccacctaggcccaagaccccggagattttccgcgcccttgagggtgaggcacatagggtccttttcggatttgtcccagagactaaagaggagctgcaggtgatgcccggcaatattgtctttgtcctgaagaagggcaatgacaactgggcgaccgtgatgtttaacgggcagaaaggtttagtgccatgcaattatttagagcccgtggagctgagaattcacccacagcagcagcctcaggaggaatcatcccctcagagcgacattcccgctccccccagctccaaggccccaggcaggcctcaactcagcccagggcagaagcaaaaggaggaaccaaaagaggtgaagttgtccgtcccaatgccctacacactgaaggtgcactacaaatacacagttgtcatgaagactcagcccggactgccatatagtcaagtgcgggatatggtcagtaagaaactcgagctgaggcttgagcacacaaaactgtcatatagacccagggattcaaatgaactggtcccactttcagaagattctatgaaggacgcctggggccaggtgaaaaattactgtctgaccttgtggtgcgaaaataccgttggggaccagggattcccagatgagcccaaggaatccgagaaggccgacgcaaacaatcagaccacagagcctcaattaaagaaggggtcgcaggtggaggcactattctcttatgaagctactcaaccggaggatctggagttccaggaaggagatatcatcctcgttcttagcaaggtgaatgaggagtggcttgaaggtgagtgcaagggtaaggtcgggatttttcctaaggtatttgtcgaggactgtgcaactacagaccttgagagcactcggagagaagtgtag

SEQ ID NO: 126412 - DNA, 1338 bp, synthetic construct
  misc_feature 1..1338: note = Description of Artificial Sequence: Synthetic coding sequence
  source 1..1338: mol_type = other DNA
atgtcacttgtggaagctataagcctctggaacgagggtgtgctcgccgctgacaagaaggactggaagggggccctcgatgccttctcagctgtgcaggacccacactccagaatctgttttaacataggatgtatgtataccatactgaaaaacatgactgaggccgagaaagccttcacaaggtccatcaaccgcgacaagcaccttgccgtcgcatactttcaaagaggcatgctctactatcaaactgaaaagtatgaccttgcaatcaaggatcttaaagaggcgttaatacagttaaggggtaaccagttaatagattacaaaatcctcgggttacagttcaaactgttcgcctgcgaagttgttgcttcagtggtagaccaggatagcttctctggctttgcgcctttacagccacaggccgccgaaccccctccaaggccaaagactccagagatcttcagagctcttgaaggagaggcccatagagttctcttcggattcgtcccggaaaccaaggaggaactgcaggtgatgcctgggaacattgtgttcgtgctgaagaaagggaatgacaattgggctacggtcatgttcaacgggcagaaaggcctggtcccctgtaactacctcgagccggtcgaactgagaattcatccccagcagcagccgcaagaagaaagctcacctcagtctgatattccggcgccacccagctctaaggctccaggcagaccgcaactgtcacctggacagaagcaaaaagaggagccaaaggaggtaaagctctctgtacctatgccctacacacttaaagtacactacaagtacacagtcgtgatgaagacgcagccgggcctgccttatagtcaggttcgggacatggtcagtaagaagctggaactaagattggagcacactaagctctcttataggccccgcgattctaacgaactggtcccgctgagtgaagattcgatgaaagacgcatggggccaggtcaagaactattgtctgacactgtggtgtgagaacaccgtaggagatcaagggtttccagacgagccaaaggaatccgagaaagccgatgccaataaccagacaacagagccacagctcaagaagggtagccaggtggaggccctgttttcttatgaagcaacccagcctgaagatttggaatttcaagaaggtgacataatcctagtgctgtcaaaggtcaacgaagaatggctggagggcgaatgcaaaggcaaggtcggtatctttcccaaagtgttcgttgaggactgtgcaacgaccgatctggagagtacccggagagaagtctag

SEQ ID NO: 126413 - DNA, 432 bp, synthetic construct
  misc_feature 1..432: note = Description of Artificial Sequence: Synthetic coding sequence
  source 1..432: mol_type = other DNA
atgcctggcaacattgtgttcgtcctgaagaagggcaacgacaattgggcaaccgtgatgtttaacgggcagaagggcttggtgccatgtaactatttggagccagtggaattaagaatacacccacagcagcagccacaggaggagagttcccctcagtccgacatccccgctccgccttcaagtaaggcccccggccggccccagctcagccccggccagaagcaaaaggaagaacctaaggaggtcaagctttccgtccccatgccatacacccttaaggtgcactataagtacactgtggtcatgaaaactcagccagggttgccctactcccaagttcgggacatggtgagcaagaagctggagttgagactggagcacacgaagctgagctatcgtccgcgcgatagcaacgagctggtcccctag

SEQ ID NO: 126414 - DNA, 171 bp, synthetic construct
  misc_feature 1..171: note = Description of Artificial Sequence: Synthetic coding sequence
  source 1..171: mol_type = other DNA
atgccatacaccttaaaggtccattacaagtataccgtggtgatgaaaactcagcctggcctgccgtacagccaagttcgggatatggtttcaaagaaactagagctgcggctggagcacaccaagctgtcataccggcccagggattcaaacgagctcgtacctctgtag

SEQ ID NO: 126415 - DNA, 1020 bp, synthetic construct
  misc_feature 1..1020: note = Description of Artificial Sequence: Synthetic coding sequence
  source 1..1020: mol_type = other DNA
atggccgtagcccagcagctaagagcagaatccgattttgaacaactcccagacgatgtcgccattagtgcaaatatcgctgacattgaagaaaagagggggttcacatcacatttcgtgtttgtcatcgaagtaaaaactaagggcggcagtaagtacttgatctataggagatataggcaattccacgccctgcagtccaagcttgaggaaagatttggtccagactcaaagtcttcagcactcgcctgtaccctgccaactctaccggccaaagtttatgttggagtcaaacaggaaatcgctgaaatgcgtatccccgccttaaacgcatatatgaagtccctactgtcattgcctgtctgggtcctcatggacgaggacgtgcgaattttcttttatcagtcgccttacgatagtgagcaagtgcctcaggcccttagacgattaagaccgaggacccggaaagtgaagtccgtgtcgcctcaggggaacagtgtggacagaatggccgcgccacgtgccgaggcactcttcgactttactggcaattcgaaactggaactgaactttaaggctggagatgtgatcttcctgctttcaagaatcaataaagattggttggaaggcacagttcggggtgccacgggaatctttcccttgtcattcgtcaagattctaaaggattttcctgaggaggatgatcctaccaactggctgcggtgctattactatgaagataccatcagcaccatcaaggacattgcggtcgaagaggatctttcttctacccccctgctcaaagacctgttagagctgacgcgaagagagttccagagggaggatatcgcacttaactaccgggatgctgaaggtgacctggtgcggctcctctcagatgaagacgtagctctgatggtgcgccaggcccggggtctgccaagccagaagcgacttttcccatggaagctgcatataactcagaaagataactaccgcgtatataacacaatgccatag

SEQ ID NO: 126416 - DNA, 1047 bp, synthetic construct
  misc_feature 1..1047: note = Description of Artificial Sequence: Synthetic coding sequence
  source 1..1047: mol_type = other DNA
atggctgttgcacaacagcttagagccgaatctgattttgagcaactccccgatgacgtggcaatatccgctaatattgcagacattgaagagaagagggggttcaccagtcattttgtgttcgtgatcgaggtgaaaaccaagggggggagcaagtacctgatttatcgccgatataggcagttccacgcactccagtccaaactcgaagaacgcttcggaccagattctaaaagcagcgcgctggcctgcacgttgccgacgcttcccgcaaaggtctacgtcggagtgaaacaggagatcgctgaaatgagaataccagctctcaatgcttacatgaagtcccttcttagcctgccagtttgggtattgatggacgaggatgtgaggattttcttttaccaaagtccctacgatagtgagcaggtcccgcaggccctgcggcggctgcgaccccgcaccaggaaagtgaaaagtgtgagcccgcagggtaacagcgtggacagaatggctgccccccgggccgaggccctgttcgatttcactggaaattccaagctggagctaaattttaaagctggagacgtaatctttctgttgtccagaattaacaaggactggttggaagggaccgtacgcggcgcaactggtatctttcccctcagcttcgtcaagatccttaaggattttccggaagaggatgacccgaccaactggctgcgatgttactactatgaagacaccatttctacgatcaaatccgtggcatgggaggggggcgcatgcccggcctttctcccctccctgcgacccctgcctttaactagcccaagtcacggctctctgtcccactctaaggcgcccagcggaagccagatgtcgcacaacgcagtcaccagccaccagcgtcctggatggcccggacaaccacacagtccttttccgcaccccactccacatttccagcccgatgcttctctgttgcagccagttacccctctcggcacaagccgttggagaaaaatttcagctgctctaccatactag

SEQ ID NO: 126417 - DNA, 501 bp, synthetic construct
  misc_feature 1..501: note = Description of Artificial Sequence: Synthetic coding sequence
  source 1..501: mol_type = other DNA
atgcgcataccagctctcaatgcctatatgaaatcattactgtcacttcctgtatgggtcctgatggacgaggacgtgagaatttttttctaccaatccccttacgattcggagcaggtaccgcaagcattacggcgcctccgacctaggacaaggaaagtgaagtcggtctccccacaaggtaattccgttgaccggatggctgcgcctcgcgcagaagccttattcgactttacaggtaattcaaaactcgagttgaacttcaaggctggggatgtcattttcctgttatctcgcattaataaagactggttggaggggactgtgaggggcgccacaggaatattcccactctcgttcgtaaagatacttaaagactttcctgaagaagatgatccgaccaattggctccggtgctattattacgaagacacaatttcgaccattaagagcgtggcgtgggaaggaggcgcttgccccgcatttctgccatccctctag

SEQ ID NO: 126418 - DNA, 480 bp, synthetic construct
  misc_feature 1..480: note = Description of Artificial Sequence: Synthetic coding sequence
  source 1..480: mol_type = other DNA
atgaatgacatctcacagaaggctgagatcctgctttcgtcgagtaaacctgtacccaaaacatacgtccctaagctcggaaagggcgacgtgaaagataaatttgaagcaatgcagagggcccgagaggaacggaaccagcgccggtctagggacgagaagcagaggagaaaagaacagtacatcagggaaagagaatggaaccgtcgaaaacaggaaataaaagagatgctggctagcgacgacgaagaagatgtgagctcgaaggttgagaaggcctatgtgcctaagctcaccggtaccgtgaagggaagatttgctgagatggaaaagcagagacaagaggaacagcggaaaagaacggaagaagagaggaagagacgaattgagcaagatatgttagaaaaaaggaagattcagcgcgagctagctaaacgcgccgagcagaagctggcccggagggatggagcccacctatag

SEQ ID NO: 126419 - DNA, 1836 bp, synthetic construct
  misc_feature 1..1836: note = Description of Artificial Sequence: Synthetic coding sequence
  source 1..1836: mol_type = other DNA
atgaatgacatctcacagaaagcggagatcaaagaaatgttggcatccgatgatgaagaggatgtgtcctctaaggtggagaaggcttatgtccctaagctgaccggcaccgtgaaaggcaggtttgccgaaatggaaaaacagaggcaggaagaacagcgaaaacggacagaagaagaaagaaaaaggcgtattgagcaggatatgctagagaagaggaagatccagcgcgagctcgctaagagagcagagcagattgaagacataaataatacagggaccgagtcagcctcggaggagggcgacgacagccttctgataaccgtggtcccagtgaagtcctataaaacaagtggtaaaatgaagaagaattttgaggatttagagaaggaacgggaagaaaaggagcgtatcaagtatgaggaagataagagaataagatacgaggaacagcggccgtcactgaaggaagcaaagtgcctttccctggtaatggacgatgagatagagagtgaggctaagaaagaatctttatccccaggcaaacttaaattgacattcgaagagctggagaggcagcggcaagagaatagaaagaagcaagcagaagaagaagccagaaaacgcttggaagaggagaagagagccttcgaagaggccaggagacaaatggtgaatgaggatgaagaaaatcaggacactgctaagatctttaagggctatcgcccgggaaaactgaagctgtcctttgaggagatggaacggcaacggagagaggatgagaagcggaaagccgaggaagaggcccgccgtcgcatagaggaagaaaagaaagccttcgctgaggcccgaagaaacatggttgtggatgacgactcccccgagatgtataagaccatttcccaggaatttctaactcctggcaagcttgagattaatttcgaagagttgctcaagcagaaaatggaagaagagaaacgacgcaccgaggaggaaagaaagcacaaactagaaatggagaagcaggagttcgaacaacttagacaggaaatgggcgaggaggaggaagaaaacgagactttcggactcagccgagagtacgaggagctgatcaaattaaagagatcaggcagcattcaggccaagaatctcaaatccaagtttgagaagatagggcagctgtcagaaaaggagattcagaaaaaaatagaggaggaacgggcgcgacggcgggccatagatctcgaaattaaagagcgggaagccgaaaactttcatgaagaagatgatgtggacgtcaggcccgccaggaagagcgaagccccctttactcataaagtgaatatgaaagcccggttcgagcagatggccaaggctcgggaagaagaagaacagcggaggatcgaggaacagaagctcttaagaatgcagtttgagcagagagagatagacgccgctctgcagaagaaacgcgaggaagaggaggaggaggaggggtctataatgaatggtagtacagcagaggatgaggaacagactcggagcggagctccttggtttaagaaaccgctgaaaaacaccagcgtggtggactctgaacccgtgagatttacagtgaaggtcacaggtgagcctaagccggagatcacttggtggttcgagggcgaaattctccaggacggcgaagactaccagtatatcgaacgtggcgagacgtactgcctctacctgcctgagacattccccgaagacgggggagagtatatgtgtaaagccgttaataacaagggctcagccgcaagcacatgcatcctcactattgaatccaagaactag

SEQ ID NO: 126420 - DNA, 2028 bp, synthetic construct
  misc_feature 1..2028: note = Description of Artificial Sequence: Synthetic coding sequence
  source 1..2028: mol_type = other DNA
atgaatgacatttcgcagaaggcagaaattctactcagttctagcaagccggtgcccaagacgtacgtccctaagctcggcaaaggagatgtgaaagataaattcgaagcaatgcagcgcgcccgcgaagagcgcaatcaaaggcggagtcgggacgagaagcaaagacggaaggagcagtatatcagggagagggagtggaataggcggaagcaggagattaaggaaatgttggcgtcagacgatgaggaagacgtctcaagcaaggtggaaaaggcctatgtccccaagctgaccgggacggttaaaggccgatttgccgaaatggagaagcagcgacaagaggagcagaggaaaaggactgaagaagagcggaagaggagaattgaacaggatatgctggaaaagcggaagatccaacgtgagctggccaagagggccgagcagattgaagatatcaacaacacgggcactgaatcagcttccgaggagggcgatgattcactgttaattactgtcgttcctgttaagtcctataagacctccggcaaaatgaaaaagaactttgaggatttagaaaaagagagagaggaaaaagagagaataaagtatgaggaagataaaaggatccgctacgaagagcaaaggccttccctgaaagaggctaagtgtctctccctcgttatggatgacgagatagagtccgaggccaagaaggagtctcttagccccgggaaattaaagctgacttttgaggagttggaacgccagcggcaggaaaatagaaaaaagcaggccgaagaggaggcccggaagcggctggaagaagaaaaacgggctttcgaagaggcacgtcggcagatggtaaatgaggatgaggagaatcaggacacagctaaaatctttaaggggtatagacccggtaaactgaaactatccttcgaggagatggagaggcagcggcgcgaagacgaaaaaagaaaggccgaggaggaggcaaggaggcgtatagaggaagagaagaaggcctttgcagaggccaggcggaatatggtcgtcgatgacgattctccagagatgtacaaaactatctctcaggaattcctaactcctggaaagctcgaaattaactttgaggaacttctcaaacaaaaaatggaggaagagaaacgccggactgaagaagagcggaaacataaactcgagatggagaagcaggagtttgagcagctccgacaggagatgggagaagaagaggaggagaacgaaacgttcggacttagccgcgaatacgaggaactgatcaagctgaagcggtccggctcaattcaggcgaaaaacctgaaatccaagttcgagaagattggccagttatccgagaaggaaatccagaagaagatcgaggaagagcgcgcacgcagacgtgccatcgatctcgaaattaaggagagggaggctgaaaacttccatgaagaagatgatgtggacgtcaggcccgcacgcaagtcagaagccccctttacacacaaggtgaacatgaaggcccgttttgagcagatggcgaaagcccgagaggaggaagaacagcggcggattgaggagcagaaactcctgcggatgcagttcgagcagagggaaattgatgccgccctgcagaagaagcgcgaggaagaagaggaggaggagggcagcataatgaacggcagcacagcagaggatgaggaacaaacccgctcaggggccccttggtttaagaaacctctaaagaacacatctgtggtggattccgaacccgttcggttcaccgtgaaggtcacaggcgagccaaagcctgagattacatggtggtttgagggagaaatcctgcaagacggggaggattatcagtacatcgagcggggcgagacatactgtttatacctgccggagactttccccgaggatggcggagagtatatgtgcaaggcagtgaacaataagggatctgctgcctcgacatgtatactcactatcgagagcaaaaactag

SEQ ID NO: 126421 - DNA, 1731 bp, synthetic construct
  misc_feature 1..1731: note = Description of Artificial Sequence: Synthetic coding sequence
  source 1..1731: mol_type = other DNA
taagtcaaaggacggtttgcggaaatggagaagcagcgccaggaagagcagaggaaacggaccgaagaagaaagaaagcgccggatcgagcaggatatgctcgaaaaacgcaaaatccagagggagctcgccaagcgcgctgaacagatagaagatattaataataccgggaccgagtcagcctctgaagaaggtgacgactctcttctcatcaccgtagtccccgtcaaaagttacaagaccagtggaaagatgaagaaaaacttcgaggacctggaaaaagaaagggaagagaaggagcggataaagtacgaagaggataagcggatccggtacgaggaacaacggccaagtctcaaggaggcaaagtgcctctccctggtcatggatgatgagatcgaatctgaagctaaaaaggaatccttgagtccgggaaagctaaagctgaccttcgaggagctggagcgccagcggcaggagaacagaaaaaagcaagccgaggaagaggcacggaagaggttggaagaagaaaagcgggcttttgaagaggctaggaggcaaatggtgaacgaggacgaggagaaccaggatacagccaaaatctttaaggggtaccgtccaggcaaacttaaactgtcattcgaggaaatggagaggcagcggcgggaggacgagaaacggaaagctgaagaggaagccaggcggagaattgaagaggaaaagaaggcctttgccgaggctagacgcaacatggtcgtggacgatgatagcccggagatgtacaaaacaatttcacaggaatttctcactcccgggaaattggagatcaactttgaagagctcttgaaacagaaaatggaagaggagaaaaggcgaaccgaagaggagaggaagcacaaactcgaaatggagaaacaggagttcgagcagctgcgccaagaaatgggggaggaagaagaagaaaatgaaacttttggactcagccgtgagtacgaggagctgatcaagttgaaacgaagtggatccattcaagccaaaaacctgaagagcaaatttgaaaagattgggcagctgtctgagaaagaaatccagaaaaagatcgaggaggagagagctaggcgtagggccatagacctggagattaaggaacgcgaagctgagaatttccacgaggaggacgacgtggacgttaggcccgcacggaagagcgaggcacctttcactcataaggttaatatgaaagctcgtttcgagcagatggctaaagcccgggaggaagaagagcagcggagaatcgaagagcagaaactgctgcgcatgcagtttgaacagcgggagattgacgccgctcttcaaaagaagcgcgaagaagaagaggaagaggagggatccattatgaatggtagcacggccgaggacgaggagcagaccaggtccggggcgccttggtttaagaaacccctgaaaaacacctctgtggtcgattcggagcctgtcagatttacagtaaaagtgactggggagcccaagcctgaaatcacctggtggttcgagggggagatcctacaagacggcgaagattatcagtatattgaacgtggcgaaacctattgcttataccttcccgagactttccctgaggatggcggagagtatatgtgcaaggcagtcaataacaaggggtcggcagcgtcaacctgcatcctcacaatcgagaccgacgattattag

SEQ ID NO: 126422 - DNA, 966 bp, synthetic construct
  misc_feature 1..966: note = Description of Artificial Sequence: Synthetic coding sequence
  source 1..966: mol_type = other DNA
atgaacgacatctcgcaaaaggcagaaatcaaggagatgttggcctccgatgacgaggaagacgtgagtagcaaagtcgagaaggcttacgttcccaagttgaccggcaccgtaaaagggcggttcgccgagatggagaagcagaggcaggaagaacagcgtaagagaactgaggaggaacgtaaacggcggatcgagcaggatatgcttgaaaagcggaagatacagagagagctggctaaaagggccgaacaaatagaggatattaacaacacaggcaccgagagcgcttccgaggagggcgacgattccttgttgattacagtggttcctgtgaagagctacaagacctccggtaaaatgaaaaaaaatttcgaagacttggagaaggagagagaggagaaagaaagaatcaaatacgaggaggacaagcggatcaggtacgaggagcagcggccatctctgaaggaggcaaagtgcttatccctggtaatggacgacgagatagagtccgaagctaaaaaagaatctttatctcctggcaagctcaagctcacattcgaagagttggagcgccagcgacaagaaaaccgcaagaagcaggccgaggaagaagctaggaagaggctggaggaggagaagcgggcatttgaggaggcccgaagacaaatggtgaacgaagacgaggagaatcaagataccgcaaagatttttaagggatatagacctggaaagctgaagctgtccttcgaggagatggaacggcaacgacgggaggacgagaagcgaaaagctgaggaagaggctcggaggagaatagaggaagaaaaaaaggcgttcgccgaggctaggcggaatatggttgtggacgacgatagtcctgaaatgtataaaaccatctcccaggaattcctgacccctggaaagctggagatcaatttcgaggaactccttaagcaaaagtag

SEQ ID NO: 126423 - DNA, 1308 bp, synthetic construct
  misc_feature 1..1308: note = Description of Artificial Sequence: Synthetic coding sequence
  source 1..1308: mol_type = other DNA
atgaacgatatatctcagaaggccgagatcttgctgtcatcttctaagcccgtcccgaagacgtacgtgcctaagttgggaaagggcgatgtgaaagacaagttcgaagcaatgcaaagagctcgggaggaacggaatcagcgacgatctcgggatgaaaagcaaagacggaaggaacagtacattcgtgagagagagtggaaccgaaggaaacaggagatcaaagaaatgttggcctctgacgacgaggaggacgttagttctaaggtggagaaagcctacgtgcctaagctcactgggacagttaaaggtagattcgccgagatggaaaaacagcgccaggaggagcagcggaagcgcactgaggaggagcggaagcgtcgtatagaacaggacatgctagagaagcggaagatccagcgagaactggccaagcgagcggagcaggagggtgacgatagcctgctcataacagtagtcccagtgaaaagctacaagaccagtggcaagatgaagaagaattttgaggatctcgaaaaggaacgggaggaaaaggagcggataaaatatgaagaagacaagcgcattcgctacgaagagcaacgaccctctctgaaagaggccaagtgtctttccctcgttatggatgacgagatagagtctgaggctaaaaaagaaagtctcagcccgggtaagctcaaactgaccttcgaagaactggaaagacaaagacaagaaaaccgaaagaagcaggcagaggaagaggctcggaaaagactggaggaagagaaacgggctttcgaagaggcacgccggcagatggtaaacgaggatgaggagaaccaagacaccgctaagattttcaaaggctatcgcccaggtaaactgaaactttcatttgaagagatggagagacagagacgggaggacgagaaacgtaaggcggaagaagaggcacggaggcggatcgaagaggaaaagaaggcctttgctgaagcccgccggaacatggtggtggacgacgactcaccagaaatgtacaagaccatcagccaggagtttctgacgcccgggaaactcgagatcaattttgaagagctgctcaagcagaaaatggaagaagagaagcgtcgaactgaggaagagaggaaacacaagcttgagatggaaaagcaggaattcgagcaactccgccaggagatgggggaggaggaggaggagaatgagacatttggactgtccagagagtacgaagaactcatcaagctgaagcgcagcggatccatacaggcaaagaacttaaagtag

SEQ ID NO: 126424 - DNA, 1989 bp, synthetic construct
  misc_feature 1..1989: note = Description of Artificial Sequence: Synthetic coding sequence
  source 1..1989: mol_type = other DNA
atgaatgacattagccagaaggcagaaatcttgctctcatctagtaaacctgttccgaagacctacgtgcccaagctagggaagggagacgtcaaagataaattcgaagctatgcagagggctcgcgaagagcgcaatcagcgcagatctagagatgagaaacagcgacgcaaggaacagtacattagggaacgggagtggaatcggagaaaacaagagattaaagaaatgctagcaagcgatgacgaagaggacgtctcctcaaaggtggagaaggcctatgtccccaagctgactggtactgtgaaaggtagattcgccgagatggagaagcaaaggcaggaggaacaaaggaagcgaaccgaggaggagagaaaacggcgcatagagcaagatatgctggaaaaaagaaaaatccaaagagaattagctaaaagagctgagcaggaaggagatgatagtttgctcatcaccgttgtgcctgtgaaatcatataagacgagtgggaagatgaagaagaacttcgaagacctcgagaaggagagggaggagaaagagcgtattaagtacgaggaagataagaggatcagatacgaggagcagaggccatccctcaaagaggctaagtgtctctctttggttatggacgatgaaatcgagtccgaagctaaaaaggaaagcctatcgcccgggaaactgaagctcaccttcgaagagctggagagacagagacaggaaaaccgtaagaaacaggccgaagaggaagcccgtaagaggctggaggaggagaagagagcctttgaggaggcgagaaggcaaatggtcaatgaagatgaggagaaccaggacacagcaaagatattcaaagggtatcggccagggaaactcaagctgagctttgaggaaatggagaggcagcgtagggaggacgaaaagcgcaaggctgaggaagaagctcgtagacgaatcgaagaagaaaagaaagcgtttgctgaagctcggcggaacatggtcgtggacgatgactcacccgagatgtacaaaactattagtcaggagtttttaacaccagggaagctggaaattaattttgaggagcttctcaaacagaaaatggaggaagaaaagagacgaactgaggaggagaggaagcacaaactggaaatggaaaaacaggaattcgagcagttacgccaagaaatgggagaagaggaagaggaaaatgagacctttggcctgtcgagagagtatgaagaactgattaagctcaaacgcagcgggagtatacaagcaaaaaatctgaagagcaaattcgagaagatcgggcagttgtcagaaaaagagatccagaagaaaattgaagaagaaagagcgagacgccgggcaattgatctggagatcaaagagagggaggctgagaatttccatgaagaagacgacgtcgatgtaaggccagccagaaaaagcgaggccccattcactcacaaagtgaatatgaaagccaggtttgaacagatggccaaggcgcgtgaggaggaggagcagcgcaggatcgaggagcagaaactcctgagaatgcaatttgagcagagagagatcgatgcagctctccaaaaaaaaagagaggaagaagaggaggaggagggatcaataatgaatggttccaccgccgaggatgaagaacaaacgcgatccggagctccctggtttaaaaagccattgaagaacacttcggtcgtggattcggaacctgtccgttttacagtgaaagttactggtgaacccaagcctgagattacttggtggtttgaaggcgagatcctgcaagatggggaggattatcagtatatagaacgtggcgaaacatactgcctgtatcttcctgagacctttcccgaggatggcggcgagtacatgtgcaaagcggtgaataataaaggctctgccgcctccacttgtatcttaacaatcgagacggacgactactag

SEQ ID NO: 126425 - DNA, 813 bp, synthetic construct
  misc_feature 1..813: note = Description of Artificial Sequence: Synthetic coding sequence
  source 1..813: mol_type = other DNA
atggagaatcagccagtccggtggcgcgctttacctggcctccctaggccccccggcctgcccgcagcgccttggctgctgttgggagtgctcttactgcctggtacacttcgcctcgccggcggacagagcgtgacgcacacgggtctgcctattatggcatcgctggccaacacggccatttctttctcctgtcggatcacatacccttacacaccccagtttaaagtgttcacagtcagttattttcacgaagacctgcaaggacagcggagcccaaagaagcctaccaattgccaccccggcctggggaccgagaaccaaagccacactctggactgtcaagtgactttagttctgcccggtgcatccgcgacaggcacctattattgctctgtgcactggcctcattccaccgttcgtgggtcaggtacttttatactcgtaagggacgccgggtatagagagcctccacagtctccccagaagttgctgctgtttggttttacgggtctgctgagtgtactcagcgtggtcggaaccgcactgctgttgtggaataagaaacgtatgagaggccccggaaaggatcccacgaggaagtgtccagacccccgcagcgctagctcgccaaagcagcatccgtcagagagcgtgtataccgcactgcagcggagagagaccgaagtgtatgcttgcatcgaaaacgaggacggctcatctcccaccgcaaaacagtctcccttgtcccaagagcgccctcaccgcttcgaggacgatggtgagttgaacttggtgtatgagaacttgtag

SEQ ID NO: 126426 - DNA, 1248 bp, synthetic construct
  misc_feature 1..1248: note = Description of Artificial Sequence: Synthetic coding sequence
  source 1..1248: mol_type = other DNA
atggccccggtgagtgggtcacggtcccctgacagagaggcctccggttctggggggcggagaaggtccagcagtaaatcacccaaaccctcaaagagtgctcgctccccccgggggcgtagatctcggagccacagctgttctaggtctggtgacaggaacggtctaactcaccagctcggggggctgagccagggttctcgcaatcagtcctaccggagtcgaagtcggagtcggagcagggaaagaccctcagctccccggggcatcccattcgcctcggctagtagcagcgtgtattacggatcttattcacggccgtacggtagcgacaaaccctggccctccctattggacaaagagagagaggagagcctgagacagaaacggctgtcagaaagagagcgcatcggcgagctcggtgcgcctgaggtttgggggctgagtcccaagaatcccgagcctgacagcgacgaacacactcccgtagaggacgaggaacctaaaaaatctaccacaagcgccagtactagcgaggaagaaaagaaaaagaaatcgtctagaagtaaagaaaggtctaaaaaaagacgaaaaaaaaaaagtagcaagcggaagcataaaaaatattccgaagatagcgacagcgactctgactctgagacggactcctcagatgaagacaataagagacgggccaaaaaggccaaaaagaaggagaaaaaaaagaagcaccgctccaagaaatacaaaaagaagagaagtaagaaatcgcgtaaagaatcctctgacagcagctcgaaggaaagtcaggaggagttcctggagaatccctggaaggaccgaaccaaggctgaggagccatctgacctgatcggtcctgaagcccctaagaccctcacctctcaggatgataagcccctgaattacggtcacgcactgctcccaggcgaaggcgcagctatggccgagtacgtcaaagccgggaagcgcatcccaagacgaggtgagattggcctgaccagtgaggagatcgcttcctttgaatgctccggctacgtgatgagcggtagcagacaccgaagaatggaggcggtgagactgcgcaaagaaaatcagatctattccgcagatgagaagagggccctggcctcgtttaaccaggaggagaggcggaaaagggaaaacaagatcctagccagttttagggagatggtgtataggaaaactaaagggaaggacgataaatag

SEQ ID NO: 126427 - DNA, 2073 bp, synthetic construct
  misc_feature 1..2073: note = Description of Artificial Sequence: Synthetic coding sequence
  source 1..2073: mol_type = other DNA
atggagaagattctgcagatggccgagggcatcgatataggcgagatgccctcttatgacctggtactgtcaaagccttccaagggccagaaacgccacttgtccacgtgtgatggtcagaatcccccaaagaagcaggctggctctaagttccacgcccgacctaggtttgaacccgtacacttcgtagcgagtagctcaaaggatgagcggcaagaggacccatatggtccccaaactaaagaggtaaacgagcagactcacttcgcatccatgcctcgagacatctaccaggattatacccaggactccttctccatacaagacggcaactcacagtactgtgacagcagcggcttcatcttaacaaaagatcagccagtcacagccaacatgtatttcgacagcggaaatccagccccgagcaccacctcccagcaggccaactcccaaagtacaccagagccctcccccagccagacttttccagaatcagtggtcgccgaaaagcagtactttatcgagaagcttacagctactatatggaagaaccttagcaaccccgaaatgactagcggctcggacaagatcaattacacatatatgctgacccgatgcatacaggcctgcaagaccaatcccgaatacatttatgctcccctgaaggagatacctcctgctgatatcccaaagaacaagaagttactgactgacggttatgcctgtgaagtccgctgccagaacatctacctgaccacagggtatgctgggtcaaaaaacggctctcgagaccgagcaaccgagctggcagtcaagctcttacaaaaacggatcgaggtacgcgtggtgagaaggaaatttaaacacaccttcggggaggatctcgtggtttgccaaataggcatgagctcatacgaatttccacctgctctcaagccccccgaggatcttgtggtacttggtaaggacgccagcggccagcccatttttaatgcttcggccaagcactggaccaacttcgtaataaccgagaacgctaatgatgcaatcggaatactcaataattccgcaagcttcaataaaatgtcaatcgaatataagtacgaaatgatgcccaaccggacatggaggtgccgtgtgtttctgcaggatcattgtctcgctgaaggatacggcaccaaaaagacctccaagcatgcagccgcggacgaagccctgaagatcttgcaaaaaacccaaccaacgtatccaagtgtgaagagcagtcagtgtcacaccggtagtagcccccgagggagtggtaagaaaaaggatattaaagacctagtcgtctacgagaactccagtaatcccgtttgcacactcaatgacacagctcaatttaatcgcatgacagtagaatacgtgtatgaacggatgacaggacttcggtggaagtgtaaagttatcctcgagagcgaggtcatcgccgaagccgtgggagtcaaaaagaccgtaaaatatgaggctgctggagaggccgtcaagaccctgaaaaagactcagcctaccgtgattaacaatttgaaaaagggcgcagtggaggatgtaataagtcggaacgagatccagggacgctccgcagaagaggcctacaaacagcagataaaagaagataatattggcaatcaactgctccgaaagatggggtggacgggaggtggactgggcaagagtggagaagggataagggaacccatctctgtgaaagaacaacataagcgcgaaggcctcggcctggatgtcgaaagagtcaacaaaatcgctaaaagagacatcgagcaaataataaggaactacgcacggtcagaaagccatacagacctgacattttctcgtgaattaacaaacgatgaacgcaaacaaatacatcaaattgctcagaagtacggcctcaagtcaaaatcccacggcgtagggcatgaccggtacctggtcgtgggcagaaaacgtaggaaggaggatcttttggaccagctcaagcaggaaggacaagttggtcactatgaactggtgatgcctcaggccaattag

SEQ ID NO: 126428 - DNA, 2073 bp, synthetic construct
  misc_feature 1..2073: note = Description of Artificial Sequence: Synthetic coding sequence
  source 1..2073: mol_type = other DNA
atggaaaagattttgcagatggccgaaggcattgacatcggcgagatgccaagctatgatctcgtcctgtctaagccatctaaaggtcagaaacggcatttgtcaacttgtgacggacagaaccccccaaagaaacaggccggaagcaagttccacgccaggccacgctttgagccagttcacttcgtggcctcttctagtaaggacgagcgccaggaagatccctatggcccccagaccaaagaagtgaacgagcagacacattttgctagtatgccgcgagatatttaccaggattacacccaggatagtttctctatacaggacggtaacagccaatattgtgactcctccggcttcattttgacgaaagatcaaccagttaccgctaacatgtacttcgactccggcaatcctgccccttctaccacaagccagcaggccaatagccaaagcactccagaacctagcccttcccagacttttccagaaagtgtcgtagccgagaagcaatacttcatcgagaagctgacagcaacaatttggaaaaatctgtctaacccagagatgacctctgggtctgataagattaattatacctacatgcttactcgatgcattcaagcatgcaaaaccaatcccgagtacatttacgccccccttaaggaaattcccccggcagacattcctaagaacaagaagctactgacagacggttacgcgtgcgaggtgagatgccagaatatctacctgacaaccggctatgccggctcaaagaacgggtcaagagatagggcgaccgagttggcggtcaagcttctgcaaaaacgcatagaagtgcgggtcgtgcggcggaagtttaagcatacattcggagaggatctagtggtctgtcagatcggcatgtctagttatgagtttccaccagcactgaagcccccagaagatttggtggtactcggaaaggacgcctcaggacaacccatttttaacgccagcgccaaacactggaccaacttcgtgatcactgagaatgctaacgacgccattggtattctgaacaatagcgcctcgttcaataagatgagtattgaatataaatatgagatgatgccaaataggacctggcgatgccgcgtgttcctccaggaccattgcctggccgagggctatggaacgaagaaaacatcaaagcatgcagccgccgacgaagccttaaaaattttgcaaaaaactcagcccacctaccctagtgtgaagtcttctcagtgccacaccgggtcttctccgcgagggtccggaaaaaaaaaggacattaaggacctcgtggtgtatgagaacagctccaacccagtgtgcaccttgaatgataccgcgcagttcaacagaatgaccgtcgagtatgtctacgagcggatgacgggcctaagatggaagtgtaaagtgatccttgagtctgaggttattgccgaagcagtcggcgttaagaaaaccgtgaaatatgaagccgcaggggaagcggttaaaaccctcaaaaaaacacaacctactgtcataaataacctgaagaaaggggctgtggaggatgtgatctcccgcaatgaaatacagggccggtctgccgaagaagcatacaagcagcagataaaagaggataacatcggtaaccaactcctccggaaaatggggtggactggaggtggcctgggaaagagcggcgaaggtattagagaaccaataagcgttaaggagcaacacaaaagggaggggttgggactcgacgtggaacgggtgaacaaaattgccaaacgtgatattgagcagattatccgcaattatgccaggtcggaatcccacaccgacttgactttctcaagggagctaaccaacgacgaacgcaaacagattcaccaaatcgcccaaaaatatggcctgaaatctaagagccacggggtgggccatgacagatatctggtggtgggtcggaagcggagaaaggaggatctcctggatcagctcaaacaggagggccaggtcggacactacgagctggtgatgccgcaagccaattag

SEQ ID NO: 126429 - DNA, 2118 bp, synthetic construct
  misc_feature 1..2118: note = Description of Artificial Sequence: Synthetic coding sequence
  source 1..2118: mol_type = other DNA
atggggttcatgttgcccctaatctttaggtattcgcccaggctcatggagaagattctgcagatggcagagggaatcgatatcggagaaatgccctcctatgatttggtcctttcgaaaccctctaagggacagaaaaggcatctgagcacatgtgatggccagaatcctccgaagaagcaggccggctccaaattccacgcacgcccaaggttcgaaccagtgcattttgtagccagctcttccaaagatgagcgccaggaagacccatacggaccacagactaaggaagtaaacgaacagacccacttcgctagcatgccacgggacatttaccaagactacacgcaggattccttctctatccaagacggcaattcacagtattgcgacagctccggcttcattttaaccaaggatcagcccgtcacagcaaacatgtatttcgatagtgggaatccagcaccttctacaactagccagcaggcaaattcgcagtctacacctgagccaagcccctcacagacattcccggaaagcgtggtggccgagaaacaatatttcatcgagaaactcactgctaccatttggaaaaatcttagcaaccctgagatgacatccggtagcgataagattaactacacttacatgctcaccaggtgtatccaggcatgcaagacaaatcccgaatatatttatgcccccctcaaggagattccgccagccgatattccaaaaaacaaaaagctgctcaccgatgggtacgcctgcgaggtgaggtgtcagaacatatacctgaccacgggctatgctggcagcaagaatgggagcagagaccgtgctactgaacttgcagtcaaactgcttcagaaaagaatagaggtgcgagtggtcagaaggaaatttaagcacacctttggggaagacctggtggtatgccagataggcatgtcttcctacgagtttcctcccgcgcttaagccgcccgaagacctggtggttttgggcaaggacgcatctggacagcccatcttcaacgcatcagctaagcattggactaactttgttatcaccgagaacgccaatgatgccatcggcatcttgaataacagcgcctcttttaacaagatgagtatcgagtataagtatgagatgatgcccaacagaacctggaggtgtagggtctttttacaggaccactgcctggctgagggctacggtaccaagaaaaccagtaaacacgccgctgctgacgaggccctaaaaatcttacaaaaaacccagcccacatatcccagtgtgaagtcgagtcaatgtcataccgggtcctcaccccgcggctcggggaagaagaaagacatcaaagacctcgttgtgtacgaaaactcttcaaaccccgtttgtaccctaaacgatacagcccagtttaaccgcatgacagtggagtatgtctatgaaaggatgactggcttgcgatggaaatgcaaagtcattttagaatccgaagtcatagccgaagctgtcggcgtgaagaagaccgtcaaatatgaggccgccggcgaggcagtcaagaccctgaagaagacccagcctactgtgattaataatctgaagaaaggcgccgttgaggatgttattagccgtaacgaaattcagggtaggtcagccgaggaagcttacaagcaacagatcaaagaagacaacattggcaatcagcttcttcgcaagatggggtggactgggggtggactcggaaagagtggcgaagggatccgagagcctatctctgtcaaagagcagcataagagagaaggcctgggcctcgatgtggaacgtgtgaataagatcgctaagcgcgatattgaacagattattagaaattatgcacggtcagagagtcacactgatctgactttttctagagaactcactaacgatgaacgcaaacagatccatcaaatagcccagaagtatgggctgaaaagcaaaagtcatggagtgggacacgatcgctacctagtcgtcggccggaagcggcggaaggaagatctgctcgaccagctgaagcaagagggccaggtgggacactacgagctagtaatgccacaagctaactag

SEQ ID NO: 126430 - DNA, 570 bp, synthetic construct
  misc_feature 1..570: note = Description of Artificial Sequence: Synthetic coding sequence
  source 1..570: mol_type = other DNA
atgctcctacgtgccgcgtggaggagggctgccgtagccgtgactgctgctcccggacctaagcctgcagcaccaactcgcggtctccgactacgcgtcggcgacagagcccctcagtctgccgtgccggccgacaccgccgcagcgcccgaagtggggcccgtgctgcggcctttgtatatggatgtgcaggccacaacccctctggatccgagggtgctcgatgccatgttgccctaccttatcaattactatggaaatccccattcccgcactcacgcttacggctgggagtcagaggctgccatggagcgagctcgccagcaggttgcatctctcatcggagcagacccgcgagaaattattttcacctcaggggctaccgagtcaaacaatattgccataaaaacggaaagtcattctgtaatacaggccggggtgcagtggcatgatctggattccctgcaagccccaccccccgggtttaccccctttagttgcctcagcctactatccagctgggactaccgcaggccccccccccacccagctaactttctttacttctag

SEQ ID NO: 126431 - DNA, 1374 bp, synthetic construct
  misc_feature 1..1374: note = Description of Artificial Sequence: Synthetic coding sequence
  source 1..1374: mol_type = other DNA
atgctactcagagcagcttggaggcgcgcagctgtggctgtgaccgcagctccaggccctaagccggcagcgccaacacgagggctacgtctccgtgtgggcgatcgggcacctcagtccgccgtcccggcagacaccgcggccgccccagaagtcggccccgtgctgagaccactgtatatggacgttcaagccactacaccattagatccaagggttctggatgccatgttgccctaccttattaattactacggcaaccctcattcaagaactcacgcttacggctgggagtccgaagcggccatggagcgcgctagacaacaggtagccagtcttattggggccgaccctcgggagatcatcttcaccagtggcgcaacagagtctaacaacatcgccattaagggagtggccagattctatcgatccagaaaaaagcacctgataaccacccaaaccgagcataaatgcgtgctcgatagctgtcgctctctggaagcggaggggttccaggtgacgtatctgcccgtacaaaagtcagggatcatcgatctgaaagagttagaggcggccattcagcccgatacctcactggtgtctgtaatgacagtgaacaatgagatcggggtcaagcagccgatcgctgaaattggccggatctgttcttcccgcaaggtatacttccatacagatgcagcccaggccgtgggcaagatccccctggatgtgaatgatatgaaaatcgatctgatgtcaatctcagggcacaaaatctacggccctaaaggggtgggcgccatctatattcggaggcggccgagagtgagagtcgaggctctccagtccggaggggggcaggaacggggtatgagatccgggaccgtgccaacccccctggtagtcgggctgggtgccgcttgcgaagtggcccagcaagagatggagtacgatcacaagcgcatctccaaattatctgagcgcctaatacagaacattatgaagtccctgccagacgtggtcatgaacggcgacccgaagcatcactacccaggttgcattaatctcagcttcgcatacgttgagggagagagtctcttgatggcccttaaagatgtagcattgagtagcgggtcggcctgcacatccgcttccctggagcccagctatgtgttacgggctatcggtacggacgaggacttggctcattcttccattagattcggcatcggacgcttcaccactgaagaggaagtggactacaccgtggagaagtgcatccagcatgtcaaacggctgagggagatgtccccgctgtgggagatggtacaggatggaatcgacctaaagagtatcaaatggactcaacactag

SEQ ID NO: 126432 - DNA, 486 bp, synthetic construct
  misc_feature 1..486: note = Description of Artificial Sequence: Synthetic coding sequence
  source 1..486: mol_type = other DNA
atgttactcagggcagcttggagaagagccgcagtcgcggttactgccgcccctgggcctaagcccgccgctcctactaggggccttaggctccgcgtgggggacagagcgcctcaatcagctgttcccgcagacaccgccgccgcccctgaagttgggcccgttctacgcccgctgtatatggacgtgcaggccacgacgcctctggacccaagggttttagacgcaatgctgccatatttaatcaattactacggcaatccccacagccgtacgcatgcctatggctgggaaagcgaagcggccatggagcgagccagacaacaggtcgcctccctgatcggcgcggatccccgagagatcatctttacctccggagcaacagagtcaaacaatatagctattaaaggggtagcacggttttacagaagcagaaaaaagcatctgattaccaccctttcgggaggggcgggcgggtgtgtttag

SEQ ID NO: 126433 - DNA, 768 bp, synthetic construct
  misc_feature 1..768: note = Description of Artificial Sequence: Synthetic coding sequence
  source 1..768: mol_type = other DNA
atgacggtcaacaacgaaatcggggtcaaacaacctatcgccgaaataggaaggatctgctcatcccggaaggtgtacttccatacggacgcagcccaagccgtgggaaaaattcctctcgatgtgaatgacatgaagattgatctaatgtctatcagcggccacaagatatacgggcctaagggagtgggggccatttatatcaggcgacgaccccgagtcagggtggaggcgctgcaatctggcggagggcaggaacggggcatgaggtcaggaacggttcctacaccgctcgtggtgggcctcggagccgcctgcgaggtggcgcagcaggaaatggagtacgaccacaaaagaatatccaagttgagcgagagactcatacaaaacataatgaaatccctgcccgatgttgtcatgaacggcgaccccaagcaccattatccgggctgcattaatctgtccttcgcttacgtagagggcgaatccctactcatggctctcaaggatgttgcactcagtagcggtagcgcatgcacatccgcctcactggagcccagttacgtcctgagggcgatcggaacggatgaagacctcgctcattccagtatccgattcgggattggcagattcaccaccgaggaagaggtcgactatactgttgagaagtgtattcaacacgtcaagcgtctccgcgaaatgtccccattgtgggaaatggtccaggacggtatcgacctcaagtcaatcaagtggacacagcattag

SEQ ID NO: 126434 - DNA, 1221 bp, synthetic construct
  misc_feature 1..1221: note = Description of Artificial Sequence: Synthetic coding sequence
  source 1..1221: mol_type = other DNA
atgctgttaagggccgcctggagaagggccgcagtggctgtcacagcggcccccgggccaaaacctgcggcccccacaagagggttgcgcctgagagtgggcgacagggccccacagtcagcggtgcctgccgacacagcagccgcccccgaagtgggccccgtcctccggccactgtatatggatgtgcaggccacaaccccgcttgacccgcgggtactagacgctatgctgccgtacctgatcaactattacggaaaccctcattcccggactcacgcatacgggtgggagagcgaggctgccatggaacgagccagacagcaggtggcgtctcttattggcgccgatccgcgcgagattatcttcacatctggggccacggagtcaaacaacatcgcaatcaaggaactggaagctgccattcagcctgacacttctctggtctcggtaatgactgtcaataatgagatcggtgtgaaacagcccatagctgaaatcggtcgaatctgctcctctcggaaggtatactttcacactgatgcggcccaggcagtgggaaagattcccctcgacgttaatgatatgaaaatcgatttaatgtccatttctgggcataagatctatggacccaagggtgtcggcgcaatctacattcgacgccgccctagggtgcgcgtagaggccctgcagagcggaggggggcaggagagagggatgcgctctggcaccgtccccaccccactggttgttggactcggcgcagcatgcgaagtagcccagcaggaaatggagtatgaccacaaacgtatcagtaaactgagtgagagactgattcagaatatcatgaaaagcttgccagatgttgtaatgaatggggatcctaagcatcactatcctggctgcatcaacctctcattcgcctatgtagagggagaatccctgctcatggctttaaaagatgtagcactctcctccggcagcgcctgcaccagcgctagcctcgaaccaagttacgtcctaagggccatcggcaccgatgaggatctggcccatagctcaatcagattcggcatcggccgcttcaccacggaggaagaggtcgattataccgttgagaagtgcattcaacacgtcaagcggttaagagaaatgtcgcccctgtgggagatggtgcaagacggaatcgatctcaagagcatcaaatggacacagcattag

SEQ ID NO: 126435 - DNA, 693 bp, synthetic construct
  misc_feature 1..693: note = Description of Artificial Sequence: Synthetic coding sequence
  source 1..693: mol_type = other DNA
atgctcaaaaatccttatacaattaaaaagcagcccctgcatcagtttgtccagcgccccctgttccccctgcctgctgccttttaccacccagttcgctacatgtttattcaaactcaggacactcccaatccgaattcgctgaaatttatacctggcaaacctgtgctcgaaacgagaaccatggatttccccaccccggcggccgccttcagaagtccccttgcgcgacagctgttccggattgaaggtgttaaatccgtattcttcggtcctgacttcatcacagttaccaaagaaaacgaggaactcgactggaacttgttaaaacccgacatctacgctaccattatggattttttcgctagcggtcttcctctggtgactgaggaaacgccttctggagaggcagggtcagaggaggatgatgaagttgtggccatgattaaagaacttctcgataccagaatcagaccaaccgtgcaggaggatggcggcgacgtcatatataaaggctttgaggacggaatcgtacagcttaaactgcaagggtcttgtacttcatgccctagcagcattataaccctgaagaatggcatccagaatatgctgcagttctatattcctgaagtagagggcgtcgagcaggtgatggacgacgaatctgacgagaaggaggcgaacagtccttag

SEQ ID NO: 126436 - DNA, 342 bp, synthetic construct
  misc_feature 1..342: note = Description of Artificial Sequence: Synthetic coding sequence
  source 1..342: mol_type = other DNA
atggattttttcgcctccggacttcccttagtgacagaggagacccccagcggcgaagctggctctgaagaggacgacgaggttgtagccatgatcaaggagctgctcgatacgcgcatacgacctaccgttcaggaggatggcggagatgtaatatataagggatttgaggatggtattgtccagctgaagctccaagggagctgcacctcatgtccgtcaagcataatcacgctgaagaatggcatccaaaacatgctgcagttttacattccagaggtcgagggagtcgaacaggttatggacgatgaaagtgatgaaaaggaggcgaattccccatag

SEQ ID NO: 126437 - DNA, 765 bp, synthetic construct
  misc_feature 1..765: note = Description of Artificial Sequence: Synthetic coding sequence
  source 1..765: mol_type = other DNA
atggcagccaccgccagacggggatggggcgccgccgcagtggcggccgggctgaggcggagattttgtcatatgctgaagaacccttacacaatcaaaaagcagccattacaccagttcgttcagcgccccctattcccactgccggcagccttctaccaccctgtgagatacatgttcatacagactcaggacaccccaaatcctaattctttgaagttcatcccgggcaaacctgtgctggaaactcgtacaatggactttccaaccccggccgccgcctttcgatctcctttggctagacagctttttaggattgagggagtgaaatcagtgttcttcggtcccgacttcatcacagttactaaagaaaatgaggagctcgattggaatctgctgaagccagacatttacgctacgattatggattttttcgccagtggactgccacttgtgactgaagagaccccgtcaggagaggccgggtccgaggaagacgatgaagtggtggccatgattaaagagctgctggatacaagaattcgccccacagttcaggaggacggcggcgatgtgatctataaaggatttgaagacggcattgtgcagttgaaactgcagggttcctgcaccagctgtccatcctcaattatcacgctgaagaacggaatccagaatatgctgcagttctatattcctgaagtggagggagtggagcaggtgatggacgatgagtccgacgagaaggaagcgaattccccttag

SEQ ID NO: 126438 - DNA, 300 bp, synthetic construct
  misc_feature 1..300: note = Description of Artificial Sequence: Synthetic coding sequence
  source 1..300: mol_type = other DNA
atggacttttttgcatcaggtctgccactggtgaccgaagagactccaagtggcgaggcaggctccgaggaggacgacgaagtcgtggctatgattaaggaactgttggacactagaataaggcctaccgtccaggaggatggaggcgacgtgatatataagggttttgaggatggaattgtgcagctgaaacttcaaggttcctgtacgtcctgtccttcttctattattactctgaaaaatggtatccagaacatgcttcagttttatattcctgaagtggagggtgtggagcaatag

SEQ ID NO: 126439 - DNA, 342 bp, synthetic construct
  misc_feature 1..342: note = Description of Artificial Sequence: Synthetic coding sequence
  source 1..342: mol_type = other DNA
atggatttcttcgcctcgggtcttccactggtgactgaggaaacaccatcaggagaggcgggctcagaggaagacgatgaggtggttgctatgattaaagaactcctggacaccagaattagaccaactgtgcaggaagatggcggggatgtcatttataaagggtttgaggacggaatcgtgcaactgaaactacagggatcttgcactagttgtccttcaagtatcatcaccctgaagaatggcatccagaacatgttgcagttttatattcccgaggtagagggtgtggaacaggtgatggacgatgagtccgatgagaaggaggctaactccccatag

SEQ ID NO: 126440 - DNA, 291 bp, synthetic construct
  misc_feature 1..291: note = Description of Artificial Sequence: Synthetic coding sequence
  source 1..291: mol_type = other DNA
atggactttttcgcctctgggttgcctctcgtgactgaagagaccccctcaggagaggccgggtcagaagaggacgatgaggttgtggccatgattaaagagttattggatacgagaatcaggcctacagtgcaggaagacgggggcgatgtgatctataagggcttcgaggacgggatagtgcagcttaagctacagggctcatgcactagctgtcccagttctatcataacactgaagaacgggatccaaaatatgttacagttttatattcctgaggtggagggctag

SEQ ID NO: 126441 - DNA, 1464 bp, synthetic construct
  misc_feature 1..1464: note = Description of Artificial Sequence: Synthetic coding sequence
  source 1..1464: mol_type = other DNA
atggctgctgcactgccccgcacgctgggagagttacaactgtaccggatcctgcaaaaagccaacttgctgtcctattttgacgcttttattcagcaagggggcgatgatgtgcaacagctgtgcgaagccggcgaggaggagttcttagaaatcatggctttggtaggcatggccagcaagcctcttcacgtcagacgcctacagaaggccctgcgcgactgggtgaccaaccccggcctgttcaaccagcccctgactagcctccctgttagcagtatccccatttataagttgccagagggctctcccacatggttagggatttcttgctcatcatatgaaaggagttccaacgccagagagccacatctgaagattcccaaatgcgcggcaactacttgcgtacagtcacttggccaggggaagtctgacgtggtgggctcactggcgctgcaatcagtaggagagagcaggctgtggcaaggtcatcatgctaccgagtcggagcattctctgtcccccgccgatctagggagtcccgcctctcccaaggagagctccgaggcactcgacgcagctgctgccctcagtgtggccgaatgtgtcgagcgtatggcccccaccctgcccaaaagtgatttgaatgaggtgaaggaacttctgaaaacaaataaaaaacttgctaaaatgattgggcacatatttgaaatgaacgatgacgaccctcataaggaagaagaaatccgcaaatatagcgccatctacgggcgcttcgatagcaagcgaaaagacggaaagcaccttacgctgcatgagcttactgtcaatgaagccgcagctcagctgtgcgttaaagacaacgctctcttaactcgaagagacgagcttttcgcgttggcacgtcagatcagccgggaagttacatacaaatacacctaccgtaccactaaatcaaaatgtggcgaacgtgatgaactgagcccaaagcggatcaaggtggaggatggctttcccgactttcaggattcagtacagacactattccaacaggcacgcgctaaaagtgaggagcttgcagccctctcatcccaacagccagaaaaggttatggctaagcagatggaattcttgtgcaatcaggcggggtatgagaggctgcagcatgccgaaagacgcctgtccgccgggctgtaccgccagtcaagcgaggaacattcgccaaatggactgacttccgacaactcggatggacagggggaacgcccactgaaccttcgtatgccaaacctgcagaatcgccagccccatcacttcgtcgtcgacggcgagttgagtcgcctgtatccctcagaagcgaagtcccatagttctgagagcctgggcattctgaaagattatccccactcagccttcacactcgaaaagaaagtgattaagaccgaacccgaggatagtagatag

SEQ ID NO: 126442 - DNA, 1377 bp, synthetic construct
  misc_feature 1..1377: note = Description of Artificial Sequence: Synthetic coding sequence
  source 1..1377: mol_type = other DNA
atggcagccgccctgcctcggacccttggcgagctgcagctctaccgaattctgcagaaggccaacctgctgagctacttcgatgcattcattcagcaaggtggggatgatgtgcagcagttgtgtgaagccggtgaagaagagttcctggagattatggcgctcgtaggcatggcaagcaaaccactacatgtaagacggctgcaaaaagccctgagagactgggttactaatcccggcctattcaaccaacctttgaccagcctgccggtcagctctatcccaatttacaaattgcccgaagggtctcccacatggttaggcatcagctgttcatcctacgaaagatccagtaacgcaagggagccacacctcaaaataccaaaatgcgccgcaaccacgtgcgtgcagagcctagggcaggggaaatcagatgtggtgggcagccttgccctccagagcgtgggggagagcagactgtggcaaggacaccatgctactgaatctgaacactctctgtccccagctgatctgggctctccagcgtcccctaaggagtctagtgaggcactggacgcggctgccgccctatctgtggccgagtgcgtggagaggatggcacccaccctgcccaagagcgatttaaacgaagtgaaagaactgttgaagacaaataaaaagctggcaaagatgattggccacatttttgaaatgaatgacgacgatccgcacaaggaagaagagattaggaagtattctgccatttacggaaggttcgatagtaaacgcaaagatgggaaacacctgactctccacgaactgactgtgaatgaggctgcagctcagctgtgcgtgaaggacaacgcgctattgacaagaagagacgagttgtttgccttggcccggcagatcagtcgcgaagtaacctataaatatacctatcggaccaccaaatcaaaatgtggggaaagagatgagctgtcccccaagcggatcaaagtcgaggatcagccagagaaagtgatggccaagcaaatggagttcctctgtaatcaggcgggctacgagagattgcagcacgctgagcgcaggctgagtgccgggctgtatcggcaaagctccgaagaacactctcccaacggcctgacgtccgacaactccgacggacagggagaacgccccctgaacctgagaatgccaaatctacagaaccgccaaccacaccactttgttgttgatggagaactgtcacgtctgtatcccagcgaagcgaagagtcattcctccgagtccctgggcatcttaaaagactacccacacagcgccttcacccttgagaagaaagttataaagaccgagcccgaggactctagatag

SEQ ID NO: 126443 - DNA, 1464 bp, synthetic construct
  misc_feature 1..1464: note = Description of Artificial Sequence: Synthetic coding sequence
  source 1..1464: mol_type = other DNA
atggcagcagccctgccccgcactctaggtgagctgcaactgtatcggattctgcaaaaggcaaatttgttgagttatttcgacgccttcatacagcagggcggggacgatgtacagcagctttgtgaggccggcgaggaagagtttttagaaatcatggctctggttggcatggcctctaagccactacacgtcaggaggctgcagaaagccctgcgagattgggtgactaatccaggcctgttcaatcaacccctgacctcacttcctgtgagtagcattcctatctacaaactgccagagggtagccccacctggctgggaatttcctgttcttcatatgagcggtcaagtaacgcaagggagccgcatctgaaaattccaaaatgcgctgccaccacttgtgtacagtcgttaggccaagggaagagcgacgtggtaggatcacttgccctccagtctgtgggcgagtccaggctgtggcagggtcaccatgccacagagtcagaacattcactttcacccgccgacctaggatcacccgcttctccaaaggagtcttccgaggcactggacgctgccgccgccctttccgtcgctgagtgcgtggagaggatggctcccactctacctaagtcggatctgaatgaggtgaaggaactgctgaagaccaataagaagctggcgaaaatgatcggccacatcttcgagatgaacgatgatgatccgcataaggaggaagagatcagaaaatacagtgccatttatggcagatttgactccaaacgcaaagacggtaagcatttaacactacatgaattgactgtgaacgaggctgcggcccagctgtgcgtgaaggacaatgccctgctgacacgtcgcgatgagctgttcgccctggccaggcagatctcacgcgaagttacgtacaaatacacctacaggaccactaaatcaaagtgcggtgaacgggatgagctctctcccaagcgtataaaggttgaggacggattccctgacttccaggattctgtccagactttgtttcagcaggccagggccaaatccgaggagctggccgctttaagcagccaacagccggagaaggttatggctaaacaaatggagtttctgtgtaaccaggctggctacgaaaggctgcagcacgcagagcgtcgcctgagtgcgggcctgtaccgccagtccagtgaagagcattcccctaacggcctcacatctgataattctgacgggcaaggcgaacgccccctgaacctgcggatgcccaatctgcaaaaccgtcagcctcatcactttgtcgtggatggggaactaagtcggttatatccaagcgaagctaaatcacacagttcagaatccttggggatcctcaaagattacccacacagcgcattcacgctggagaagaaagtgattaaaaccgaaccggaagacagtaggtag

SEQ ID NO: 126444 - DNA, 1461 bp, synthetic construct
  misc_feature 1..1461: note = Description of Artificial Sequence: Synthetic coding sequence
  source 1..1461: mol_type = other DNA
atggccgccgccctaccaagaactttgggcgagttacagctgtaccgaatattacagaaggctaacctgctcagttattttgatgccttcattcagcaggggggtgatgacgtccaacagctgtgtgaggccggagaggaagagttccttgagatcatggctctggttggaatggccagcaagccactccatgtgaggaggttgcagaaagctctccgcgattgggtgactaaccctgggctcttcaaccagcctctgacatcgcttcctgtgtcctcaatccccatttataagttgcccgaaggatcaccaacatggttaggcatatcctgttcttcatatgagaggtcctctaacgcacgagaacctcacctcaagattcccaagtgcgccgcaactacatgtgtacaaagcctgggtcaaggaaaatctgacgtagtcggcagcctggctctgcaatctgtcggtgagtcccggctttggcaaggtcaccacgctacagagagcgaacactctctgagtccagccgatctaggaagtcctgcgtcccctaaggagtcatcggaggccttggatgctgccgccgcgctgagcgtagctgagtgtgtcgagcgtatggctcctaccctcccgaaaagcgacctgaatgaagtgaaggaactacttaaaaccaacaagaagctcgccaagatgattggccacatctttgagatgaatgacgatgatcctcataaagaggaagagatccgtaagtattctgcaatctatggccgatttgacagtaagagaaaggatggaaaacaccttaccctccatgagcttactgtgaacgaagccgccgctcagctgtgcgtaaaggataacgcgctcctgactaggcgggacgaactcttcgcgctggcccggcaaatatctcgcgaggtaacctataagtacacctaccgaacgaccaaatccaaatgcggagagagggatgagctttcaccgaaaaggattaaagtggaggacggattccctgacttccaggattccgtccagacattgttccagcaagcccgcgccaagtccgaggagctggctgctcttagcagtcagccagagaaggtgatggccaaacaaatggagttcctgtgcaatcaggctggttacgagcggctgcaacatgcagagagaaggctctccgccggcctgtatcggcagtcttccgaggagcacagccctaatgggctgactagcgacaactcagatggacaaggagaacgccccctgaatttgagaatgccaaatctacaaaatcgccagccccatcacttcgtggttgacggggagttgtctagactgtatccgagcgaagcaaaatcccattcctccgagtcccttggtattttgaaggactacccacactcagcctttacattggagaagaaagtaatcaagaccgaacccgaggacagcaggtag

SEQ ID NO: 126445 - DNA, 474 bp, synthetic construct
  misc_feature 1..474: note = Description of Artificial Sequence: Synthetic coding sequence
  source 1..474: mol_type = other DNA
atggcagctgccctgccacgaactctcggcgaactccaattgtaccgtattctgcagaaggccaatctcctgtcttactttgatgcctttatccagcagggaggcgacgatgtccaacagctgtgcgaggctggggaagaagaattcctcgagatcatggctctcgtcggaatggcatcgaaaccattacacgttaggcggctgcagaaggcccttcgtgattgggtaaccaacccgggactgttcaatcagcccttgacctctctccccgtttctagtattcctatatacaaacttccagagggctcaccaacttggctgggtatctcgtgctcctcctacgaacgctcaagcaacgcaagggagccacacctgaaaatccccaaatgcgcggccacgacctgtgtccagtccctggggcagggaaagtccgacgtagtggggtctcttgctttacagtcggtaggagagtag

SEQ ID NO: 126446 - DNA, 189 bp, synthetic construct
  misc_feature 1..189: note = Description of Artificial Sequence: Synthetic coding sequence
  source 1..189: mol_type = other DNA
atggccgctgcgttgcccagaacccttggcgagcttcagctttataggatcttgcaaaaagccaatttattgagctacttcgatgcctttatccagcagggaggcgacgatgtgcagcagctctgcgaggccggggaggaggagttcctggagataatggctctggtaggtatggctagtaaaccttag

SEQ ID NO: 126447 - DNA, 303 bp, synthetic construct
  misc_feature 1..303: note = Description of Artificial Sequence: Synthetic coding sequence
  source 1..303: mol_type = other DNA
atggcagccgccctgcctcggactctgggggaattgcaactgtaccggattctccagaaggcaaatctcctctcctacttcgatgcatttattcaacagggtggtgatgacgtgcagcagttgtgtgaagctggggaggaagaattcctggagatcatggcattagtcggcatggcctctaaaccactccacgtccggcgactccaaaaggctctgcgggactgggtgactaacccaggtctgtttaatcagcctctgacgtcactcccagtctcctctatccctatttacaaactaccttag

SEQ ID NO: 126448 - DNA, 723 bp, synthetic construct
  misc_feature 1..723: note = Description of Artificial Sequence: Synthetic coding sequence
  source 1..723: mol_type = other DNA
tagaaggaattgttgaaaacaaacaagaaactggccaaaatgatcggacatatctttgaaatgaatgatgacgacccacataaagaggaggagattcgaaagtactccgccatttatggtagattcgatagcaagcgtaaggacggcaaacatttgacgcttcacgagctgaccgttaacgaggcagccgcccagctctgtgttaaagacaacgccttgctgacgaggagagacgaattgttcgcactcgccaggcaaatctccagggaagttacctacaagtacacatatagaacaactaaatcgaagtgtggtgagcgggatgagctcagccccaaacggatcaaggttgaacagcctgaaaaagtcatggcgaaacagatggaattcctgtgtaatcaagccggttacgagaggctacagcacgccgaaagacgactctctgccgggctataccgtcagtcatccgaagaacacagccccaatggcttgaccagtgataacagcgatggacagggagagcggcccttaaatctgagaatgcctaacctccagaacagacagccccatcacttcgtcgtagacggcgagctgagtcgcctgtacccctctgaggctaaaagccacagttctgaaagccttggaatcctgaaggactacccccacagcgcgttcactctggagaagaaagtaattaaaaccgaacctgaagatagtagatag

SEQ ID NO: 126449 - DNA, 459 bp, synthetic construct
  misc_feature 1..459: note = Description of Artificial Sequence: Synthetic coding sequence
  source 1..459: mol_type = other DNA
atggcagccgcactcccacgtactctgggagagctacagctctaccgaattctccaaaaagcgaatctgttgtcctacttcgatgcttttattcaacaaggtggggacgatgtgcagcaactctgtgaagctggggaggaggagtttctagaaatcatggccctcgtgggtatggcctctaaacctcttcacgttagacggctgcagaaggcactgcgtgactgggtgactaacccaggtctgttcaaccagccactgacatcgctcccggtgagtagcattcccatctacaagcttcctgaaggaagccccacatggctaggtattagctgcagttcctacgagcgctcctccaatgcgcgggaacctcacctgaaaataccaaagtgtgcggccactacctgtgttcagtcactgggccaggggaagtcagacgtggtggggagcttggccctgtag

SEQ ID NO: 126450 - DNA, 684 bp, synthetic construct
  misc_feature 1..684: note = Description of Artificial Sequence: Synthetic coding sequence
  source 1..684: mol_type = other DNA
atgatcggccacatctttgagatgaacgatgacgatccccacaaggaggaagaaattaggaagtacagtgcaatctatggcagatttgattccaagcgcaaagatggcaagcacctgacccttcacgagttaacggtgaacgaagctgctgctcagttgtgcgtcaaggacaacgccctcttgaccagaagggacgaactatttgcacttgcgagacagatatcaagggaggtgacttataagtacacttaccgcaccacgaaaagcaaatgtggggagagagacgagttgagtcccaagcgtatcaaagtcgagcagccagaaaaggttatggctaagcagatggagttcctgtgtaaccaggcaggatacgaaaggcttcaacacgccgagagaagactctctgctgggctgtaccggcaaagtagcgaggagcattcacctaacggattaactagtgataacagtgatggtcagggagaacggccccttaatctacgtatgccgaacctgcagaatcgccaaccacaccactttgtggtggatggggaactgtcacggctctaccctagcgaggccaagagccactcatctgaatccttgggcattctaaaggactaccctcactccgcattcaccctggagaaaaaggtcataaagacggaaccggaagactcaagatag

SEQ ID NO: 126451 - DNA, 1578 bp, synthetic construct
  misc_feature 1..1578: note = Description of Artificial Sequence: Synthetic coding sequence
  source 1..1578: mol_type = other DNA
atgcacagggcgccctcccccacagccgagcagcctcccggcggcggtgactctgcaaggagaaccctgcagccacgattgaagccctctgctcgcgctatggccctgcctcgtaccctcggcgagctccagctctatcgcgtcctgcagagggctaatctgctctcgtactacgaaacctttattcagcaagggggggatgatgtgcagcaactgtgtgaggccggagaagaggagtttctggaaatcatggccctggttgggatggctacaaaaccgctgcacgtgcgtaggctgcagaaggccctgagagagtgggccactaatccaggcctattcagccagccagttccggctgtgcctgtctcttctattccgctgttcaagatttccgaaaccgctggaactaggaagggctccatgtccaacggtcacggctcacctggcgaaaaggctgggagcgcccggagttttagcccaaaatcccctctggaactgggggagaaactctcccccttgcccggcggcccgggagctggtgatccaaggatttggccaggtcggtccaccccagagtctgacgtgggtgcgggaggcgaggaggaggcagggtctccccccttctcgccacccgccggcggtggcgtcccggaggggacaggcgccggaggtctcgccgccggcggcacaggtggtgggcctgatagactggaaccggagatggtgagaatggtggtcgaaagcgtagaaagaatttttcgcagctttccccgcggagacgctggtgaagtgactagcctacttaaactcaataaaaagctggcaagatctgtagggcatatttttgaaatggatgataatgattctcaaaaggaagaagaaattcgcaaatatagcatcatatatggcaggtttgattccaaacgcagagagggcaaacagctgtcactgcacgagctaaccattaatgaagccgccgctcagttttgcatgagggacaacactcttctcctgaggcgagtagaactgttttctctgtcccgacaagtagctagagagtccacttacctgtctagcctgaaaggatctcgactacaccccgaagaactgggcggtcccccactgaaaaagttgaagcaggaagtgggagagcagtcccatcctgaaattcagcaacctcctcccggccccgagagctatgtgcccccgtacagaccaagtctggaggaagacagtgcatcattaagtggggaaagtctggatgggcacctgcaagccgtaggaagctgtccgcgcttaaccccaccacccgccgacctgcccctagcactgcccgctcatggtctgtggtcccgccatatcttacagcagaccctgatggacgagggcctccgactggcccggcttgtcagccatgatcgggtgggccgactgtccccctgtgtgccagcaaagccgccactcgcagagttcgaggaagggcttcttgatcgctgccctgcacccgggccacatcccgccttggtcgaggggcgcaggagtagcgtgaaagtcgaggccgaggcaagccgacaatag

SEQ ID NO: 126452 - DNA, 1386 bp, synthetic construct
  misc_feature 1..1386: note = Description of Artificial Sequence: Synthetic coding sequence
  source 1..1386: mol_type = other DNA
atgcacagggccccctccccgacggcggagcagccgccgggcgggggcgattccgcacgccggacccttcagccaagactcaagcctagtgcccgcgctatggctctacctcggacgctgggcgaactgcagctatatcgagttctgcagagagccaacctcctgtcttactatgaaactttcatccagcagggcggtgacgacgtgcagcagctgtgtgaagctggggaagaagaattcctcgaaattatggccctagttggcatggctaccaagccattgcatgtgaggcggctgcagaaagctctcagggaatgggccacaaacccaggactttttagtcaacccgtgcctgcagtaccagtctctagcatccccctctttaagatttccgaaaccgctggcacaagaaaagggtcaatgagcaatggccacgggtcccccggggaaaaagcaggcagcgcccgcagcttcagcccaaagtcccctctcgaactgggcgaaaagttgagtccactgcccggcggccccggcgctggggacccaaggatatggcccggccgttcaacacccgaatccgatgtgggggccggaggtgaagaggaggctggctccccaccattcagtcccccagccggggggggcgtgcctgaaggtaccggcgcaggaggcctcgcagctggcggcacgggtggtggtccagacagactcgagccggagatggtgagaatggtcgtagagtccgttgaacgcatcttcagaagttttcctaggggcgacgccggcgaggtgactagccttctaaaactcaacaagaaacttgctcggagcgtgggccatattttcgaaatggacgataacgactcccagaaggaggaagagattaggaaatattcaataatctatggacgctttgatagcaaaagaagggagggcaaacagttgtcactgcacgaactgactatcaatgaggctgctgcgcagttctgcatgcgcgacaatactttgcttttgagaagggttgaactctttagcctctcccggcaggtggctagagagtcgacctatctgagttccctcaaaggaagtcgactccatcccgaggaattaggtggtccccccctgaaaaaactgaagcaggaagttggagaacagtctcatcccgagatccaacaaccacctccggggccagagagttacgttccgccataccggccttctcttgaggaagattcagccagcctttcaggtgagtccctcgacggtcatcttcaggagtttgaagaagggctgctggatcgctgtccagcacctggcccccaccctgctctggtggagggccgaagatcatcagtcaaagtggaggcagaggctagccgacagtag

SEQ ID NO: 126453 - DNA, 969 bp, synthetic construct
  misc_feature 1..969: note = Description of Artificial Sequence: Synthetic coding sequence
  source 1..969: mol_type = other DNA
atgcaccgggcccccagccccaccgctgagcaaccccccggcggcggggactccgcgaggcgcaccttgcagcccagactgaaaccatccgcgcgggccatggccctgccaaggacactcggggagttgcagctctaccgggtgctgcaaagggcaaacctgctgtcttactacgagaccttcattcagcaaggcggcgatgacgtgcagcaactgtgtgaagcgggagaagaagaattcctcgaaatcatggccctggtcggaatggctacaaagccactccacgtgaggaggcttcagaaagccctcagggagtgggctactaaccctggactcttcagccaacctgtcccagctgtaccagtgtcgtccattcccttgtttaaaattagcgagaccgctggcacccgtaaagggagtatgagcaatggccacggttcccccggcgagaaagccggcagtgcccgttccttcagtcctaaatctcctttagagttgggggaaaagttatctccactgcccggaggtcccggtgccggagacccacgaatatggcccgggaggtctacacccgaatccgacgtcggggccggcggtgaagaggaagcggggtccccaccattctcgcctcctgccgggggaggggttcctgagggcacaggagcagggggcctggccgcgggagggactgggggcggaccagaccgcttggagcctgagatggtgcgaatggttgttgagtcagtggagcggatattccgcagttttccaagaggagatgcaggggaagtgacctcactcttaaaactgaataagaaattagcccgaagcgtcgggcacatctttgagatggacgataatgactctcagaaagaggaggagatccgcaagtacagtattatctacggccgcttcgactcgaagaggcgtgaaggaaaacagctgagcctccatgaggcatccccgtag

SEQ ID NO: 126454 - DNA, 723 bp, synthetic construct
  misc_feature 1..723: note = Description of Artificial Sequence: Synthetic coding sequence
  source 1..723: mol_type = other DNA
taatcagggtcagcgtctcctgctgtggcggaattatgtcagaacacccctgaaacctttctggaagcctcaaaattgctacttacctatgcggataacattttacggaaccctaatgacgaaaaatatcgaagtatacggattggtaacacagccttctcgactagattactgccggttcgcggggctgtggagtgtctgtttgagatggggttcgaagagggcgagacccaccttatttttcccaaaaaagcgtctgtagagcagttgcaaaaaatcagggatctgattgcaatagaacgcagtagtcgactcgacgggagtaataaatctcacaaggtgaaaagttctcagcagccggccgcctctactcagctaccaacaacccctagcagtaatccctccggtctgaaccagcacacccgtaaccggcaaggccagagcagcgatccccccagcgctagtaccgttgcggcagatagtgcgatcctagaagttcttcagagtaacattcagcacgtgctcgtttacgaaaaccctgccctgcaggagaaagccttagcctgcattccagttcaggaactcaaacgtaaaagtcaggagaagctgtcaagagcgcgtaaacttgacaaggatattattacactgcgcaatttctggaagcaggatgtggatggcgtggcctccgggcctattgtgctgcattgtgctgctgagctttag

SEQ ID NO: 126455 - DNA, 1965 bp, synthetic construct
  misc_feature 1..1965: note = Description of Artificial Sequence: Synthetic coding sequence
  source 1..1965: mol_type = other DNA
atggcagctgcagcactgggcagctccagcgggtcggccagcccagccgtggccgaactctgccagaatactccagaaaccttcttggaagccagtaaactgctcttgacctatgcagataatattttgagaaatcctaacgacgagaaatatcgatcaatacgaatcggaaacaccgcattcagtacccgcctgctgccggtcaggggtgctgtggagtgccttttcgagatgggctttgaggaaggggagactcacttgatcttccccaagaaagcgagcgtggaacaactgcagaagataagagacctgattgcaatagagagatcatcccggttggacggcagtaataaatctcataaggtaaaaagttcccagcaacctgccgcctctactcagctgccaaccaccccctcttccaacccatctggtctaaatcagcatactagaaacaggcagggacagagctctgaccctcccagcgcctctaccgtggccgccgatagcgccattctggaggtcctacaaagcaacattcagcacgtcctggtatatgagaatcccgccctccaggagaaagctctggcttgtattcctgtgcaagaactcaaaagaaaatcccaggagaagctgagcagagcccgcaagttggataaaggcatcaatatatccgatgaggacttcctgctgctcgagctgcttcactggtttaaggaagagttcttccattgggttaacaacgtgctctgctccaagtgcggagggcagacaagaagccgcgacaggagcctgctaccatctgacgatgagctgaagtggggtgctaaagaagttgaggatcactattgcgacgcctgccagttttccaaccgcttccccaggtacaacaaccctgaaaagctacttgaaaccagatgtggacggtgtggcgaatgggccaattgttttacattatgttgtcgcgcagtgggcttcgaggcacggtatgtatgggattacacagaccacgtttggaccgaggtatattcaccctcccaacaaagatggcttcactgcgatgcctgcgaagatgtctgcgataagcccttactttacgaaataggctggggtaagaagctgagttacgtgatagctttctcaaaagacgaggtggttgatgtcacatggcggtatagttgtaagcacgaagaagtcattgcccggcggactaaagtgaaggaagccttgctgcgtgacactattaacggtctgaataagcaacgtcagttattcctctccgaaaacaggcgaaaagaattgctgcagcgcattattgtggagttagtcgaatttatcagtccaaaaacgccgaagcccggggaactggggggccggatctccgggtccgtggcctggagggtagcccggggtgagatgggactacaaaggaaggagactcttttcataccctgcgaaaacgaaaagatatccaagcagttacacttgtgttacaatatcgtcaaagacaggtacgtccgcgtttcaaacaacaaccagaccattagcggttgggaaaatggcgtgtggaaaatggagagcatcttcaggaaagtcgagactgactggcacatggtctacttggcaaggaaagagggatccagcttcgcgtacattagctggaagtttgaatgcggcagtgtaggactgaaggtggactccatcagtatccggacctccagtcagacctttcaaaccggtaccgtggagtggaagcttcggagtgatactgcacaggtcgagctcacgggcgacaactcccttcattcatacgctgacttttcaggtgccacagaggtcatcctggaggccgagctgtctcgaggagatggagatgttgcatggcagcacacccagttatttcggcagtcgttgaatgaccacgaggaaaactgtcttgagattatcattaagttctccgatctgtag

SEQ ID NO: 126456 - DNA, 1902 bp, synthetic construct
  misc_feature 1..1902: note = Description of Artificial Sequence: Synthetic coding sequence
  source 1..1902: mol_type = other DNA
gctgccttgggttcctcatctggttccgcctcgcctgccgtagccgaactttgtcaaaatacacccgagacatttctggaggctagtaaactcctgctcacatacgccgataatattttaaggaatcctaacgacgaaaagtataggtccattagaatcgggaacactgccttcagcacaaggctcctgccggtgaggggtgccgtggagtgtctctttgaaatgggcttcgaggagggcgaaactcatctaatattcccaaagaaggcctcggtggaacagctgcaaaaaattcgagatcttatcgccattgagcgttcctccagactggacggctccaacaagagccacaaggtcaaaagcagtcaacaaccggccgcgtcgacccagctaccgacgaccccaagctctaatccctccggcctgaatcagcacacaaggaatagacagggccagtcttctgatcccccatccgcctccacggttgccgccgattctgctatactggaggtactgcaaagcaacatccagcacgtcctggtctatgagaatcctgccctgcaagagaaagctctagcctgtatccccgtgcaggaactgaagcgaaaatcccaggaaaagctgagccgagcaaggaaactggataaaggcatcaatataagcgatgaggacttcctgttgctggagcttctacattggttcaaggaagaattcttccattgggtgaataacgtcttgtgttcgaaatgcggcggacaaacccggtcgcgcgataggtcccttctcccttctgatgacgaactgaaatggggggcaaaagaggtggaggatcattactgcgacgcttgccagttcagcaaccggttcccacggtacaacaatcccgagaagctattggagacgaggtgcggaaggtgcggtgagtgggcaaattgtttcactttgtgttgccgggcagtaggcttcgaggctcgctatgtgtgggactataccgagctgcagcggacattgagcctcaaactgacaactctgaaggagataggaaaaacatttctccggatctcaaagagacagaagctcatccaagtggtagacgtcacttggcgctattcgtgcaaacatgaagaagtgatcgctaggcgcactaaggtgaaggaggctctcctacgagacactataaacggcttgaacaagcagagacagcttttcctaagtgaaaataggagaaaggagctcttgcagaggattatcgtagagctggtggagttcatttctcccaagactcccaaaccaggcgagctgggtggccggatttctgggtcggttgcatggcgagttgcaaggggagagatgggactccagagaaaggagacattatttatcccatgcgagaatgagaagatttctaaacagctccatctctgctataatatagtgaaagatagatatgtgcgggtaagcaacaacaaccagacaataagtggctgggagaatggggtgtggaaaatggagtcgatttttcgcaaggtagagaccgattggcacatggtttacctggcacggaaagaggggtcttctttcgcttatatcagctggaagttcgagtgtggatcagttggcctgaaggtcgactcgatttcaatacgaacaagctcacagacattccaaacaggcaccgttgaatggaagctgcgcagtgatacagctcaggtcgagctgacaggagataatagcctccattcctatgccgatttctctggagccaccgaagtgatcttggaggccgagctgagtcggggagacggtgacgtggcctggcagcatacacagttgttcagacagagcctgaacgatcacgaggagaactgtctggagattatcatcaagttttctgatctgtag

SEQ ID NO: 126457 - DNA, 1677 bp, synthetic construct
  misc_feature 1..1677: note = Description of Artificial Sequence: Synthetic coding sequence
  source 1..1677: mol_type = other DNA
atggccgcggctgccttggggagctccagcgggtccgcaagcccagccgtggctgagttgtgtcagaatactcccgagacattcctggaagccagcaagctcctgctgacttatgccgataacattctgagaaaccccaatgacgagaaatatcgctcaatccgtataggcaataccgccttttccactaggctgttacccgtgcgtggagctgtggagtgtctgtttgaaatgggctttgaggagggcgaaacacacctgatcttccccaagaaggcttccgttgaacagctgcagaagatccgggacctgattgctatagagcggagctcccggttggacggatcaaacaaaagccacaaagtcaagagcagccaacagcccgccgccagtacacagcttcccactacaccctcgagtaatccctcaggtttgaatcagcacacccgcaaccgccaaggacaatcaagtgatcctccaagcgcgagtactgtggctgcagactcggccattctcgaagtgcttcagtcaaacattcagcacgtattggtttatgagaacccagccctgcaggaaaaggcccttgcctgcatcccggtgcaagaactgaaaaggaagtcccaagagaagctgagccgtgctaggaaactggataagggaatcaacatcagtgatgaggatttcctgctattggagctgcttcattggtttaaggaggaatttttccactgggtgaataatgtcttatgctctaagtgcggcggccagaccagatcacgtgaccggtccctgctgccctccgacgatgaacttaaatggggagccaaagaagtggaagatcattactgcgatgcttgtcagttttcaaatagatttccgcgatacaacaatcccgaaaagctgctggaaacacgatgcgggagatgcggagagtgggctaactgtttcacattgtgctgcagagctgtgggctttgaggcacgatatgtttgggattacacagaccacgtgtggacagaagtgtatagccctagtcagcagaggtggctccattgtgacgcctgcgaagacgtttgcgacaagcctctcttatacgagattggttggggcaagaaactgtcatacgtcattgccttcagcaaggacgaagtcgtcgatgtgacttggcgatacagctgtaagcacgaagaagtcatcgccagaaggacaaaagtgaaggaggcactcttgcgcgacacaataaacggtctgaacaagcagaggcagctgttccttagcgaaaatcgtagaaaagaactcctgcagcgcataatcgtagaacttgtggaatttatcagcccaaagactcctaagccaggtgaactaggaggccgcatctcgggctccgtggcatggcgggttgctcggggtgagatggggctccagcgcaaagaaaccctgttcattccttgcgagaacgaaaaaatatccaaacagctacatctctgctacaatatcgtgaaagatagatacgtgagagtgagtaacaacaatcaaactatctcaggctgggagaatggggtgtggaaaatggagagtatttttcgtaaagtggagaccgactggcacatgattactgtttttaccccgatgttaattttcctcgtgccactgaaactcttctggaaacagaactag

SEQ ID NO: 126458 - DNA, 1839 bp, synthetic construct
  misc_feature 1..1839: note = Description of Artificial Sequence: Synthetic coding sequence
  source 1..1839: mol_type = other DNA
atgcggaaccccaacgacgagaagtataggtctatccgaataggcaatacggccttttccactcggctacttcctgtgcggggagctgtcgaatgtttattcgaaatgggctttgaggagggtgaaactcacctgatatttcctaaaaaagctagcgtcgagcaattgcagaagatccgcgatcttatcgccatcgagcgttcctcacgcctcgacggttccaataagtctcacaaggttaagtcatctcaacaaccagctgcctcaactcaactgcccaccacccctagttccaatccatctggactgaatcagcatacccgaaaccgacaggggcaaagttcagaccccccttccgcaagcaccgtggcggcggactcagcgatcctggaagtgctgcagtccaacattcagcacgtgctcgtttatgaaaacccagcacttcaggagaaggccctagcctgcattcccgttcaggagctcaagcgaaagagccaggagaagttatctagagcacgaaagctggataagggaattaacatcagcgacgaagattttctgctcctggaattgctacactggttcaaggaagaatttttccactgggtgaacaatgtgctgtgtagcaagtgcggtggtcaaacacggagtagagataggtccctcttgccttccgacgacgagttgaaatggggggctaaggaagtggaggatcattactgcgatgcgtgccagttctcgaataggttccctcgctacaacaacccagagaagctcctggaaaccagatgcggccgctgcggggagtgggccaactgtttcacgctttgctgtcgggcagtgggatttgaggccaggtacgtgtgggattacactgaccacgtgtggactgaggtgtattccccaagtcagcagcggtggctgcactgcgacgcgtgcgaagatgtctgcgataagcctctgctctacgaaattggttggggtaagaagctttcttatgtgatagccttctccaaggatgaggtcgtcgacgtaacttggcgatactcctgtaagcacgaggaggtgatcgcacggcggactaaagtcaaggaggccctgctgcgcgatactatcaacggattaaataagcagcgccagttgtttttaagcgagaaccgccgcaaggaactgttgcagagaataattgtggagctggtagagttcatctcccctaagacacctaaacccggtgagttggggggtcgcatatccggatctgtggcatggcgtgttgcgcggggagaaatggggctgcagcgcaaagaaacactgttcatcccatgcgaaaacgaaaagatcagcaaacagctgcatctctgttataatatcgtgaaagatagatatgtgagggtaagtaataataatcagacaatctccggctgggagaacggcgtgtggaaaatggagagcatatttcggaaggtcgaaacagactggcatatggtgtacctcgcacgcaaagaggggagctctttcgcatatatatcatggaagtttgaatgtggcagtgtcggacttaaggtagactccatctctattagaactagcagtcaaacgttccaaacaggtacagtggaatggaaattacgatctgacacagcgcaagtggaactcaccggcgacaactccctgcattcttacgctgatttttcaggcgcaactgaggtaatcctggaggcagagttgtccaggggggatggcgacgtggcatggcaacacactcagttgtttagacaatctctgaacgaccacgaggaaaattgtctggaaatcatcatcaagttttccgacctttag

SEQ ID NO: 126459 - DNA, 516 bp, synthetic construct
  misc_feature 1..516: note = Description of Artificial Sequence: Synthetic coding sequence
  source 1..516: mol_type = other DNA
atggggttcgaagaaggagaaacgcatttgatttttccaaagaaggcctccgtggagcagttgcagaagatcagggacctcatagcaattgagcggtcgagccggttggatggatcaaacaagagtcacaaggtgaaatcatcacagcagccggctgcttcaacccagttgccaactactccatccagtaacccctccgggttaaaccagcatactcgcaatcggcagggccagtcctctgatcccccgtccgcttctactgtggccgctgactccgccatcctagaggtcctgcagtccaatattcagcacgtgctggtatatgaaaatccggctctgcaggaaaaagcgttggcgtgcatacccgtgcaggagctgaagaggaagagccaggagaagcttagcagggcacgcaaacttgataaggacatcatcactctgaggaacttctggaagcaggatgtggatggggtggccagtggacccatcgttctccattgtgcagccgagctgtag

SEQ ID NO: 126460 - DNA, 1911 bp, synthetic construct
  misc_feature 1..1911: note = Description of Artificial Sequence: Synthetic coding sequence
  source 1..1911: mol_type = other DNA
atggccgcagcggctctgggctctagtagcgggtctgcttctccagcggtagctgaactctgtcagaacacacccgaaactttccttgaagcatctaaactgctcttaacctacgccgataacattcttagaaacccaaatgatgagaagtacagaagcataaggattggaaatacggcctttagtacccgattattacctgtccggggagccgttgagtgcctcttcgagatgggattcgaagagggcgagacacacctgatcttccctaaaaaggccagtgtagagcagttacagaaaattagggacctgatcgcaatcgagcgctcttcaaggttagatggttctaacaagtcccacaaggtgaagagctcacagcagcccgcagcctctacacagctgccaactacacctagtagcaatcctagcgggttgaatcagcacacccgtaaccgacagggacagagttcagacccaccaagcgccagtactgttgccgcagatagtgctatactggaagtccttcagtcaaacatacaacacgtactcgtgtatgagaaccccgccctccaggaaaaggcgctggcctgcatacctgtgcaagagctcaagcgtaaaagccaggaaaaactgtctcgggcccgaaagctggataagggaatcaacatatctgacgaagattttctgctgctagagctcctccattggtttaaggaggaattcttccactgggtgaataatgtgttatgctccaaatgtggcgggcagactagaagccgagataggtccttgctcccctccgacgacgagctgaagtggggtgccaaggaagtggaagatcattactgtgacgcttgtcagttttcaaaccggttcccccggtataacaacccggagaaactgctggaaactcggtgtggaagatgcggagagtgggctaattgttttaccctgtgttgcagagcggtggggtttgaggcacgttatgtatgggattacacggaattgcaaaggacattgagccttaaactgacaacactgaaagagattggcaaaacttttctgagaattagtaaacggcagaaactgatccaggtggtagacgtgacctggcgctatagttgcaagcatgaggaggttattgctcgccgtacaaaagtgaaggaagcattgcttagagacacaattaacggcctgaacaagcagagacagctgttcctctccgaaaaccggagaaaagaattacttcagagaataatcgtcgaactcgtggagttcatctctcccaaaactcccaaaccaggtgaactggggggtcggatcagtggatcagttgcctggcgagtggcacgcggggagatgggtttgcagagaaaggaaactctgtttatcccttgcgagaatgagaaaatctccaagcagctccacctgtgttacaatatcgttaaagacaggtacgttcgggtttctaataacaaccagacgatctctgggtgggagaacggggtgtggaagatggagagcatctttagaaaggtggaaactgattggcacatggtatatttggcaaggaaagaggggagttcctttgcctatatctcttggaaatttgaatgcggctctgtggggctgaaagtcgacagcatctcaatccgcacgtcctcacaaactttccagaccgggacagtggagtggaaacttcggagcgatactgcccaagtggaattaacgggcgataattccctgcactcttacgccgatttcagcggagcaactgaagtcattcttgaagccgaactgagtaggggtgacggggatgtcgcctggcaacacacccagttattccgccaatcactaaatgatcatgaggaaaattgcctagagatcattatcaaattttccgatctatag

SEQ ID NO: 126461 - DNA, 1188 bp, synthetic construct
  misc_feature 1..1188: note = Description of Artificial Sequence: Synthetic coding sequence
  source 1..1188: mol_type = other DNA
atggccgccgaagcctccgaaagcggccccgctctccacgagttgatgagagaagctgaaatctctctacttgagtgtaaagtgtgtttcgagaaattcggccaccggcagcagaggcgacccagaaacctgtcctgcggacacgtcgtttgcctggcctgcgtggcggccctagctcacccgagaaccctggcccttgagtgtcctttttgccgacgagcttgtagggggtgcgacacaagtgactgcctgcctgtactgcatctcatcgaactgctcgggagcgcactccgacagagccccgccgcccatcgcgctgcacccagcgctcctggcgcactgacttgtcaccacaccttcggtggctgggggactctggtgaaccctacaggtttagctctctgccccaagactggccgcgtagtggttgtgcatgacggccgacgccgtgtgaaaatcttcgatagcggcggtggttgtgcacaccaattcggagagaagggggatgcagcccaggatatacgttatcccgttgacgtgacgataaccaacgattgccacgtggtcgttactgacgccggcgatcgaagcatcaaggtgtttgatttctttggccaaatcaaattggtcattggcggccagttctcacttccctggggcgtggaaaccacccctcagaatggcatcgttgttaccgatgccgaggccggttcactacatttgctcgatgtggatttcgcagaaggagtccttcggaggaccgagcgactacaggctcacctttgtaatcctcggggggtagccgttagctggctcactggcgcgatagctgtgctggaacacccactcgcgctagggactggtgtctgctcaactcgcgtgaaggttttttcgtcttcaatgcagttggtgggacaggtggatacattcggtctgtctctgtacttcccctccaaaataacagcttccgccgtgacattcgatcatcagggcaacgttattgtagcagacacatccggtccagccattttatgccttgggaaacccgaggagtttcccgtgcccaagcctatggtcacacatggtctgagtcaccccgtggccctgacttttaccaaggaaaattcgctgctggtgcttgatacagcatcacacagcatcaaggtgtataaagtggattggggctag

SEQ ID NO: 126462 - DNA, 903 bp, synthetic construct
  misc_feature 1..903: note = Description of Artificial Sequence: Synthetic coding sequence
  source 1..903: mol_type = other DNA
atggcagcagcagccggcgacgcagacgacgagccccgtagtggtcactcctcttcagagggggagtgcgcagtagctcccgagcctctgaccgacgccgagggtctgttctcttttgctgacttcggctccgccctggggggcgggggcgcaggtctctcagggcgcgctagtggaggcgctcagagcccattaaggtacctgcatgtgctgtggcagcaggacgccgaaccccgtgacgagcttagatgcaagattccggcagggcgactcagaagagcagccagaccccatcggcggctgggccctacaggcaaggaagtccacgctctcaagaggctgcgcgacagcgcgaacgcgaatgacgtggaaaccgtccaacaacttctagaggacggggctgatccttgcgcagccgatgataaagggaggacagctcttcattttgcgtcttgtaatggcaacgatcaaattgtacagctgcttctggaccatggggctgaccctaaccagcgggatggactaggcaacactcctctccatctcgcagcttgtacaaatcatgtgccagttataaccacactcctgaggggaggagcaagggtggacgcactcgaccgggccgggcggacaccattacacctggcaaagtcaaagttgaacatccttcaggaaggccatgcccagtgcctcgaagctgttcgtctggaagtaaagcaaattatccatatgctgcgcgagtatctcgagcgccttggccagcacgaacagcgtgagagactggacgacctttgtacccggctgcaaatgaccagtaccaaagagcaggtagacgaggtgaccgatcttctggcgagtttcactagcctgagtttacagatgcagagtatggagaaacgttag

SEQ ID NO: 126463 - DNA, 387 bp, synthetic construct
  misc_feature 1..387: note = Description of Artificial Sequence: Synthetic coding sequence
  source 1..387: mol_type = other DNA
atgacagaggccgacgtaaatccaaaagcttacccactcgccgacgcacatctcacgaaaaagttactggacctagttcagcagtcctgcaattacaagcagctcagaaagggcgcgaatgaggcaaccaagacactgaatagaggcatttccgaattcatcgtcatggccgccgacgccgaacccctcgaaattatattacacttacccctgttgtgtgaggacaaaaatgttccatacgtcttcgttcggtctaagcaggcactggggcgagcctgcggcgtgagcagaccagtgatcgcatgctccgtcacgatcaaggaaggaagtcaattgaagcagcagatccagagcattcaacagagcatcgagagactgttagtctag

SEQ ID NO: 126464 - DNA, 387 bp, synthetic construct
  misc_feature 1..387: note = Description of Artificial Sequence: Synthetic coding sequence
  source 1..387: mol_type = other DNA
atgaccgaggctgacgtgaatcctaaggcttatccattggcagatgcccaccttacgaagaaattgctggatcttgtgcagcaatcatgcaattacaagcaattgcgcaaaggggccaacgaggccactaaaacactgaatagagggatatcggagttcattgtaatggccgcggatgcagagccactggagatcatactgcacctgcctttattatgtgaagataagaatgtgccctacgtcttcgttcggtccaaacaagccctgggaagggcctgtggagtgagccgcccagttattgcctgtagtgtcacgattaaagaaggctcacagttaaagcagcagattcagtccatccagcaaagtatagaaagactcctggtttag

SEQ ID NO: 126465 - DNA, 399 bp, synthetic construct
  misc_feature 1..399: note = Description of Artificial Sequence: Synthetic coding sequence
  source 1..399: mol_type = other DNA
atgttgcttgtgcagacagaagccgacgtgaatcctaaggcgtatccactcgcagatgcacatttgactaagaagctgcttgacctcgttcagcagtcttgtaactataaacaactccgtaagggcgccaacgaggccacaaagaccctgaaccgaggaatcagcgagttcatcgtgatggctgcagatgccgagccccttgaaattattctccacctgcctctcctttgcgaggacaagaatgtgccctatgtttttgtgagaagcaagcaagccctggggagggcctgcggagtgtctaggccagtgattgcttgctcagtgacaatcaaagagggcagccagctgaagcaacagattcaaagcatacagcaatcaatagaaaggctgctcgtgtag

SEQ ID NO: 126466 - DNA, 2130 bp, synthetic construct
  misc_feature 1..2130: note = Description of Artificial Sequence: Synthetic coding sequence
  source 1..2130: mol_type = other DNA
atggcaacagcaggcgggggaagcggggccgaccccggcagtagaggtttgctgcgcttgctgagcttctgcgtgctgcttgccggcttgtgtcgtggaaactctgttgagcggaaaatatatatccctctgaataaaaccgctccctgcgtacgcctcctcaacgctacgcatcagattgggtgccagtcctctatcagcggagataccggtgtgattcatgtggtcgagaaagaggaagatcttcagtgggtacttaccgatggccccaatccgccctacatggtcttactggagagcaaacacttcaccagagacctcatggagaaacttaaagggagaacatcccgtatcgctgggttagccgttagcctgaccaaacccagtcctgcctcagggtttagccctagtgttcagtgtccaaatgatgggtttggcgtgtacagtaatagctatgggcccgagttcgctcactgcagggaaatccaatggaacagtcttgggaacggcctggcctacgaagactttagcttccccatctttttattagaggacgagaatgaaaccaaggtgattaaacagtgctatcaggatcataatttatcacagaatggctccgccccaaccttcccgctgtgcgcaatgcagctgttttctcacatgcacgcagtcatcagcactgccacctgcatgaggcgctcgtctatccagtcgacattttctattaaccccgagattgtgtgtgatcccttgtccgattacaatgtgtggtccatgcttaaaccaataaatacgaccggcaccctgaagcccgatgatagagtggtagtagccgccaccagactggacagcagatcctttttttggaatgtggcgccaggcgcggaaagcgctgtcgcgtcttttgttacacagttagcagctgccgaagctctccagaaagccccagatgtgacaacactgccacgcaatgtcatgtttgtgtttttccaaggggagacctttgattatattggtagtagcagaatggtgtacgatatggagaagggcaagttcccggtccagctggaaaacgtggattcattcgtggagttaggtcaggtagctctgcgcacctccctggagctgtggatgcataccgaccctgtatctcagaaaaatgagtccgttcgaaatcaggtggaggacctgctggccactctggagaagagcggcgcaggagttccagctgtgattctgagaagacccaaccagagccagcccctaccccccagcagtctccagaggtttcttagggcacgaaacatctccggggtggtgcttgctgaccattctggggcgtttcacaataagtactatcagtccatttatgacactgcggaaaatattaatgtgtcgtatccagaatggttatcccctgaggaagacctcaattttgttacagacacagccaaggctttggccgacgtcgctacggtattagggcgcgcactgtatgagctcgccggaggcacaaactttagcgacacagtccaggctgatccccagacagtgaccaggcttctctatggtttcttgattaaagccaacaactcatggttccagagcatcctgagacaggatctgcgctcttacctaggcgatgggcctcttcagcactatatcgcagtgtccagccctactaatacaacatacgtcgtgcaatatgcactagcaaatctgaccggcaccgtggtaaatctcactcgcgagcaatgtcaagatccgagcaaagtgccatccgagaataaggatctctatgagtattcttgggtgcaggggccacttcactcaaatgagacggacaggctccccagatgcgtgcggtctacagcccgactcgctcgggccctgagccccgcattcgaactgtcgcaatggagcagcaccgagtattccacatggacggagtcccggtggaaagatatccgcgctcgtattttcctgattgcatcaaaagaattggagttgatcacccttacggtcggattcggcattctcattttttcgctaattgtgacatattgtatcaatgccaaggccgacgtcctgttcattgccccacgagagcccggcgccgtatcctattag

SEQ ID NO: 126467 - DNA, 2070 bp, synthetic construct
  misc_feature 1..2070: note = Description of Artificial Sequence: Synthetic coding sequence
  source 1..2070: mol_type = other DNA
atggattttaatctgattctggaatctttgtgcaggggcaactcagtcgagcgcaagatttacatccccctgaacaagaccgccccttgtgtgcgactcctaaatgcgactcaccaaattggctgccaatcttcaataagcggagacactggcgtcatccacgtggtggagaaggaagaagatctgcagtgggtgctaacagatggtcctaatcctccatatatggttctgctggagagcaaacattttacccgtgatctcatggagaagttaaaaggcagaacatcccgtatcgcgggcctggccgtctcactgaccaaaccaagtcccgcttctggcttctctcccagcgtgcagtgcccaaatgacgggttcggagtgtactccaattcctatggtcctgaattcgcacattgtcgcgagattcaatggaactctctggggaatggcctggcatacgaggatttcagtttccccattttcctgctggaagacgagaacgagactaaagtcatcaaacagtgttaccaggatcacaacctctctcagaacggtagcgcaccaaccttcccactgtgtgccatgcagttattcagtcacatgcacgccgtgatcagcaccgcgacttgtatgagaagaagttcaatccaaagtacattttccattaatccggagatagtttgtgatcctctatctgattacaacgtctggagcatgctaaagcctattaacacaacgggtacgttgaagcctgacgaccgagtggtcgtggctgcgacccgcctggattctaggtcctttttttggaacgtcgcacctggagccgaatccgctgtggctagcttcgtcacgcagctggctgcagccgaggcacttcaaaaggctcctgatgtgactactctgccgagaaacgtcatgttcgtatttttccagggggagacctttgactatattggctcttcaaggatggtatacgatatggaaaaaggcaaattcccggtgcaactggaaaacgtggatagcttcgtggaacttggacaagtggctttaagaacctctttggaactctggatgcatacggatccagtgagtcagaagaatgagagtgtccgaaatcaggttgaggacttactcgctaccctggagaaatccggcgcaggtgtgcccgcagttattcttagacggcccaatcagagtcagcctcttccaccatcttccctgcaacgattcctcagggcccggaatatttcgggagttgtccttgcagatcacagcggcgcctttcacaacaagtactaccagtcgatctacgacaccgccgagaatattaacgtaagctatcccgagtggctaagtccagaagaggacctaaacttcgtgaccgacacagccaaggcactggccgacgttgcaacagtcctggggcgagcactatacgagcttgcaggcggcaccaatttttctgacaccgtgcaagctgaccctcagaccgtgactcggctgctgtacggatttctcattaaggctaacaattcatggttccaatccatccttaggcaggacctaaggtcctatctgggggatggtccactccagcattacattgccgtctcctcaccaactaacacaacttatgttgttcaatatgcgctggctaatttaacaggaacagtcgttaatctgacacgggagcaatgccaggatccaagcaaagtgccgagtgagaataaggatctctacgagtactcctgggttcagggtccgctgcactctaacgaaacggacaggctgcccagatgtgtaagaagcacagctaggttggctagggctctgtcaccggcgtttgaactgtcccagtggtcttcaaccgagtactctacatggactgagtcacggtggaaggatattcgagcaagaatctttctgatagccagcaaagagcttgaactgataactctgacagtcggattcggtatcctcattttctccctgattgtgacttactgcatcaatgcaaaggctgatgtgctgttcatcgctccaagggaacctggcgccgtaagttattag

SEQ ID NO: 126468 - DNA, 1356 bp, synthetic construct
  misc_feature 1..1356: note = Description of Artificial Sequence: Synthetic coding sequence
  source 1..1356: mol_type = other DNA
atgcttaaaccaattaatacaaccggcacactgaagcccgacgaccgggtcgttgtggcagccacgcgccttgattcccggagcttcttttggaacgtcgcaccaggggctgagagtgccgtggccagtttcgtgacgcaattagctgccgcagaggccctccagaaagcgcccgacgtgactactcttccaagaaacgtcatgttcgtattcttccagggtgaaacttttgattacatcggatcctcccgtatggtctacgacatggaaaaaggaaagttcccggtgcagctggaaaatgttgactctttcgtggagctggggcaggtagctttacgcactagcctggaattatggatgcataccgatccagtgagccagaagaatgagtccgtacgcaaccaagtagaggatctcctcgccacacttgagaagagcggtgcgggcgttccagcagtaatcctacgtcggccaaatcagtcccagccgttgcccccatcctccttgcagcgattccttcgggctagaaatattagcggtgtggtgctcgccgaccactcgggagctttccataacaaatactaccagagcatctacgacactgcagagaacataaacgtaagctatcccgaatggctcagccctgaggaggacttgaattttgttaccgacactgccaaagccctcgcggatgtagctacagtgctgggccgcgccctctacgaactggctggagggaccaactttagcgacacggtccaggcagaccctcagactgttacaaggttgctgtacggcttcttgatcaaagctaacaactcctggttccaatctattctaagacaggacctgagatcttacctgggggacggaccactacagcactacatcgccgtgtcctcacccaccaacaccacttacgttgtgcagtacgcacttgcaaacttgacgggcactgtggttaatcttacacgcgagcagtgtcaggatccctctaaagtacccagcgagaataaggatttatatgaatattcctgggtgcaggggccgttgcactctaacgaaaccgaccgtttacctcgctgtgtgagaagtacagccagactggccagagccttgtccccagctttcgaactcagccagtggagttctacggagtacagcacttggaccgaatccaggtggaaggacatacgggcccgtatttttcttatcgcaagcaaagagctggagctaatcactttaacagttggatttggaatcctcattttctcactaattgtcacctactgtattaatgcgaaggcggacgttctcttcattgcccccagagaaccgggcgctgtgagttattag

SEQ ID NO: 126469 - DNA, 918 bp, synthetic construct
  misc_feature 1..918: note = Description of Artificial Sequence: Synthetic coding sequence
  source 1..918: mol_type = other DNA
atgctgaaaccaataaataccaccggtacactgaaaccagacgacagagttgtagtggcagctacaagactggattctcgttcttttttttggaacgttgcgccaggggccgaatccgccgtcgcttcctttgtgacacagcttgcagcggcggaagcactgcagaaggcaccagatgtcacaactctgccgcgtaatgtgatgtttgtattctttcaaggagtcgccctcagaacttccctcgagctatggatgcatacagaccctgtgtcccagaaaaacgagtctgtgcgtaatcaggtagaagatctgctcgcaactctggagaagagtggtgccggggtgccagctgttatcctgcgacgacccaaccagtcccagccccttcctccatcgtccctccagcgtttcctaagagctcgcaacatcagcggcgttgtgcttgccgatcactcaggggcctttcataacaagtactaccagtctatctatgacaccgcggagaacataaacgtgtcttatccagagtggttaagccccgaagaggatctgaatttcgttaccgacaccgccaaagcactggctgatgtggcaaccgtgcttggacgggctctgtatgaacttgccggcggtaccaacttcagtgataccgtacaggctgatccacagacggttaccaggctcttgtacggatttttaatcaaggctaacaactcgtggttccagagtatactcaggcaggatcttaggtcctacctgggcgacggcccccttcagcattacatcgctgtctcctccccaaccaatactacctacgttgttcagtacgcccttgccaatttgaccggcacggtcgtgaacctaacccgggaacagtgtcaggacccttccaaggttcccagtgaaaacaaagactag

SEQ ID NO: 126470 - DNA, 2070 bp, synthetic construct
  misc_feature 1..2070: note = Description of Artificial Sequence: Synthetic coding sequence
  source 1..2070: mol_type = other DNA
atggactttaacctcatcttggaaagtctctgtagaggtaactctgtggagcgaaagatctatatcccactgaacaaaacagccccctgcgttaggcttctcaatgctacccaccagattggctgtcagtctagtatcagtggcgacaccggcgtaatacatgttgtggaaaaggaggaggacctgcagtgggtcctcacggatggccctaatcccccttatatggtcttgctggagtccaagcactttactcgcgatttgatggaaaagctgaagggacgcaccagccgaatcgctggcctggcggtttccctgaccaagccatctcctgcaagcggcttttctccgtctgtgcagtgtccaaatgacgggttcggcgtgtacagtaattcctacggacccgagttcgctcattgccgcgagatccagtggaatagtctgggaaatggcctagcatatgaagatttttcctttccaatctttctgcttgaggatgagaacgagaccaaagtgataaaacagtgttatcaggaccataatctctctcagaatggctcagcaccaacattccctctgtgcgcaatgcagctcttcagtcacatgcatgccgtcatctctacagcaacttgcatgcgtaggtcctcaatccagagcaccttcagtatcaatcccgaaatcgtgtgtgaccctttaagtgattacaatgtgtggtcaatgttgaagcccattaacacgaccggaactttgaagccggacgacagagtcgttgtcgctgccacaagattggattctcggtcattcttctggaacgtggcacctggcgccgaatcagcggtggcttcttttgtcacccagttggctgcagcagaggcactgcagaaagcgccggatgtaactacattgccaagaaacgtcatgtttgtcttctttcagggggagaccttcgattacattgggagctctaggatggtctacgacatggagaagggcaaatttccagtgcaactggagaacgtggattcctttgtggaactcggacaagttgccctaagaactagcctagaactctggatgcacacagaccccgtgagccagaaaaacgagtccgtccgaaatcaggtggaggacttgcttgcgacattggaaaagagcggagcgggcgtccccgccgtgatcctccgcagacctaaccagagccaacccctgcccccttcctccctacaacggttcctgcgcgctcgtaatattagtggcgtggttctagcggaccattcaggggccttccataacaagtactaccagagcatatacgacactgctgagaacattaacgtgtcatatcccgagtggttaagcccagaagaggatctcaattttgtcacggacaccgcgaaggctctcgcagacgtggccactgtgcttggtagggctctgtatgaactggccggtggcactaacttcagcgacacagttcaggccgaccctcagaccgtcacacggctactgtacggctttctgattaaagcgaacaatagctggtttcagtccattctccgccaggatctaaggtcctatctgggcgacggaccactccaacattatatcgccgtcagctcgcctaccaacactacatacgtggtgcagtatgcactcgccaatctgaccggaactgtggtcaatctgacccgagagcagtgtcaggacccttcgaaggtgccttcagaaaacaaggacctgtatgaatattcctgggtgcagggcccgctacattcaaacgaaacagatagactgcccaggtgtgtgcgtagcacagccaggttagcccgagctttgagccccgccttcgagctgtctcaatggtccagtacagagtatagcacctggacagagtctaggtggaaggacattagagcccggatctttctcattgcctctaaggaactggaactgattactttaaccgtgggatttggcatactcatcttctcccttatcgtgacctattgcatcaacgccaaggccgatgtgctgttcatcgcacctcgcgagcccggcgctgtcagctattag

SEQ ID NO: 126471 - DNA, 768 bp, synthetic construct
  misc_feature 1..768: note = Description of Artificial Sequence: Synthetic coding sequence
  source 1..768: mol_type = other DNA
atggcaacagcaggtggaggcagcggcgccgaccctgggtccagaggactcttgcgcctcttgagcttctgcgtgctgctggcagggttgtgccgggggaattccgttgagaggaaaatctatattccactgaacaaaaccgctccttgtgtgagactactgaacgccactcaccagatcggatgccagtctagcatcagtggggacaccggtgttatacacgtggtagaaaaagaggaggacttacagtgggtgctaaccgacggcccaaacccaccctacatggtgcttctggaatctaaacattttacccgggacctgatggagaagctcaagggtaggaccagcaggatagcaggattggctgtgtcgcttaccaaaccttcacccgctagcgggttctcgccctctgttcaatgtccaaatgatggatttggggtgtattcaaattcctatgggcccgaatttgcacattgtcgggagatacagtggaactctctaggcaatggtctggcttacgaagatttttcgttccccatctttctgttagaggacgagaatgaaactaaagtgattaagcaggagaccttcgactacattggttccagtcgcatggtgtacgacatggagaaagggaagttcccagtacaactcgaaaatgttgactcgtttgtcgagttgggacaggtggccctgagaacctcgctggaactgtggatgcacactgacccagtgagccagaagaacgagtctgtgagaaaccaatag

SEQ ID NO: 126472 - DNA, 963 bp, synthetic construct
  misc_feature 1..963: note = Description of Artificial Sequence: Synthetic coding sequence
  source 1..963: mol_type = other DNA
taggggttcggagtctactccaacagttacggtccagagttcgctcactgccgcgagattcagtggaacagtttgggaaatggtttagcgtatgaagacttcagttttcccatctttctgctggaagacgagaatgaaacaaaggtgatcaaacagctgtttagccacatgcacgccgtgatcagtacggcaacatgcatgcgaaggtcaagcatacagagcaccttcagcattaatcctgagatcgtgtgcgaccctcttagtgactataacgtgtggtccatgttaaagcccattaacaccacgggcacgctgaaacccgatgatagagtcgtcgtcgcagcaaccaggctggactctcgctccttcttttggaatgtggcccctggtgctgagagcgcggtggcaagttttgtgactcagttagcagcggcggaggctttacagaaagccccagatgtaacaacattgcctcgcaacgtcatgttcgtgttctttcagggcgaaaccttcgactatatcggcagttctcgcatggtttacgatatggagaagggcaagttccctgtccagctcgagaacgtggacagcttcgtcgagctgggtcaggtagccctgcgcacaagtctcgagctgtggatgcatactgaccccgtaagccagaaaaatgaatctgtccggaatcaggtcgaggacctcctcgccactcttgagaagtcaggagcaggagtacccgcggtgatcctgcgcaggccgaaccagtcgcagccactccccccttcctctttgcagcgctttttgagagctcgcaatatctctggtgtggtactggccgatcactccggcgctttccacaacaagtactatcagtctatctatgataccgcagaaaacatcaatgtttcctatccggagtggttatcaccagaggaggacttgaatttcgtgaccgacactgcatag

SEQ ID NO: 126473 - DNA, 660 bp, synthetic construct
  misc_feature 1..660: note = Description of Artificial Sequence: Synthetic coding sequence
  source 1..660: mol_type = other DNA
agatcatcaatccagtcaactttctccatcaatccagagatcgtttgtgacccgctgtcagattacaatgtatggtccatgctgaaacccatcaatactactggcacgctgaagcctgatgatcgcgtggttgtggcagcgacccggttggccgccgcagaggctttgcagaaagctcctgacgtgacaaccctgcctaggaatgtaatgttcgtgttcttccagggtgaaacatttgactatattggcagctcaaggatggtttacgatatggagaagggcaagtttccggttcagctcgaaaacgtggactcttttgtcgaactcggtcaggtagcccttcgtacatccttggagctctggatgcacactgatcccgtcagccagaaaaatgagtccgttaggaatcaggttgaggacctgcttgctaccctggagaaaagcggggccggcgtgcctgccgtcattctccgtcgcccaaaccagagccagcccctgccaccctcgtccctccagcggttccttagggccaggaacattagcggagttgttctggcagaccacagtggggcctttcacaacaagtactaccagtcaatttatgacacagccgagaatattaatgtgtcttaccccgagtggttgagtccagaagagtag

SEQ ID NO: 126474 - DNA, 828 bp, synthetic construct
  misc_feature 1..828: note = Description of Artificial Sequence: Synthetic coding sequence
  source 1..828: mol_type = other DNA
taaaacgttgccccgggcgcagagtccgccgtggcttccttcgtgacacaactggctgcggccgaggccctgcagaaggctccagacgtgactactctgccccggaacgtgatgtttgtgttcttccagggcgtcgcgctgagaacgagtctggaattgtggatgcacacagatccagtatcacagaaaaatgaatctgtacgaaaccaggtcgaagatctacttgccaccctggagaagtcaggcgctggggtaccggccgtcatcctgagaaggcccaatcaatcccagcccttgcccccttccagtcttcagcgctttcttcgtgcccgcaatatcagtggggtagtgcttgccgaccactccggcgccttccacaataagtactatcagagtatttacgatacagcagaaaacatcaatgtgtcctatccagagtggctctcaccggaggaggacttgaatttcgtgacggataccgctaaagctttggcagatgtggcaaccgtgctgggacgagctctctacgagctggctggcggtaccaacttttctgacacagtacaggcagatccacaaactgtgacgagacttctgtacggatttctgatcaaagctaacaactcctggtttcagtctatcctcagacaagatcttagatcctacctgggtgacgggcctcttcagcactacattgccgtgtcgtcgccgactaataccacatacgttgtacagtacgccttagccaacctcactggcaccgttgtgaacttgacacgcgagcaatgccaagatccttcaaaggtgcccagtgagaacaaagattag

SEQ ID NO: 126475 - DNA, 405 bp, synthetic construct
  misc_feature 1..405: note = Description of Artificial Sequence: Synthetic coding sequence
  source 1..405: mol_type = other DNA
atggccaccgctgggggtgggtccggtgcagatccaggttctcgaggcctactgaggctcctgtccttctgtgtgctcctggctgggctctgtcggggaaacagcgtggaacggaaaatttacataccattaaacaaaactgccccctgtgttagacttctcaacgccactcaccaaattggatgccaaagctcgatctctggagacactggtgtgattcacgtcgtagaaaaggaagaggatctgcagtgggtgctcactgatgggccgaatcccccttacatggtactgctcgaatcaaaacactttacccgtcaaaacgtaaggcttagcgacacattcctgtgcagctttatggaattcctctcttattccagagacctgatggaaaagctgaagggttag

SEQ ID NO: 126476 - DNA, 699 bp, synthetic construct
  misc_feature 1..699: note = Description of Artificial Sequence: Synthetic coding sequence
  source 1..699: mol_type = other DNA
atggccacagccggcggggggtctggcgctgatcccggcagtcggggcctccttcgactcctttccttttgcgtgttgctggccggcttatttctcgacttcgagcctgatccgctgccactttgtccagacgtttctttcttcccacagccacagcctccgactccacaaagcaaaggcacgggcctgtgcaggggcaatagcgtggagagaaaaatatatatccctcttaacaagacagctccttgtgtccgactgctaaacgcaacccaccagattggatgtcagtcctccatcagcggagacacaggtgtcatccacgtcgtggaaaaggaggaggacctgcagtgggtgttaactgacggaccaaatcccccttacatggttctcctggagtccaaacatttcacaagagacctcatggagaagctgaagggccgcacgagtcgtatcgccggtctggctgtgtccttaaccaagccctcgccagccagcggcttttctccgtctgtgcagtgccctaacgacggattcggtgtctattccaactcttatggcccagagttcgctcattgccgagaaatacagtggaactccctgggtaatggacttgcttacgaggatttcagcttcccgatttttctcttagaggatgagaatgaaacaaaggttatcaaacagtgttaccaggaccactag

SEQ ID NO: 126477 - DNA, 1716 bp, synthetic construct
  misc_feature 1..1716: note = Description of Artificial Sequence: Synthetic coding sequence
  source 1..1716: mol_type = other DNA
atggcaaccgcagggggcggttctggcgccgaccctggcagccgtggattactgcgcctgctgagcttctgcgtactcctggcgggactttgcagaggcaatagcgtggagcgaaagatctacattcccctgaataagaccgccccatgcgtcagattactgaacgccactcaccagatcgggtgtcagagctccatcagtggagacacaggagtcatccatgtcgtggagaaagaagaagatctgcagtgggttctgacagatgggcccaaccctccttatatggttttgctggagtctaagcatttcacccgcgacctgatggaaaaactgaaggggaggacctcaaggattgcgggtctggccgtgtcgttgacaaagccctcccctgcatccggtttttccccttccgtgcagtgtcccaacgatggtttcggtgtttatagcaacagctacggtcccgaattcgcccactgccgagaaatccagtggaacagcctcgggaacggcctcgcgtatgaggacttctcatttccaatttttctcctggaagacgaaaacgagacaaaggtgatcaagcaggaaacctttgattatatcggatccagtcggatggtgtatgatatggaaaaaggtaaattccctgttcaactcgagaacgtggacagtttcgtggagctgggtcaggttgccctgcgtacatctctagagctttggatgcatactgatcctgtgtcccagaaaaatgagtctgttagaaaccaagtcgaagaccttcttgcaactctggaaaagtctggtgccggggtccccgcggtcatactaagacgccccaaccagagccagccactgcccccttcgtccttacagcgatttctgagggcccgcaatatttcaggtgtggttttggctgaccactcaggagcctttcacaacaagtattatcaatctatctacgacacagcagaaaatatcaacgtcagttacccggagtggctgtcccccgaggaggatctgaacttcgtcactgatactgccaaggctctggccgacgtggcaaccgttctgggaagagcactgtatgaactggcggggggaacaaatttcagtgacaccgtgcaagctgatccccaaaccgttactcgcttactgtatggctttctgatcaaagccaacaatagctggtttcagagcatactgcggcaggatcttcgctcttatctgggagacggacccctgcagcattatattgctgtctcttcccccaccaacacaacttacgtggtacagtacgccttagccaacctcactgggaccgtggtgaatctgacccgggaacaatgtcaagacccttcaaaggtccccagcgagaacaaggatctctatgaatattcctgggtgcaggggccattgcattcaaacgagaccgatcggctcccccgctgtgtgaggagcactgccagattggcccgcgccctctcaccagcattcgagttgtcacaatggagctccacggagtatagcacgtggaccgaaagtagatggaaagatattagggcgaggatcttcttaatagcttccaaggaactggaattaattacacttaccgtcggctttggaattctcatttttagcctcattgttacatactgtatcaatgctaaagccgacgtgctgtttattgcccccagggaacctggcgctgtgtcttactag

SEQ ID NO: 126478 - DNA, 642 bp, synthetic construct
  misc_feature 1..642: note = Description of Artificial Sequence: Synthetic coding sequence
  source 1..642: mol_type = other DNA
atgtctcgcgttctggtgccctgccacgtcaaggggtccgtggccctgcaggtgggcgacgttcgtacatctcaaggcagaccgggcgtgctagtgattgacgtgacgtttccttccgtggccccttttgagttgcaagagatcaccttcaaaaactactacaccgctttcttaagtattcgggtgcgacaatatactagcgctcatactcccgccaagtgggtgacatgtctgagggattattgcctgatgcccgacccccattcagaggagggtgcccaggaatatgtaagccttttcaagcaccaaatgctttgcgatatggccagaatctccgagctgaggctcattcttaggcagccaagcccactgtggctctccttcactgtggaggaactgcaaatatatcagcagggtcccaaatcgcctagcgtcacctttcctaaatggttgagccaccccgtcccttgcgaacagcctgccctgcttcgggaaggactgccggatcccagccgggtgagcagcgaagtgcagcaaatgtgggcactgaccgagatgattagagcctctcacacctcagcgcgcattggccgattcgatgtggatgggtgttacgatttgaacctcctttcctacacatag

SEQ ID NO: 126479 - DNA, 642 bp, synthetic construct
  misc_feature 1..642: note = Description of Artificial Sequence: Synthetic coding sequence
  source 1..642: mol_type = other DNA
atgtcccgagtacttgttccgtgccacgtgaaggggagcgtggcgttacaggttggcgatgtgagaacgagtcagggacggcctggagttttggtaatcgacgtgacctttccttccgtggccccttttgagcttcaggaaatcacgttcaaaaactattacactgcatttctctctataagagtgagacaatacacctcagcacacaccccagcaaagtgggttacatgcctcagagattactgcctgatgccggatccccacagcgaggaaggggctcaggaatatgtaagcctgttcaagcaccagatgctgtgtgacatggcccggatcagtgagctgcggcttatcttgcgtcagccgagtcctttgtggttgtctttcacggtggaagaactgcagatatatcagcagggtccaaaatctcccagcgtgacattcccaaagtggctcagccatcccgttccttgcgaacaaccggccctgctgcgcgagggattacccgatccttctcgcgtcagtagtgaagtccagcaaatgtgggctctcactgagatgatacgtgcttcacacacaagcgcccgtattggtcgatttgacgtggacgggtgttacgacctcaacctgctctcctatacttag

SEQ ID NO: 126480 - DNA, 528 bp, synthetic construct
  misc_feature 1..528: note = Description of Artificial Sequence: Synthetic coding sequence
  source 1..528: mol_type = other DNA
atgagtcgagtcctggttccatgccatgtgaagggctccgttgcactgcaggtcggagacgtacgaacctcccagggacggccgggggttctcgtgatcgacgtgactttcccctcagttgccccgtttgagctgcaagaaattacttttaagaattattacactgcatttctgtcaataagagtgaggcaatacacaagcgcccacacccctgccaagtgggtcacctgcctacgagactactgtctaatgccggacccccattctgaagaaggcgcgcaggaatacgtgagtttgttcaagcatcaatcaccttcagtgacttttcccaaatggctctctcatcccgtaccatgcgaacagccagctctgttgcgagaggggctgccggatcctagccgcgtgtcttcggaggttcaacagatgtgggcactgaccgagatgatcagggcctcacacacatccgcaagaatcggacgattcgacgtggacggatgttatgacttgaatctcttatcgtacacatag

SEQ ID NO: 126481 - DNA, 795 bp, synthetic construct
  misc_feature 1..795: note = Description of Artificial Sequence: Synthetic coding sequence
  source 1..795: mol_type = other DNA
atggaaagtgggttcacgtcaaaggacacctatctgtcccactttaacccgagggattacctcgagaagtactacaagtttggctcccggcattccgcagaatcacagatcctgaaacatctcttgaagaacctgtttaagattttttgtctagatggggtgaaaggggatctgctgatagacataggctctgggccaacaatttaccagctcttgagcgcctgcgaatccttcaaagagattgtggtcaccgattacagtgatcagaacctccaggagttggaaaaatggttgaaaaaggagcccgaagcattcgactggtctcctgtcgtgacatatgtgtgtgatctggaaggaaaccgcgtgaaggggcctgaaaaggaggagaaacttcggcaggccgtgaagcaggtcctgaagtgcgatgtgacccagagccagcctctcggcgcagtgccactgccgcccgccgattgcgtacttagtactctttgcctggacgctgcctgccccgatctccccacctattgtcgagcactaagaaatctcgggagcttgctcaagcccggtggcttcctggtgatcatggatgctcttaaatcgagctactacatgattggggagcaaaaattcagtagtcttccattggggagggaggctgtggaggcagctgtgaaagaagccggctatactatcgaatggttcgaggtgatcagccaatcctactcctcaactatggccaacaacgaaggactgttttctctagttgccaggaaactgagtagacccctatag

SEQ ID NO: 126482 - DNA, 795 bp, synthetic construct
  misc_feature 1..795: note = Description of Artificial Sequence: Synthetic coding sequence
  source 1..795: mol_type = other DNA
atggagagcgggtttactagcaaggacacttacctctctcacttcaatcctagagactacctggaaaaatactataaattcgggagccgccacagcgcggagtctcagatcttgaagcacctcctgaaaaacttattcaaaattttttgtttggacggcgttaaaggggacctcctcatagacattggatcagggcctacaatctatcagctgttgagtgcttgcgaaagcttcaaagaaattgtggtgactgactactctgatcagaatctgcaggagttagaaaaatggcttaaaaaagagccagaggcattcgactggtcccccgtagtgacctatgtttgtgacctggagggcaaccgggttaaaggtcctgagaaggaggagaaactgcgtcaagccgtaaagcaggtattgaagtgcgacgttacccagagccagcccctcggggctgttccgttaccccccgccgactgcgtgctctcaaccctgtgtctcgatgcagcctgtcctgatctgccaacatattgcagagcccttaggaacctgggaagcctgttgaagcctggcggattcctggtcatcatggatgccctgaaatcctcttactacatgatcggcgaacaaaagtttagttcgttacccctgggtagggaggcagtggaagctgccgtgaaagaggccggttacactatagagtggttcgaagtcatcagtcagagttattcgagtacgatggccaacaatgagggactgttcagtctggtggcgagaaaactgtcccgaccactgtag

SEQ ID NO: 126483 - DNA, 759 bp, synthetic construct
  misc_feature 1..759: note = Description of Artificial Sequence: Synthetic coding sequence
  source 1..759: mol_type = other DNA
atgaaatctcgcatccctgttgtcctgctcgcctgtggaagtttcaaccccatcactaatatgcatctaagaatgtttgaggtcgcccgcgaccatttgcaccagactggtatgtaccaggtgattcagggtatcatttcccctgtgaatgacacatacggaaaaaaggatctggctgcctcccaccatagggtagccatggcgagactcgccttgcagacctccgactggattagagtcgatccatgggaaagtgaacaggcccagtggatggagacagtgaaagtgttacggcaccaccactccaagctgttaaggagcccaccacagatggaaggtcctgatcacgggaaagcactgtttagcacaccagcggccgtgcctgagctgaaactgctgtgcggagccgacgttcttaaaacgttccagactccaaacctgtggaaggacgctcacatacaagagatagtggagaagtttggcttggtttgcgtgggacgtgtgggccacgatcctaaaggctatatcgccgaaagcccaattctgaggatgcaccaacacaatatccacttagcaaaggaacccgtgcagaatgaaattagcgctacctacatccgcagggcactcggccagggacagtctgtgaagtacctcatccccgacgccgtgataacttacatcaaggatcatggcctgtacacaaagggatccacctggaagggcaagtcaacgcagagcactgaggggaaaacgagctag

SEQ ID NO: 126484 - DNA, 648 bp, synthetic construct
  misc_feature 1..648: note = Description of Artificial Sequence: Synthetic coding sequence
  source 1..648: mol_type = other DNA
atgtatcaagtaatccagggaatcattagcccagtaaatgatacgtatggtaaaaaggatctggctgcatcccaccatcgggtggcaatggcccggctcgccttgcagaccagcgattggatcagggttgacccatgggagtcagagcaggcacagtggatggagaccgtgaaggtgttgcgacaccatcatagcaagctgctaagaagtccaccccaaatggagggcccagaccatggcaaagccctattctcaacgcctgccgcagtgcccgagttaaaactgctctgtggcgcggatgtgttgaaaacatttcagacacccaatctgtggaaggacgcacatattcaagagatcgtggagaaatttggcttggtgtgcgtcgggcgggtgggacatgaccccaagggatatattgccgagagtcctatcctgaggatgcaccagcataacatccacctcgcaaaggaaccggtgcagaacgagatcagtgccacatatatccggagggccctcgggcagggccaaagcgtgaagtacctgattcctgacgccgtgattacatatataaaagatcacggactgtacaccaagggcagcacttggaaaggaaaaagcactcagtctaccgaaggtaaaacctcgtag

SEQ ID NO: 126485 - DNA, 648 bp, synthetic construct
  misc_feature 1..648: note = Description of Artificial Sequence: Synthetic coding sequence
  source 1..648: mol_type = other DNA
atgtaccaggttatccaagggattatctccccagtgaatgatacttacggcaagaaggatctggccgcatcccaccatcgagttgccatggcaagactggctcttcagaccagcgactggatccgggtggatccatgggaaagcgagcaggcccagtggatggaaacggtaaaggtgttaagacaccatcactcaaaacttcttaggagtccaccacagatggagggcccagaccatgggaaggccctgttcagtacacccgccgctgtgcccgaattaaaactgctttgcggagcggatgtcctcaagacttttcagaccccgaatctgtggaaagacgcacatatacaagagatcgtcgagaaattcggactggtgtgtgtagggcgtgttggtcatgaccctaaggggtacattgctgaatcacctattcttaggatgcaccagcataacattcacctcgctaaagaacctgtccagaacgaaatctccgcaacctacatccggagagcactaggtcaggggcaatccgtgaaatatttgatccctgacgctgtcattacctacatcaaggaccacggactgtacaccaagggcagtacatggaaagggaaaagcacgcaatccacagaaggtaagacctcctag

SEQ ID NO: 126486 - DNA, 429 bp, synthetic construct
  misc_feature 1..429: note = Description of Artificial Sequence: Synthetic coding sequence
  source 1..429: mol_type = other DNA
atggaaggccccgaccatggcaaagccctcttctcaactcccgccgcagtgcctgaactcaagctgctgtgtggcgccgacgttctgaaaacattccagaccccaaacctgtggaaagatgcacacatccaggaaattgtcgaaaagttcggactggtatgtgttgggagagtcggtcacgaccctaagggctacattgccgagagccccattctgcgaatgcaccaacataacatccatttggctaaagaacctgtccagaatgagatcagcgccacctacatcagacgggcccttggtcagggtcagagcgtgaaatatcttatccctgatgcggtgataacatatatcaaggaccacggcctgtacactaaagggtcgacttggaagggaaaatcaacacaatctactgaaggcaaaactagctag

SEQ ID NO: 126487 - DNA, 345 bp, synthetic construct
  misc_feature 1..345: note = Description of Artificial Sequence: Synthetic coding sequence
  source 1..345: mol_type = other DNA
atgaagagccgcatcccagtggtcttgctggcctgcggatcatttaatccaattactaacatgcacttacgcatgtttgaggtcgcccgtgaccatctgcaccagacagggatgtaccaagttatccagggaattatctcgcctgtgaacgatacatatgggaagaaggatcttgcggcttctcatcatcgtgtggccatggccagactggctctgcagacctcagactggatacgcgtggatccttgggagtccgagcaggcgcagtggatggaaacagtcaaggtcctacggcatcatcattctaagctgctgcggtccccccctcaaatggaagggccctag

SEQ ID NO: 126488 - DNA, 492 bp, synthetic construct
  misc_feature 1..492: note = Description of Artificial Sequence: Synthetic coding sequence
  source 1..492: mol_type = other DNA
atgaaatctaggatccctgtggtactgcttgcctgcggctctttcaaccccattaccaacatgcaccttcgcatgttcgaggtagccagggaccatctgcaccaaactgccgtgcccgaactcaaactgctatgtggtgccgatgttctgaagacgttccagacgcccaatctgtggaaagatgcccacatccaagagatcgtggagaaatttggccttgtgtgcgtaggacgcgtgggccatgaccccaaaggttacatcgcggagtcccctattctgcggatgcatcaacataatatccatcttgccaaggaaccggtgcagaacgagatttccgctacgtatattcgcagagcccttggccagggacagtcggtcaaatatctgatccctgatgcagtaataacctatattaaagaccacggtttgtatacaaaggggagcacatggaaaggtaagtcaacacagtctacagaaggaaagaccagctag

SEQ ID NO: 126489 - DNA, 3261 bp, synthetic construct
  misc_feature 1..3261: note = Description of Artificial Sequence: Synthetic coding sequence
  source 1..3261: mol_type = other DNA
atggccaatctgctgaaaactgttgtcaccggatgctcttgtcccctcctgagcaatctcggctcttgtaagggcctgagagttaaaaaggactttctgcggaccttctacacgcatcaggaattgtggtgcaaagccccagttaaaccaggcatcccctataaacagttgacagttggcgtccccaaggagatcttccagaacgagaagcgagtggccctttctcctgctggcgtccagaatctcgtgaaacaggggtttaacgtggttgttgaaagtggagcaggggaggctagtaagttttcagacgatcactatagagtggccggtgcccaaattcagggggccaaagaggtgctcgcttcggatctcgtggtcaaggtgagggcgccaatggtgaaccctactttgggtgtgcatgaagccgacctgttaaaaacctcgggtaccttgatcagctttatataccccgcacaaaacccagaactactgaataagctttcgcaaagaaagaccactgttctcgctatggaccaggtcccacgcgttaccatcgcacagggctatgatgctctctcgagtatggcaaatattgcgggatataaggcggttgtgcttgctgccaatcactttgggagattcttcacaggccagatcaccgctgccgggaaagtccctccagccaaaattctgattgtgggaggcggcgtcgccgggctggccagcgccggagcagctaagtcaatgggcgccatcgtcagaggattcgacactagggctgctgctctggagcagttcaaaagtctaggcgctgagcctctggaagtagatctaaaggagtcgggcgaagggcagggaggctacgccaaggaaatgtctaaggagtttattgaggcagaaatgaagcttttcgctcagcagtgtaaggaggttgatatcctgatctcaaccgccctgatccccgggaaaaaagcccctgtgctattcaataaagaaatgatcgagtctatgaaagagggatcagtggttgtcgaccttgccgcagaagcaggaggtaatttcgaaacaaccaaacctggagaactgtacattcacaagggtattactcacataggttacaccgatcttcccagcaggatggcaacccaggcttctacactgtacagcaacaacatcactaagctcctaaaagccatcagtcctgacaaggacaatttttacttcgatgtcaaggatgatttcgattttggcacgatgggacacgtcatcaggggaaccgtggtcatgaaggacggcaaggtgatcttcccggctcccacacccaaaaatattccacaaggagctcccgtaaaacagaaaactgtggccgaacttgaagccgagaaggcggctactatcacaccttttcgaaaaaccatgagcacagcttctgcctacactgcaggtctgacaggcatccttggactgggcatcgcagcaccaaacctcgccttcagccagatggtgaccacctttggactggccggcatcgtgggctatcataccgtgtggggggtgactcctgctcttcacagccccctaatgagcgtgaccaatgcaatctcgggactcaccgctgtgggaggattggcacttatgggcggtcatctgtacccatctacaacgagccagggcctcgccgccctggcggccttcatctcgtcagtcaacatcgccggggggtttttagtcacccaacgcatgttggacatgttcaagagacctactgatccccccgagtacaattacctgtacttgctgcctgcaggtactttcgtggggggatatctggcggcattatacagcggatataacattgagcagatcatgtatctgggttccggcctgtgttgcgttggcgctctcgccggactgtcaacgcagggtacggctaggctgggcaacgcactgggcatgatcggcgtggctggcggtctggctgccactctgggagtcctcaagcctggtcctgagctgctagcccagatgtcgggcgcaatggcacttgggggaactattgggcttaccattgctaagcgaattcagatttccgatttaccccaactggtagcagcattccactcactggtggggctggccgcagtgttgacctgcatcgccgaatatattattgaatatccgcacttcgcaacagacgcagctgctaatctcactaagatcgttgcttatctcgggacatatattggaggagtgacatttagtgggagcctcattgcatacgggaagctgcaggggctgctgaaatccgcgccgctgctcctcccgggccgacacctgctcaacgcaggattgctcgctgcctctgtgggcggtattatcccatttatggtggacccaagtttcacaacagggataacatgcctggggtccgtgagtgctctgtcagctgttatgggcgtgacattgacagcagcaatcggaggggccgacatgccagtcgtaattacagtccttaattcatatagtggttgggcactgtgtgctgagggctttctattgaacaacaatctattgaccatcgtaggagctcttatcggatcctctggtgcaatcctgtcgtacattatgtgcgtggcgatgaatcggtctcttgcaaacgtgatcctgggcggttatggcacaactagcactgccggaggcaaacctatggagatctcgggtacccacactgaaatcaacctggacaatgctatcgatatgattagagaggcaaactcgatcataatcactccgggctacgggttgtgcgccgctaaagcccaatatcccatagccgatctcgtgaaaatgctgaccgagcagggcaagaaggttaggtttgggattcaccccgttgcgggacgcatgccgggccaactgaacgtccttctggccgaagcgggggtcccctacgacattgtccttgagatggatgaaatcaaccatgactttcctgatacagacttggtcctggtgattggcgccaatgacacagtaaattccgcagcccaggaagacccaaattcaattatcgctggcatgccagtcctggaagtctggaagagcaaacaggttatcgtgatgaagcgaagcttgggagtcggatacgcggcggtcgataaccctattttttacaagccgaacactgcgatgctgctcggcgacgctaagaagacttgtgacgctctgcaagcaaaagtgagagaaagctatcagaagtag

SEQ ID NO: 126490 - DNA, 3261 bp, synthetic construct
  misc_feature 1..3261: note = Description of Artificial Sequence: Synthetic coding sequence
  source 1..3261: mol_type = other DNA
atggccaacctgttgaagacagtagtcactggttgctcatgcccattactttctaacctcggaagctgtaaggggctgagggtcaagaaggactttcttagaactttctatactcatcaggagctgtggtgcaaagcaccagtgaagcctggtatcccatacaagcagcttacggtcggcgtgcctaaggagattttccagaacgaaaagcgggttgccctgtcaccggccggcgtgcagaatctggtgaaacagggttttaatgtcgttgtggaatccggtgccggtgaggcctctaagttttccgatgaccactaccgtgttgctggcgctcagatccagggggccaaggaagtgttggcctctgatctggtggtgaaagttagagcccccatggtcaaccccacattaggggttcacgaagcagacctgctgaagaccagcgggactttaatcagcttcatctaccccgcccaaaatcctgagttgctgaacaaactaagccagcggaagactacggtgctggcaatggaccaggtccctagggtgaccatagcacagggttacgacgcattaagttcaatggcgaacattgctgggtacaaggccgtcgttttggccgcgaatcacttcggtcgcttcttcactggtcagatcaccgccgcaggaaaggtgccgccggctaaaattctcatcgtgggcggtggtgtggctggcctggccagcgccggtgccgctaagtccatgggcgcgatcgtgcggggatttgacacaagggccgctgcactagagcagtttaagtctcttggggcagagccactcgaggttgacctgaaagaatccggggaaggacaggggggatatgctaaggagatgtccaaggagtttattgaggccgaaatgaaactgtttgcccaacaatgcaaggaagtagacattctcatctcaacggccctgattcccggcaagaaggccccagtcctctttaacaaggagatgatcgagtccatgaaggagggatcagtcgtggtcgaccttgccgccgaagcgggcggcaattttgagactacaaaaccaggagaattgtatatccacaaaggcattacacacatcggatatactgacctcccttcgcgcatggctacccaggctagtactctgtactccaacaacattactaaactattgaaagccatttccccagataaagacaatttttactttgacgtaaaggacgactttgattttgggacgatgggacatgtgattaggggcactgtcgtgatgaaggacggcaaggtcattttcccagcgcccacacccaaaaatatccctcagggggcaccagtaaagcagaaaacagtagccgagctcgaggccgagaaagctgccaccattacaccattcagaaaaaccatgtcgactgcttcagcctacacggccgggctcacaggaattctgggcctcggaattgccgctcctaatctggcgttttcccagatggtcacaacgttcggtcttgcaggaattgttgggtaccacaccgtctggggcgtgacccctgcattacactccccactaatgtccgtgacaaacgccatctctggcctgacggctgtaggggggctcgctctgatgggaggccacttgtacccatccactacaagtcagggcctcgctgctctcgccgcgtttatctcctccgtcaatatagccggagggttcctggttactcagcggatgctggatatgttcaagcggcccaccgatccgcccgagtataattacctgtacctactcccagctgggacattcgtcggaggatatttggccgctttgtacagcggatacaacattgagcagattatgtacctcggctccggcctttgttgcgtgggggctcttgcgggcctcagcacacagggcaccgctcggctgggaaatgccttgggtatgattggtgtcgccgggggtctggctgctacgctgggcgtgctaaaacctgggcccgaactgttagcccagatgagcggcgccatggccctgggggggaccatcggcctgactattgccaaaaggatccagatcagcgacctgccacagctcgtggccgcattccactccctggtgggactggccgcggtattaacttgcatcgccgaatacatcatagagtacccccactttgctacggacgcagctgctaacctaactaagattgtagcttatctgggtacttatattggcggagtgaccttctcaggctccctcattgcatacggaaagctccaaggcctgctgaaatctgctccactgcttctgcctggcaggcaccttctcaatgctgggttgttggctgcctctgtaggcggcataatacccttcatggtagatccaagcttcaccaccgggatcacctgcctcggctctgtgtctgcattatccgcggtgatgggtgtcacgttaacggcagccatcggcggagcagacatgccagtcgtgatcactgtgctcaattcatactcaggatgggcgttgtgtgctgaagggttcctgctgaataataatttattaacaatcgtaggtgcactgatcggatccagtggcgctatcttgagttatatcatgtgtgttgctatgaaccgcagtctcgccaatgtcatcctgggcggatatggcacaactagcacagctggcgggaaaccaatggaaatcagtggcactcacaccgaaataaaccttgacaacgccattgacatgatcagggaggccaacagcattatcataacacccggctacgggctctgtgccgctaaggcccaatacccaatcgcggacctcgtgaaaatgttaactgagcagggcaaaaaggtccggttcgggatccatccagtggccgggcgtatgccaggccagctgaacgtgctcctcgcagaggctggagttccctacgacatcgtccttgaaatggatgagattaaccacgacttcccagacaccgatctggtcctggtgattggcgccaatgacactgtcaattcggctgctcaggaggacccaaatagcattattgctggaatgcctgtcctggaggtttggaaatccaaacaagtgatagtcatgaagcgaagtcttggtgtcggctacgccgccgtggataacccgatcttttacaaacctaacacagctatgttactgggcgatgcgaagaagacatgcgatgctttacaggccaaggtgcgggagtcctatcagaagtag

SEQ ID NO: 126491 - DNA, 600 bp, synthetic construct
  misc_feature 1..600: note = Description of Artificial Sequence: Synthetic coding sequence
  source 1..600: mol_type = other DNA
atggccaacctgctaaaaactgttgtcacgggatgttcctgcccactgctgtcaaacctggggtcatgtaaggggctacgcgtcaagaaagattttcttcgaactttttatacgcaccaggaactttggtgtaaagctcccgtgaaacccggaataccttataagcagttgaccgtaggcgtgcctaaggagatcttccagaatgaaaagagggtcgccctgagcccagcgggagtccagaacctggtcaagcaaggttttaatgtggtcgtcgagtctggcgccggcgaagcatccaaattctcagacgatcattatagggtcgccggtgcccaaatacagggtgcaaaagaggtgctagcctctgacctagtggtcaaagtcagggcaccaatggttaatcccactctgggcgtacatgaggcggatcttctaaagaccagcggaacactgatttcctttatttacccggctcagaatccggagctgctcaacaagctaagccaacgcaagacaaccgttttggccatggatcaggtgcctagggtgactattgctcaaggatatgatgctctctcaagcatggccaacatcgcctag

SEQ ID NO: 126492 - DNA, 654 bp, synthetic construct
  misc_feature 1..654: note = Description of Artificial Sequence: Synthetic coding sequence
  source 1..654: mol_type = other DNA
atggctaatctattaaagaccgtggtgacagggtgttcatgcccactgctctccaacctagggtcatgtaaggggctgagagttaaaaaagattttctgaggactttttacacccatcaagagctgtggtgcaaggcacccgtgaaaccaggaatcccatacaaacagcttaccgtcggagtgcctaaagaaatctttcaaaatgagaagcgtgttgctttaagccccgctggagtgcagaacctagtaaaacagggattcaatgtggtcgtagaatctggcgccggcgaagcatcaaagttctctgacgaccattaccgcgttgccggggcccagatccagggcgccaaggaggttctggcttccgacctggtggttaaagtacgggctcccatggtcaaccctacactcggagtgcatgaagccgatctccttaaaaccagcggcactcttataagctttatttacccagctcagaaccctgaactgctgaacaaactgtcgcagcgcaagacaacggtcctcgcaatggaccaggtaccacgggtgacaattgcacagggctacgacgcactgtcaagcatggcaaatattgccgggtacaaggcagttgtgttggcagcaaaccacttcggaaggttttttaccggatag

SEQ ID NO: 126493 - DNA, 1806 bp, synthetic construct
  misc_feature 1..1806: note = Description of Artificial Sequence: Synthetic coding sequence
  source 1..1806: mol_type = other DNA
atgctaagctggaatagggtgcgggcaaagctgccgagcagtcagatggtcacaaccttcgggctcgccggtattgtcggttaccatactgtgtggggagtaacacctgcgctccacagccccctgatgagtgttaccaatgcaatctccggcctgacagcagtaggggggctcgcactgatggggggccacctgtacccttctaccacgtcccagggactagctgctctcgctgcattcatttcctccgtcaacatagcaggggggtttctagtgactcagcggatgctcgatatgttcaagagacctactgatccacccgaatataattatctctatctcttgccagcaggcactttcgtgggcggatatctggccgcactttacagtgggtataatattgaacagattatgtacctgggttccggtctttgttgtgtcggtgccctagccggactgtctacccaggggacagcaaggcttggtaacgctctgggtatgataggagtggccggcggcttggctgctacgcttggtgtgctgaagccaggaccagaactactcgcccagatgtccggagctatggcactcggcggcaccataggtttgacgatcgccaagagaatccagatttccgacctacctcaactggtcgccgcatttcatagtctagtcggccttgcggccgtcctcacttgtattgcagaatacattattgagtaccctcactttgcgaccgatgcagccgctaatcttactaagatagtggcttatctcggaacatacatagggggcgtgaccttttctggttctttgatcgcatacggtaagctgcagggactgttgaagtctgccccgctgcttctccctggaaggcaccttctgaacgccggcttactcgccgcttctgtaggagggattatcccttttatggtggatccgtctttcactacaggtattacctgcttggggagcgtaagcgctctgtccgctgtcatgggcgttaccttgacggcagcaattggaggagccgacatgccagtggtgatcaccgtcttgaacagttacagcggctgggctctgtgcgctgaaggcttcctcttgaacaacaatctgctaactattgtgggtgcccttattggctcgtctggagccattctgtcatacatcatgtgcgtagcaatgaaccgttccctcgcgaacgtcattctgggagggtacggaacaaccagtaccgcagggggcaaacccatggagatttccggaactcacaccgagattaatctggataatgccattgatatgataagagaggcaaattccatcataattacccctggttacggcctttgtgcagcaaaagctcaatatcccatcgcagacttggtgaagatgctgacagaacagggcaaaaaggtcaggtttggcatccacccagtggctggaagaatgccaggacagctgaatgttctgttggctgaagctggggtgccgtatgatatcgtgcttgaaatggacgaaattaatcatgacttccctgacaccgaccttgtcttagttatcggagcaaacgacacggtgaactctgctgcacaggaagatcccaacagcatcatagccgggatgcccgttctcgaggtttggaaatcaaagcaggtgatcgtgatgaaaagatccctgggagttggctatgctgcggttgacaatcctattttctacaagccaaataccgctatgctgctgggcgacgctaaaaagacgtgtgatgcccttcaagcaaaggtgcgagagtcctaccagaagtag

SEQ ID NO: 126494 - DNA, 357 bp, synthetic construct
  misc_feature 1..357: note = Description of Artificial Sequence: Synthetic coding sequence
  source 1..357: mol_type = other DNA
atgcgccgagctggcctgggagagggcgtgccccctgggaactacgggaattacggatacgccaatagtggctattccgcctgcgaggaggaaaacgagaggcttactgagtctctgaggagtaaagtgaccgcaatcaagtctctatcaatcgaaatagggcacgaagtcaaaactcagaataaacttctggccgagatggactcacagttcgacagcaccaccggatttctgggcaagaccatgggcaagttaaaaatcctgtctcgcgggagccaaacaaaactcctgtgctacatgatgttgtttagcctgttcgtatttttcatcatctactggataatcaagctgcgttag

SEQ ID NO: 126495 - DNA, 1107 bp, synthetic construct
  misc_feature 1..1107: note = Description of Artificial Sequence: Synthetic coding sequence
  source 1..1107: mol_type = other DNA
atgaaccccgcagcagaggcagaattcaacatattgctggccaccgactcctacaaagttacacattacaaacagtatccccctaataccagtaaggtttacagctactttgaatgtcgggaaaagaaaaccgagaatagtaagctcaggaaggtgaaatacgaggagaccgttttttatggcctacagtatattcttaataagtatctgaaggggaaggttgttaccaaagaaaaaattcaggaggcaaaggatgtgtacaaggagcactttcaagatgacgtgttcaacgaaaaagggtggaattatattctggaaaagtacgacggccatctccccatcgagattaaggctgtgcctgaggggttcgttattccccgtggtaacgtgttgttcaccgtggagaataccgatcccgagtgttactggcttaccaactggatcgagactatcctcgtccagtcttggtacccaatcacggttgctaccaattcccgtgaacaaaaaaaaatactggcgaaatatctgttagagacctctggcaacttggacggactcgaatataagcttcacgactttggctaccgtggggtgtcctctcaggagactgcaggcattggagcctccgcccatcttgtcaattttaagggcacagataccgttgcaggcttggcactgatcaagaagtactatggcaccaaagatccggtcccagggtactccgtgcctgctgctgaacactctaccatcaccgcctggggtaaggaccacgaaaaggacgccttcgagcacatagtcacgcagttctctagcgtcccagtctctgtggtatctgattcctacgacatttacaacgcatgtgagaaaatttggggggaggatctgcggcacctaatagtgagccggagcacacaagcccccctgatcattcggcctgattcaggcaaccctctggacacagtgctcaaggtactcgaaatcctggggaaaaagttcccggttacggagaactcgaaggggtacaagctgctacccccctacctccgggtgatccagggtgatggcgtggatatcaataccctacaggaagtgtgtgtgctctactag

SEQ ID NO: 126496 - DNA, 183 bp, synthetic construct
  misc_feature 1..183: note = Description of Artificial Sequence: Synthetic coding sequence
  source 1..183: mol_type = other DNA
atgaaccccgcagcagaggctgagttcaatatcctgcttgccaccgattcttacaaggtaacgcattataagcagtacccgcccaatacttctaaggtgtacagctatttcgaatgtagagagaaaaaaactgaaaactccaagcttaggaaggtcaagtatgaggagacagttttctactag

SEQ ID NO: 126497 - DNA, 267 bp, synthetic construct
  misc_feature 1..267: note = Description of Artificial Sequence: Synthetic coding sequence
  source 1..267: mol_type = other DNA
atgaatcccgccgcagaagcagagtttaacatattgttagccactgatagctacaaagttacacattataagcagtatccaccgaataccagcaaggtgtattcctacttcgagtgtagagagaaaaaaactgagaactccaaactgaggaaagtgaagtatgaagagactgtgttctacggattgcagtatatcctcaacaaatacctgaagggtaaagtcgtgaccaaggaaaagattcaagaagcgaaggatgtatacaagtag

SEQ ID NO: 126498 - DNA, 1701 bp, synthetic construct
  misc_feature 1..1701: note = Description of Artificial Sequence: Synthetic coding sequence
  source 1..1701: mol_type = other DNA
atggcagcagagcaggaccctgaggcccgtgcggcagctcgcccgcttctcacagacttgtatcaggcaaccatggcattgggctactggagagccggtcgagcccgtgacgccgcagagttcgagctcttttttcgcaggtgtccttttgggggagcctttgcactcgcagcaggactgagagactgcgtgcgcttccttcgcgccttccggttacgcgacgcagacgtacaattcctagcatctgttctgccccctgataccgatccagcatttttcgaacacctacgtgccctcgattgctcagaggtgacggttcgggcactcccggaaggtagcctggccttccccggtgtcccccttctgcaggtgagtggccctttgctggttgtgcagttgctggagacaccgctgctatgcctcgtcagttacgctagcctggttgccaccaatgctgcccgccttcgacttatcgccgggcccgagaagaggttgttagagatgggtttgcgcagagctcagggcccagatggtggcctgacagcctccacgtattcctacctcgggggatttgatagctcatctaatgttctggccggccagctgcggggtgtaccagttgcaggaactctggcccattcttttgtaacttcattttccgggagcgaggtgcctccagatcctatgctcgctcccgccgctggagaaggccccggcgtggatcttgctgcgaaggcacaggtttggttagaacaagtttgcgcccaccttgggttgggggtccaggagccacatcccggtgagagggccgctttcgtggcctatgccctcgcatttcccagagctttccagggcctgctggacacgtattcagtgtggagatctgggctgccgaatttccttgccgtggcactggccttgggagaactgggatatcgggcggtaggcgtgaggctggactccggggacctgcttcagcaggcccaagagataagaaaagtcttccgtgcagcagctgcccaatttcaagtgccatggctggaaagcgtgctcatagtagtgagtaataatatcgatgaagaagccctggcccgtctagcccaagaggggtccgaggtaaatgtaatcgggattgggacttcagtggtgacctgtccccagcaaccaagcttgggcggcgtttataagctcgtcgcagtgggggggcaacccaggatgaaactgaccgaggacccagagaaacaaaccctgcccgggagcaaagctgcctttaggcttcttggaagcgatggatcccccctcatggatatgctgcagctcgctgaggagcctgtgccccaggcaggtcaggagctacgcgtgtggccgccaggtgcacaggaaccctgtacagttcgccccgcccaagtcgagcccctgctaagactgtgtttgcagcagggtcagctgtgcgaaccgcttccgtcactagccgaaagcagagccctcgctcagctcagcttaagtcgtctgtctccggaacaccggagactgcggtccccagcccagtaccaggtgggcggtggaccgccatgtcattcggctctgtgtgcccccgccctaacacttccaactgcaccggtgctgtgctccctacaggtggtgttatccgagcggcttcaggctttggtcaatagcctgtgcgctggtcagtccccttag

SEQ ID NO: 126499 - DNA, 1578 bp, synthetic construct
  misc_feature 1..1578: note = Description of Artificial Sequence: Synthetic coding sequence
  source 1..1578: mol_type = other DNA
atggccgctgaacaagacccagaagccagagccgctgcaagaccgcttctgaccgacctgtaccaggctacaatggctctgggttactggagggctgggagagctagagacgccgcagagtttgaactgttctttagacggtgtcctttcggaggggcttttgcattggcagctggactgcgcgattgcgtccgctttctgcgtgcctttcgtttaagagatgccgatgtgcagtttctcgcaagcgtccttcccccagatactgatcctgcttttttcgagcatcttcgggctttggactgcagtgaggtcacggtccgcgctctgcctgagggttctcttgccttcccaggagtgcccctgctacaggtgagtggacccttactggtcgtgcagctgctggagactcccctgctgtgcttagtgtcttatgcttctctggtggctacgaatgcagccagactgaggctgattgcgggacctgagaagaggttgttggagatggggctgagacgggctcaaggtccagacgggggtctcaccgctagcacttactcatacctgggggggtttgactctagctctaatgtgttggctgggcagctgcgtggtgtgccagtcgccggcactcttgcccattctttcgtcactagtttcagcgggtcggaagttccacctgaccccatgctggccccggctgccggggagggtcctggtgtggatttggcagccaaagcacaagtttggctggaacaggtgtgcgcgcacctcggcctcggcgtccaagaaccgcatcctggtgagagggccgccttcgtggcctatgcactagcttttccaagagccttccaagggctgcttgatacctattccgtctggagatcgggcctccccaattttttggccgtggcgctggccttgggggaacttgggtatagagctgtcggggtaaggctagacagtggagacctcctacagcaggcacaggaaattcggaaggtcttccgcgcagccgcagctcagttccaggtgccctggcttgaatccgttctcattgttgtctccaataacatcgacgaagaggcactagctagactggcacaggagggaagtgaggtaaatgtcataggtattgggacaagcgtggtgacgtgccctcagcagccatcattggggggagtttataagctggtcgccgttgggggacagccccgcatgaagctcaccgaggatccagagaaacagacgctccccggttccaaggcggcttttagactgttggggtccgatggaagtcctcttatggacatgctacaactggccgaggaaccagttccccaagcaggccaggagcttcgggtctggccacccggcgcacaggaaccatgtacagttcgacctgcccagctctgcgagcctctaccttcactggccgaaagcagagcgttggcccaactgtccctgtctcggctgtcccctgagcatagacggctacggtctcctgctcaatatcaggttgttctttccgagagactccaagcactggtgaactccctgtgtgccgggcaatccccttag

SEQ ID NO: 126500 - DNA, 1473 bp, synthetic construct
  misc_feature 1..1473: note = Description of Artificial Sequence: Synthetic coding sequence
  source 1..1473: mol_type = other DNA
atggcagcagagcaggatcccgaagcacgagctgccgcgagacccctgcttacagatttgtatcaggcgaccatggccctgggctattggcgcgccggacgcgccagagatgccgccgaatttgagttatttttccgccgttgcccattcggaggcgcgtttgctctggcggctggcctgagggactgcgtgaggttcctacgggcttttaggctgagagatgcagatgtgcagttcctggcaagtgtcctgcctcccgacaccgacccagcgttttttgagcaccttagggctctggactgttcagaagtgacagttagagcgttgcccgaggggtctttggctttcccaggtgtgccacttcttcaggtcagcggaccacttctggtcgtccagctcctcgagaccccattactgtgccttgtatcctatgctagcttggtggctaccaatgctgcccgccttagactgatcgctgggcctgagaagaggctgctcgaaatgggactgcgccgcgcgcagggccccgatgggggtctgactgccagcacttacagttatttgggtggttttgacagttcatccaacgtccttgcgggacagctgcgtggggtccccgtcgccggcactttggcgcatagcttcgttactagtttttcgggatccgaggttcctccagaccccatgcttgcacctgcggccggtgaagggccaggtgttgacctcgctgccaaggcccaggtatggcttgagcaagtgtgtgcccaccttggcctgggcgtccaagagccccatcccggtgaacgagctgcttttgtggcctatgccctggctttccctcgtgccttccagggtttgctggacacctatagtgtctggcggtctgggctacccaactttctcgcagtcgcactggctctgggtgagctgggctatagggcagtgggagtcagattggacagcggggacttattacagcaagcacaggagatccgtaaggttttccgagcagctgccgctcagttccaggtcccttggctagagtctgttctgatagtcgtgtcaaataatatcgatgaggaggcgctggctaggctggcccaggaggggagcgaagtgaacgtgatcgggattgggacctctgtggtgacgtgtccacagcaaccatcattgggtggggtgtataagctggtggctgttggcgggcaacctcggatgaagctgaccgaagaccctgagaaacagacactgcctggcagcaaagccgcctttcgacttttgggatcggacggatcacccctgatggacatgctacagttggccgaggaaccagtgccccaggctggtcaggagctccgagtttggcccccaggggcacaagaaccctgtacggtgaggcctgcccaggtggagcctcttttaagactgtgcctccagcagggtcaggtggctgcacctccaccatcctcctag

SEQ ID NO: 126501 - DNA, 1617 bp, synthetic construct
  misc_feature 1..1617: note = Description of Artificial Sequence: Synthetic coding sequence
  source 1..1617: mol_type = other DNA
atggctgctgagcaggatcctgaagctcgcgctgctgcgcgcccactgctcaccgatctgtaccaagcaacgatggctctgggctattggcgagcgggaagagccagagatgctgctgaatttgaactattttttagacggtgcccctttggtggggcttttgccctagccgctggactgcgggattgtgttagatttctccgcgcttttaggctacgcgatgccgacgtacaatttcttgcaagcgtgctccctcctgataccgaccctgcattcttcgaacatcttagggcactggactgttcagaagttaccgtgagagctttgcctgagggatcactggcctttccaggggtacctctgcttcaggtctctgggcccctcctggttgtccagctcctcgaaacccccctgctgtgtctcgtttcatacgcctccctcgtcgcgacgaacgccgcgcggctccgcctgattgccggaccagaaaagaggctgctggagatgggactaagacgcgcacaaggccccgatggagggctgactgcaagcacctattcatatctgggcggcttcgatagcagttctaatgttttagcggggcagctccgtggtgtccccgtggctggaactttagcccactcattcgtgacgagcttcagtggtagcgaggtcccccccgatcctatgctggcgcccgccgccggggaaggacccggtgtggacctggcagccaaggcacaggtttggttggagcaggtctgtgctcatctcgggttaggcgtccaggaaccccaccccggtgaacgggcagcgttcgttgcctatgccctagccttcccacgtgcattccagggactgctggatacctatagcgtttggcggtctggccttccaaactttctcgcagtggctctcgcgctgggcgagctgggatatcgggctgttggtgtgagactggattcaggcgacctgctgcagcaggcacaagaaatccggaaagtgtttagggctgccgccgcccagtttcaggtgccttggctggaaagcgtcctgattgtcgttagtaataacatcgatgaagaagccctagctaggttagcccaagaaggctcagaggtgaacgttattggaatcgggacgtccgtcgtgacctgccctcaacagccgtcgctgggtggtgtatacaaactggtggccgttggaggccagcctagaatgaagttgaccgaggatcccgaaaagcagacactccccggctccaaggcagcattccgactgcttggatcagatgggtctcctcttatggacatgctgcaattggccgaagagccggtacctcaggccgggcaggagctcagagtctggccccccggagcacaggaaccatgtactgtcagacctgcccaggtcgaacccctattaaggctgtgcctccagcagggccaactgtgcgagccccttccatctctggcagagagtagggccctggcccaactgtctctcagccgcctttctccggagcataggcggctcagaagccctgctcagtaccaagttgtactgtccgaaagattgcaggcactggtaaactcactgtgcgcaggacagagcccctag

SEQ ID NO: 126502 - DNA, 2199 bp, synthetic construct
  misc_feature 1..2199: note = Description of Artificial Sequence: Synthetic coding sequence
  source 1..2199: mol_type = other DNA
atgccagaggagacgcagactcaagatcaacctatggaggaagaggaagtggaaacgtttgcgtttcaagccgaaatcgcccaattgatgagcctgattattaacactttttattccaacaaagagatcttcctgcgagaactgatctctaactcttctgatgcactcgacaagatcaggtacgagagccttactgatccctcaaagctggattccggaaaagagctgcatatcaatctcatccccaacaaacaggaccgaaccttgactattgtggacactgggattggcatgactaaggctgatctgatcaataacctaggtacaatcgccaaatctggaacaaaagcctttatggaggctctgcaggccggggctgatatctccatgattggacagttcggcgtggggttttattctgcgtatctggttgccgagaaagtgaccgtgatcactaagcacaatgatgacgagcagtacgcgtgggagtcttctgccgggggatctttcaccgtcagaacagatactggcgaacctatgggaaggggtacgaaggtcattctgcatttgaaagaagatcaaaccgagtacttggaggaaaggcgaattaaggaaatcgtgaagaaacacagtcagttcatagggtatccaatcaccctgttcgtggaaaaggaaagagacaaggaggtgtccgatgacgaggcagaagagaaggaggacaaagaggaagagaaagagaaagaggagaaagagtccgaggataaaccagaaatagaggacgtggggtcggacgaggaggaggagaagaaggacggtgataagaagaaaaaaaagaagattaaagagaagtatattgaccaggaggagctgaacaaaacgaagccgatttggaccagaaatcctgatgatattacgaacgaggagtacggcgaattttacaagagcttgacgaatgattgggaggatcatctggccgtgaagcatttctccgtggagggccaattggaattccgcgcccttctgtttgtccctcgacgcgccccattcgatttgttcgagaaccgcaaaaagaagaacaatatcaaattgtatgtgcgacgcgtcttcatcatggataattgcgaggaactgatccccgagtatctgaattttatacgcggggttgtggattctgaggatttgcccctgaatatcagcagggaaatgctgcagcagtccaagatactgaaagtcatccgaaaaaacctcgtgaaaaagtgcctcgagctatttacagagctggcggaggacaaggaaaattataagaagttttacgaacagtttagcaagaacattaagctcggcattcacgaagacagccagaaccgaaagaagctgtccgagctgctcaggtattacacctctgccagtggtgacgagatggttagtctgaaagactactgcactaggatgaaagagaatcagaagcatatttattacataacaggagagaccaaagaccaagtggccaatagcgctttcgtggaacggctccgaaaacacggcctggaggtaatttacatgatagagccaattgacgaatactgcgtacagcagttgaaggaatttgaaggtaaaacgttggtctctgtgaccaaggagggcctcgagctgcccgaggacgaagaggagaagaagaagcaggaagaaaaaaaaactaagttcgagaatctttgcaagattatgaaggatatcctggaaaaaaaggtggagaaagttgtggttagtaacagattagtgacttcgccttgctgcattgttacctccacttatgggtggacagctaacatggagcgcataatgaaggcacaggctctacgcgacaattccacaatgggctacatggccgccaagaaacacctggagataaacccagatcatagtattatagagacactgaggcaaaaagccgaggccgataagaatgataaatctgttaaggacctggtcatccttctctatgagactgctctcctctctagcggtttctcgctggaagatccccagactcatgctaaccggatttacaggatgatcaagctcgggttggggattgatgaagacgaccccacggctgatgacaccagcgccgcagtcaccgaagagatgccccctctcgagggggacgacgatacttcaaggatggaggaggtggattag

SEQ ID NO: 126503 - DNA, 2910 bp, synthetic construct
  misc_feature 1..2910: note = Description of Artificial Sequence: Synthetic coding sequence
  source 1..2910: mol_type = other DNA
atggaaggcgaccgcgtggccgggcgccccgtgctgtctagtttaccagtacttcttctactgcctttgttaatgctgagggcagctgccctccatcccgacgaactatttccacacggagagtcctggggggaccagctgctgcaagaaggtgacgatgagagctcggccgttgtgaaacttgcaaatcctttgcacttctatgaggcccggttcagcaatctctatgtgggcacaaacggaatcatcagcacccaggattttcctagagagactcagtatgtggattatgactttcccaccgatttcccagctatcgcgccatttctggccgatatcgatacgtcacacggccgtgggagggtgctgtatagagtcaacgggaaagtaagcggccacctgcacgtcggccatacccctgtgcacttcacagatgtcgatcttcatgcctacattgtgggaaacgatgggcgagcatacacagctatcagccatatcccccaacccgccgcacaggccctcctcccccttacacctattggcggactgtttggttggctgtttgccctcgagaaaccaggctcagaaaacgggttttcgttggctggggccgccttcactcacgacatggaagtcacattttatcctggcgaggaaaccgtccgcatcacccaaacggctgagggactggaccccgagaactatctctctattaagaccaatattcaaggccaagtgccttatgtgagcgctaacttcaccgctcacatcagcccttataaggaactctaccattattcagactcaacggttacctctaccagcagtagggactattccctcacatttggggcgatcaaccaaacctggtcctatcggatccatcagaatattacctatcaggtttgcagacatgcaccaagacatcctagtttcccaaccacccagcaactgaacgtggaccgggtctttgccctgtataacgacgaggaaagggtgctccggtttgcagtgacaaatcagatcggacctgtaaaggaagacagcgacccaacccctggaaatccctgctacgatgggagtcatatgtgcgacacaactgctagatgccatcccggtactggggtggattacacctgcgaatgtgcatccggctaccaaggcgacggcagaaattgcgtggacgaaaatgaatgtgcgaccggattccaccgctgcggcccaaattccgtttgtatcaatttgcctggctcctatcggtgtgagtgccggtcaggttatgagtttgcagacgacagacatacatgtattctgattactcccccggcgaatccgtgcgaagatggctcccatacctgtgctcccgccggtcaggctcggtgtgttcaccatggaggcagtactttttcttgcgcttgtttgccgggttatgcgggagacggtcatcaatgtacagacgtagatgaatgctccgaaaatcggtgccacccggccgctacgtgctacaacactcctgggagcttctcttgccggtgccagcctggctattacggagatggattccagtgtatacccgatagtacttcttccttgaccccctgtgagcagcagcagagacatgctcaagcacagtacgcttatccaggcgcgcgcttccacattccacaatgcgatgaacaggggaatttccttcctctccagtgccacggttcaactggattctgttggtgcgtggaccccgacgggcacgaggtgcctggcacccagaccccaccaggcagtacccccccccattgcggcccttctcctgagcccacccaacggcctccgacaatctgcgagcgatggcgtgagaacttgctcgagcactatggcgggaccccccgggatgatcagtatgtgccccagtgtgacgacctcggacattttatccccctacaatgccatggaaaatcggacttttgctggtgcgtggataaggacgggagggaggttcagggcactcgatctcagcccggcaccacaccagcctgcatccccaccgtcgcgccccccatggtgcgccccacccctcgtcctgacgtgactcctccttctgttggaacattcctgctttatacacaggggcagcagatcggctatctccctctgaatggtacgagacttcaaaaagatgctgctaaaaccctgctatcactccacggatcaatcatagtcggaattgactacgactgcagagagcgcatggtgtattggaccgatgtggccgggcgcaccataagccgggctgggctggaactgggagctgagccagagactatcgtgaatagcgggttgataagccccgagggactcgcgatcgatcatattcgacggaccatgtactggaccgactccgttcttgataagatcgagagcgccctcttagatggcagtgagcgcaaagtgctcttctacactgatcttgttaatccgagggccatagctgtggatcccattcgtggtaacctgtattggaccgactggaatagagaggcaccaaaaatcgagacgagttctctagacggagagaaccgcaggatcctgattaataccgatattggtctgcctaacggactgacatttgacccattctctaaactgctgtgctgggcagacgctggaaccaagaagttggaatgtacactgccggatggtaccggacgtagagtaatacaaaacaacttaaaatatcccttcagtatagttagctacgctgatcatttctatcacacagattggagacgcgacggtgtggtgagcgttaataagcactccgggcagtttaccgatgagtacctccccgagcagagatcgcacctgtatggcattactgccgtctacccttactgccccaccgggcgtaaatag

SEQ ID NO: 126504 - DNA, 3543 bp, synthetic construct
  misc_feature 1..3543: note = Description of Artificial Sequence: Synthetic coding sequence
  source 1..3543: mol_type = other DNA
acaccgcaaactgagcggataacccattccagtatcagctggagctttctgctgcgattctcacggggtaaactgctgatgctgagagcggcagcactgcacccagacgagctctttccccacggtgagtcatggggagaccagttgcttcaggagggtgatgacgagtcctccgcagtagtcaagctcgcgaatcccctccatttttacgaggccagattttcaaatctttacgtcggcaccaacgggatcataagtacacaggatttccccagagagacccagtacgtcgattatgacttcccaacagatttccctgcgatcgctcccttccttgcggacatcgatacgagtcacggcagaggtagagtgctatatagggaagacacatcaccagctgtgctggggttggcagcccgctatgttcgggccgggtttccccgttccgcaagattcacccccacacacgcttttctcgcaacatgggaacaggtaggggcctatgaagaggtcaagcgcggcgccctgccctctggcgaactgaatactttccaggctgtgctggcatcagacggcagcgactcttacgcactcttcttataccctgccaacggtctgcaattcttggggacaagacccaaggaatcttacaatgtgcagttgcagctgccggccagagtgggcttttgtcgcggggaagccgacgatcttaaaagcgaggggccttatttctcattgacttcgactgaacaaagcgtgaaaaatctttatcagctctccaacctcgggatcccaggcgtctgggcatttcacattggctccacctctccacttgataacgtcaggcccgcagcagtgggcgatctctccgccgcgcacagctcagtgcccctgggtcgatctttttcgcacgccaccgccctggaaagcgactataatgaggacaatcttgactattatgatgtgaatgaagaggaggccgaatacctgcctggagagcccgaagaggctcttaacggccacagcagcattgatgtctcatttcagagcaaagttgacaccaagccactagaagagagcagcactctggatccccatacaaaagaaggcacctcgctaggggaagtcggtgggcccgacctgaaggggcaggttgaaccatgggacgaaagggagacccgcagccccgcccccccagaagtggatcgcgacagcctggctcccagttgggaaactccgccgccataccccgaaaacggctccatccagccctaccccgatggcggccctgtgccttcggagatggatgtgcctcccgctcatcccgaagaggaaatagtgctcaggtcatacccagcctctgggcatacaactccgctatctcgtggtacatatgaagtgggcctggaagataatatcgggagcaatactgaagtgttcacatataacgccgcaaataaggaaacttgtgaacacaatcataggcagtgttcaagacatgcattttgcactgattatgctaccgggttctgctgccactgtcagagcaagttctacgggaatggaaaacattgtctgcccgaaggcgcaccacaccgagttaacggaaaggtttccgggcatcttcacgtgggtcacacacccgtgcactttacagacgttgacttgcacgcgtacattgtggggaacgatggccgggcctacactgccattagccacatcccccagcctgctgcacaagcgttgctgcccctcactcccatcggtgggctgttcgggtggttgtttgcccttgaaaagccgggatctgagaacggtttcagcttagctggagcagcgttcacacacgacatggaggtcacattctaccctggtgaagaaaccgtgaggattactcagacagccgaaggcctggacccagaaaactacctgtccattaagacaaacattcaagggcaagtcccatatgtgtctgctaacttcacggcccacatcagcccctataaagaactttaccactactctgattctacagttacaagcacatcgagtcgggactactccctcaccttcggcgcaattaaccaaacttggtcctatagaattcatcaaaatatcacttaccaggtctgccgccacgctcccagacatccgagcttcccaaccacccaacagttgaatgtggaccgcgtgttcgctttgtacaatgacgaggaacgtgtgctgcggtttgcagtgaccaatcagatcggcccagtcaaagaagacagtgaccccacacccggtaatccttgctatgatggaagtcacatgtgcgacactaccgctcggtgccacccaggcacaggcgtggactatacatgtgagtgcgcgtcaggctatcaaggcgacggtcggaactgtgtcgatgaaaatgagtgtgccaccggatttcaccgctgtggacctaatagcgtttgcattaacctgcctggttcctaccgctgtgagtgtcggagcgggtatgagtttgcggatgacaggcatacctgtatcttaattacgccaccagctaacccgtgtgaagatgggagccacacttgcgcacccgcgggtcaagcccgctgtgtacaccatggcggatccacatttagttgcgcatgtctgcctgggtatgccggcgacggccatcagtgtaccgacgtggatgaatgttcagaaaacaggtgccaccctgcggctacctgctacaacacacctggatcattctcatgcagatgccagcctggctactacggtgacggattccagtgcatccccgattccacgtccagtttaacgccgtgtgaacagcagcaaagacacgcacaggctcaatacgcgtaccccggtgcaaggtttcacattccccagtgcgacgagcagggaaattttctaccgcttcagtgccacggttccacgggtttttgctggtgcgtggatcccgacggccacgaggtccccggtacacagaccccgcccggaagcactccaccacactgcgggccttcacccgaacctacccagaggccaccgaccatctgtgaaaggtggcgcgaaaatctcttagagcactacgggggcaccccacgcgacgaccagtatgtgccccagtgtgacgacttgggtcacttcatccctctgcagtgtcatgggaagtccgacttctgctggtgtgtggacaaggacgggagagaagtacaggggactcgcagccagccagggacgacccccgcttgcatcccaacggttgctcctccaatggtgaggcccacgcccaggccagatgttactcccccatctgtggggacattcttactctatacccagggtcagcagattgggtatttacctctgaacgggacacggctgcagaaggacgccgccaagactcttctgagcttgcacgtgaagtggattagccctgtgggcgggagggccgcgtggctgtcccagtgggagcctccacacagaccctgctgcagtgaagtggactggtgtagagaagtgctagaggggttttag

SEQ ID NO: 126505 - DNA, 3825 bp, synthetic construct
  misc_feature 1..3825: note = Description of Artificial Sequence: Synthetic coding sequence
  source 1..3825: mol_type = other DNA
atggaaggtgatcgggtgaagctcgccaaccccttacacttttacgaggcccgcttttcaaatctgtacgtgggaactaatgggatcatttctacacaagattttcccagggaaactcagtatgtagactatgacttccctacagacttcccggctattgcccctttcctggctgacatagataccagccatggtagaggtagggttctgtatagagaagacaccagtcccgcagtcctgggcctggctgcgcggtatgttagagctggcttcccccgctctgcgaggtttacccccacccatgctttcctcgctacttgggagcaggtgggggcttacgaggaagtcaagcgcggcgccctgccatctggagaattaaataccttccaggccgtgctggcctctgacggctccgatagctacgcactattcctgtatcccgctaacggcctgcagtttcttggtactcgccctaaagagtcctacaatgttcagctccagctgccagccagggttggcttttgtagaggagaggccgatgatttaaagtctgaggggccttatttcagtctaacaagtacggaacagtcagttaaaaatctttaccaattatcaaacctgggcatcccgggagtttgggctttccatattggatccacatcaccgctggacaatgttcgacccgcggcagtgggcgatctctccgcagcgcactcgtcggtacccctgggtcgcagtttttcccacgcaactgctctggaatctgactataatgaggataacttagactactacgacgtcaacgaagaagaagcggaatatctgcccggagaacccgaggaagccctaaatgggcattctagcattgacgtatccttccaatctaaggtggatactaaacctctcgaggagtctagcacgctcgatccacatactaaggaaggcacgagtctgggcgaggtgggaggaccagatctgaaaggccaggtcgaaccctgggacgagcgcgagacgcggtctcccgctcccccagaagtggatagggactctctagccccttcatgggagactccccctccctatcctgagaatgggtccatccagccttatcctgacgggggaccggtcccatccgaaatggatgtgcctcctgcccaccctgaagaggaaattgtgcttcgctcctatcctgcttcggggcacaccactcctctgagtcgcggaacgtacgaagtgggacttgaggataatatcggatctaacactgaggtatttacttataacgcagccaacaaagagacgtgcgagcacaaccaccggcaatgtagcaggcatgcgttttgtaccgactatgccacagggttctgctgccactgtcagtctaagttctacggaaacggcaaacactgtcttccagagggggccccccaccgagtgaatgggaaagtctccggacacttacatgtgggccatactccagtgcatttcaccgacgtcgacctgcacgcatatatcgtaggcaatgatggccgggcatacacggccatttcccatattccccagccggccgcccaagctttgctccctctaacgcctatcgggggcctgtttggctggcttttcgcgcttgagaagcctggaagtgagaacggtttttcgttagccggcgccgcatttacccacgacatggaagtgacattttacccgggcgaggaaactgtgagaattacccagaccgctgagggattagatccagaaaactaccttagtataaagacaaacatacagggtcaggtgccgtacgtatcagctaatttcactgctcacatctcaccctacaaggagctttaccactatagcgacagcacggtcacctccaccagttcccgcgactactcattgacttttggcgcgattaatcagacctggagttaccgaattcaccagaacattacctatcaggtttgccggcacgcaccccggcaccctagttttcccacaacacagcaattgaacgtagaccgggtgttcgccctttataacgacgaagagagagtgctgaggttcgctgtgacaaaccagatcggccccgtcaaagaggattcagatcctactccagggaacccatgctatgacggatctcatatgtgtgatacgaccgcccggtgtcatccagggacaggcgtagattacacctgcgaatgtgccagcggttatcagggagacggaaggaattgtgttgatgagaacgagtgcgctaccggcttccatcgctgtggccccaactccgtttgtattaacctcccaggatcctaccggtgtgagtgcagatccggctacgaattcgcagatgaccggcacacatgcatatacgtcgatgaatgtagcgaaaatcggtgccacccagctgccacgtgctacaatacacctggctccttttcctgtagatgccagcccgggtactatggcgacggctttcaatgtatccccgattccacgtcctccttgaccccatgtgagcagcagcaacggcacgcccaggctcagtacgcgtacccaggcgcaaggttccacatccctcagtgtgacgaacaggggaactttctgccactccagtgccatgggtcaaccggattctgctggtgtgttgaccccgacggtcatgaagtgcctggcacccaaactccccctggctctacacccccacactgtggcccctcgcctgagccaacgcagcgcccacccaccatctgcgagaggtggcgtgaaaaccttctggaacactacgggggtactccccgggacgatcagtacgtgccgcagtgtgatgatctgggacatttcatccctctgcagtgccatgggaaatcagatttttgctggtgcgttgacaaagatgggagggaagtgcagggtacaagaagccagcctggcacgacgcctgcctgcattcctacagtggccccccctatggtacgaccaaccccccgccctgacgtgactccaccctctgtaggaacattcctactgtatacgcagggccagcagatcggttacctccccctcaatggtacgcggttacagaaagacgcagccaagactctgctgtctctgcatggctctatcatcgtcggcatcgactacgattgtagggaacggatggtctattggaccgatgtagccggtcgcaccatttctcgcgccggactggagctgggcgcggagccggaaacaattgttaattccggactcatctcaccagaaggattggccatcgaccatatacggcgtaccatgtactggactgacagcgtactggataagatagaaagtgccctgcttgacgggtcggaacggaaagtcctgttctatactgatctagttaaccctcgagctatagctgtggatcccattcgcgggaacctctactggaccgactggaaccgggaagccccaaaaatcgaaacaagctcactggatggagagaaccgcagaattcttatcaatacagatatcgggctgcctaatgggctgacatttgatccatttagcaagctactgtgctgggctgacgcggggacaaaaaagctcgaatgcaccttgcccgacggcacgggccgtagagtcatccagaataatctcaagtacccatttagtatagtgagctacgccgaccatttctaccataccgattggcgacgggacggcgtggtttcagtgaataagcattccggacaattcaccgatgaatacctccccgagcaacgctcacatctctacggaataacggcagtatatccatattgcccaactgggcgcaaatag

SEQ ID NO: 126506 - DNA, 3837 bp, synthetic construct
  misc_feature 1..3837: note = Description of Artificial Sequence: Synthetic coding sequence
  source 1..3837: mol_type = other DNA
atgaccgctcgaggacttgctcttggtcttcttctgttgctattgtgtccggcccaggtgtttagtcagtcgtgcgtgtggtatggagagtgcggcatcgcttatggagataagcgatacaattgcgagtatagcggtcctccaaaacccttgcccaaagacggctatgatcttgtgcaggagctctgcccaggtttcttcttcgggaacgtgtcactgtgctgcgatgtgagacaattgcagactctgaaagacaacctgcaacttccccttcaattcctgagcaggtgtccttcatgcttttataatctgttaaatctcttttgcgaactcacatgcagccctcgccaatcacagttcctgaacgtcacggcaactgaggactacgtggacccagtgacaaaccaaactaagaccaacgtcaaagagctgcagtactatgtcggtcaaagctttgctaatgcaatgtacaacgcatgccgcgatgtggaggcacccagttccaatgacaaggcactcggtctactatgcgggaaagacgccgatgcttgtaatgccaccaactggatcgaatatatgttcaataaagataatggacaggccccgttcaccattacgcccgtgttttctgacttcccagtgcacggcatggagcctatgaacaacgctacaaaagggtgtgatgagtcggttgacgaagtaactgcgccatgttcttgtcaggattgcagcattgtgtgtggtcccaagccacagcctcctccgccccctgcgccatggacgatccttggcctggatgccatgtacgtaataatgtggattacatacatggccttcctgctcgtattcttcggggcctttttcgccgtgtggtgttacaggaagcggtattttgtgtctgagtacacacccatcgacagcaatatcgccttctctgtaaatgctagtgacaagggcgaggcgtcgtgctgtgatcccgtgtctgccgcctttgagggctgtttacgacgcctgtttacacgatggggatctttctgcgtgcgaaatcccggatgtgtgattttctttagcctggtgttcatcaccgcatgttccagtgggctcgtttttgtgcgcgtcacaacaaacccagtagatctgtggtccgctccctcaagccaggccaggctggaaaaggaatactttgatcagcacttcggcccattcttccggacggaacagctcattattagggctccactcaccgacaagcacatctatcagccctacccctcaggggcagatgtcccttttggtccccccctggacatacagatacttcaccaggttcttgatcttcaaatcgctatcgagaatatcactgcatcgtatgacaacgagaccgtgaccttacaggacatatgcctcgcccccctctcaccatataataccaattgtaccatactctccgtgctgaattactttcagaattctcacagcgtgctcgaccataagaagggggacgacttcttcgtgtacgcggattaccacactcatttcctctactgcgtgcgagcccctgcttctcttaacgacacatcccttctgcacgacccttgtttggggacattcgggggcccagtcttcccttggctagtgttgggaggctacgacgatcagaattacaacaacgccaccgcattggttatcacttttccggttaacaactactacaatgacactgaaaagcttcagcgcgcccaggcgtgggaaaaagagtttatcaacttcgttaaaaactacaagaatcccaacctgaccatcagttttaccgctgaacgatcaatcgaggacgaattgaaccgggagtcggacagcgacgtgtttactgtagtgatttcatatgccatcatgttcctctacatcagcctggcgcttgggcacatgaaatcttgccgcagactactcgttgacagcaaggtgagcctgggtatcgctggaattctgatcgtcctgtcatccgtggcatgcagcctgggcgtcttttcctatattggactcccccttacgttgattgtcatagaggtgataccttttcttgttctcgcagtcggcgttgataatatcttcattctggtgcaggcctaccagcgcgacgaacgacttcaaggggaaaccctggatcaacagttggggcgagtgctaggagaagtcgccccctccatgtttctgtcatcttttagcgaaaccgtagccttctttctcggggcactgtccgtcatgccagcagtccacacgttttccctctttgctgggctagccgtctttatagactttctcctgcaaattacctgtttcgtcagtcttctgggactggatattaaaaggcaggaaaaaaaccgcctggacattttttgctgcgtgcgcggtgcagaggacggtacatcagttcaggctagtgagtcctgcttgttcaggttctttaaaaactcttactcacctttactccttaaggattggatgcgtcctatcgtgattgccatcttcgtcggtgtgctatcattttcgatcgcagtgcttaacaaggtggacatcggactcgaccagtcattgtcgatgcccgacgattcttacatggtcgattattttaagagcattagtcagtatcttcacgccggtccccccgtgtacttcgtgcttgaggaaggacacgactataccagttccaaggggcagaacatggtttgcggagggatgggctgcaataacgacagcctcgtgcaacaaatcttcaatgccgcccagctagataattatacacgaattggtttcgccccctcttcttggatagacgattatttcgattgggtgaagccccagtcatcgtgttgcagagtcgacaatattaccgatcaattctgcaatgcaagcgtcgtggatccagcatgtgtgaggtgccggcccttgaccccagagggcaaacaaagaccgcagggtggtgattttatgcgctttctgcctatgttcctctccgacaaccctaaccccaagtgtggcaagggtggccatgccgcgtacagttccgcagtaaacatactgcttggccatgggacacgggtgggagccacatattttatgacctatcataccgtgctccagacttcagcagattttatcgacgcactgaaaaaagctaggctcatcgcatctaacgtgaccgaaacaatgggtatcaacgggtcggcataccgggtgttcccctacagtgtgttctacgtgttctacgagcagtacttaaccatcatcgatgatacgatattcaacctgggcgtctccttgggcgcaatatttcttgtgacaatggtgcttcttggctgcgagctgtggtccgccgttattatgtgcgctactatcgcaatggtcctggtaaacatgtttggcgttatgtggctgtggggaatttccttgaacgcggtatctctggtgaatttagtgatgtcatgcggcatttcagtcgaattttgctcacacataacacgagcattcactgtgtctatgaaaggcagccgtgtcgaaagggctgaagaggcactggcacacatggggtctagcgtgttctctggcatcacgctgaccaaattcggcggaattgtggtgttagcgtttgccaagagccagatctttcagatattttactttcgcatgtacctggcaatggttctcctgggcgccacccacggactgattttcctccccgtccttcttagttatatcgggcccagcgtgaataaggccaaaagctgcgccacagaagagagatataaaggcaccgaaagggagagattgctgaatttctag

SEQ ID NO: 126507 - DNA, 2883 bp, synthetic construct
  misc_feature 1..2883: note = Description of Artificial Sequence: Synthetic coding sequence
  source 1..2883: mol_type = other DNA
atgtacgtgataatgtggattacatacatggcattcttactggtcttctttggcgcattttttgcagtctggtgttatcggaaaaggtactttgttagtgagtacaccccgatcgattccaatattgcattttccgttaatgcttccgataaaggaacagcctggctactgacaagtaccttcccctctagccccgtattgccaggggaggcaagttgctgtgaccctgtcagtgctgcattcgagggctgtctgcgccgcttgtttacgagatggggttccttctgtgtacgaaacccaggctgtgtgatatttttctctctagtcttcattaccgcttgtagctctgggctcgtgttcgtgagagtgaccactaatcccgtggacctatggagtgccccatcttctcaggctaggctagaaaaagagtacttcgatcagcattttggcccatttttccgcacggaacagcttattattagagccccactgaccgataaacatatctatcaaccttatccatccggagccgacgtgcctttcggccccccccttgatattcagattctgcaccaggttttggatttgcagatcgctatcgaaaacatcaccgcatcctatgataatgagacagtcacattacaggacatctgtctcgcccccctctctccatacaacaccaactgcacgatcctaagtgttcttaattacttccagaactcacactcagtgttggaccacaagaagggtgatgatttctttgtttacgccgattatcatacgcactttctctattgtgtgcgattcatcaactttgttaagaactacaaaaatcctaacctgacaatctccttcaccgctgagcgaagcatcgaagacgaattgaaccgagaatcagactctgacgtgttcaccgtggtcatctcctacgctataatgttcctgtatatttcactagccctcggccatatgaagagttgtcgccgtcttttagtggacagcaaggtaagtcttggcatcgcaggtattcttatcgtcctttccagtgttgcttgctccttgggggttttctcgtacatcgggctgccactgacgcttattgttatcgaagtaataccctttttggtcctggccgtaggcgtcgacaatatctttatcttagtgcaggcttaccagagagacgagagactccaaggagagaccctggatcagcagctcggccgagtgttgggagaagtggcaccatctatgtttcttagcagctttagcgagaccgtggcgttcttcctgggtgccctgtcagtcatgcctgctgtgcataccttttctctgttcgccggcctggctgtattcattgacttcctgctgcaaatcacttgttttgtgtcgctgctaggtctcgatattaaacggcaggaaaagaaccggctcgatatattctgctgtgtcagaggagctgaggacggaacaagtgtgcaagcctctgaatcatgcctgtttcgattctttaaaaactcatacagtccattgctcctgaaggattggatgcgtcccatcgtgattgcgattttcgtcggcgtgcttagcttttcaattgcggtcctgaacaaggtggatataggtctcgaccagtcattgtcaatgccggacgatagctatatggtggactacttcaaatccattagtcagtatctgcacgccggccccccagtctactttgtgctagaggagggccacgactacacatccagcaaaggtcagaacatggtgtgtggcggcatgggctgtaacaatgatagcctggtccagcaaatctttaacgcagcgcagttggataactacacgcgaatcggcttcgcgccgagttcttggatcgacgactattttgactgggtgaagcctcagagctcctgctgtcgtgtagataacatcaccgatcaattttgcaatgcatcagtagtcgatcccgcctgcgttcgctgccgcccattgacacctgaaggaaaacagcgcccccagggcggagatttcatgcggttcttaccgatgttcctaagtgacaaccccaaccctaagtgtggaaaaggcggacacgccgcctactctagcgccgtaaatatcctgctgggtcacggcacgagagtgggggccacatacttcatgacgtaccatacagtattgcaaacatctgcagattttatcgacgcccttaaaaaggcacgcctgattgcgtctaacgtaaccgaaactatgggcatcaatggaagtgcctatcgggtcttcccatacagcgtgttttatgtgttttacgagcagtatttgacgataattgacgacacaatcttcaacttgggcgtgagcctgggagcgatctttctcgtaaccatggtgctgctgggctgtgagctgtggagtgctgtcatcatgtgcgctactatcgccatggttttggttaacatgttcggggtcatgtggctttggggcatatctcttaacgcagtgagtctagtaaacctcgtaatgagctgtggcatttccgtggaattttgcagtcatatcacccgggcttttaccgtgagcatgaaggggagcagagtggaaagggctgaggaagccctggcccacatgggttcttctgtcttctcggggattaccttgacaaagtttggagggattgtagtgcttgccttcgccaagtcacaaattttccagatcttttactttcgaatgtacttagcaatggtcctgctcggagccacccacggcctgatttttttacccgtccttctctcatatattgggccttccgttaacaaagccaaatcttgcgctaccgaagagagatataaaggtacggagcgcgagcggctgctgaacttctag

SEQ ID NO: 126508 - DNA, 2331 bp, synthetic construct
  misc_feature 1..2331: note = Description of Artificial Sequence: Synthetic coding sequence
  source 1..2331: mol_type = other DNA
atgtataacgcatgtcgggatgttgaggcaccatctagcaacgacaaggctttgggcctgctgtgcggaaaagatgcagacgcatgtaatgccacaaactggattgaatatatgttcaacaaggataacggccaggcgccgtttaccattacaccagtgttttccgatttcccagtacacgggatggaacccatgaataatgcaacaaagggatgcgacgaatctgtagacgaggtgacggcgccctgtagctgccaggactgtagcatagtctgcggccctaagcctcagcctccgccaccgccagcgccgtggactatcctcggacttgacgccatgtacgtaataatgtggattacatacatggcattcctgctagtgtttttcggtgcattttttgccgtgtggtgctatcgcaagcgctacttcgtctcagaatacacccctattgatagtaatatcgcttttagtgttaacgcgtctgataaaggcgaagctagctgttgtgacccagtgtctgcagcctttgagggttgtctgcgaagactgttcacacggtggggaagcttttgcgtgcggaatcccggatgcgttatcttctttagcctagtctttatcaccgcttgtagttccggacttgtgtttgtgcgcgtgaccacaaatcctgtcgatctgtggagcgctcccagttcccaggccaggctggaaaaagaatatttcgaccagcatttcggtccattctttcgcacagagcagcttattattcgcgcccccctgaccgataaacacatctatcaaccttatccttctggcgcagacgtccccttcgggccgccattagatattcagatcttgcaccaggtcttggatctacagattgctattgaaaacattacagcctcttacgacaacgagactgtcacgcttcaagatatttgcctcgcaccgttgtcgccatataacaccaactgcacaattcttagcgttctaaactatttccagaatagtcattccgtgttagatcacaaaaagggggatgatttcttcgtttatgccgattatcacactcacttcctgtactgtgtgcgcgcaccagctagcctgaacgacaccagcctgctgcacgacccctgtctgggcacattcggtgggcccgtattcccttggcttgtcctgggcggatatgatgatcaaaattataataacgcaactgccctcgtgattactttccccgtgaacaattactacaatgataccgagaaactgcaacgcgctcaggcctgggaaaaggaattcattaacttcgtcaaaaattacaaaaatcccaatctgacaatttccttcaccgctgagagatctattgaagatgaactgaatcgagagagtgactcagatgtgtttaccgtggtaatatcttatgccataatgttcctgtacattagtctcgctcttggccatatgaagtcctgcagacgactgttggtcgacagtaaagtctccctgggtatcgctggcattttgattgtcttaagttcggtcgcctgcagcctcggagtatttagctacatcggattgccgcttactttgatcgtgatcgaagtgatacccttccttgtgcttgcagtcggtgtggacaacatttttattctcgtgcaagcctaccaacgggacgagaggttacagggcgaaactctggaccagcaactggggcgggtgctgggcgaagtggccccttccatgtttctgagctctttctcagaaacagtggctttcttcttaggggctctctcggtgatgccagcagttcacaccttttctctattcgccggcctcgctgtctttattgactttttgctgcagatcacatgctttgtgtcccttttggggcttgacataaaaagacaggagaagaacaggctggatatattctgctgtgtgcgtggggccgaggacggaacaagcgtacaagctagcgagagctgcttattccgttttttcaaaaacagttatagtcccctgctgctgaaggactggatgcgcccaatagtgattgccatttttgtgggagtcctgtcatttagcatcgccgtcctgaataaagttgacataggtttggaccaatccctgtctatgccagacgacagctatatggtggattatttcaagtcgatcagccagtacctgcacgccgggcctcccgtgtactttgtcctggaagaggggcacgactatacatctagtaagggccaaaacatggtgtgcggaggcatggggtgtaataacgactccctggtgcagcagatctttaatgcggcccagcttgacaactag

SEQ ID NO: 126509 - DNA, 369 bp, synthetic construct
  misc_feature 1..369: note = Description of Artificial Sequence: Synthetic coding sequence
  source 1..369: mol_type = other DNA
atgcggtttcttgctgccacatttttactcctcgccttatccaccgctgcacaggccgaacctgtgcagttcaaggactgtgggagtgtagatggggtgattaaggaggtcaacgtatcgccgtgccctacacaaccgtgtcagctgtctaaaggccaatcttactccgtgaacgtgacattcactagtaatattcagtccaaatccagcaaagctgtggtgcatggcatactaatgggggtcccagtccctttccccatccctgagcccgacggctgtaagtccggaatcaactgccccatccagaaggacaaaacttacagttacttaaataaactgcccgtcaagtccgagtatccaagcgtatag

SEQ ID NO: 126510 - DNA, 456 bp, synthetic construct
  misc_feature 1..456: note = Description of Artificial Sequence: Synthetic coding sequence
  source 1..456: mol_type = other DNA
atgcgattcttggccgctacctttctgttgctggccctgagcacagcagcgcaggccgagcccgtccagtttaaagattgtggctccgtcgacggcgtcatcaaagaggtaaacgtgtccccatgtcctacccagccctgccagctttccaaggggcaatcctacagcgttaatgttacctttacctcaaacattcaaagcaagagcagcaaggcggtagtccatgggatcctcatgggggtgcccgtcccattcccaatacccgaacctgatggatgtaagagtggcatcaattgtcccatacaaaaagataaaacctactcttatctgaataaacttccagtcaaatccgagtacccgtccatcaaactggttgtagaatggcagttacaggacgataagaatcagtccctgttctgttgggagattcccgtgcagattgtaagtcacctgtag

SEQ ID NO: 126511 - DNA, 1053 bp, synthetic construct
  misc_feature 1..1053: note = Description of Artificial Sequence: Synthetic coding sequence
  source 1..1053: mol_type = other DNA
atggacttgaaagcactgctgtcttcgctcaatgactttgccagcctgtctttcgctgagagttgggacaacgtcggcctcctggtcgaaccttctcccccacacacagtaaatacattgtttcttactaatgatctgacagaggaagtgatggaggaggtgcttcagaagaaggcagacttgatcctgtcttaccatcctccaatttttcggccgatgaagcgcattacctggaacacctggaaagagaggttggttataagggccttggaaaaccgagtggggatctacagtccacatactgcttacgacgcagccccccaaggggtgaacaattggctcgccaaaggcttgggggcctgcacctcaagacccatccacccctctaaggcgcccaattacccaacagagggaaatcaccgagtggaattcaacgtgaactacactcaagatctggacaaggtgatgtcagctgtcaagggaattgatggggtaagcgtcacttcattttccgctcggacaggcaacgaggaacaaacccgtattaacctaaactgcacacaaaaggcactgatgcaagtcgtagattttctttcaaggaataagcaactgtaccagaagactgagattctctctctcgagaaacccctccttttacataccgggatggggcgcctctgtaccctggacgagtcagttagcctcgcaactatgattgaccgtatcaaacgccatctgaagctgagccatattaggcttgccctcggcgtgggtcgcacccttgagtctcaagtgaaggtggtcgctttgtgcgcaggttccggtagttcagtcctgcagggagtggaggccgacctttaccttaccggtgaaatgtctcaccacgacacactggacgcagcatcccaaggaattaatgtaatcttatgtgaacactctaataccgagcgaggattcctgtcagatctgcgggatatgcttgattcccatctggagaacaagattaacattattctctcggaaaccgaccgcgatcctctacaggtcgtgtag

SEQ ID NO: 126512 - DNA, 759 bp, synthetic construct
  misc_feature 1..759: note = Description of Artificial Sequence: Synthetic coding sequence
  source 1..759: mol_type = other DNA
atgctctcctcatgtgttcgtccagtaccaaccacagtcagattcgtggatagtttaatctgtaatagcagtagatcatttatggatctaaaggccttgctcagcagcctgaacgattttgccagcttgtccttcgccgagtcttgggataacgttggcttactggtggagcccagtccaccccacactgtgaacaccctttttttaactaatgatctcaccgaggaggttatggaagaggtgctgcagaagaaagcggacctgatcttatcttaccaccctccgatttttaggcctatgaagcggattacttggaatacctggaaagagaggcttgtgattagagctctggagaacagagttggaatctattcacctcatacagcctatgatgcagcaccgcagggggtgaacaactggctcgcaaagggtctcggggcctgcacctcccggccaatccacccctctaaagcccctaactatcctaccgagggcaatcatcgggtggaattcaacgtgaactatacacaagacctggacaaagtaatgtcagctgtaaaggggatcgacggggtaagtgttacctcttttagcgccaggaccggcaacgaagagcagacaaggatcaatctgaactgcacccagaaagcgctgatgcaggtggtggatttcctttcgcgcaataaacagctgtatcagaagcatcaggacaacaccttctataaatccgccgggtgtcagcttaaatttgtgacatag

SEQ ID NO: 126513 - DNA, 1134 bp, synthetic construct
  misc_feature 1..1134: note = Description of Artificial Sequence: Synthetic coding sequence
  source 1..1134: mol_type = other DNA
atgctctcatcatgtgtgaggccagtacctacaacggtgcgatttgtggattcactcatctgtaattcgtctcgcagcttcatggatttgaaagcacttctgtccagcctgaatgatttcgccagcctgagttttgcggagagctgggataatgtcggactactagtggagccctccccccctcacactgttaacactctctttctcaccaacgatctgacagaagaggtcatggaggaggtgctccagaagaaagctgacctgatcctgagctaccacccacctatcttccgtcccatgaagaggatcacatggaacacctggaaggagagactggtgattcgtgccctggagaatcgagtgggaatctatagtccacataccgcatacgatgcagcgcctcagggggtgaacaattggttggccaaaggacttggggcatgtacttcccggcctatccacccgtccaaggctccaaactacccgacggagggaaaccatagggtcgaattcaatgtgaactacactcaagacttggacaaggttatgtccgctgtaaagggcatcgacggcgtcagcgtgacctccttctctgcaagaacaggcaacgaagagcaaaccaggatcaacttgaactgcacacagaaagctcttatgcaggtagtcgatttcttgtctagaaataagcaattgtatcagaaaaccgaaatcctttctctggagaagccgcttttgctgcacaccggtatgggtcggctgtgcacccttgacgaaagcgtctcgctggcaacaatgatcgaccggatcaaaaggcatctcaaactgagtcacataaggctggcactgggtgtcggtagaacactggaatcccaggtgaaggtcgtggctctctgtgctggctcagggagtagtgttctacaaggcgtcgaggcagatctttacctcaccggagaaatgagccaccacgacaccctggatgccgcctcccagggtataaatgtcattctgtgtgagcactctaatacagaacgtgggtttctgagcgatctcagggatatgttggactctcacttggaaaacaagattaatatcattctgagtgaaaccgatcgagatccattgcaggtggtgtag

SEQ ID NO: 126514 - DNA, 489 bp, synthetic construct
  misc_feature 1..489: note = Description of Artificial Sequence: Synthetic coding sequence
  source 1..489: mol_type = other DNA
atggacctgaaggcactcctatcttctctgaacgacttcgcatccctgtcctttgccgaatcctgggataatgttggactgctagtagaaccaagcccgccccacaccgtgaataccctgtttctgacaaatgatctgacagaggaggttatggaagaggtcctacagaaaaaggctgatctgattctgagttaccacccccccatcttccgtcctatgaagaggatcacgtggaatacctggaaggagcgtctggttattcgggccttggagaatcgagtgggtatatactcccctcatacagcctatgacgctgcaccgcagggcgtgaacaattggttggccaaaggactgggagcttgcaccagtagacctatccatccctcaaaggcacctaattacccaaccgagggaaaccatcgcgtagagttcaacgtgaactacacccaggacttagacaaagtcatgtctgccgttaaaggaatctag

SEQ ID NO: 126515 - DNA, 1134 bp, synthetic construct
  misc_feature 1..1134: note = Description of Artificial Sequence: Synthetic coding sequence
  source 1..1134: mol_type = other DNA
atgcttagcagttgcgtacggcccgtcccgaccacagtgagattcgttgactcccttatttgcaactcctcacggtcctttatggacctgaaagccctactgtcctcactgaatgacttcgccagcctctcctttgccgagtcctgggacaatgtcggtctgctggtggaacccagtcctcctcacaccgtcaacactttgtttttgaccaacgacttgacagaggaggttatggaggaggtgctccagaaaaaagcagatcttatcctgagctaccacccccccatcttcagacctatgaaacggataacctggaatacgtggaaggagcgcctggtgattagagccctggagaatcgagttgggatttatagcccccataccgcgtacgatgcagctccccagggtgtcaataattggttggcaaaagggctgggcgcgtgcacctcacgccctattcacccctctaaggctcctaattaccctactgaaggtaaccatagggtggagttcaacgtgaattacacacaggacctggataaggtgatgtcggcggtgaaagggattgacggggtttccgtcaccagcttttctgctcgtaccggcaatgaggaacagacacggatcaaccttaattgcactcagaaggcgttgatgcaagtcgtggactttttatctcgcaataagcagctgtaccagaagacagagatcctctcactcgaaaagcctctgctactgcacacaggcatggggcgactgtgcacacttgatgagtccgtgtcgctggcaacgatgatcgaccgcattaaacgtcatcttaagctctctcatattagactggcactgggggtgggtagaacgctggaatctcaggtcaaagtcgtcgccctttgcgctggctcggggtcctcagtgctgcagggcgtggaggccgacttgtatttaacaggagagatgagccatcacgacacgttggacgccgcatcccaaggcataaatgtgattctctgtgaacacagtaacacagagcgggggttcctaagcgatctgagggacatgttagactcccatctggagaacaagatcaatatcattctaagtgagacagaccgggatccattacaagtagtgtag

SEQ ID NO: 126516 - DNA, 858 bp, synthetic construct
  misc_feature 1..858: note = Description of Artificial Sequence: Synthetic coding sequence
  source 1..858: mol_type = other DNA
atgctctcctcttgtgtcagacctgtgccgactacagtgcgattcgttgacagtctcatttgtaactcatccagatcctttatggaccttaaggccctgctctcgtccctgaatgactttgcatcactttcatttgcagagtcttgggataatgtcggcctgctggtcgagccctctccgcctcacacagtaaacacgctgtttctaacaaacgatctcaccgaagaagttatggaagaggtcctacagaaaaaggcagatcttattctatcctaccacccccccatctttaggcctatgaaaaggattacctggaacacatggaaggagagattggttattcgcgcactcgagaatcgggtaggcatttatagcccccataccgcctacgatgcagccccccaaggagtcaacaattggctggctaaaggtcttggagcatgcactagcagacccatccacccttccaaggctccaaattaccctacagaggggaatcatagggtagaatttaatgtgaattacacgcaagacctcgacaaggtgatgagtgcagtgaaaggcattgatggtgtgagcgtaacaagtttcagcgcgcggacaggtaatgaggagcagactcgcatcaatctgaactgcactcaaaaagccctgatgcaagtcgtggatttcctatccaggaataagcagctataccagaaaacagagatcctgtctctcgaaaagagcttgaagagcaagtcttggccttgtgtgctcgtgctcggcgcagccttttgccgcgttcttcggcttactttcacatctcaagtccgctgccccatcatgatcctgtggatgttactcccaaaagagtag

SEQ ID NO: 126517 - DNA, 1134 bp, synthetic construct
  misc_feature 1..1134: note = Description of Artificial Sequence: Synthetic coding sequence
  source 1..1134: mol_type = other DNA
atgcttagctcctgcgtgcgtcctgtcccaactacagtcagattcgtcgactccctgatttgtaacagtagtcgttcctttatggacttgaaagctctcttatctagcctgaatgacttcgctagcctctctttcgctgaatcctgggacaatgtaggcctccttgtggaaccgtcccccccccatacagtcaatactctatttctgaccaacgacctgaccgaagaggtcatggaagaggtcttgcagaagaaagccgatctcatactgagttaccatccgccaatattccgacccatgaaaagaatcacctggaatacttggaaggaaagactggtgattcgcgctctggaaaatcgggtggggatatacagtccccacaccgcttatgatgccgctcctcagggggtgaataactggctagcaaagggtctcggggcctgcaccagcagaccaattcatccctcaaaggcccccaactatcctaccgaggggaatcatcgtgtcgaattcaacgtgaactatacccaggatttggacaaagtgatgtccgcagtcaaggggatcgacggagtttcagtgaccagcttctctgctcgcactgggaatgaagagcagacccgcatcaacctgaattgcactcagaaggctctgatgcaagttgtggacttcctgagccggaataagcagctctaccaaaaaaccgaaattctctccctggaaaaaccactcctcctccacactggaatgggtaggctttgtacactggatgagagtgtgagcctggcgaccatgatcgacaggattaagcgacacttaaaactgagccatattagactcgccctaggtgttgggaggactctcgaaagtcaggtcaaagtagtggcattgtgtgccgggtcaggctcgagcgttttgcagggagtagaggctgacctgtaccttactggggaaatgagccatcacgacaccctcgatgcagctagtcagggcatcaatgttatcttgtgcgaacactcaaacactgagcgcggatttctcagcgatcttagggacatgcttgactcgcacctggagaataaaatcaatatcatcctgagtgaaaccgaccgcgacccgttgcaagtggtttag

SEQ ID NO: 126518 - DNA, 630 bp, synthetic construct
  misc_feature 1..630: note = Description of Artificial Sequence: Synthetic coding sequence
  source 1..630: mol_type = other DNA
atggaccttaaggcattacttagtagtttgaacgacttcgcttcactgtctttcgcagagagctgggacaatgttggcctgctggtagagccctctccaccccatacagtcaacactctgttcctgaccaacgatctgacggaggaggtgatggaagaagtactccagaaaaaagcagacctcatcttatcctaccaccctcccatcttccgtcctatgaagaggattacctggaatacctggaaagagaggttagttataagggcattagagaatagagtggggatttatagcccacatacagcttatgatgcagcacctcagggtgttaacaactggctggctaagggcctgggcgcctgtacttcacgacctatccatccttcaaaggcacccaactacccaacagagggaaaccacagggtggaattcaacgtaaactacacccaagacctagataaggttatgtcggcggttaagggcattgatggagtatctgtcacctccttcagtgccagaactggcaacgaagaacagaccagaatcaaccttaactgtacccaaaaggccttaatgcaagttgtggactttctcagcagaaataagcaactgtaccagaaaaccgaatag

SEQ ID NO: 126519 - DNA, 492 bp, synthetic construct
  misc_feature 1..492: note = Description of Artificial Sequence: Synthetic coding sequence
  source 1..492: mol_type = other DNA
atgctgtcttcttgcgtgcgcccagtgccaacaactgttaggttcgttgacagtcttatctgcaattcatctcgatcctttatggatctcaaagctttattgtcatccctgaacgacttcgcgtctctgtctttcgcagaaagctgggataacgtgggcttactcgtcgagccaagtcctcctcacactgtaaacaccctgttcttgaccaatgacctcaccgaagaggttatggaggaggtgctccagaaaaaggctgacttgatcttgtcctaccatccccctatctttcggccgatgaagcgtattacttggaacacatggaaagaaaggttggtgatacgcgcacttgagaatcgagtgggaatttatagcccacacaccgcatatgacgcagcccctcagggcgtgaataactggctcgccaaaggcctaggtgcctgtactagccggcccatacacccaagcaaagctcccaactaccccacgtag

SEQ ID NO: 126520 - DNA, 4749 bp, synthetic construct
  misc_feature 1..4749: note = Description of Artificial Sequence: Synthetic coding sequence
  source 1..4749: mol_type = other DNA
atggccggcccagggggatggagggatcgggaggtcacagatctggggcacctacctgaccccacaggaatttttagtctcgataagactataggcctcggcacatatgggcggatttacctgggcctacatgaaaagacaggagccttcacagcggttaaagtgatgaacgcgcgcaagacacctctacctgagattgggcgcagagttcgcgtcaacaagtaccagaaaagcgtgggatggagatacagcgatgaagaggaagacttaaggaccgagctgaatctgctgcgaaagtattccttccacaaaaacatcgtctccttctatggcgcatttttcaagctctctccgcctgggcagcgacatcagctgtggatggtcatggaactgtgcgcagctggaagcgtgactgatgtggttaggatgaccagcaaccagtcactgaaggaagactggattgcctatatttgcagggaaatcctccaggggcttgctcacttgcacgctcatagggttattcatagggatattaagggccagaacgttcttctgacacataacgctgaggtcaagctggtggatttcggggtgtccgcccaagtgtcaagaaccaacgggcgacgaaatagttttatcggaaccccctattggatggcccctgaagtcatcgactgtgacgaagaccctcgtaggtcttacgactaccgttccgatgtctggtcagttggcattaccgccatcgaaatggccgagggcgccccgcctctttgtaacctgcagcccctggaggcactgtttgtgatcctccgagagagtgcccctaccgtgaagtccagcggttggtccaggaaattccacaacttcatggagaagtgcactataaagaactttctgttccgaccaacctccgcaaacatgctgcagcatccattcgtccgcgatatcaaaaatgagaggcacgtggtggagtctttaacgagacatctaaccggcatcataaagaaacgacagaagaaaggtattcccctcatctttgagagggaggaagccatcaaggagcagtatactgttagacgattcaggggcccctcctgcacacatgagctgctgagactgcccacctcctccagatgccggcctttgcgcgtgcttcatggggaaccttcacagccccggtggctccctgaccgcgaggaaccccaagttcaggctctgcagcagttgcaaggcgcagcaagagtctttatgcccctgcaggcactggattcggccccaaagcctctaaaaggacaagcgcaggccccccagagactgcagggtgccgctagggtctttatgccccttcaggcacaggtcaaggccaaggcttcgaagccgctgcagatgcaaattaaggcccctccgcgcctgaggcgggcggctcgggtcctgatgcccctgcaggctcaggttcgtgctcctagactcttgcaagtccagagccaggtgtcgaaaaagcagcaggctcaaacccagacatcggagccgcaagatttggaccaggttcccgaggagtttcaggggcaggaccaagtgcccgaacagcagagacaaggacaggctccagaacagcagcagcgccataatcaggttccggaacaggaactggaacagaaccaggccccagagcagcctgaggtgcaagagcaggctgcagagcctgcccaggcagagaccgaggcagaggagcctgaatccctcagggtgaatgcacaggtgtttttgccattgctgagccaggatcaccacgtgcttctgccacttcacttagatacccaggtgctgatccccgtcgaggggcaaactgagggtagcccacaggcacaggcctggactctcgagcctccacaggccattggatcggtccaggctctgatcgaagggctatcaagggacttactgcgtgcccccaatagtaacaattccaaacccttagggccgcttcagacactgatggagaacctgagcagtaatcgcttctactcacaaccggaacaggctagagaaaagaagtcaaaagtgtccacactccgacaggccctggcgaaacgactgagccccaaacgcttccgggccaagtcctcttggcggcctgaaaagcttgagcttagcgatcttgaggccagacgccaaagacggcaacggcgctgggaagatattttcaaccaacacgaagaggaattgcgacaggtcgataaggacaaagaagacgagagcagcgataacgacgaagtcttccactccatacaggccgaagtgcaaattgagcctttgaaaccgtatattagcaaccccaaaaagatcgaggtgcaagagaggtctccttcagtgccaaataaccaggatcacgcccatcatgtgaaattttccagcagcgtcccccagcgaagtctcttggaacaggctcaaaaacctattgacataaggcaacgatcttctcagaatcggcagaattggctcgctgcatcggagagtagctccgaagaggaaagtccggtcaccggtaggcgatctcagtctagccctccatatagtacgatcgaccagaaattattggtcgacatccacgtcccagacggttttaaagtcggtaaaattagtccacccgtgtacctgactaatgagtgggtgggatacaatgcattgtctgagatttttagaaacgactggctgacccccgcacccgttatccagccacccgaggaagatggagactacgtagagctgtatgacgcttcagccgacacggatggggatgatgacgacgagtcgaacgacacgttcgaagacacttatgatcacgccaacgggaatgacgacctcgacaatcaggtcgatcaggccaacgacgtatgcaaagatcatgatgatgataataataagtttgtagacgacgtgaataacaattattatgaggcacccagctgcccgagagctagttatgggagagatggctcctgcaagcaggatggatacgacggcagtagggggaaggaggaagcctacagggggtatggaagtcacacagccaataggagtcacggtggatctgccgcatctgaagacaacgccgccatcggcgatcaggaggaacacgccgcaaacatcggctccgaaagaagagggtctgaaggggacggcggaaaaggagtggtccgcaccagtgaagagtctggggcactcggcctcaatggggaggagaattgctctgaaacggacgggccgggcctcaaaaggcctgccagtcaggacttcgaatatctccaggaggagccaggaggcggcaatgaggcatctaacgccatcgactctggagctgccccctccgcccctgaccacgaatctgataacaaggatatatctgagtcctcaacgcagtcagatttctcagctaaccactcaagtccatccaaaggctctggcatgagcgccgatgccaactttgcttcagccattttgtatgctgggttcgtggaagtgcctgaggagtcccccaagcagccttctgaggtgaatgtgaacccactgtacgtcagcccggcctgcaagaaacccctcattcacatgtacgagaaggagtttactagcgaaatttgctgcggatccttgtggggagtgaatctgctgctcggcactcgctcgaatctttaccttatggataggagtggtaaggccgacatcactaaactcattaggaggcgaccattcaggcaaatccaggtacttgaacctctgaatctgctcatcaccatcagcggccacaaaaaccgccttcgcgtctatcatttgacctggctgcggaataaaatacttaacaacgaccccgaaagtaaaagaaggcaagaggagatgttgaagacagaagaggcctgcaaagccatcgataaacttacaggatgcgagcactttagcgtccttcaacacgaagaaacaacttatattgctatcgcgctcaagtctagtatacacctttatgcttgggccccgaagtcattcgatgaatccaccgcgattaaagtgtgcatcgaccaatcggccgatagcgagggcgactatatgagttatcaggcatacattagaatccttgcaaagatccaggctgcggatccggtcaaccgctttaagcgccctgacgaactgctgcacctcctcaagctgaaagtgttcccaacccttgaccataaacccgtcactgtcgatctggctattggctcagagaaaaggctgaagatattcttcagcagcgccgacggatatcacctgatagacgccgagagcgaagttatgagtgacgtgaccctgcccaagaaccccctcgaaatcattatcccccagaacatcataattctgcccgactgtctgggcattgggatgatgctaactttcaacgccgaggccctgagcgtagaggccaacgagcagttatttaagaagatcttggagatgtggaaggatattccttcaagtattgcattcgagtgtactcagcggacgaccggctgggggcagaaggctatcgaagtgaggtcgctgcagagtcgagtccttgaatcggagctgaaaaggagatctatcaagaagctgcgattcctgtgcacaaggggtgataagctgttttttacgagtaccctgcgaaaccaccactctcgggtgtatttcatgactcttggcaaactggaggagctgcaaagtaactacgacgtgtag

SEQ ID NO: 126521 - DNA, 4752 bp, synthetic construct
  misc_feature 1..4752: note = Description of Artificial Sequence: Synthetic coding sequence
  source 1..4752: mol_type = other DNA
atggctggtcctggcgggtggcgggacagagaagttacagatctcgggcacctgcccgatcccaccggtattttctctcttgacaagacaatcggcctgggtacctacggcaggatatacctaggcctgcatgagaaaacgggagcctttacggcagttaaagtaatgaacgcacggaaaactcctctgcctgagattggcagacgggttcgtgtcaataagtatcaaaaatccgtagggtggcggtactcagacgaagaggaggatctccgtaccgagctgaatctgctgcgaaagtactctttccacaagaatatcgtgagtttttacggcgcgtttttcaagctgtctcctccgggccagcgacaccagttatggatggtcatggaattgtgcgccgcaggcagcgtcacagatgtagttaggatgacgtccaatcagtcccttaaagaagactggatagcgtatatatgccgggaaatcctccaggggttagcccaccttcacgcgcacagggtgatacatagggacattaaaggccagaatgtcctattaactcacaatgccgaagtgaagctggtggatttcggcgtgtctgcccaggtatcgagaactaatggaagaagaaatagcttcataggtactccctattggatggctccggaagtgatcgattgtgatgaggatccaagacgctcctatgactacagatcagatgtgtggagcgtgggtatcaccgccatagaaatggcggaaggggcaccaccgctctgtaatttacaacctttggaggcactcttcgtgatactcagagagagcgccccgacggtaaaatctagtggctggagccgcaagttccataatttcatggagaagtgtaccatcaaaaacttcctgtttcggccaacttcagctaatatgctccagcacccattcgtgcgagatatcaaaaatgagcggcatgtggtcgagtcccttaccaggcatttgaccgggattataaaaaaacggcagaaaaaaaaaggaatcccattaattttcgaaagggaagaagccatcaaggagcaatatacagtgagacgcttcaggggcccaagctgtactcacgagctgttgcgcttaccaacctcgagtcgatgccgtccgcttcgcgttcttcacggcgaaccatcacagcctcgatggcttccagacagagaggagccccaggtgcaagcactgcaacagctgcagggagccgctcgggtattcatgcctctgcaggccctggactccgcgccaaaacccctgaagggccaggctcaagctccacagcggttacagggcgccgccagggtgtttatgcctctgcaggcccaagtgaaggcgaaagcgtcaaaacctctccaaatgcaaataaaagcacctccccggcttagacgcgcagcccgcgtcttgatgcctctgcaagcacaagtgcgggcccctaggttgctccaagtgcagtcacaggtcagcaaaaaacaacaggcacagactcagacatcagagccccaagatctcgatcaggttcctgaggaatttcaagggcaggaccaggtgcctgagcagcagaggcaaggacaggcccccgagcagcagcagcgtcacaatcaagttcctgagcaggagctcgaacagaaccaggcacctgaacagccagaggttcaggagcaggccgccgagcctgctcaggccgagaccgaagccgaggagccagagagcctacgcgtcaacgctcaagtctttctgccgcttttatctcaggatcatcatgtgctcctaccgctccatctggacacccaggtgcttatccctgttgaggggcagactgaaggtagcccacaggcacaggcatggacactcgagccccctcaagccatcggttccgttcaggcgctgattgaggggttaagccgtgatctgcttagggctccgaattccaataattctaaacctttgggtcccctgcaaactctcatggaaaatttaagttccaaccgtttctactcacagccagaacaagcaagggagaaaaaatctaaggtctcaaccctgcgccaggctctcgctaagaggctgtctcccaagagattccgtgcgaagtcaagctggagacccgagaagctagagctttctgaccttgaagctaggcgccaacggcggcagagaagatgggaggacattttcaaccaacacgaagaagaactgcggcaagtggataaggataaagaagacgaatcctcggacaacgacgaggtgttccacagtatccaagcggaggttcaaatagagccactaaagccgtacatctccaacccaaaaaaaatcgaggtgcaggagcgttcgcctagtgtgcccaacaatcaggatcacgcccatcacgtcaagttttcatcctcagtgccgcagcgaagtctgctcgagcaggcccagaaacctattgatatccggcagagatcctctcagaacaggcagaactggctcgcagcatctgaaagtagcagtgaagaagaatcacccgtgactggacgacgatcacaaagctcaccaccctacagcaccatcgaccagaagttgctggtggacattcatgtgccggacggttttaaagtcggtaagatctctccccctgtctacctcaccaatgagtgggttgggtataatgctcttagcgaaatattccggaatgactggctcacaccagctccggttatacagcctcccgaggaagacggtgactatgtagaactgtacgacgcctcagccgacaccgatggagatgacgacgacgaaagtaatgacacatttgaagacacatacgaccacgctaatggcaacgacgatttagataatcaggtcgaccaggccaacgacgtgtgcaaagaccatgatgatgacaacaacaagttcgtcgatgatgtgaacaacaattattatgaggcaccatcatgcccaagagccagctatggccgagacggaagttgcaagcaagatggctacgatggatctagagggaaggaagaagcctaccgcggttatggcagccatacagcgaatagatctcatggaggttcggcagcatccgaggataacgccgctataggagaccaggaagagcatgctgctaatatagggagcgagcgtcgcgggtctgagggcgacggcggcaagggagtcgtgcgcacctctgaagagagcggcgccttggggctcaatggcgaagagaattgttcagaaaccgatggccctggactcaaacgacccgccagtcaagactttgagtacctacaagaagagccaggtggcggaaacgaggcttcaaatgcaatagatagtggcgcagcccccagcgctcccgaccatgagtctgataacaaggacataagcgaaagtagcactcagtcagatttttccgccaatcactctagtccctccaaaggcagtggaatgtcagccgatgctaacttcgcgagcgccatactctacgctggatttgtggaagtccccgaggagagcccaaagcaaccaagcgaggtgaatgtgaatcccctatatgtcagccccgcctgcaaaaaacctttgatccacatgtacgaaaaggagtttacctccgagatctgttgcggaagcctctggggcgtgaatctcctcctcgggaccagatccaatttgtacctcatggaccgatccggaaaggcggacattaccaagctgatcagaagaaggccgttccgccagatccaggtactagaacccctaaacctgcttatcacgattagtgggcacaagaatcggctgagggtctatcacctgacgtggctaagaaacaagatactgaacaatgaccccgagtcaaagagacgacaagaggaaatgttaaaaacggaggaagcttgcaaagccatcgataagctgacaggatgcgaacacttctcagtgttgcagcacgaggagacaacatacatcgccattgctctgaaaagcagcatccatttgtatgcgtgggcaccgaagagtttcgacgaatctacggcaataaaagtgtgtatcgatcagtctgcggactctgagggtgattatatgagctatcaggcctacattcgaatcttggccaagatacaggcagcagatcccgtgaatcggtttaagcgtcctgacgaattgctgcatctactcaagctcaaggtctttcccacattagatcacaagcctgtcacggtcgatctcgcaattggaagcgagaagaggctgaagatattcttctcctctgctgacggctatcaccttattgacgccgagtcagaggtgatgagcgatgtaacactgccaaaaaatcctctggagatcatcattcctcagaacattattattctgccagactgtctagggatcggcatgatgctgaccttcaacgcggaagccctctcggtggaggccaacgagcagctgtttaaaaagattctggaaatgtggaaagatatcccatcgagtattgctttcgagtgcacacaaaggacgacaggctggggacagaaggcaattgaggtgcggtccttacagtctcgggtgctggagtcggagctcaagcgtcgctctatcaaaaagttacggtttttatgtacacgtggagacaagttgttctttacgagtacactgcgaaatcaccatagccgggtgtattttatgacccttgggaaactagaggaattgcagagtaactacgatgtttag

SEQ ID NO: 126522 - DNA, 567 bp, synthetic construct
  misc_feature 1..567: note = Description of Artificial Sequence: Synthetic coding sequence
  source 1..567: mol_type = other DNA
atggctgggccaggagggtggagagacagagaggtcacagatctgggacacctgccagacccgacagggatcttttcactggataaaactataggtctgggcacctacggtagaatctatctagggctgcacgagaaaacaggcgcatttacggctgttaaggtcatgaacgcacgtaagacccctctgcccgaaatcgggaggcgagttcgcgtgaataaatatcaaaagtcagtaggctggcgatactccgacgaagaggaggaccttcgcactgaattaaacctgctgcgcaaatattcgttccataagaatatcgtctcattctatggcgcgtttttcaaactgagccccccaggccagagacaccagttgtggatggtcatggagttgtgcgctgctggatccgttaccgacgtcgtgcggatgacatctaaccaaagcctgaaggaagattggatcgcatacatctgtcgggaaatcctccaaccgaaggtgatcttcttagggaccgggtgtagcgattcttctttgaaaaaagaattgtgcctgaaacatcagaactag

SEQ ID NO: 126523 - DNA, 492 bp, synthetic construct
  misc_feature 1..492: note = Description of Artificial Sequence: Synthetic coding sequence
  source 1..492: mol_type = other DNA
atgcaagtcccaagagaacggatcaagatcgctttccgactgtggatacccatccttgtgattcggatagtcgtcgcagggacatggcctcaggctcctggactgagcaccttaggtctgaatataatcatcctgcccgactgtctcgggatcggaatgatgctgacctttaatgccgaggcactctcagtggaggccaacgagcagctgttcaaaaagattctcgagatgtggaaagacatcccatccagcatcgcattcgagtgcacacaacgtaccacaggctggggtcagaaggcgattgaggttagatccttgcagagcagggtgctggaaagcgagttaaaacgtaggagcatcaaaaagctgcgcttcctttgtaccaggggagacaagctgttttttacaagcacgctacgaaaccatcactccagagtgtactttatgaccctgggcaaactggaggagctgcagtcaaactacgatgtatag

SEQ ID NO: 126524 - DNA, 1449 bp, synthetic construct
  misc_feature 1..1449: note = Description of Artificial Sequence: Synthetic coding sequence
  source 1..1449: mol_type = other DNA
atgcttaaattccaagaggctgctaaatgtgtatcaggttccacggccatcagcacctatcctaaaacactgattgcaagaaggtatgtactacagcaaaaactcggcagcggctctttcggaactgtgtatctcgtgtccgataagaaggcaaagcggggggaagagctgaaggtgctgaaagaaatcagcgtgggggaacttaatcctaacgaaaccgttcaagccaatctagaagcccagctgttgtcaaaactggatcatccagctatagttaaattccatgcatcctttgttgaacaggacaatttctgcatcataacagaatattgcgaaggaagagatcttgacgataagatccaggagtacaagcaggctggtaaaatctttccggagaatcagattatagagtggttcattcagcttctgctaggcgtagactacatgcacgagcggagaatcctgcatagggatttaaagtccaagaatgtcttcttgaaaaacaatttgttaaaaataggtgatttcggcgtaagtcggcttctgatggggagttgcgaccttgcaaccaccttgaccggtactccacattacatgagccccgaggcactgaagcaccaggggtacgacaccaagagcgatatctggagtcttgcctgcattctctatgaaatgtgttgcatgaaccacgcctttgccggttccaactttctttcaatagttctgaagatcgtggaaggtgataccccatctttaccagaaaggtaccctaaggagctgaacgccattatggaaagcatgttgaacaaaaatccgtctctgcgcccaagcgctattgagatcctcaaaatcccttatcttgacgagcaactgcagaacttaatgtgtagatattccgagatgacacttgaggacaaaaacctggattgtcagaaagaagccgcacatatcataaatgccatgcagaagcggattcatttacagaccctgagagctctgtcggaggtccaaaagatgactccccgagaacgaatgcgtcttcgaaagctccaggctgccgatgaaaaagcccggaagctgaagaagatcgtcgaagagaaatatgaggagaacagcaaacgcatgcaggagctgcgctcacgaaatttccagcaacttagtgttgacgttctgcatgagaagactcacctcaaagggatggaagaaaaggaggagcaacctgagggaaggctgtcttgttcacctcaggacgaagatgaggagcgctggcagggcagagaagaagaatcagacgagcccacccttgagaatttgcctgagtcacaacccattcctagcatggacctccacgagcttgagtcaatcgttgaagatgccactagcgatctgggctaccatggcgattgcaacttgatatccctagatgaatattggaaaaacgaaaagtag

SEQ ID NO: 126525 - DNA, 1938 bp, synthetic construct
  misc_feature 1..1938: note = Description of Artificial Sequence: Synthetic coding sequence
  source 1..1938: mol_type = other DNA
atgctcaaatttcaggaggccgcaaagtgcgttagcgggagcaccgccattagtacctaccccaagaccctgattgccagacgatatgtgttgcagcagaagctggggagcgggagttttgggaccgtatacctggtctctgacaaaaaagcaaaaaggggggaggaactgaaggttctgaaagagatcagcgtcggcgagctcaaccccaatgagacagttcaggccaatctggaggctcagctgctgtcaaagctcgaccaccctgctattgtaaagttccacgcctcgttcgtggaacaagacaacttctgcatcattacagagtattgcgagggtcgcgatctggatgacaagatacaggaatataaacaggccggaaaaattttcccggaaaatcagatcatcgagtggtttatacagctgctgctgggggtggattacatgcatgagagacggatcctgcatcgggacctcaagtcgaaaaacgtgttcttgaagaataacctgctcaagattggcgactttggcgtcagtagattgctcatgggctcgtgcgacctggctacaactctcaccgggaccccacattacatgagcccagaagccctaaaacaccaaggctatgatacaaaaagtgatatatggagcttggcatgtatcttgtatgagatgtgctgcatgaatcacgctttcgccggctctaactttctaagtatcgtcctcaagatagtggagggggacaccccatctctgcccgaacgctatccaaaggagttgaacgccattatggagagtatgttgaacaaaaacccctcactgcgtcctagtgccattgagatactgaagattccatatcttgacgagcaactccagaacctgatgtgccggtattcagagatgaccctggaggataagaacctggactgccaaaaggaagcagcccatattataaatgcaatgcaaaagaggatccacctgcagacgcttagagccctgagcgaggtgcagaagatgactccccgggagcgcatgcgtctccggaaactgcaggccgcggacgagaaggcccggaagctgaagaagatagtggaagagaagtatgaagagaactctaaacgaatgcaggagctgaggagtcgaaactttcagcaactaagcgtggacgtcttgcatgagaagactcacctgaaaggcatggaggagaaagaggaacagcctgagggccgcctctcctgcagcccccaggatgaagacgaagagaggtggcaggggcgggaagaggaatccgacgaacctacactggaaaacttgcccgagtcccagcctatcccttctatggacttacacgagttggaaagcattgttgaagatgccactagcgacctcgggtatcacgagatccctgaggatccactggtcgcagaagagtattacgccgacgcctttgactcctactgcgaggagtctgacgaagaggaggaagagattgccctcgagaggccggaaaaagagatccggaacgaaggctctcagccagcctacaggactaatcagcaggacagcgacattgaggccctggcccggtgtctcgaaaacgtactaggctgcacatccctagacaccaaaactataacgacaatggcagaagatatgtctcccgggcccccgatctttaactcagtgatggcccggactaaaatgaagcgcatgcgcgaaagtgccatgcagaagctcggaaccgaagtttttgaggaggtgtacaattacctgaaacgggcacgtcatcagaacgccagcgaggccgaaatccgggaatgtctggaaaaggtcgtacctcaagctagtgattgctttgaggttgaccaattattgtactttgaggagcaattattgatcacaatgggaaaagagccaactctccagaatcacctttag

SEQ ID NO: 126526 - DNA, 1386 bp, synthetic construct
  misc_feature 1..1386: note = Description of Artificial Sequence: Synthetic coding sequence
  source 1..1386: mol_type = other DNA
atgcacgagagacggatattgcaccgtgacctcaaaagcaagaatgttttccttaagaataacctgcttaaaattggggatttcggagtgtcaaggctgcttatgggctcctgcgatctcgccactaccctaacgggtactcctcattacatgtctcctgaggcactgaagcaccaaggctatgacacgaaatccgatatttggagcctagcctgtattttgtatgaaatgtgctgcatgaatcacgcatttgcgggttctaatttccttagcatagtgctcaaaattgtcgagggcgacactccaagtttacccgagagatacccgaaggaactgaacgccattatggagtccatgctcaacaaaaaccccagcctgcggccatccgcaatagagatcctcaagatcccctacctggacgagcaactacagaatctaatgtgtcgatattccgagatgaccttggaggacaaaaaccttgattgccagaaggaggcagcccacatcattaatgctatgcaaaaacgaattcatctgcaaaccttgagagcgctttccgaggtgcagaaaatgaccccgagagaacgaatgcgtctgcggaagttgcaagccgcagatgagaaagccaggaagctcaagaaaattgtagaggaaaaatacgaagagaatagtaagcggatgcaggagcttcgcagtaggaattttcagcagctgagtgtggatgtcctccatgagtctgacgagcccaccctggagaacctcccagaatctcagcctatcccgtcaatggacctgcacgaattagagagtattgtcgaggacgctacctccgatttggggtaccatgagatcccggaggacccccttgtggccgaagagtactacgccgacgcatttgatagctactgtgaggagtcagatgaggaggaagaggaaatcgccctggaacgaccagagaaagagatcaggaatgaaggttcacagccggcctacagaaccaatcagcaggatagcgatatcgaagctctggcccggtgcctagaaaacgtgctggggtgtactagtctcgatacaaagaccatcactaccatggccgaggatatgtctcccgggccacctatctttaatagcgtcatggccagaacgaaaatgaaaagaatgcgcgagtcagcgatgcaaaagctggggactgaagtgtttgaggaagtctataactacctgaagcgagctagacaccagaatgcatccgaagctgaaattcgcgagtgtctggaaaaggtcgtgccccaagccagcgattgttttgaggtggaccagctgctttacttcgaagaacaattactgattactatgggcaaggagccaaccttgcagaatcatctttag

SEQ ID NO: 126527 - DNA, 1938 bp, synthetic construct
  misc_feature 1..1938: note = Description of Artificial Sequence: Synthetic coding sequence
  source 1..1938: mol_type = other DNA
atgctcaagttccaggaagctgccaaatgtgtgtcagggtcaacagctatcagcacctacccaaaaaccttaattgctcgccgttacgtgctccagcagaagctgggatccggctcatttggcacagtgtatcttgtgtcggacaagaaggcaaaaaggggagaagaactgaaagtgctgaaagagatcagcgtgggagaattgaatcctaatgaaacggtccaggccaacctcgaggctcagctcctgtctaaacttgatcaccctgctatagtaaaattccacgcctccttcgtcgagcaggataacttttgcattatcacagagtattgcgagggtcgggatcttgacgataaaattcaagagtacaagcaagccggaaagatcttccctgagaatcagattattgagtggtttatacagctgctcttgggcgtcgactacatgcacgagcggaggattttgcaccgggacctaaaaagcaaaaacgtctttctcaagaataaccttctgaaaattggcgactttggagtttcaagacttctcatgggcagctgtgatctggctaccaccttgacaggtacaccacactacatgtctcctgaggctctaaagcaccagggatacgataccaaaagcgacatctggagccttgcttgtattttatatgaaatgtgctgtatgaaccacgcattcgctgggtccaacttcttaagcatcgtgctcaagatagtggagggagatacaccatctttgcccgaacggtatcccaaggaactgaatgctattatggagtccatgctaaataaaaatcctagtctccgtccgagtgctattgagattctgaaaatcccctatctggatgaacagctccagaatctgatgtgccggtattctgagatgaccctggaagacaagaatttagattgtcagaaggaggctgcccacatcattaacgctatgcagaagcggattcacctgcaaaccttacgggccctgagcgaggtccagaagatgacccctagggagcggatgaggctgaggaagttgcaggccgcagatgaaaaggcaaggaaactgaagaagatagtagaagagaagtacgaagaaaactccaaacggatgcaggagctccggtcccggaatttccagcaactttccgttgatgtcttgcacgaaaagacccacttaaagggcatggaagagaaggaggagcagcctgaaggccggctgtcctgttcaccccaggatgaggacgaagagagatggcagggtcgggaggaggagagtgatgagcctaccctcgagaacctacccgagagccaaccaattccatcaatggatctccatgagctcgagtccattgtcgaagacgcaacatcggacctcggttaccatgaaatccctgaggatcccttggtcgccgaagagtactacgctgatgcttttgactcctactgcgaagagtcagatgaagaggaagaagaaatcgcactggaacggccggagaaagagatccgcaatgaaggcagtcagcccgcctaccgcacgaaccagcaggatagcgacatagaagcactggcaagatgcctcgagaacgttctgggatgtacatctctggacacgaagacaatcactactatggccgaagatatgtcccctgggccaccaatattcaacagtgtaatggctagaaccaagatgaagaggatgcgggagagtgcaatgcagaaactgggtacagaagtgttcgaggaggtgtacaactatttaaagagggcaaggcaccagaatgcctccgaagcggagatcagggagtgtctggagaaggtggtgccccaggcttcagattgcttcgaggtggaccaactgttgtacttcgaggagcaacttttaatcacgatggggaaagagccaactctacagaatcacctgtag

SEQ ID NO: 126528 - DNA, 1449 bp, synthetic construct
  misc_feature 1..1449: note = Description of Artificial Sequence: Synthetic coding sequence
  source 1..1449: mol_type = other DNA
atgctaaagttccaagaggccgcaaagtgcgtctcgggctctaccgcgatctctacctaccccaaaacattgatagctcgcagatacgtactgcagcagaaattaggcagtggaagctttgggactgtgtatctagttagcgacaagaaagctaaaaggggagaagagctaaaggtcctgaaagaaatctcagtaggcgagctcaaccccaatgagacagtgcaggctaatttggaggcccagctactgagtaagcttgaccatcccgcaattgtgaaattccacgcatccttcgtggaacaagacaatttttgcattattaccgaatattgcgaggggagagatttagacgataagatccaggagtataagcaggccggaaagatatttccagagaatcagattatcgaatggtttatacagttattactgggcgtcgattacatgcatgaaagaaggatcttgcatagggacctgaagtcaaagaacgttttcttgaaaaacaacctgctcaagatcggagacttcggtgtcagccgcctgctgatgggctcctgtgacctggctacgactctcactgggaccccacactatatgtcccccgaggcactgaaacaccagggatatgacaccaagagcgacatttggagtctcgcttgtattctatatgaaatgtgctgtatgaatcacgcctttgccggctcaaactttttgtctatagtgcttaagatcgtagaaggagacactccatccctacctgagaggtacccaaaagagctcaacgccatcatggaaagtatgttaaataagaatccctcgctgcggccgtcagccattgagattctgaaaatcccttatctggacgaacagctacagaacctcatgtgcaggtatagcgagatgactctggaggataagaatctggattgccagaaagaagccgcgcacattatcaacgctatgcaaaagagaatccacctgcaaaccttgagggccctgtcggaggtgcaaaagatgactccccgggagcggatgcggttgcggaaactgcaagcggccgatgagaaagcacggaaacttaaaaagattgttgaggaaaagtacgaagaaaacagtaagcgcatgcaagaactcaggtcccggaattttcaacagctatccgtcgacgtcctgcacgagaagacccacctcaaaggcatggaagagaaggaggagcagccagaagggaggctgagttgctccccacaggacgaggacgaggagcgttggcaaggccgggaggaagagtcggacgagcctacactggaaaacttacccgaatctcagccgattccttctatggacttacacgagctggagagcattgttgaggacgccacttctgaccttggctatcacggagattgcaatctcatctccctggacgagtactggaagaacgaaaagtag

SEQ ID NO: 126529 - DNA, 1938 bp, synthetic construct
  misc_feature 1..1938: note = Description of Artificial Sequence: Synthetic coding sequence
  source 1..1938: mol_type = other DNA
atgctgaaattccaggaggccgccaagtgtgtctcagggtctactgctatttcgacataccctaagactcttattgcccggaggtatgtgctacaacagaagctagggagcggatccttcggtactgtatacttggtgtcagacaagaaggcaaagaggggggaggagcttaaggtgttgaaggagatctccgttggggagctgaaccctaatgaaacagttcaggcaaatttagaggcccagctgctatccaagcttgaccaccccgcaatcgtcaagttccatgctagttttgtcgaacaggacaacttttgcataatcacggagtactgtgaaggaagggatcttgatgataagatccaggaatataagcaggcaggcaagatctttcctgaaaatcagatcattgaatggtttattcaactgctgttgggcgttgactacatgcacgaaaggcgcattttgcatcgtgatcttaagtccaagaatgtcttcttgaagaacaatctcttgaaaattggggacttcggagtttcgcgacttttgatgggctcgtgcgacctcgcaactacgcttacaggaacccctcactacatgagcccagaagctttgaaacaccaggggtacgataccaagtcagacatatggagtttggcctgtatcctctacgagatgtgttgtatgaatcacgcctttgcgggctctaacttcttgtctatagtcctgaaaatcgttgaaggagacaccccctccttgcctgagagataccccaaggaactgaacgctattatggagtcaatgctcaataaaaatccatccctccggccgtctgcaatcgagattctgaagattccctatctggatgaacagctgcaaaaccttatgtgccgctactctgagatgacacttgaagataagaacctagactgccagaaggaggcagcacatatcattaatgcaatgcaaaagcggatccatcttcagaccctgagggcattgagtgaggtgcaaaagatgacacctcgggagagaatgcgtctccgcaaattgcaagcggcagacgagaaggcccgtaagctcaaaaaaatagttgaagaaaagtacgaggagaattcaaaaagaatgcaagaactgagatcaaggaacttccagcagctcagtgttgatgtgctgcatgaaaaaactcacctcaaagggatggaagagaaggaagaacagcccgagggccgcctatcctgttcccctcaggatgaagatgaggagcggtggcagggacgagaggaagaatcagatgaacccactctcgaaaatctccctgagagtcaacccataccaagcatggatctccatgagttggaaagtatcgtcgaggacgccactagcgacttgggatatcatgagatacccgaagatccgctggtagctgaggaatactacgctgacgcatttgattcctactgtgaagaatcagatgaagaagaggaagagatcgcactcgagcgacccgagaaggaaatccgcaacgaaggaagccagcctgcctatcggaccaatcagcaggattctgacatcgaggcactcgcccgttgcctggaaaatgtgcttgggtgcactagtcttgatacgaagaccatcactactatggccgaggacatgagtcctggcccaccgatcttcaacagtgtgatggcaagaaccaaaatgaagcggatgagggaatccgctatgcaaaagctcggaacagaggtgtttgaggaagtatataactacctgaaaagagcgagacaccagaacgcctcagaggccgaaatcagggagtgtcttgaaaaggtggttccacaggcttccgattgtttcgaagttgaccagctcctgtactttgaagagcaactgctgattaccatggggaaagagccaaccctgcagaaccacctgtag

SEQ ID NO: 126530 - DNA, 1413 bp, synthetic construct
  misc_feature 1..1413: note = Description of Artificial Sequence: Synthetic coding sequence
  source 1..1413: mol_type = other DNA
atgctcaagttccaagaagctgcaaaatgtgtttcaggatctaccgccatcagtacatatccaaaaactctcattgcacgtcggtacgtcctccagcagaagctcgggtcagggagttttgggactgtgtatttagtgtccgacaaaaaagccaagaggggtgaggagttgaaagtcttaaaagaaatcagcgtgggcgagctgaaccctaacgagacagtacaggcaaatctggaggcccagcttttgagcaagctcgaccaccctgcaatcgtgaagttccacgccagttttgtagagcaggataatttctgtatcatcacggagtactgtgaagggagggatcttgacgataagattcaggaatacaaacaggccggcaagatctttccagagaatcagatcatcgaatggttcatccagcttctgctgggtgtagactacatgcacgaaaggcgcatcctgcatcgagatctgaagtcaaaaaacgtgttcctaaaaaacaatttgcttaagatcggcgacttcggagtgtcacgcctgctgatgggtagttgcgatttagcgaccactcttaccggtacaccgcactacatgtcccccgaagctttgaaacatcaagggtacgatacaaagtcggacatctggtcactcgcttgcatcctgtatgaaatgtgttgtatgaaccatgcctttgctgggtccaatttcctaagtatcgttctaaagattgtcgaaggcgatacaccatcactgcccgaaaggtaccctaaggaattgaatgccatcatggagtcgatgctgaataagaatccctcattgcgtccatcggctattgagattctgaagataccatatctagacgagcagttgcagaacctgatgtgcagatactctgaaatgactttagaggacaaaaatttagattgccagaaagaagccgcccacattatcaatgctatgcaaaaaagaatccacctgcagaccttaagggcactgtcagaggttcaaaagatgacccctcgagagcggatgaggcttcgcaaactccaggccgccgatgagaaggctcgtaaactaaagaaaatcgtcgaggagaaatacgaagaaaattctaaacgaatgcaggagctaaggagtagaaatttccagcagctgtccgttgatgtgctgcacgagaagacccacctgaaaggcatggaagagaaggaagagcagcctgagggtcggctaagctgtagcccccaggatgaggacgaggagagatggcagggcagggaggaagagtccgacgagcccaccctcgagaatcttcctgagtcacagccaatcccaagcatggatctccatgaattagaaagcatcgtcgaagacgcaacctccgaccttggctaccacgccactcacagctag

SEQ ID NO: 126531 - DNA, 2079 bp, synthetic construct
  misc_feature 1..2079: note = Description of Artificial Sequence: Synthetic coding sequence
  source 1..2079: mol_type = other DNA
atggaaaaatatgaacgcattagggtggttggcagaggagcctttgggattgttcatctgtgtttgcggaaggcagatcagaaacttgtgataatcaaacagattcccgtggagcagatgacgaaggaagagcgccaggctgcccaaaatgaatgccaggtgctaaagctacttaaccatcccaatgtcatagaatattatgagaatttccttgaagataaggctctgatgattgcaatggagtacgccccaggggggaccttagctgagtttattcagaaacgatgcaattcactactggaagaagaaactatccttcattttttcgtgcagattttgctagcccttcaccacgtgcacacgcatctgattctccaccgagacctgaaaacacagaatatcttactagacaagcaccgtatggtcgtcaaaattggtgattttggcatctctaaaatcctgtctagtaaatctaaggcgtatacagtggtgggaacaccatgctacatcagtcctgagctttgcgagggaaagccctacaaccagaaatctgatatttgggcgctcggctgcgtactgtacgaattggctagcttaaaaagagcattcgaagccgcaaatctgcccgcattggtgttaaaaataatgagcggcaccttcgcccctatcagcgatcggtactccccagaactgaggcagttggtgctgtctctgttgtcactcgagccagctcagcgtccacctctgtcacatatcatggctcagcccctctgcatacgggccctactaaacctacatacggatgtgggaagcgtgagaatgaggagggccgagaagagcgtggccccctccaacactggcagtcgaactacatctgttcgatgcagggggatacccaggggacccgtcagacccgctatccctcctccccttagttctgtctacgcctggggcggtggcctgggcacaccattgcgactgccaatgctgaataccgaggttgtgcaggttgccgccggtcgcacgcaaaaagccggggttaccaggagtggacgccttattctgtgggaggccccaccgctgggagccgggggcggaagtctgttgccgggggcagtggagcaaccccaaccccagttcatctccagatttcttgaaggccagtcgggcgtcacgattaaacatgtcgcatgtggcgattttttcactgcgtgtctgaccgatagaggcatcatcatgacgtttggttctggctcgaatggttgtctagggcacggcagtctgactgacataagccaacccaccatcgttgaggcactgctgggatacgagatggtccaggtggcgtgtggcgcttcacacgtgctggccttgtctaccgaacgcgaactctttgcttggggaaggggtgatagtggtcggctgggcctcggcaccagagagtctcatagctgtccacaacaggtgcctatgccccccgggcaggaagcccaacgggtggtttgtgggatagattcttctatgatcctcacggttcccgggcaggctctcgcatgtggaagtaacagatttaacaagttgggactcgaccacctgagtctgggggaggagcctgtgcctcatcagcaggtggaggaggccctgagcttcacgttgttagggagcgcgccacttgatcaggaaccccttctgtcaattgatctgggtactgcacactcggcagctgttacagcttccggagactgctacacctttggaagcaaccaacacggtcagctgggcacaaatactcgaagaggcagcagggcgccctgtaaggtgcagggactggaaggcatcaagatggcaatggtagcctgcggcgacgcgtttacagttgcgataggagctgagtcggaagtgtacagctggggaaagggcgccaggggtcgtctgggcaggagagacgaagatgctggtctgcccaggcctgtgcagctggatgagacccacccctatacagtgacatcagtgtcctgttgtcacggcaacaccctgcttgccgtccggtcagtcaccgatgagcctgtacccccttag

SEQ ID NO: 126532 - DNA, 1383 bp, synthetic construct
  misc_feature 1..1383: note = Description of Artificial Sequence: Synthetic coding sequence
  source 1..1383: mol_type = other DNA
atggaaaagtacgagcgcataagagtggtcggtcgcggggcctttggcattgtccacctctgtctccgaaaagccgatcagaagttagtcataatcaagcaaatccccgtagaacagatgaccaaggaggagagacaggccgcccagaacgaatgccaggtgttgaaactgttgaaccatcctaatgtaatagagtattacgaaaatttcctcgaggacaaagcgctgatgattgcgatggagtacgcgcctggtggcactctcgcagaattcattcagaagcgctgtaactccctgctggaggaggagaccatcctacatttctttgtgcaaatcttgctggccctccatcatgtccacactcacctgattctacacagagacctgaaaacgcagaacatactgttggataagcacaggatggtggtgaaaatcggtgacttcgggatctccaaaattttatcgagcaaatcaaaagcctacacagttgtgggtactccatgttacatttcccctgagctttgtgaaggtaagccatataaccaaaaatcagatatttgggccttggggtgcgtgctgtacgagctagcttcactgaaacgtgccttcgaagctgcaaatctccccgctttggttttgaagattatgtcgggcacatttgcccccatatcagacagatacagtcccgaactcaggcaacttgtcctgtcccttctgtccttggagcctgcccagaggccccccttatctcatatcatggcacagcccctatgcatcagagccttactgaatttgcatacagacgtggggagtgtcaggatgcggcgtccagtacagggtcagcgagcagtcttgggcgggcgcgtatgggcgccatctggatccaccgggggacttaggcagcgcgaaacttggggaaagtcatcactgcccgcatgtcgtaatgtgaggagggtgttcgtattacggccccccagtgtactgcaaggcagagaggtccggggccctcagcagcaccgggagcaagaccaccaatgcccgctccagagataccctccaggaacctgtgaagcttcgcatccaaccaccactgtggtgagcgtgtgcctgggctggtgggcagggcacccaccagcagccgccaatgcccagcacaggggaggacctgggggttcgtgggcccacgctgaatctcgaagacacgctctctgggcctctcaccccgttggcggacccactccgcggtgtcggcgccgccagtccccatcctgggggtccggcgcagctactgcccccgtgcacctcgctttccccgggggcccggtggggtgcgatcaccaggcgcgtggtctgtggggtctcttgcattgtctgcccgactag

SEQ ID NO: 126533 - DNA, 2940 bp, synthetic construct
  misc_feature 1..2940: note = Description of Artificial Sequence: Synthetic coding sequence
  source 1..2940: mol_type = other DNA
atgtctgtgctcggagaatacgagcgccactgcgattcaataaacagcgattttggtagcgaatccggcgggtgcggagatagcagccctgggccatctgcatctcaaggaccaagggcaggcggtggtgcagccgagcaggaggagttacactacattcctattcgggttctgggcagaggcgcgtttggagaagccacgttgtatcgcaggactgaggatgactctctggtggtgtggaaagaggtcgacctcacccggctcagcgagaaggagcgtagggacgccctgaatgagatagtaattttggctctcctccagcacgacaatataatcgcttactataaccattttatggacaacacaacacttctcatcgaattggaatactgtaatggcggcaacctgtacgataagatactccgccagaaggacaagctgttcgaagaagaaatggtcgtgtggtacctttttcagatagtttccgccgtgagctgtattcataaggcaggcatactccacagagacatcaaaactttgaacattttcctgacaaaagctaacctgattaagctaggcgattacggactagccaagaagctcaattctgagtatagtatggccgagactctcgtgggaacgccatattacatgtctccggagttgtgccagggcgttaagtataactttaaatcagatatctgggcggtcggctgtgtgatctttgaactgcttactctcaagcggacctttgacgcaaccaacccactgaacctctgcgtgaagatcgtgcaggggatcagggcaatggaagtagactcctcacagtactctctggagctcatccaaatggtgcactcctgtcttgatcaggatccggagcagcggccaaccgcggatgagctgctggatcgcccgttactgcgaaagaggcgtcgggaaatggaggaaaaagtaacactgttgaatgcccctaccaaaaggccaagaagttcaacggtgacagaagcccctattgccgtcgtgacctctcgaacatctgaagtgtacgtgtggggcggcgggaaatcaacgccacagaagctggatgtaattaaaagcggctgcagcgcacgccaggtctgtgcagggaatacacattttgcggtggtcaccgtggagaaagaactgtacacatgggtcaatatgcagggtggaaccaagctccacgggcagctcggccacggagacaaggcatcctacaggcagccaaagcacgtggagaagctccagggaaaggcgatcagacaggtgtcctgtggagatgactttaccgtttgtgtcactgacgaaggccagctgtacgccttcggctccgactactatggctgtatgggagtggacaaggtagcaggccccgaagtgttagaacccatgcaactgaatttcttcttgtcaaatccagttgaacaagtctcttgcggggacaatcatgtcgtagtcctgacccggaacaaggaagtctatagttggggctgcggagagtacggaagactcgggctggactctgaggaggattattataccccacagaaagtggacgttcctaaggctctgataatcgtggcggtgcagtgtgggtgtgatggcacgttcctgctcacccagtcaggcaaggtgttggcttgtggcctcaatgagtttaacaaactcggtttgaaccagtgcatgagcggcataataaaccacgaggcgtaccacgaggtgccttataccacttcattcacactggctaaacagctgagcttctataagatcagaaccatcgctcctggaaaaacgcacacagctgcgatagacgagagaggacggttgctcacatttggctgcaataaatgcggtcagctgggtgtgggcaactataaaaaacgcctgggcattaacctgctgggtggccccctcggcggcaaacaggtaattagggtatcatgtggagatgaatttacaatcgccgccacggacgataaccacatcttcgcctgggggaacggtggaaatggacgcctggctatgactcctacagaacgtcctcacggaagtgatatatgcacttcatggcccagacctattttcggatccctccaccacgtgcctgacttgtcctgtagagggtggcataccattttgattgtggagaaggtgttaaacagcaagaccatacgatctaatagctctggactctctatcggcacagtgttccagagttctagccctggcggcggtggcggaggtggaggtggggaggaggaggacagccaacaggaaagcgaaacccccgacccctccggtggttttcggggaaccatggaggcagatcgaggcatggagggcctaatctcgcctacagaggctatgggtaacagtaacggtgcaagttcatcctgtccaggatggctccgcaaggaactggaaaatgccgaatttatccctatgccagatagccctagtcccctctctgctgcattctcagagagcgagaaagacacgctcccttacgaggaactccaggggctgaaggtggctagcgaggctccccttgagcataagccccaggtggaagctagctccccccgtcttaatccagctgtaacttgcgcaggcaagggcaccccactcacaccaccagcgtgcgcttgcagttctctgcaggttgaagtagagaggctgcagggcctagtactgaagtgcttggccgaacagcagaagcttcagcaggaaaacctgcaaattttcacacagctccaaaagctcaataagaagcttgagggagggcagcaggtagggatgcactctaaggggactcagacggcaaaggaggagatggaaatggaccccaagccagatcttgattccgatagctggtgcttgctcggcaccgattcatgccggccttcgttgtag

SEQ ID NO: 126534 - DNA, 1545 bp, synthetic construct
  misc_feature 1..1545: note = Description of Artificial Sequence: Synthetic coding sequence
  source 1..1545: mol_type = other DNA
atgtctgtcctgggggagtacgaaaggcattgcgactctataaatagcgacttcggctctgaatcaggagggtgcggcgatagctctcccggtccttccgcttcacagggcccccgggcaggtgggggggcgttcggcgaggccaccttatatcggcggaccgaggacgactcgctggtagtctggaaagaggtcgacctgactcgtttgtccgagaaggaacgcagagatgccctgaatgagatcgtgatcctggccctgctacagcatgataacattatcgcttattataaccactttatggacaacaccacattgcttattgagctggaatattgtaacggcggaaacttgtacgacaaaattctgcggcagaaggataaactgttcgaggaagagatggttgtgtggtatctctttcagatagtttctgctgttagctgtattcacaaagccgggattttacacagagatatcaagacactcaatatctttttgaccaaagcaaatttgattaaattaggcgattatggcctcgccaagaaactcaacagtgaatatagcatggcagagactctcgtgggcactccctactacatgagtcccgaactgtgtcaaggcgtgaaatacaattttaagagcgatatatgggctgtgggctgcgtcatctttgagctcctcaccctgaaacggacctttgatgcaaccaatccactgaatctttgtgttaaaattgtccagggtatcagggccatggaggtggacagcagccagtactctctcgagctgatccagatggttcattcgtgtctggatcaagatccagaacagaggccgaccgcagatgagctgcttgaccggccactgttaagaaaaaggaggagggagatggaggagaaggtgaccctgctcaacgcgcccacaaagagaccccgttctagcactgttaccgaggcgcccatcgcagtggttacttcacgcacaagcgaggtgtatgtatggggcggaggtaaatctacaccccagaagctggacgtcatcaagtccggttgcagcgcccgccaagtatgcgctggcaatacccacttcgccgttgtgacagtggaaaaagaattgtacacatgggtgaacatgcagggcggcacaaaacttcacgggcaactgggacacggcgacaaggctagctaccgacaacctaagcatgtggaaaagctgcagggaaaggcgattcggcaagtttcttgtggcgatgactttaccgtgtgtgtgacagatgagggacagctatatgcttttgggagcgactactatgggtgtatgggtgttgacaaagttgccggcccagaagtcctagagccaatgcaactgaatttctttctgagtaatcctgtggaacaagtgtcatgcggtgataatcacgtggtcgtcctcacccggaacaaagaggtgtatagttggggttgtggtgagtacgggcggggttcactcgtgtctgtccatttttttacaggcatccagcccgactttaaggtagtctgtatctag

SEQ ID NO: 126535 - DNA, 3777 bp, synthetic construct
  misc_feature 1..3777: note = Description of Artificial Sequence: Synthetic coding sequence
  source 1..3777: mol_type = other DNA
atggagaagtacgtccgcctacaaaaaatcggcgaagggtcattcggaaaagctatactcgtgaagtctactgaagacggccgccagtacgttattaaggagattaacatctcccggatgagctccaaggagcgcgaggaatcacggcgagaggtcgccgtgttagcaaacatgaagcatcccaatatcgtgcagtacagggaaagcttcgaggagaacgggagtctctatattgttatggactattgtgaaggaggtgacctctttaagagaatcaacgcgcagaaaggagtcctgttccaggaggaccagatcctggactggttcgtccagatttgcttagcactgaaacacgttcacgacaggaaaattcttcaccgtgacatcaaatctcagaacatctttctgactaaggacggtaccgtccagctgggggatttcgggattgctcgggtgctgaacagtacggtcgaactcgctcggacctgtatcggcacaccctattacctttcacccgagatatgtgaaaataagccctacaataacaaatcagacatttgggcactgggatgcgtcctgtacgagctgtgcaccttgaaacatgccttcgaggcaggctccatgaagaacctagtgctgaaaataatttccgggagctttccgcccgtcagcctgcattactcttacgatctgcgatccctcgtgtctcagcttttcaaacgcaaccccagagacaggccttccgttaactcaatattggagaaggggtttattgcgaagcgaatcgaaaagtttctgagcccacagctgattgccgaggaattttgtcttaagacattcagcaaattcgggagtcagcccatacccgccaagcggcctgcaagtggacagaacagcatttcggttatgccagcccagaagatcacgaagcccgcagcaaagtatggcattcctctggcttacaagaagtatggcgacaaaaaactgcacgaaaagaaacccctacagaagcacaagcaggcacaccagacccccgagaaacgggttaacaccggcgaagagaggcggaagatctccgaggaggctgcccgaaagagacggctagagttcattgagaaggaaaagaaacagaaagatcagataatttccctgatgaaggcagaacaaatgaagcgccaggaaaaagagcggctagagagaattaatcgtgcacgagaacagggatggcgtaacgtactgagcgccggcggtagtggagaggtgaaagctcctttcctggggtcaggtggcacaatcgcacccagctctttctcttcacggggtcagtacgagcactatcatgccatcttcgatcagatgcagcagcagcgagctgaagataacgaagcaaaatggaagagggagatctacgggcgggggctgcctgaaagaggaattctgccaggagtccgaccaggattcccttatggagcagcgggtcaccatcactttccggacgccgacgatataagaaaaacacttaagcggctgaaggcggtcagcaaacaggccaacgctaatcggcagaaaggtcagctcgcagtcgagcgggccaaacaggtggaggaattccttcaaaggaagagggaagcgatgcaaaataaggcccgggccgagggccacatggtctatttggctcggcttcgccaaatcagactacagaacttcaacgagaggcagcaaatcaaggccaaactgcggggggaaaaaaaagaggcaaaccattccgaaggccaggaaggttcagaagaggctgatatgagacgcaagaagattgagagccttaaggcccacgctaacgctagagcggctgtgcttaaagagcagctggaacgaaagagaaaagaagcttacgagagggaaaaaaaggtctgggaagagcatcttgttgccaaaggcgtcaaatcatctgacgtctcccctcccttgggccaacatgagaccggggggtcccctagtaagcagcaaatgcggtcagtgattagtgtgacctcagctcttaaggaggtgggcgtggacagctccctaaccgacactagggagaccagcgaagaaatgcagaaaacaaacaatgccatatcaagcaaacgcgagatccttcgcagacttaacgaaaatctgaaagcccaagaggacgagaaagggaaacaaaacctctccgataccttcgaaatcaacgtgcacgaggacgctaaggagcacgagaaggagaaatcagtgagtagcgaccggaagaaatgggaagctggcggacagttagtgatacccctcgacgagttgactttggacacatcatttagcacaaccgaacgccacactgtaggtgaggtgatcaaacttggaccaaacggttctcccagacgcgcgtgggggaaaagtccgactgatagcgtattaaaaattctgggcgaggctgaactgcaactgcagaccgaacttttagagaacacaacaatccggtctgagatttctcccgagggagagaagtacaaaccactgatcaccggagagaaaaaagtccagtgcatctcccacgagatcaacccatccgcaattgtagactcccccgtggagaccaagagcccggaattctctgaggcctctcctcagatgagcctcaaactggagggaaacctggaggagcctgacgaccttgagaccgagatactccaggagccgagcggaacaaataaggatgagtcacttccttgtaccatcaccgacgtctggatatctgaggagaaggaaactaaagagacgcagagtgctgaccgaattacaatacaagagaacgaggtgtcagaagacggcgtctctagcaccgtggaccagctttccgatattcatattgaacctgggactaacgattcgcagcactccaaatgcgacgtcgataagtcggtgcagcctgagcccttctttcacaaagttgtccacagcgagcacctaaaccttgtgccccaggtacagtcagtgcaatgcagtcctgaagagagctttgcctttcgaagccacagccatttgcctcccaaaaacaaaaacaaaaattcattgttaattggtctaagtactggcctgtttgacgccaataaccctaaaatgcttcggacttgttcccttcctgatctgtctaagctctttcggaccctcatggatgtgcccaccgtgggcgatgtcagacaagacaaccttgaaattgatgaaattgaggacgagaatatcaaagagggcccctccgacagcgaggatatcgtgtttgaggagaccgacactgacctccaggagcttcaagccagcatggaacaactgttgcgagagcagccgggggaggaatacagcgaggaagaagagagcgttcttaagaatagtgatgtcgagccaacggccaacggtacagatgtggcagatgaggatgataatccaagcagtgagtcagctctgaatgaggaatggcattctgacaattctgatggcgaaattgcctctgaatgtgagtgcgactccgtatttaatcacctggaagaactcaggctgcatctggagcaggagatgggctttgagaaattttttgaggtgtacgagaagatcaaggccatccacgaggatgaggacgaaaatatcgagatatgcagtaaaattgtacaaaatatcctcggcaatgagcaccagcacctatatgcaaaaattttacacttggtcatggccgacggggcataccaggaggacaacgacgagtag

SEQ ID NO: 126536 - DNA, 3861 bp, synthetic construct
  misc_feature 1..3861: note = Description of Artificial Sequence: Synthetic coding sequence
  source 1..3861: mol_type = other DNA
atggagaaatacgtgcgcttgcagaaaataggtgaggggtcctttggtaaagcgatactggtgaagtcaaccgaggatgggcgacagtacgtcataaaggagataaacatcagccggatgtcgagcaaagagcgggaagaatcccgccgcgaagtagctgttttggctaacatgaagcatcccaatatagtgcagtatagggaatccttcgaggagaacggatctttgtacatcgttatggactattgtgagggaggagacctgtttaagcgaatcaacgcccagaagggagtcctgttccaggaggatcaaattctcgattggttcgtacagatctgcctggccctcaaacacgttcacgaccggaagatcctgcaccgggatattaagtctcagaacattttcctcactaaagacgggacagtgcaactgggggacttcgggatcgcacgcgtgctgaattcaacagtggagcttgctcgaacctgcataggtactccatactacctgagccctgaaatttgtgaaaacaagccttacaataataagagtgacatctgggctctggggtgcgtgctctatgagctctgcacactcaagcacgcctttgaggctggcagtatgaaaaatctcgtccttaagattatttccggctcctttcccccggtttcgctacattactcttacgatctacgcagcctcgttagtcaacttttcaagcgaaaccctagggataggccttcagtaaacagtatcttagagaaagggttcatcgcaaaacgaatcgagaagtttctgtctccgcagctcatagcagaagaattctgtctgaagacatttagcaaatttggatcgcaaccgattcccgccaaacgaccggcttcagggcaaaactctatctctgtgatgccagcgcagaagatcactaagcccgctgcaaagtatggcataccgttggcctacaaaaagtacggtgataaaaaactgcatgagaagaagcctcttcagaagcacaagcaggcgcaccagactccagagaaacgagtgaatactggagaagaaagaaggaagatctctgaggaagccgccaggaagagaagactcgagtttattgagaaggagaaaaagcaaaaggatcagatcatctctttaatgaaggccgaacagatgaagcgtcaagaaaaggaacggctcgagagaattaatcgcgcacgggaacagggctggcgaaacgtgttgagtgctggcggctccggcgaggtgaaagccccctttctggggagtggaggaaccatagcccccagctccttctcatcccgggggcaatatgaacactatcacgctatttttgatcagatgcaacaacaaagagctgaagacaacgaagctaagtggaaacgggagatatatggcaggggtctcccagagcgtgggattctgcccggcgtccgcccaggtttcccatacggagccgctggccaccaccatttccccgatgctgatgatattcgcaaaaccctgaagagactgaaggctgtgagcaagcaggccaacgcaaaccgccaaaaagggcagcttgctgtcgagagagctaagcaagtagaggagttcttgcaaaggaaacgagaagccatgcagaataaggctcgcgcagaggggcatatgggaattctccagaacctagcggcgatgtacggcggtagaccctcttcttctcggggtggcaagccccgcaacaaggaggaggaggtgtatctcgcacgactcagacagatcagactccaaaatttcaacgaacgccagcaaatcaaggctaaactacgaggcgagaaaaaggaagcaaaccattccgaagggcaggaaggatcagaggaagccgacatgcgaaggaagaagatagagtcactgaaggctcatgcaaacgcaagagccgccgtcctgaaggaacaactggaacggaaacgaaaagaagcttacgaaagggagaaaaaagtatgggaggagcacttggtggccaagggagttaaatcctctgacgtaagcccgcctttgggacagcacgagaccggtggctccccttccaaacagcagatgcggagtgtgatttccgtgacgagcgctctgaaggaggtcggggtagattcttcgctcacggacactcgtgaaactagtgaagaaatgcagaaaacaaacaatgcaatttcttctaaaagagagattttaagacggctaaatgagaatctaaaggcacaggaggatgaaaaaggtaagcaaaacctgtctgacacatttgagataaacgttcacgaggacgccaaagaacatgaaaaagagaagagtgtgagctccgatagaaagaaatgggaagctgggggacagctggtgattcccttagacgagttgacactagatacttctttcagcacaactgagcgacataccgtcggcgaggtcattaaactaggtccaaatggtagcccacgtcgcgcttggggcaaatctcctacagacagtgtgctgaagatccttggggaagcagagctacagcttcaaaccgagctactcgaaaatacaacaattcgatctgagatcagccccgagggtgagaagtacaaacccctcattactggagaaaagaaagttcagtgcatttctcatgagatcaatccttctgcaattgtcgattccccagttgagaccaagtcacctgagttttcggaggccagtccccaaatgtcactcaaacttgaagggaatctggaggaaccggatgacctcgaaactgagatccttcaagagcccagtggtactaataaggacgagagtttgccatgtaccatcacggatgtttggatctctgaggaaaaggaaacaaaagagactcagtcggctgaccgcataaccattcaggaaaatgaagtgtccgaggacggagtttcatctacggtggaccagctgagcgatattcacattgagcccggaaccaacgatagccagcattctaagtgcgatgtcgataagagcgtccagccggaaccattcttccacaaggtagttcattcagagcacctgaatcttgtacctcaggtccaatccgtacagtgctcaccggaggaaagtttcgctttcagaagccattcacacctgcctccaaagaacaagaataagaactcactccttatcggcctatctaccggactcttcgacgctaataaccctaaaatgttacgaacctgtagcctaccagatctgagcaaactattcaggaccttaatggatgtgccaacagtcggggatgtgcgacaggacaacctcgagattgatgagattgaggatgagaatattaaggaggggccaagcgatagtgaggacatagtatttgaagagaccgacaccgacctccaggaattacaagccagcatggagcaactactgagggaacagccgggggaggaatacagtgaagaagaggaatcagtgcttaagaattcagacgtggagcctacagcaaatggcactgatgtcgcagacgaggacgacaacccatcgagcgagagtgccctcaatgaggaatggcactcagataacagtgatggtgagatagcgagcgagtgcgagtgtgactccgttttcaatcacctggaagagctgaggttgcaccttgagcaggaaatggggttcgaaaagttcttcgaggtgtacgaaaagataaaagctatccatgaagatgaggacgaaaatattgaaatttgttcaaagatagtgcagaacatcttaggtaatgagcatcagcatctctacgcaaagatcttacaccttgtgatggctgacggggcctatcaggaagataatgacgagtag

SEQ ID NO: 126537 - DNA, 3645 bp, synthetic construct
  misc_feature 1..3645: note = Description of Artificial Sequence: Synthetic coding sequence
  source 1..3645: mol_type = other DNA
atggagaaatacgtgaggctccagaagatcggggagggctcattcggtaaggcaattttggtgaagtccacagaggatggcagacaatacgtcattaaagaaatcaatattagcagaatgtccagtaaagaacgtgaagagagtcggcgggaggtggccgtcctcgccaatatgaaacacccgaatatcgtccagtatagggaaagcttcgaggagaacggcagcctgtatattgtgatggattattgcgagggaggtgacctgttcaaacgcatcaacgcccagaagggagttctctttcaggaagaccaaatcctggactggtttgtgcaaatctgcctggctctcaaacacgtgcacgatagaaagattcttcaccgcgatattaagtctcagaatatctttcttactaaagacgggactgttcaattgggcgactttgggatagcccgggtcctgaatagcacggtcgagctggcaaggacctgtatcggcaccccctattacttgagccccgagatctgcgagaataagccctacaataataagagcgatatttgggctctgggctgcgtattgtacgaactgtgtacactcaaacatgcctttgaagccggatctatgaaaaatctcgtgctgaagattattagtggaagttttcccccagttagtctccactactcttatgacctgaggtccctggtcagccagcttttcaagcgcaatcctcgggaccgccccagtgtgaatagtatcctggaaaaaggatttattgcaaaacgcattgaaaagtttctttccccgcagctgatcgcggaagagttctgcctgaaaacattttcaaagtttggctctcagccaatccccgccaagagacccgcatctggccagaactccattagcgttatgcccgcccagaagatcaccaaacctgctgccaagtacggaatccccctggcttataaaaaatatggagataaaaagctgcatgagaaaaagccgcttcaaaagcacaagcaggcccaccagacacctgagaagcgcgttaatactggagaagagagacgcaagatatccgaggaggctgcgaggaagcgtcgactcgagtttatcgaaaaggaaaagaagcagaaagatcagatcatctctctgatgaaagccgaacagatgaaacgccaggagaaggagcggctggagaggataaacagggctcgtgagcagggctggagaaacgtgttatccgctggcggctcaggggaggtgaaggccccattcctgggcagcggagggaccattgccccctcttccttctcctctcgggggcagtacgagcactatcacgctatcttcgaccaaatgcagcagcaacgtgccgaggataacgaagccaaatggaagagggagatatatggcagaggcctgccggagcggcagaaaggacagcttgcagtcgaaagggcaaagcaagtggaagaatttctgcagagaaaacgtgaagccatgcaaaataaggctagggccgaaggacacatggtctatctcgcccgactgcgacaaatacgcttgcagaattttaacgagcgacagcagattaaagccaaactgagaggagaaaaaaaggaggctaaccattccgagggccaggaggggagcgaggaggctgatatgcgtaggaaaaagatcgaatctctaaaggctcacgcaaacgcccgagcagccgtgctcaaggagcagctcgaacggaaacgcaaggaagcttatgagagagagaagaaagtgtgggaggaacacctcgtagctaaaggggtgaagtcatccgacgtgtctccacccctgggtcagcacgagacagggggtagtccatctaagcagcagatgagatctgtgattagcgtcacgtccgcactcaaggaggtcggggtggactctagcctgactgacacccgggagacatctgaggagatgcagaagaccaacaatgccatctctagcaaaagggagattctgagacgcctgaacgagaatctgaaggcacaagaggacgagaaggggaagcaaaatttatcagatacattcgagatcaacgtgcacgaagacgccaaagagcacgagaaggagaagtcagtatcgagtgacagaaagaaatgggaggccggcggccagctggtcataccacttgatgaactaactttggacaccagctttagcacgacagagcggcatacagtcggagaggtcataaagctcggccccaacgggtccccgcgtcgcgcgtggggtaagtctcctaccgactcggtcctgaagattctcggggaggccgaactgcaactgcagacggaactgctggagaataccaccataaggtcagaaatctcacccgagggagagaagtataaaccattgatcacaggggaaaagaaagtgcagtgcatctcacatgaaatcaacccctctgccatagttgacagcccggtggagacaaaaagcccagagttctctgaagctagcccgcagatgtccttaaaactagaggggaacctggaggagcccgatgacctggagaccgagatactacaggagccatctggtacaaataaagacgaatcgctgccctgtacaattactgatgtatggatctcggaagagaaagaaaccaaagagacacagtcagctgacaggattaccatccaagaaaatgaggtgtccgaagacggtgtgagcagtaccgtcgaccagctgtctgatatccatattgagccaggaacgaacgacagtcaacacagtaagtgtgatgtagataaatccgtccagcctgaacccttctttcataaagttgtccatagcgaacatctgaacctggtacctcaggtgcagtctgttcagtgcagtccagaagagtctttcgctttccgcagtcacagccatctgccacctaaaaataagaacaaaaactccctcctgatcggactgtcaacagggctattcgatgccaataatcctaagatgctgcgtacttgctctctcccagacctctcaaaacttttccgtactctgatggatgtccccaccgtcggagacgtgcgacaggataacctggagattgatgagattgaggatgaaaacatcaaggaggggcccagtgactctgaggatatagtcttcgaggagacagacaccgaccttcaagagttacaggctagtatggagcagctgctcagagaacagcctggagaggagtactccgaggaggaagaatccgtcctgaagaacagtgacgtagaacccactgcaaacggtacagatgttgctgacgaagacgacaacccatcttccgaaagtgccctcaacgaagagtggcatagtgacaactctgatggagagatcgcatctgaatgtgaatgcgactcagtgtttaatcatcttgaggagcttcgcctgcacttagaacaagaaatggggtttgaaaagttttttgaagtctacgaaaagatcaaggctatacacgaggatgaggatgaaaacatcgaaatttgcagcaaaattgtgcagaacatcctggggaatgaacaccaacatctctacgcaaaaattctccacctggtcatggccgatggagcataccaggaagacaacgatgagtag

SEQ ID NO: 126538 - DNA, 3570 bp, synthetic construct
  misc_feature 1..3570: note = Description of Artificial Sequence: Synthetic coding sequence
  source 1..3570: mol_type = other DNA
atggagaagtatgtgaggctgcagaaaatcggagaaggctcgtttggcaaggccattcttgttaaatccacagaagacggcagacagtacgtcattaaggagatcaatatctcacggatgtcttccaaagagagagaagaaagtcggagggaggtggccgttctagctaatatgaaacaccctaatattgtccagtatcgagaatccttcgaggagaacggaagcctgtacatcgtgatggactattgtgagggtggcgacttgttcaaacgcataaatgcccagaagggggtgctctttcaggaggatcagatcctagactggtttgttcaaatctgtctggccctaaaacacgtacacgacagaaaaattcttcaccgcgacatcaagagtcagaacatatttctcactaaggacggaactgtccaactgggcgactttggaatcgcacgtgtcctgaattcaactgtagagttagcacgtacctgtatcggcaccccctactacttgtcccccgagatctgtgaaaataaaccttataataacaaatccgatatttgggcgctgggctgtgtattatacgaactgtgtacactcaagcacgctttcgaagccggatccatgaaaaacctcgtgctcaaaataatttctggctcattccccccggtgtccttgcactattcctacgatctacggtctctggtgtcccagctatttaaaaggaatcctcgcgacagaccctctgtgaactctattttggaaaaaggatttattgccaagcggattgagaagttcttgagtccacaattgatcgcggaagaattttgcttgaaaacattttctaagttcgggtcccagcccattcccgcaaaaaggcccgcgtcaggacagaactcaataagtgtaatgccagcgcaaaaaatcaccaagcccgccgcaaaatacggaatcccactggcttacaaaaagtacggagataagaaattgcatgagaagaaaccgttacaaaagcacaaacaggctcaccagacacccgaaaagcgcgtaaatacaggggaggaacgcaggaagatctcagaagaagcggcaaggaagcgtagactggagttcatagaaaaagagaagaagcagaaggaccagattatttccctcatgaaggctgagcagatgaagcgccaggaaaaggagcgtgctccattcctgggaagcgggggtactattgcacccagttcatttagctctcggggacagtatgaacactaccatgctatctttgaccaaatgcagcagcaacgggctgaggataatgaagccaaatggaaacgcgaaatctacgggagaggactgcctgagcgccagaagggacagttagccgtggaacgggcaaagcaagtagaagaatttcttcagagaaaaagggaggcaatgcagaacaaggccagagccgagggccacatggtatatctggcacgcttgcgccagatccgcctccaaaattttaacgaacgccagcagatcaaggccaaattgagaggagaaaaaaaagaagctaaccactctgaggggcaagagggcagcgaggaagccgacatgcgacgtaagaaaattgagtccttaaaagcccacgcgaatgctcgcgccgccgttctgaaggaacagctcgagcggaaaaggaaagaagcttacgagagggagaagaaagtgtgggaggagcaccttgttgccaaaggtgtgaagagctctgacgtgagcccacccctgggtcaacacgaaacaggcggatcaccttcaaagcagcaaatgaggtccgtcatctcagttaccagcgcattaaaagaggtgggcgtcgatagctctttgaccgacacccgcgaaacaagcgaagagatgcagaagacgaataacgcaatcagctctaaaagggaaattctgcgcagactcaacgagaatctgaaggcccaggaagatgaaaagggtaaacaaaatctgagcgatacattcgaaattaatgtccatgaagatgcaaaagagcatgaaaaggaaaaaagcgtctccagcgaccgtaagaaatgggaagccggcgggcagctcgtcattcccttggacgagctgaccctggatacatccttctccaccacagaaaggcacacggtcggagaagttatcaaactcgggcccaacggctcaccccggagggcgtggggtaagagccccacggatagcgtacttaagattctaggggaagctgagctccaactgcagacagaactcctagagaacacgactattaggagtgagataagccctgaaggagagaaatacaagcctctcataaccggagaaaagaaagtgcagtgcattagtcacgaaattaatcccagcgccatcgtcgactcaccagtggaaaccaagtctcctgaattcagcgaggctagcccgcagatgtcactgaagcttgagggaaacctagaagagccagatgatcttgagacagaaattctccaggaaccctccggtaccaataaggatgaatccttaccttgcacgatcaccgacgtatggattagtgaggagaaggagaccaaggaaactcagagtgccgatcgtatcactattcaggagaatgaagtgtccgaggacggcgtgtcatctacagtggatcagcttagtgatattcatatcgaaccaggaaccaatgattctcaacatagcaaatgcgacgttgacaaaagcgtgcagccagagccgttctttcacaaggtagtccactccgagcaccttaatctggtcccccaagtgcagtcggtgcaatgctctccagaggagtccttcgcatttaggtcccattcccacctgccccctaaaaacaaaaacaagaacagtttacttattgggttaagcaccggcctgtttgacgccaacaacccaaaaatgctccggacctgctcactgccggatctgtcgaagctgttcagaaccctaatggatgtccccaccgtgggcgacgtgcggcaggataatctggagatcgacgaaatagaggatgagaatataaaggaaggcccaagtgactccgaggatatagtcttcgaagagactgacaccgacttgcaggagctccaggcatccatggaacagctgcttcgggagcaaccaggcgaggaatattctgaagaggaggagagcgtgctcaagaactcagatgttgagcctacagccaacgggaccgacgtagctgacgaggacgacaatccctcctctgagagcgctctaaacgaagagtggcactctgataacagcgacggagagattgcctccgagtgtgagtgtgactcagtgtttaaccacctggaggagctgagactccatttggaacaggagatggggttcgagaagttcttcgaagtgtatgagaagatcaaagcgattcatgaggatgaggatgagaatatagagatatgctctaaaatcgttcagaatatcttaggaaacgaacaccaacatttgtatgccaagattttgcacctcgtgatggcagacggcgcctaccaggaggacaatgacgagtag

SEQ ID NO: 126539 - DNA, 1155 bp, synthetic construct
  misc_feature 1..1155: note = Description of Artificial Sequence: Synthetic coding sequence
  source 1..1155: mol_type = other DNA
atgccctctcgggctgaagattacgaagtgttatacactataggcactggcagctacggccggtgccagaagatacgacggaagtcggatggaaaaattcttgtgtggaaagaactagattatggctcgatgacggaagccgagaaacagatgcttgtgtccgaggtgaacctgctgcgcgaactaaagcaccccaatatagtcagatactatgatcgcattatcgatcgaacgaacacaaccctatacatcgtgatggaatactgcgaggggggggatctcgcaagtgtgattactaagggaaccaaagagagacagtatctagacgaggaattcgttcttcgagtgatgacacagcttacactggccctgaaagagtgtcaccggcgttctgacggcggacacactgtgcttcatcgggacctgaagccagcaaatgtatttctcgatggtaagcagaatgtgaagttaggtgactttggcctggccaggatcctcaatcacgacacctcctttgcgaagacattcgttggtaccccctactacatgtctccagaacagatgaataggatgtcatataatgagaaatccgatatatggagcttgggctgcctgctgtatgagttgtgtgccctcatgccgccgtttacagctttctctcagaaagaacttgccggaaagattcgtgaaggaaagttcagaaggatcccttatcgctactccgatgagttaaacgagattatcactaggatgctaaatctcaaagactaccaccggccgtccgttgaagaaatcctggagaacccactgattgccgatctcgtggcagatgagcagcggagaaacctggaaaggcggggcagacaacttggtgaacccgagaagagccaagatagctcacctgtgctatccgagcttaaattaaaagagatccagctacaagagcgcgagcgggctcttaaagcccgcgaggaaaggttagagcagaaggagcaggagctctgcgttagagagcggcttgccgaagacaagctggctagggcagaaaatctgttgaagaattatagcctgcttaaggagagaaagttcctctcgctggcatccaatccgggaatgagaataaacctcgtgaaccggagctggtgctataagtag

SEQ ID NO: 126540 - DNA, 1338 bp, synthetic construct
  misc_feature 1..1338: note = Description of Artificial Sequence: Synthetic coding sequence
  source 1..1338: mol_type = other DNA
atgccctctagggctgaggattacgaagtcttgtatacaattggcacggggagctatggcagatgtcaaaagattaggcgcaaaagtgacggcaaaatcctggtatggaaggagttggactacgggagcatgacagaggcggagaagcagatgctggtgtctgaagtaaatttgctgcgcgagctcaagcaccctaacattgtgagatattacgatcggattattgataggaccaatacaactctgtacattgttatggaatactgcgagggtggcgacttagccagcgtgattaccaagggaacgaaggaacgacagtacctggatgaggagtttgttctacgcgtaatgacccagctgaccctagcactgaaggagtgccacagacgtagcgacggcggccacaccgtcttgcatcgcgacctgaaacccgcgaatgtctttctcgatgggaagcagaatgtcaaactgggagattttgggctcgcccgcatcctgaatcacgatacatcttttgcaaaaacttttgtgggaaccccatactacatgagtcccgagcaaatgaataggatgtcatataacgagaaatctgacatatggtccctggggtgtttgctctacgaattatgtgcactgatgcctccatttaccgcattctcccagaaggaacttgccggcaagattagggaagggaaatttcgccgaatcccctaccgctattctgacgaactgaatgaaatcattactcggatgctgaacctcaaagattatcaccgcccctccgtggaagagatattggagaatccactgattgcagatttggtggcagatgagcagcgcaggaatctggagagacgcggtcggcagctgggcgagcctgagaaaagtcaggattcttcccccgttctaagcgagctgaaactgaaggaaattcagcttcaggagcgtgagagagctctgaaggccagggaagagaggctagagcagaaagaacaagagttgtgtgtgagagaacggcttgcagaagataagctggcaagagcggagaacctgttgaaaaactatagcctgctgaaagaaagaaagtttctctctctagcatccaacccagaactgctgaacctgccctcatctgtgatcaagaagaaagtacatttttccggtgagagcaaagagaacatcatgcggagtgagaattccgaatcacaactcacgagtaaaagcaagtgcaaggatctgaaaaagcgactgcacgcagctcagctgagggcacaagccctgagcgacattgaaaaaaattatcagctcaaatctcggcagattctgggcatgcgatag

SEQ ID NO: 126541 - DNA, 1209 bp, synthetic construct
  misc_feature 1..1209: note = Description of Artificial Sequence: Synthetic coding sequence
  source 1..1209: mol_type = other DNA
atgactgaagccgaaaagcagatgctggtgagcgaggtcaacctcctgcgtgagcttaaacacccgaatatcgtgagatattacgatcggatcattgacaggacaaacactaccctctatatcgtcatggagtactgcgaaggtggtgatttggcaagcgtcattaccaaaggtaccaaggaacggcagtatctggatgaagagttcgtgctcagagtgatgactcagctaactctggcactcaaggagtgccaccgtaggtctgatggcggccacaccgtgttgcaccgtgaccttaaaccagccaacgtattcctcgacgggaaacagaatgtgaagctgggcgattttggtctcgccaggatccttaaccacgatactagtttcgcgaagaccttcgttggcactccctactacatgtctcctgaacagatgaaccggatgagttataatgagaagtccgacatatggagcctgggttgtctgctttacgagctgtgtgcattaatgccgccattcaccgcattctcgcagaaagaactcgctgggaaaattcgggaagggaaatttaggcgaatcccttaccggtacagcgacgagctgaacgagatcattacacggatgctcaatctgaaagattatcacagaccttccgtggaagagattcttgagaacccattaattgcagacctagtggccgacgagcagcgccgaaatctggaaaggagaggccgacaactgggggagcctgaaaaatcccaggacagctcacctgttctatccgaactcaaattgaaggagattcagttgcaggagcgggagagagccctgaaagccagggaagagagactggagcaaaaggagcaggagctgtgcgttagagagcgcctcgccgaagataaactcgcacgggctgaaaatctcctcaaaaattactcccttctgaaggagcggaagtttttatctctcgcctctaatcccgagttactcaacctgcctagctccgtcattaagaagaaggtccacttcagtggcgaatctaaagagaacattatgagatccgaaaacagcgagagccaactgaccagcaagtcaaagtgtaaggacttgaagaagaggctgcatgccgcacaactgcgtgctcaggccctcagtgatattgaaaaaaactaccaacttaagagccgccagatcctcggtatgaggtag

SEQ ID NO: 126542 - DNA, 1521 bp, synthetic construct
  misc_feature 1..1521: note = Description of Artificial Sequence: Synthetic coding sequence
  source 1..1521: mol_type = other DNA
atggatgattacatggttctccgcatgatcggggaagggtcatttgggcgtgcattgctggttcagcacgagtcttccaatcagatgttcgcgatgaaggagatcaggctcccaaagtcattctcaaacacccagaatagccgtaaagaagccgtgctattggcgaagatgaaacaccccaacattgtggccttcaaagagtcctttgaagctgaggggcacctgtatatagtgatggagtattgcgacgggggggatctcatgcaaaagatcaaacagcaaaaagggaaacttttccctgaggacatgattctgaactggtttacacaaatgtgtctgggtgttaatcacatacataaaaaaagggtgttacatcgcgatattaaatccaaaaacattttcctgacacaaaacggcaaggtcaaactcggtgactttgggtccgctcgcctgttgagcaaccctatggcgttcgcatgcacctacgtcggcaccccatactatgtcccacctgagatctgggaaaacctaccatacaacaacaaaagtgatatttggagcctcggatgcattctgtatgagttatgcacgttgaaacacccattccaggccaacagttggaagaacttgatcctgaaagtatgtcagggttgtattagtcctcttccaagtcattatagctatgagctccaatttctggtgaaacagatgttcaagcgcaaccctagtcacaggccgagcgctaccacactcctttcaagaggaatcgtcgctcggctcgtgcagaagtgtctgccacccgaaatcataatggagtacggtgaggaggtgttagaggaaattaagaacagcaaacataacaccccccgcaaaaaggccaatcctagtcgaataaggattgccttggggaacgaagcctctaccgttcaggaggaggagcaggaccggaagggaagccacaccgaccttgaatctataaacgagaatctagtggaatcagcactccgccgtgtgaatagagaggagaaaggtaataagtctgttcacttacggaaggcctcctcaccaaacctccacagaaggcagtgggagaaaaacgtgcctaacacagctctgacagctcttgagaatgcttccatcttgacatcttcactcactgcggaggatgacaggggaggctccgttataaagtactctaagaacaccactcgaaaacaatggctcaaggagaccccagacaccttactaaatattctgaaaaatgcggacttgtctctggcctttcagacatacacaatctataggccaggcagcgaaggtttccttaagggacctctgtctgaagagaccgaggctagtgacagcgtggatgggggacatgattccgtaatcctcgatccagagaggctcgaacccggtttggatgaggaagacaccgattttgaagaggaggatgataaccctgactgggtgtcggagctcaagaaacgggccggatggcaagggctttgtgatcgctag

SEQ ID NO: 126543 - DNA, 1521 bp, synthetic construct
  misc_feature 1..1521: note = Description of Artificial Sequence: Synthetic coding sequence
  source 1..1521: mol_type = other DNA
atggacgattacatggttttgcgaatgattggagagggcagctttggccgagccttgctggtgcagcacgaatcatccaaccagatgtttgccatgaaggaaatacggctgccgaaatctttttcaaatactcagaattccaggaaggaagcagttctgctggccaagatgaagcatccaaacatcgttgcattcaaagagagttttgaggcagagggccacctctacattgtgatggagtactgcgatggaggcgacctcatgcagaagataaaacagcaaaaaggcaaacttttccccgaagatatgattctgaactggtttacacagatgtgcctcggtgtgaaccacatccacaaaaagcgggtgctccatcgcgacattaaaagtaaaaacattttcctaacacagaacgggaaggtgaagctgggagactttggttctgcccggctgctctcaaatccaatggctttcgcctgtacctacgtcggaactccctattacgtcccccccgagatctgggagaacctcccctacaacaataagtctgatatctggagtctcggctgtatcctctatgaactctgcacactcaagcatccgtttcaggcgaactcctggaaaaatttaatcttaaaggtctgtcaggggtgcatctctcctttaccaagccactactcatatgaactgcaatttctggttaagcagatgttcaagcgcaacccctctcatcgcccatctgcgacaactttattaagtcgggggattgtcgctcgtttggtacaaaagtgcctacccccagaaataattatggaatacggggaagaagtcctggaagagattaagaattccaaacacaataccccccgtaaaaaagctaatccatcccgaatcagaatcgccttgggaaatgaagcctccaccgtgcaagaggaagagcaggatagaaaaggcagccataccgacctcgaatctattaatgagaatcttgtcgaatctgctctgcgtcgagttaatagggaggaaaaaggcaataagtccgtacaccttcgtaaagccagctccccgaatttacaccggagacagtgggagaagaatgtccctaataccgctttgactgccctggaaaacgcgtctatactgactagttcgctcacagcagaggatgataggggaggatccgtgatcaagtattccaaaaatactaccagaaaacagtggctgaaggagacacccgataccctgttgaatatcctgaagaacgcagacttgagcctagcctttcagacttatacaatctatcggccaggatcggaaggcttccttaagggaccattatcagaagaaaccgaagcatccgacagcgtggacggcggacacgactctgttattctggaccccgagcggctggaaccaggacttgacgaagaggacaccgatttcgaggaagaggacgataacccagattgggtgtcagaattaaaaaagcgtgctggttggcaggggctctgcgatcgctag

SEQ ID NO: 126544 - DNA, 1470 bp, synthetic construct
  misc_feature 1..1470: note = Description of Artificial Sequence: Synthetic coding sequence
  source 1..1470: mol_type = other DNA
atggacgattatatggtgctcagaatgatcggagagggcagtttcggacgtgcactgctcgtacagcacgagtcatcaaatcagatgtttgctatgaaggaaatcaggttacctaagagtttttctaacacccaaaacagtagaaaggaagccgtgctcctcgcaaagatgaagcaccccaatatcgtagcctttaaggagtcctttgaggccgaaggacacctgtacatcgtcatggaatactgtgacgggggtgacctgatgcaaaagataaagcagcagaaaggcaagctcttccctgaagatatgatactgaattggttcacccagatgtgtctcggtgtgaaccatattcataaaaaacgggtactccatcgggacattaaatccaagaacatttttctcactcagaatggaaaggtcaaactcggagacttcggcagcgccaggctgctcagtaatcccatggcatttgcgtgcacgtatgtaggcactccatactacgtgccaccagagatttgggaaaatctgccctataataataaaagcgatatctggtcactgggatgcattctttacgagttgtgtactttaaaacatccattccaagcaaattcctggaagaatttgatcttaaaggtctgccaaggttgtataagcccactccctagtcattattcatacgaactgcagtttctggttaaacaaatgtttaaacgaaacccatcccacaggccctccgccacaactctgttgagtcggggaatagtggcaagactggttcaaaaatgcctgccgcccgagatcatcatggaatacggggaagaggtgttagaggaaattaagaacagcaaacacaacaccccacgaaagaagcaggaggaggagcaagaccggaagggctcacacaccgatctggagtcgatcaacgagaacctggtggaaagtgccctgcgaagggtgaaccgcgaggagaagggcaataagtctgtacacctcagaaaagccagcagcccgaatctccatagacgccagtgggagaagaacgtgcccaataccgcgttgaccgcgttagaaaatgcctccattttgacttctagtctcaccgccgaggatgaccgcggcggtagcgtcattaaatatagcaaaaacaccacccgcaagcaatggttaaaagaaactccggacactctattaaacatcctcaaaaatgctgacctaagtcttgcttttcaaacctatacaatatatcggcctggcagtgaggggttcctgaaggggccccttagcgaagagacggaagcatcagacagcgtagacggtggtcatgactccgtcatcctggacccggaaagactggagcctggtttggatgaggaggatacagatttcgaggaggaagacgacaatccagattgggtcagtgagctgaagaagcgggctggctggcaggggctatgtgatcgttag

SEQ ID NO: 126545 - DNA, 1533 bp, synthetic construct
  misc_feature 1..1533: note = Description of Artificial Sequence: Synthetic coding sequence
  source 1..1533: mol_type = other DNA
atgcagttcgggcgtgcccacggagattgcgtttccggagctcaactgtgcggatgtccatctatggatgactacatggtgctcagaatgatcggagagggctcctttggccgggcgctattggtgcagcacgaaagcagtaaccagatgttcgccatgaaggagataagacttccaaaaagcttttcaaatacccagaacagcagaaaggaagctgttctgctggccaagatgaagcatcctaatatcgtggcctttaaggagtcttttgaggccgagggacacctatatattgttatggagtattgcgacggaggcgacttaatgcagaaaatcaaacagcagaaaggcaaactttttcccgaggatatgatcctgaactggtttactcagatgtgccttggggtcaaccacattcacaaaaagcgcgtgctgcaccgggatatcaaatctaagaacatctttctgacacagaatggtaaggtgaaactcggcgattttggtagcgctcgcttactcagcaatcctatggccttcgcctgcacttatgtggggacaccctactatgtgcccccagagatttgggagaatctcccttacaataacaagagcgacatctggtctctgggatgtattctgtatgagctctgcactctaaagcaccctttccaggcaaacagttggaaaaatttgatcctgaaggtctgtcaagggtgcatctcaccgctccccagccattacagctacgagctgcagttcctggtgaagcagatgtttaagaggaaccctagccaccgcccgtccgccaccactctgctgagcagagggatcgtggctaggcttgtccagaaatgcctccctcccgaaattataatggaatacggggaggaagtcctcgaggagataaagaacagcaagcacaatacacctcggaagaagcaggaggaagaacaagacaggaaggggagtcatacagatttggaaagtattaacgagaacttagtggaatctgctcttcgccgcgtgaacagagaggagaaaggcaacaagtctgtgcacttacgcaaagcctcctcacctaaccttcatcgccgacaatgggagaagaatgtgcccaatactgcactgactgcactggaaaatgccagcatcctcacttcgtcactcacggccgaagatgaccgcggcggttcagtgataaagtatagtaaaaatacaacacgcaaacagtggctcaaggagactcccgatactctcctgaacatactgaagaacgccgaccttagcctggcgtttcagacatacactatctaccgtcctgggagtgaaggattcctgaagggccctctgtctgaagaaactgaagctagcgactccgtggatggaggtcatgatagtgtgatcctggaccccgagagactcgaaccagggttggatgaggaggacaccgatttcgaggaagaggatgacaacccggactgggtctccgagctcaagaagcgggctggatggcagggcctttgtgaccgctag

SEQ ID NO: 126546 - DNA, 177 bp, synthetic construct
  misc_feature 1..177: note = Description of Artificial Sequence: Synthetic coding sequence
  source 1..177: mol_type = other DNA
atggatgattacatggtactccgtatgattggcgaagggtcttttgggagggctctgctggtgcagcatgaatccagtaatcagatgtttgcaatgaaagaaatcaggctgccaaagtccttttctaatacccagaattcacggaaagaggctgtgctccttgccaaaatgaaatag

SEQ ID NO: 126547 - DNA, 510 bp, synthetic construct
  misc_feature 1..510: note = Description of Artificial Sequence: Synthetic coding sequence
  source 1..510: mol_type = other DNA
atggctagaggcggagatacaggttgcaccggcccatccgagactagtgccagcggagccgccgctatagcactgcccggtttggagggtccagctaccgatgcacagtgtcagactctccctctcactgtcctgaaatcccgttcgccatctccgcggtcgctcccacccgctttatcctgccccccacctcagccagccatgctggagcatctgtcaagcctgccaactcagatggactacaagggccagaaattggctgagcagatgttccagggtatcattctctttagtgctattgtcggatttatctacgggtacgtggctgaacagtttggatggacagtgtacatcgttatggccggcttcgcattctcatgcctgctcactttgccaccttggccaatctatcgaagacatcccctgaagtggctccccgtacaggaaagttccactgacgataagaaacctggtgaaaggaagataaagaggcacgcaaagaataattag

SEQ ID NO: 126548 - DNA, 2259 bp, synthetic construct
  misc_feature 1..2259: note = Description of Artificial Sequence: Synthetic coding sequence
  source 1..2259: mol_type = other DNA
atgccactagcagcctattgttacctgagggtggtgggtaaggggtcatacggcgaagtgaccctggttaagcaccgccgcgacggcaaacaatacttacatgaaaaacacatcctgcaccgagatctgaaaacgcaaaatgtcttcctgaccagaaccaacattatcaaagttggagatttgggaatcgcccgagtgctggaaaatcactgtgacatggcatccacacttataggtacaccttactacatgtctcctgagttgtttagtaataagccatataactataagagtgacgtgtgggccctcggctgttgtgtctacgaaatggcaactctcaaacatgcgtttaatgctaaggatatgaacagcttagtctaccgaatcatcgaggggaagcttcctcccatgcctagggattactccccagaattggcagagttaatacgcaccatgctgtcaaagcgacccgaggagcgacctagcgtgcgctctatcttgcgccagccctatataaagcgacagatttctttctttctcgaggcaactaagataaaaacatctaaaaataacatcaaaaatggggactcccagtcaaaacccttcgccaccgtggtctctggcgaagccgaatccaaccacgaggtcatccatcctcagccactgtcaagcgaaggatcacagacatatatcatgggggagggcaagtgcctatcccaagagaagccccgtgcttcaggactgctgaagtcccctgccagcttgaaagcgcacacttgcaagcaggaccttagcaatacaacagagctggctacaatctcgtctgtgaacattgatatcctccctgccaagggcagagattccgttagcgatggcttcgtgcaggaaaaccagcctcggtaccttgacgcctctaatgaattggggggcatctgctctatcagtcaggttgaagaggaaatgctccaggataataccaagtcctctgctcaacccgagaatctgatccctatgtggagctcggacatagtcactggcgagaagaacgaacctgtgaagccgctgcagcccctgatcaaagaacagaaacctaaagaccaaagcctggcactctcaccgaagttggagtgcagcgggactatactcgcacattctaacctgaggcttctgggctcctccgatagcccagcctccgcatcgcgcgtcgccgggatcactggggtgtgtcaccatgctcaggaccaggtggcgggcgaatgcataattgaaaagcaaggccgtatccacccggatttgcagccacacaactctggttcggagccatcgctgagtcgtcaacggaggcagaaacgccgggagcagaccgagcatagaggcgagaaaagacaagtgcgccgcgacttgtttgccttccaagagtctccacccaggtttctcccctcacatcccatagtgggtaaagtggacgtaacttctactcagaaggaagccgagaatcagcggagagtggtcacaggcagcgtgtcttcctctcgttcttccgaaatgagttccagcaaagatagacccctttcggccagagaaagacgtcgattgaagcagtcacaagaggagatgtcatcaagcggaccctcggtgagaaaggccagcctcagtgttgcaggaccaggtaaacctcaggaagaggatcagccattgccagctagaaggctaagttctgactgttctgtgactcaggagcgcaagcagattcattgtctatcagaggatgagctttcttcttcaacaagctccacagacaaatccgacggggactatggggaaggaaagggacagacaaatgagatcaacgccctcgtgcagctgatgacacagacactgaaactggattccaaggagagctgtgaggacgtgcccgtggcaaatcctgtctccgagtttaaactccatcgcaaataccgcgacaccctgattctccacggaaaggtggcagaggaggcagaggaaatccatttcaaagagttgccctcggcgatcatgcctggatcggagaaaatccgccgccttgtggaagtgcttagaactgatgtgatccgtggtttgggcgtgcagctgctcgagcaggtgtatgatctactggaggaagaggacgagtttgacagggaggtgagactgagagaacacatgggcgagaagtataccacctactccgttaaggccagacagttgaagttttttgaagaaaatatgaatttctag

SEQ ID NO: 126549 - DNA, 942 bp, synthetic construct
  misc_feature 1..942: note = Description of Artificial Sequence: Synthetic coding sequence
  source 1..942: mol_type = other DNA
atggccggacaaccaggacacatgccccacggcggaagctccaataacctgtgtcacacattggggcccgttcatccgccagacccccaaagacaccctaacacgctgagcttccggtgttcactggccgactttcagatcgaaaaaaagatcggtagaggtcaatttagcgaggtttacaaagccacttgcctgctggaccggaagaccgtggccctgaagaaggtccagatctttgagatgatggacgcaaaagcccgacaggattgcgtaaaggagatcggcctgctgaaacagctcaatcaccctaatatcataaagtatctggatagtttcatagaggacaatgagctgaacattgtcctcgagctggcagacgctggcgatctttcccaaatgattaagtattttaagaagcaaaaacgattaattcctgaaagaaccgtgtggaaatacttcgtacagctatgcagtgcggtggagcacatgcacagtagacgggttatgcatcgtgatatcaagcccgcgaacgttttcataaccgcgacgggcgtcgtgaagcttggagacctgggcctcggtagattcttcagctctgaaacaactgctgcgcatagtcttgttggtacaccatactatatgtcaccggagcggatccacgagaatggctacaatttcaaatcagatatctggtcacttggctgcttactctacgagatggccgcgctccagagtcctttctacggtgataagatgaaccttttttccctgtgtcagaaaatcgagcagtgtgactatccgccactgccaggcgagcattattccgagaaactgcgggaactggtctcaatgtgtatctgccccgatcctcaccagcgacccgatatcgggtatgttcaccaggtggcaaaacaaatgcatatttggatgagtagcacatag

SEQ ID NO: 126550 - DNA, 624 bp, synthetic construct
  misc_feature 1..624: note = Description of Artificial Sequence: Synthetic coding sequence
  source 1..624: mol_type = other DNA
atggccggacaaccgggtcacatgccacacggggggtcttcaaacaacctgtgccatactcttgggcccgtacatcctcctgatccccagcgccatccaaacaccctgtcctttcgatgtagtctcgccgatttccaaattgaaaagaagattgggcgtggccagttttccgaggtgtacaaggccacatgcctgctggacagaaagacggtcgccttgaaaaaagtgcagatatttgagatgatggacgccaaagcccggcaggattgcgtcaaggagatcggacttctcaagcaattaaatcatcctaacataattaaataccttgactccttcatagaagacaatgagctaaatatagtgctggagcttgcagacgccggggatctatctcagatgattaagtatttcaagaagcagaagcggcttattcccgagaggactgtatggaaatatttcgttcaactctgttcagcagtagagcatatgcatagtagacgcgtgatgcacagggacattaaaccagctaatgtatttattacagcaactggggtggtgaaactaggggacctaggtttggggaggttcttcagctctgagacaaccgctgcccatagtctgtag

SEQ ID NO: 126551 - DNA, 1044 bp, synthetic construct
  misc_feature 1..1044: note = Description of Artificial Sequence: Synthetic coding sequence
  source 1..1044: mol_type = other DNA
atgccacggagagaggtgtgctgggaggctgctcactttcgccaggaggaacagagcctgcccagacctagagttagggcactggtacgcttagcatgtcgaatggccggccagcccggacacatgcctcacggcgggagctcgaacaatctatgccacacactgggcccggtacatccaccagacccacagagacaccctaacaccttgagtttccggtgctctttggctgattttcagatcgaaaaaaaaattggcagaggtcagtttagtgaggtgtacaaagctacctgtcttttggataggaaaaccgttgccttaaaaaaggtacagatttttgaaatgatggatgcgaaggcaagacaagattgcgttaaggagattgggttactgaagcagctgaaccatcctaacataatcaaatacctggatagctttatcgaggataacgagcttaacattgtcttggagttagcggacgcaggagacctgtcccagatgatcaaatattttaagaaacagaagcgcctgatcccagagcggacagtctggaagtacttcgtgcagctgtgttctgcggttgagcacatgcacagccgccgcgtgatgcatagagacataaagccagcaaacgtgttcattactgctacaggcgtggttaaattaggcgatttaggcctgggcaggttctttagctcagaaactacagccgcccattcattagtgggtaccccttattacatgtctccagaacgtatacacgagaatgggtataattttaaaagcgacatttggtcccttggctgtttattgtacgagatggccgccctgcagtcccccttttacggggataaaatgaacttgttttccctatgtcagaagatcgagcaatgcgactatcctcctttgcctggagaacattattctgagaagttgagggaactagtgagcatgtgtatttgtcccgaccctcaccaacgccccgatattggctacgtgcatcaagttgccaagcagatgcacatctggatgtcttcgacctag

SEQ ID NO: 126552 - DNA, 738 bp, synthetic construct
  misc_feature 1..738: note = Description of Artificial Sequence: Synthetic coding sequence
  source 1..738: mol_type = other DNA
atggctggccagcctgggcatatgccacacgggggatctagtaacaacctgtgtcatactttagggcccgtccacccccctgatccacagcagctgaaccaccctaatataatcaagtacctagatagcttcattgaggataacgagttgaacattgtgctcgaattagctgacgccggggaccttagccagatgatcaaatattttaagaagcagaaacggctaatcccagagcggacggtgtggaagtacttcgtgcagctgtgcagcgccgttgaacacatgcactctcgccgggtaatgcaccgggacattaagcccgccaacgtgtttataactgccaccggggtcgtgaagctcggcgaccttgggttgggaagatttttctcgagcgaaaccactgctgctcacagtcttgtaggcacgccctactacatgtcgccggaacggatacatgaaaatggttataatttcaaaagcgatatctggtccctgggatgcctgctgtatgagatggccgcactccaatctcctttttacggagacaaaatgaatctcttctctctttgccagaagatcgagcaatgtgactatcctccattgcccggcgagcattactccgagaagctgcgggagctggtatccatgtgcatctgccctgatccccaccagaggccagatattggctatgttcaccaggtggccaagcaaatgcacatttggatgagctccacttag

SEQ ID NO: 126553 - DNA, 942 bp, synthetic construct
  misc_feature 1..942: note = Description of Artificial Sequence: Synthetic coding sequence
  source 1..942: mol_type = other DNA
atggctggccagcccggtcacatgccccacggagggagttcaaataacctatgccatactctgggccccgtgcaccctccggacccacaacggcaccccaacactctgtcatttcgatgtagtcttgcagacttccagatagagaaaaagatcggacgcggccagttttctgaagtctacaaggccacatgcctgctggatcggaaaaccgtggctctgaagaaggtgcagatatttgagatgatggacgcaaaggctcgacaggattgtgtgaaggagatcggacttctgaagcagctgaaccatccaaacatcattaaatacttagactcctttattgaagataatgagctaaacattgtgctggagctggccgatgccggcgatctgtcgcagatgatcaaatattttaagaagcagaagcggctgatcccagaacggacggtctggaaatatttcgttcagctgtgttcagcggtggaacacatgcacagccggcgcgtcatgcaccgagacattaaacccgccaatgtctttatcaccgcaacgggcgtcgttaaactgggtgatctgggtctgggtcggttctttagcagcgaaacgactgccgcgcactctcttgtgggtacaccctattatatgtcgcccgagcgaatccacgagaatggatacaactttaaatcagacatatggagcctgggatgtctgctgtacgagatggccgccctgcagtcgcctttttacggtgataaaatgaatttgtttagcttatgtcagaagattgagcagtgcgactacccccctctcccgggtgagcactacagcgagaaactgagagagctcgtttctatgtgcatatgccctgatcctcatcagaggccagatatcggctacgtgcatcaagtcgcgaaacagatgcacatctggatgagttcaacatag

SEQ ID NO: 126554 - DNA, 1044 bp, synthetic construct
  misc_feature 1..1044: note = Description of Artificial Sequence: Synthetic coding sequence
  source 1..1044: mol_type = other DNA
atgccgcgtcgcgaggtttgctgggaggctgcccacttccgtcaagaggaacagtcactcccccggcctagagtgcgggcgctcgtacgcctcgcctgcaggatggctgggcagccaggacacatgccccacggtgggtccagtaacaacttatgccatactcttggacctgttcatccgccagatcctcagaggcaccctaacacactatcgttcaggtgctcactggctgacttccaaatcgaaaaaaaaatcggcaggggccagttttctgaagtgtacaaggccacttgccttctggacaggaagacagtggcccttaagaaagtgcaaatcttcgagatgatggacgcaaaagcacgccaggactgcgtcaaggagatagggcttctaaaacagttgaatcatcctaacataataaagtacttggattccttcattgaggataatgagctgaacatcgttctcgagctagctgacgcgggcgatttgtctcaaatgatcaagtatttcaagaagcagaagagactgatcccagaacgcaccgtctggaagtatttcgtacagctttgctctgcggtagagcatatgcacagtcgccgagtgatgcatagagatatcaaaccagcgaacgtgttcattacagccacaggggtagttaagctcggagaccttgggctaggaagattcttctcctcagagacaacagcagctcacagtctcgttggcaccccttattatatgtctccagaacgaattcatgagaatggctataacttcaaatccgacatttggtcactagggtgtctcctttatgaaatggccgccctccaatcccccttctatggcgacaaaatgaacctcttctcactctgccaaaagatcgaacagtgtgactaccccccactgcccggggaacattacagcgagaagctgcgagagctcgtaagcatgtgtatttgtcctgatccacatcagcgtcctgatatcggctatgtgcaccaagtggcaaaacaaatgcacatttggatgtcctccacatag

SEQ ID NO: 126555 - DNA, 663 bp, synthetic construct
  misc_feature 1..663: note = Description of Artificial Sequence: Synthetic coding sequence
  source 1..663: mol_type = other DNA
atggcaggccagcctggtcacatgccccatggagggagtagcaataacttgtgccacacactcggacccgtgcacccccccgatccccagaggcacccgaacactctatccttcaggtgtagcttggctgatttccagatcgaaaagaagattggcagggggcagtttagcgaagtctacaaggccacctgccttctggatcggaagactgtagcgctgaagaaggtgcaaatttttgaaatgatggatgcaaaagcaagacaggattgcgtcaaggaaatcggacttttgaaacagctcaaccaccccaacatcattaagtatcttgactcttttattgaagataatgaactgaatatagtgctggagctggcagatgcaggagaccttagtcagatgattaaatacttcaaaaagcagaagcgcctcatccctgaacgtaccgtctggaaatactttgtccaactgtgtagtgccgtggagcacatgcacagccggagggtgatgcacagagacatcaaacccgcaaacgtgttcatcaccgccactggtgtggttaaactgggcgacctcggtctcgggagatttttttcatcagagacaacagccgctcatagcctggtaggaacaccctactacatgagccctgaacgtatacactag

SEQ ID NO: 126556 - DNA, 585 bp, synthetic construct
  misc_feature 1..585: note = Description of Artificial Sequence: Synthetic coding sequence
  source 1..585: mol_type = other DNA
atgccccgccgtgaggtctgctgggaggcagcccattttaggcaggaggaacagtccctgcctcggccgcgcgtaagggcgctggtgcggctggcttgtcggatggccgggcagccaggacatatgccacatggtggatcatccaataacctgtgccacaccttaggtcccgtgcacccaccagatccccagaggcaccctaataccttgtcatttaggtgttcccttgctgacttccaaatcgagaaaaagattggccgcggacaatttagcgaggtctacaaggcaacctgtcttctggatagaaaaactgtcgccctcaagaaggtgcagatcttcgaaatgatggacgccaaagcccgtcaggactgtgtgaaggagatcggactgttgaaacagctaaaccaccccaacattattaaatacctggacagcttcattgaagacaacgaattaaatattgtactagagcttgccgacgcaggagacctgtcccagatgattaaatactttaagaagcaaaaaagactcattcccgagcggacagtctggaagtattttgtgcagttgtgctccgccgtctag

SEQ ID NO: 126557 - DNA, 669 bp, synthetic construct
  misc_feature 1..669: note = Description of Artificial Sequence: Synthetic coding sequence
  source 1..669: mol_type = other DNA
atggccgggcagccaggccacatgccccacgggggcagtagcaacaacctgtgccatacgcttggcccagtgcatcctcccgacccccagcgccatccaaatactctctccttccgctgttccctggccgatttccagattgaaaagaaaatcgggcgaggccaattttccgaagtctataaagcaacatgcctgctggatcggaaaacagtggcactcaagaaggtgcagatcttcgagatgatggacgcaaaagcacgacaagattgcgtgaaagagatcgggctcttgaagcagctcaaccatcctaacatcattaagtatcttgactcctttattgaagataacgagctgaatatcgttctggaactggctgacgccggcgatctgtcccagatgatcaaatacttcaagaaacagaaacgattgataccagaaagaacagtctggaaatacttcgtacaactgtgttcagctgtcgaacatatgcatagccggcgagttatgcacagggacatcaaacctgctaacgtgttcatcacagccacaggcgtggtaaaattgggcgacctgggccttggcaggttcttctcatctgagactaccgcagctcatagcctggtggggactccctattacatgtcccctgagaggattcatgagaactag

SEQ ID NO: 126558 - DNA, 660 bp, synthetic construct
  misc_feature 1..660: note = Description of Artificial Sequence: Synthetic coding sequence
  source 1..660: mol_type = other DNA
atggctggccaaccaggccacatgccccacggaggatccagcaataatctctgccatacactggggcctgtgcacccaccagatccccagcgacaccccaacaccctctcctttcgctgctccctagcggacttccagatcgagaaaaagattgggcgcgggcagttttcagaagtgtataaagcgacctgtcttctggaccgcaaaactgtcgcccttaaaaaggtccagatttttgagatgatggacgcaaaagcgcggcaggactgtgtgaaagaaattgggctgcttaaacaacttaatcatcccaacatcattaagtacctggactccttcatcgaggacaacgagttgaacatcgtgctagagctggctgatgctggtgatctctcacaaatgattaaatacttcaagaagcaaaagaggctgattcccgagcgaaccgtgtggaaatattttgtacagctctgttctgccgtggagcacatgcacagcaggagagtgatgcacagagatataaagcctgctaacgtgttcatcacagccactggggtcgtcaaactcggggatctcgggctgggtcggtttttctccagtgagacaaccgccgcccattcactagttggaacaccttactacatgtcccctgaacggatttag

SEQ ID NO: 126559 - DNA, 516 bp, synthetic construct
  misc_feature 1..516: note = Description of Artificial Sequence: Synthetic coding sequence
  source 1..516: mol_type = other DNA
atggccggacaacccgggcacatgcctcatggaggctcaagcaacaatttatgccataccctaggcccggttcacccccctgatccccagagacatccaaacaccctgtcattccgatgctcccttgccgacttccaaattgagaagaaaattggcaggggtcagttctccgaggtgtacaaggccacgtgtctcctggacagaaagacagtcgctcttaagaaggtacagatctttgagatgatggatgccaaagcccggcaggattgtgtgaaagaaattggtctgctaaaacagttgaatcaccccaatatcatcaaatatttggactccttcatagaagataatgaactcaatatagtactggagctggccgacgcaggggatctgtcacaaatgattaaatactttaagaagcagaaaagattgatccccgagcgcaccgtttggaaatacttcgtgcagctgtgctccgcagtcgagcacatgcactctcgccgagtgatgcataggtag

SEQ ID NO: 126560 - DNA, 606 bp, synthetic construct
  misc_feature 1..606: note = Description of Artificial Sequence: Synthetic coding sequence
  source 1..606: mol_type = other DNA
atggctgggcagcccggccatatgccccatggaggaagctccaacaacttgtgccacactctcggacctgtgcatcctccggatccgcagcagctcaatcatcctaacataatcaagtatcttgactcttttatcgaggataacgaactgaatatcgtgttggagctcgcagacgccggcgatctgtctcagatgattaaatacttcaagaaacagaaaaggttgatccctgagagaaccgtgtggaaatacttcgtccaattgtgctccgcagtcgagcacatgcactcgcgtagagtgatgcatagagacatcaaacctgctaacgtttttattacagctaccggcgtggtgaaactgggcgatttgggactgggccgattcttttccagcgagaccactgccgctcacagtttggtggggacgccctactatatgtcaccagagagaatccatgaaaacggatataacttcaaatctgatatttggtccctcggatgcctgttgtacgagatggccgccctgcagagcccattctacggcgacaagatgaacttattcagcctgtgccagaagattgagcagtgcgactaccctccattatag

SEQ ID NO: 126561 - DNA, 1017 bp, synthetic construct
  misc_feature 1..1017: note = Description of Artificial Sequence: Synthetic coding sequence
  source 1..1017: mol_type = other DNA
atggaagccaccggatgggactcacggtgcagccccggcacgcaggtgcgcgcactggttcgattagcctgtagaatggccggccaacccgggcacatgccacacggaggtagctccaacaacctgtgccatacgctaggtcctgtgcaccctccagaccctcagaggcacccaaacacactgagctttcgatgcagcttggctgattttcagattgaaaagaaaatagggaggggtcagttttctgaagtgtacaaagcaacctgtcttctagatagaaagactgtcgctttgaagaaagttcagatttttgaaatgatggatgctaaggctagacaggattgcgtgaaggaaattggtctgctgaagcagctgaatcatcctaacattatcaagtatctggactcttttatagaggacaatgagcttaatatagtgttggagttggccgatgcgggggatttgagccaaatgattaaatacttcaagaagcagaaaagacttatcccagagcgcactgtttggaagtactttgtccagctctgtagcgcggtggagcatatgcacagccgccgagtgatgcaccgtgacatcaaacccgccaatgtttttataaccgctaccggcgtggttaaactgggcgatcttggcctcggtaggttctttagctctgagaccacggcagctcattctcttgtaggtaccccttattatatgtccccagaacggattcacgagaacggctacaactttaagtcagacatttggagcttaggttgtttactgtatgagatggccgctttacagtcaccattttatggcgacaagatgaatctctttagtttgtgccagaagatagagcagtgcgattacccgccccttcccggcgagcactattcagagaagctgcgggagttggtcagtatgtgcatctgccccgatccccatcagcgaccagacattggttacgtgcatcaggtggctaaacagatgcacatttggatgtcttccacttag

SEQ ID NO: 126562 - DNA, 996 bp, synthetic construct
  misc_feature 1..996: note = Description of Artificial Sequence: Synthetic coding sequence
  source 1..996: mol_type = other DNA
atgggccggagacggccggcaccttttcgggcactagtgcggctagcatgcagaatggcagggcagccggggcatatgcctcatggcggatctagtaacaacctgtgccataccttagggcccgtacatccccctgacccgcagagacacccaaatactctgtctttccgatgcagccttgcggactttcagatcgaaaagaaaatcggcagagggcagtttagcgaagtttacaaggccacctgccttcttgaccggaaaacagtggcactcaaaaaagttcaaattttcgagatgatggacgctaaagctcgtcaagattgcgtgaaagaaatcggtctgctcaagcagttgaatcatcccaacattatcaaatatctggattctttcattgaagataacgaactcaacattgtactggagttggcagacgcgggtgacttgtcccagatgattaaatactttaagaagcaaaagaggcttattcctgaaagaaccgtatggaaatactttgtccagctctgcagtgctgttgaacatatgcactctcgacgggtgatgcaccgagacatcaagcctgcgaacgtgtttattactgcgacaggagtggtgaagctgggagatttgggtcttggccggtttttttcctctgagaccacagcggcccatagtctggtgggcacaccctattatatgtcgcccgagaggatccatgagaatggatataattttaaatcagacatttggtcgctaggatgtctgctgtacgagatggcggctctccaatctcccttctatggggataaaatgaatcttttttccctgtgtcagaagatcgagcagtgcgactatccacccctcccaggggagcattattctgagaagctgcgcgagctcgtgagcatgtgcatctgtcccgatccacaccagaggcctgacattggatatgtgcaccaggtggccaaacagatgcacatttggatgagtagcacctag

SEQ ID NO: 126563 - DNA, 942 bp, synthetic construct
  misc_feature 1..942: note = Description of Artificial Sequence: Synthetic coding sequence
  source 1..942: mol_type = other DNA
atggccggccagcccggccatatgccccacggtggttcttcaaataatctctgccacacgttgggaccggtccacccacccgaccctcagagacatcctaatacactttccttcaggtgcagcctggccgattttcagatcgaaaagaagatcgggcgagggcaattttcggaggtgtacaaggccacttgcctgcttgaccgtaagactgtggccctgaagaaagtgcagatcttcgaaatgatggacgccaaagcccgtcaggactgcgtgaaagagataggactgctgaagcaattaaaccatcccaacatcattaagtacctggattcattcatcgaagacaatgagctcaatattgtgctggaacttgccgacgccggggacctgtcccagatgataaagtatttcaagaagcagaaacgactgataccggagagaactgtgtggaagtactttgttcagctttgttctgcagtcgagcacatgcactccagacgggtaatgcatcgcgacataaagccagccaacgtgttcataaccgccactggggtggtgaagctcggggaccttggactaggccgatttttctcctcagagaccaccgcagcccactcactcgtgggtacgccttactatatgagccccgagcgcattcatgagaacggatacaacttcaaatctgacatttggtccctgggatgcctgctctatgagatggccgcgttgcagagcccattctacggcgacaagatgaatctctttagtctctgccagaagatcgaacagtgtgactacccccctctgcctggcgagcattatagcgaaaaactccgggagcttgtttcaatgtgtatatgtcctgatccacatcagagacctgacatcggctacgtgcatcaagttgctaagcaaatgcacatctggatgagcagtacatag

SEQ ID NO: 126564 - DNA, 942 bp, synthetic construct
  misc_feature 1..942: note = Description of Artificial Sequence: Synthetic coding sequence
  source 1..942: mol_type = other DNA
atggccggacagcctgggcacatgcctcacggaggaagttccaataacctttgtcacaccctggggcccgttcatccaccagatccacagcggcacccgaacaccctttccttcagatgttcactggccgactttcaaattgaaaaaaagatcggacgcgggcagttctccgaggtgtataaagctacatgcctattggaccgcaaaaccgtggcactgaagaaggtgcagattttcgagatgatggacgccaaagccaggcaggactgcgtgaaagaaatcggactgctgaaacagctgaaccaccccaatataattaagtatcttgacagcttcattgaagacaatgagctgaatattgtcttggaactcgccgacgccggagatttatcacagatgattaaatattttaagaagcaaaagaggctgatccctgagaggaccgtctggaaatattttgtacagctgtgctctgccgtcgagcacatgcacagtaggcgggtaatgcatcgcgatattaaaccggctaatgttttcattacagcaaccggagtggtgaagcttggcgacctcggcctgggccgattcttcagtagtgagaccaccgccgcgcattccttggtcggcaccccatattatatgagtcctgagcggattcacgagaacggatacaacttcaaaagtgacatctggtccctcggttgcctcctgtatgaaatggctgctctgcagtcacctttttatggggataagatgaatctgttctccctatgtcagaaaattgagcagtgtgactatccgcccttgccaggtgagcattatagcgaaaaactgagggaactggtgagtatgtgcatttgtcccgatccccaccaaaggccggatataggctatgtgcaccaggtcgctaagcagatgcacatttggatgagcagcacctag

SEQ ID NO: 126565 - DNA, 909 bp, synthetic construct
  misc_feature 1..909: note = Description of Artificial Sequence: Synthetic coding sequence
  source 1..909: mol_type = other DNA
atggacgagcagagtcaaggcatgcaggggccccccgtgcctcagtttcagccccaaaaggcattacgtccggatatgggatataataccctggctaattttcgcatcgagaaaaagattggccgcggtcagttttcggaggtgtaccgagcagcatgcctccttgacggtgttcctgtggcactcaaaaaagtacagatcttcgatctgatggacgctaaggcccgcgctgactgcatcaaggagatcgatttgttgaagcaactgaaccacccaaatgttatcaagtactatgctagctttatcgaggacaacgagctaaatatcgtcctggagctggcagacgcaggagacttatcccggatgatcaaacactttaagaagcagaagaggctcattcccgagcggactgtctggaagtacttcgtgcagttgtgcagcgcgttggagcacatgcactctaggagggtcatgcatcgggacataaagccggctaatgtattcataaccgcaactggcgttgttaagctcggagatctgggtctcggtcggttctttagctccaagaccaccgcagcgcattcgctggtgggaacaccttactacatgtctcccgagcgcatccatgagaacggctataattttaagagcgacatctggagcctgggctgcctgctctatgaaatggcagccctgcagtctcccttttacggggacaaaatgaacctttattccctgtgcaagaaaatcgagcagtgcgattaccccccattgccatcagatcattatagcgaagaactgaggcagctggtgaatatgtgcatcaaccctgatcctgagaaacgacccgatgtaacctacgtgtatgatgtggctaagaggatgcacgcgtgtacggcctcttcttag

SEQ ID NO: 126566 - DNA, 249 bp, synthetic construct
  misc_feature 1..249: note = Description of Artificial Sequence: Synthetic coding sequence
  source 1..249: mol_type = other DNA
atggacgaacagtcacagggcatgcagggcccacctgtgccccaattccagccccaaaaggccctccggcccgatatgggatataatacactggctaatttccgaattgagaagaagataggccgcggccagttttccgaggtttacagggctgcgtgcctgcttgacggcgtccctgtggctttaaagaaagtgcagatatttgacctgatggacgcaaaggcccgagcagattgtatcaaggagtag

SEQ ID NO: 126567 - DNA, 99 bp, synthetic construct
  misc_feature 1..99: note = Description of Artificial Sequence: Synthetic coding sequence
  source 1..99: mol_type = other DNA
atggatgagcagtcccaaggcatgcagggacctccggtaccacagtttcaaccccagaaggcactgaggcctgatatggggtataacaccctcgcatag

SEQ ID NO: 126568 - DNA, 909 bp, synthetic construct
  misc_feature 1..909: note = Description of Artificial Sequence: Synthetic coding sequence
  source 1..909: mol_type = other DNA
atggatgagcagagccagggtatgcaggggcctccagtcccccagttccagccccagaaagcattacggccggacatgggctataacaccctggccaactttcgcatcgaaaaaaagatcggcaggggacagttctcagaggtctacagggcagcttgcctactcgatggcgtgcctgtcgctttaaagaaggtacagatctttgacttgatggacgccaaggcccgggcagactgtatcaaggagattgatctcctgaaacagctcaatcaccctaacgtgatcaaatattacgcaagcttcattgaggataatgagctcaatatcgttcttgagctcgctgacgctggcgatctgtccaggatgatcaaacacttcaagaaacagaagagactcattcctgagaggaccgtttggaagtactttgttcaactttgcagcgcactggagcatatgcattctcgacgcgtaatgcatcgggatattaagcctgctaacgttttcatcaccgccaccggtgtagttaaactcggcgatttgggtctgggcaggttctttagctccaaaaccactgccgcccactccctggtaggaaccccctactacatgtctcccgagagaattcacgaaaacggatataatttcaaaagcgacatatggtctctcggttgtttgctgtacgagatggcagccctacagagcccgttctacggggataagatgaacctttacagtctatgcaaaaagattgaacagtgtgattatccccccctgccatcagatcactattctgaagagctcaggcagttagtgaacatgtgtattaatccggatcctgaaaaacgcccagatgtgacgtacgtgtacgatgttgctaaacgaatgcacgcgtgcactgcctccagttag

SEQ ID NO: 126569 - DNA, 189 bp, synthetic construct
  misc_feature 1..189: note = Description of Artificial Sequence: Synthetic coding sequence
  source 1..189: mol_type = other DNA
atggatgagcagagccaaggcatgcagggtcccccagtgccccagtttcaaccacagaaagcactccgtcctgacatgggctataacaccttggcgaattttcgcatcgaaaagaagatcggcagagggcagttctcagaggtttaccgagcagcgtgtttacttgatggtgtgccagtcgccctctag

SEQ ID NO: 126570 - DNA, 3729 bp, synthetic construct
  misc_feature 1..3729: note = Description of Artificial Sequence: Synthetic coding sequence
  source 1..3729: mol_type = other DNA
atggaaaagtatgtgagacttcagaagatcggggagggctcatttggaaaggccattctggtgaagtcgactgaagatgggcgccagtacgtaatcaaagagattaacatttcgaggatgagcagcaaagagagggaggagtccaggcgggaggtggcagtcttggccaacatgaaacacccaaacatagttcaataccgagagtcattcgaagagaacggaagtctttatattgttatggattactgtgaggggggggatctgttcaaacgcattaatgctcaaaaaggagtgctatttcaggaagaccaaattctagattggtttgtgcaaatttgcctggcactcaagcacgtccatgaccgaaagatcttgcaccgggacatcaaaagtcagaatatatttttgactaaggatgggacagtccaactgggggatttcggcatcgcacgtgtgctgaactctaccgtcgagttagcccgaacatgtatcggaactccctactacctgtctcccgagatctgtgagaataaaccttacaacaataaatcagacatctgggcactcgggtgtgtattgtatgagctgtgcaccctgaaacacgcttttgaggctggttccatgaagaatttggtactcaaaatcattagcggttctttccctcccgttagtttacattactcatacgatcttcggagtcttgtgtcccagctgtttaaaaggaaccctagagacagaccatctgtgaactctattctcgaaaaggggttcatagccaagcggatcgagaaatttttaagtcctcaattaatagcggaagagttctgtctgaagacgttttcaaaatttggatcccagccaatccccgcgaagagaccagccagcggccaaaatagtatctccgtgatgcccgctcagaaaatcacgaaacctgcagctaagtatggcatccctctggcttacaagaaatacggtgataaaaagctgcacgaaaagaagcctctgcaaaaacacaaacaggcccaccagacccctgaaaagcgggtgaacaccggagaggaacgacgcaaaatcagtgaagaagccgcccggaaaagaaggctagagttcattgagaaagagaagaagcagaaagaccagataataagtctcatgaaagcagagcagatgaaaaggcaggagaaagagcgactggagaggatcaaccgggctagggagcagggatggcgcaatgttctcagcgcaggaggcagcggtgaagtcaaggcgccctttctgggcagtggagggacaatcgctccaagtagcttttcctctcgaggccagtacgagcactaccacgccatcttcgatcagatgcaacagcagcgcgccgaggataatgaagctaaatggaaaagagagatctacggccgcggcttacctgagcgccagaagggacagcttgctgtcgaacgcgcgaaacaggtcgaagagtttctgcagcgtaagagggaggcgatgcagaataaagctcgggccgaaggccatatgggaatactgcagaacctggcggcaatgtacgggggccgcccctccagctctcgggggggcaaaccacgtaacaaggaagaagaagtttatcttgcacggttaagacagatccgcttgcagaattttaacgagaggcagcagataaaggctaaattacgcggggagaagaaggaagctaaccactctgagggccaggaaggctctgaggaagctgacatgagacggaagaagatcgaatccctcaaagcgcatgcgaacgcccgggctgcagtactgaaggagcaattagagcggaagcgcaaggaggcttatgaaagggaaaaaaaagtctgggaagagcatttggtggccaaaggggtgaagtcaagcgatgtgtctccccccctgggccagcatgagacaggaggctccccaagtaagcagcaaatgcgctcagtgattagcgttactagcgccctgaaggaagtaggggtggactccagtctaacggatactagagaaacttccgaggaaatgcagaagaccaacaacgctatcagttctaagcgtgagattctgaggagattaaacgaaaacctgaaagctcaggaggatgagaaagggaagcaaaatttgtccgatacatttgaaattaacgtgcacgaggacgctaaggagcacgagaaagaaaagtcagtatcctctgaccggaaaaagtgggaggctgggggccaattagtaattcccttggacgagttaacgctggatacatcattttcgacaactgagagacataccgttggcgaggttattaagctgggtcccaacggctctccccgcagggcctggggcaaaagcccgaccgactcagtactcaaaatattgggcgaggcggagctacaattacagactgagcttttggaaaataccaccatcagatctgaaataagtccagagggtgagaagtataaacccctgatcaccggggagaaaaaggtgcagtgcatttcacacgaaatcaacccgtctgcaattgtagatagtccggtagagaccaagtcaccagagttcagcgaagcgagccctcagatgtccttaaaattggagggtaacctggaggagccagacgacttagagacggagattctgcaagaaccctccgggaccaacaaagacgaatccctgccctgtaccattacggatgtgtggatcagcgaggagaaggagacaaaggagacacaaagtgccgatagaattactattcaggagaatgaagtgtcagaggatggcgtgagtagcaccgttgatcaactgtctgatattcatatcgagcctggcacaaacgacagccagcattcgaaatgtgatgtggacaagtcagtgcagcccgagcctttttttcataaggtcgtacactccgagcatttgaacctggtgccccaggtgcaaagcgtgcagtgctcccccgaggaatcctttgccttccggtctcattctcatctgccgccaaaaaacaagaataagaattcgctcttaattgggctgtctacgggcctctttgatgccaacaatcccaagatgttaagaacatgtagcctgccagatttgtccaaactgtttcgtactttgatggatgtgcccacggtgggtgacgtacgacaagacaatctggagatcgatgaaatcgaggacgaaaacattaaggaggggccaagcgatagtgaagacattgtgttcgaggagaccgacactgaccttcaggagctgcaggctagcatggagcagctgttgagagaacagcccggtgaagagtattccgaagaggaggaatccgtcctaaaaaattctgacgtggagcctacggcgaatggaactgacgtggctgatgaggatgacaatcccagctccgagtccgcgctgaacgaagagtggcacagtgacaattctgatggagagattgcttcagagtgtgagtgtgattccgtgtttaatcatctggaagaacttcgtctccacctggagcaagaaatgggctttgaaaaatttttcgaagtgtacgaaaagatcaaagctatccacgaggatgaggacgagaacattgaaatatgcagtaagatcgtgcagaacatcctgggcaacgaacatcaacacctatatgccaaaattctgcacctcgtgatggcagatggggcctaccaggaagacaatgacgagtag

SEQ ID NO: 126571 - DNA, 1800 bp, synthetic construct
  misc_feature 1..1800: note = Description of Artificial Sequence: Synthetic coding sequence
  source 1..1800: mol_type = other DNA
atgctgaaattccaggaggcagcaaaatgtgtgagcggaagcacggccattagtacctatcctaaaaccctgatcgcaaggcgttatgtgctacaacagaagttagggtcgggatcattcggcacagtttatctggtgagtgataagaaggctaaacgcggggaggagctcaaggtgctgaaagagattagcgtgggcgaactgaacccgaacgagaccgtgcaggcgaacttggaagctcagctgctctcaaaacttgaccaccccgctatcgtgaagttccacgcatcttttgtggagcaggacaatttctgtatcatcaccgagtactgtgagggacgtgatttggatgacaagattcaagaatacaagcaagccgggaagatctttccagaaaatcaaatcatagagtggttcattcaactgctgctcggtgttgactacatgcacgaaagacggatcctgcatcgtgacttaaaaagcaagaatgtgtttctcaagaacaacctgctaaagattggagacttcggagtttccagattgttgatgggatcctgtgatctggccactacactgacgggcactccccactacatgtcaccagaggccctcaagcaccagggctacgacaccaagtcagacatatggtccctggcgtgtatactctacgagatgtgttgcatgaatcatgcgttcgctggcagcaattttctgagcatcgtgctgaaaatcgtggagggtgacaccccttccctcccggaacggtaccctaaggagctgaacgcaattatggaatcgatgctgaataagaacccctctctcagaccctcagctattgagattctcaagattccttaccttgatgagcagttgcagaatctgatgtgtaggtacagcgagatgactctggaggataagaacttggattgccaaaaggaagctgcccatattatcaacgccatgcagaaaaggattcaccttcagacgctccgcgcattaagcgaggtccaaaaaatgactccaagggaacgtatgcggctcagaaagctgcaggctgcggatgagaaagccagaaagctgaagaagatcgtggaagaaaagtacgaggaaaattcaaagcgcatgcaggagcttcggagccgcaatttccagcagctgtcagtggacgtcttgcacgaaaaaacccatctgaaaggtatggaggagaaggaagagcagccagagggaagacttagctgttcgccgcaggacgaggacgaagagcgatggcaggggcgagaagaagagtcagacgaacctaccctcgaaaatctgcctgagtcacagcccattcccagtatggacttgcacgaattggaaagcatcgtggaggatgccacctccgatctcggttatcacgagattccggaggatccattagtggccgaggagtattacgctgacgcctttgattcctattgcgaagaaagtgatgaagaggaagaagaaattgctctggagcggccggagaaagagatcaggaacgaggggtcccagcccgcgtatagaactaatcagcaagactcagatattgaggccctggcgcggtgtctggagaacgtgctaggatgcacaagcctcgaccagccctgccgctcatggggccagaagtacttaaaacggagcatcattaccagccgagaacagggcattcgcatgcttgcaaagcaaagatccgccagcgtatggaaaaaatggtgcttgaaaccagccaccgtgctgaaatggacttcatcctgcacccttaaaagcagttgctag

SEQ ID NO: 126572 - DNA, 459 bp, synthetic construct
  misc_feature 1..459: note = Description of Artificial Sequence: Synthetic coding sequence
  source 1..459: mol_type = other DNA
atggactctggcactgaggaatatgaactcaacggaggactgccaccaggcacccccggctccccagacgcttctccagccaggtggggttggcggcacgggccaataaatgtgaatcattatgcctcaaagaagtccgcagcagagagcatgcttgatattgctctgttgatggccaacgcatcacagctgaaggctgtggtggaacaggggcccagtttcgccttctacgtcccactagtggttctgatctccatatctctagtgctgcaaattggcgtcggtgtgctattaattttcctggtgaagtatgacctgaacaacccagcaaagcatgctaaactggattttcttaataatttggccaccggcctggtctttattattgtggtcgtcaacattttcataacagccttcggggtgcagaagcctctgatggacatggctcctcagcagtag

SEQ ID NO: 126573 - DNA, 567 bp, synthetic construct
  misc_feature 1..567: note = Description of Artificial Sequence: Synthetic coding sequence
  source 1..567: mol_type = other DNA
atggctggattatcacggcaactctgcgccctgtctcatccgaaaaaggctgctgagactcagaccgccgaacccggtggagcgcacgccgtgtgctcacgccaccccgtccgggtgaaaggacttgagggcagcgagatggagtctgcgcgagaaaatattgatctacagccaggcagctccgaccctcgctctcaacctattaatctgaaccactatgccactaaaaagagcgtcgccgagtctatgttagatgtcgcactgtttatgtctaacgcaatgagacttaaggccgtccttgagcagggtccttcttctcattactatacgacattagtgacgctgatctccttgtctctgctgcttcaggtagtgattggagtcctacttgtggtgatcgcccgattgaatcttaatgaagtggaaaagcagtggaggctcaatcagctgaataatgccgcaaccatcttagtcttctttaccgtggtcattaacgtcttcattacggcatttggcgcacacaaaactggattcctagctgcccgggcatcgcgcaatcccctatag

SEQ ID NO: 126574 - DNA, 273 bp, synthetic construct
  misc_feature 1..273: note = Description of Artificial Sequence: Synthetic coding sequence
  source 1..273: mol_type = other DNA
atgctcgacgtcgcactgttcatgtctaatgctatgcggttaaaagccgtattggagcaggggccttcgagccactattataccaccctggtgacactgatcagcttgtccttactgttgcaggtcgtgatcggggtactcctggtggtaataggtgaggagccttcacttcagagcgacctgttgcccaggcatccatggttggcagagcgccctcatgtgtcacctggacctccttgtatcggcaccggcagcttcgcaactactcgatag

SEQ ID NO: 126575 - DNA, 1401 bp, synthetic construct
  misc_feature 1..1401: note = Description of Artificial Sequence: Synthetic coding sequence
  source 1..1401: mol_type = other DNA
atgccaggcgactcttcccctggcaccttaccactgtgggacgcaagccttagtcctcccttgggccctgatccgggagggttctcccgcgcttctcacgcgggagataagtcacggcccccagcgccagagctggggagtccaggcgccgtccgaccacgcgtcggctcctgcgcacctgggccaatggaactgcgcgttagcaacaccagttgcgaaaacggtagcctgcttcacctttactgcagctctcaggaggtcctgtgccagattgtgaatgacctgtcccccgaagtgccttctaatgcaacttttcattcctggcaggagcggattcggcagaactatggcttttatattggcctcggcctggcctttttaagcagcttccttattggctcatccgtgatcctgaagaagaagggcctcctaaggcttgttgctacaggggccacccgcgccgttgacggcggattcgggtacctgaaggatgccatgtggtgggctgggttcctcacaatggccgccggggaggtggccaatttcggagcatacgcatttgcacccgctacagtcgtgacccccctaggagccttgagcgtcctcatctctgcaattctgagcagttatttcctccgtgaatctctcaatctgctggggaagctgggctgcgtcatctgcgtggcaggcagcacagtgatggtgatccacgccccggaagaagagaaggtgacaacgatcatggaaatggcctccaagatgaaggatacagggttcatcgtcttcgccgtgctcctcctcgtgtcctgcctaatactgatctttgtaattgcccctcgttacggccagagaaacattctgatatacattattatttgcagcgtcatcggagcctttagcgttgccgctgttaagggtcttggcatcacaatcaaaaatttctttcagggcctgcctgttgtgaggcacccccttccgtatattctgtctcttatactcgccctatccttatcgacccaagtaaactttctgaatcgcgctttagacatttttaacacctctctggtgttccccatttactacgtcttcttcactactgtcgtcgtgaccagttctattatcttgttcaaagaatggtatagcatgagcgccgttgacatagcagggacgctgtctggttttgtcacaattatattgggcgttttcatgctccatgcctttaaggatctggatatcagctgtgcaagcctacctcacatgcataaaaatcccccgccaagcccagctccagagcccacagtgatacggcttgaagataagaacgtgctggtggataacattgagctggccagcaccagcagtccagaggaaaagccaaaagtctttatcattcacagctag

SEQ ID NO: 126576 - DNA, 1344 bp, synthetic construct
  misc_feature 1..1344: note = Description of Artificial Sequence: Synthetic coding sequence
  source 1..1344: mol_type = other DNA
atgccaggggacagcagtccgggtacactacctctgtgggacgccagtctgtccccacctttggggccagaccccgggggtttcagcagagcatctcatgcaggggataagagccgccccccggcccccgaactcgggtccccaggagctgtgcgcccgagagtgggaagttgtgcgcccggaccaatggaattgcgagtctccaatacatcttgtgagaatggatccctgttgcacttatattgctccagccaggaagtcctgtgccaaatcgtcaatgatctcagccctgaagtgcccagcaatgcaactttccattcctggcaggaaagaattcggcagaactacggcttttacattgggcttgggctcgcttttttgagtagcttcctcattggatcgtctgttatcctcaagaagaagggactgctacgactcgttgccactggcgcgacccgagccgtcgccgcaggggaggttgctaattttggtgcatatgcctttgcgcctgccactgtagtaactccactgggcgcactatcagtgctcatctcagctatcctctccagctactttcttcgggagagcttgaacctgctaggaaaactgggctgcgtgatctgtgtagccggttccacagtcatggtgatacacgcaccagaagaggagaaggtgaccacgattatggaaatggcctctaaaatgaaggataccggtttcattgttttcgccgtgctgctgctggtcagttgcttgattctcattttcgtgatagcaccaagatacggacagaggaacatattaatttacattattatctgctccgttatcggagctttctccgtcgctgccgttaagggcctcggcattaccatcaaaaatttttttcagggcctgcccgtcgtgcggcacccccttccctacatactgagtcttatacttgcactgagcctgagtacccaggtgaactttcttaatagggcactggacatctttaacacgtctttggtgttcccaatctactatgtattcttcaccactgtggttgtgacttccagtattattctgttcaaagaatggtactctatgagcgctgtcgatattgccggaaccctgagtggatttgtgacaattattctgggggtatttatgttacacgctttcaaggacttggatatttcttgtgcgagtctccctcacatgcataaaaaccccccgccttctcccgctcccgagcccacagtgataagactagaggacaagaacgtgttggtggacaacatagagcttgccagtacctcatcacctgaggagaagcctaaggtctttataatccacagctag

SEQ ID NO: 126577 - DNA, 8415 bp, synthetic construct
  misc_feature 1..8415: note = Description of Artificial Sequence: Synthetic coding sequence
  source 1..8415: mol_type = other DNA
atgaacggagatatgccccatgtgcctattaccactctcgctggaatcgcttccctgactgacctgctgaatcaactgcctttaccctctcctctgcctgctacgactacaaaaagtctgctcttcaacgcccgaattgcagaggaagtaaactgcctcctggcatgccgcgacgataacctagtctcgcaactagtgcactcgctgaatcaggtgtcaaccgatcatatcgagctcaaggacaaccttggtagcgatgatcctgagggagacataccagtgttactccaggctgtgctggctcggtctcctaatgtcttccgcgagaagtccatgcagaatcgctacgtccagagcgggatgatgatgtctcaatataagctgagtcagaactccatgcattcttcccctgcttcgagtaactaccagcagaccactatttcccatagccccagcagccggttcgtgcctccacagacttcctcaggtaacaggtttatgccacagcagaacagccccgtgccaagtccatacgcccctcagagccctgcaggatatatgccttacagccacccctcctcctataccacccatccacaaatgcagcaagcttcagtgtctagtcctattgtggccggtggcctgagaaacatccacgataataaagtctccggtcccttgagcggaaattcggcaaatcatcatgcagacaaccccagacacggctcctctgaggattatttgcatatggtgcatcgactcagtagcgatgacggcgactccagcacaatgcggaatgctgcatccttcccactgaggagccctcaacccgtgtgttccccggctggatctgagggcacacccaaagggagcaggcctccactcatacttcaatctcagtcattgccctgctcttctccacgggacgtgccccctgatattctgctggactcacccgagaggaaacaaaaaaagcagaagaaaatgaagctaggaaaggatgaaaaagagcagagtgaaaaagcagccatgtatgatattataagctcaccttccaaggacagcacaaaactgaccctgagactgagccgggtgagatctagtgacatggaccaacaggaggacatgattagtggtgttgagaacagtaatgtcagcgagaatgatatccccttcaacgttcagtaccccgggcagacgtctaaaacacctatcacgccgcaggatataaataggcctctgaatgctgctcagtgtctgagccagcaagagcagaccgccttcctgccagcaaatcaggtccctgtgctgcagcagaacacctccgtggctgctaagcagccacagaccagtgttgtacaaaatcagcagcaaatctcccagcagggtccaatctacgacgaagtagaactggatgcgctcgctgagattgaaagaattgagagggaatcagctattgaacgtgagcgcttctctaaagaggtccaggataaggataagccactcaaaaagagaaagcaagactcatatccgcaagaagccgggggcgctaccggtgggaacagacctgcttcccaggagaccggaagcaccggcaacggctcgcggccggcattgatggtatctatcgatctgcatcaggccggtagggtagattcccaggccagcattacgcaggattccgatagtattaagaaaccagaggaaatcaagcagtgcaacgacgcccccgtgtcagttctacaggaggatatagttgggtccctgaaaagcacccccgagaaccacccagagacccccaaaaagaaatcggaccctgaattatcaaaatcagagatgaaacagtcagagtctcgcctggccgaatcgaagcctaacgagaatagactggtcgagaccaaatcttcagagaacaagctagaaactaaggtggaaacccagaccgaggaactgaaacaaaatgagtccaggactaccgagtgtaagcaaaacgagagcaccatcgtggagcccaagcagaacgaaaatcgattgagcgatacaaaaccgaatgacaataaacaaaataacggtaggtcagagaccactaagtctaggccagagaccccgaaacaaaagggagagtcaagacccgagacacccaaacaaaagagtgatgggcatcccgagacccctaaacagaagggggatggccggcccgagacccctaagcagaagggtgagagccggccggaaactccaaaacagaaaaacgaaggacgcccagaaactccgaaacatcgtcatgacaataggagagactccgggaaaccatctactgaaaaaaagcctgaagtaagcaaacataaacaagacaccaaatctgacagtccacgtctaaagtctgaaagagcagaggccctgaaacagcgccctgacggtcgtagcgtgtctgaaagcctaaggagggatcatgataataagcagaaatccgatgatcggggagaatcagagcgacaccgtggtgatcagagtcgcgtgaggagacctgagacactgcgatcatcatcccgcaacgagcacggaattaagagcgactcgtctaaaaccgacaaactggaacgcaaacaccggcatgaatctggcgactcgcgtgaaagacccagctccggtgaacaaaaatcacggccagactcaccaagggtcaagcagggggactctaataagtcaagatcagataagctgggatttaagtctcctactagtaaggacgataagaggaccgagggaaacaaatccaaggtggatacaaataaagcccaccctgataataaggccgagttcccaagctacctcctaggcgggcgcagcggggctctgaagaactttgtcattcccaagatcaagagagacaaggatggcaatgtcacacaagaaaccaaaaagatggagatgaagggggagccgaaggataaagtggagaagataggcctggtggaggatctgaacaaaggagcaaaacccgtagtggtcctgcagaaactgtccttagatgacgtgcagaaacttataaaggatagggaggacaagtcgcggtcctctctgaagcccattaaaaataaacctagcaaaagtaataagggatcaatcgatcaatcagttctcaaggagctgccccctgaactactggcagagattgaatccacgatgccactctgcgagcgagtgaagatgaataagcgaaaacgttccaccgttaacgagaaaccaaagtacgctgaaatttccagcgacgaggataacgacagtgacgaggcgtttgagtcatccagaaagaggcacaagaaagacgacgacaaagcctgggagtacgaagagcgggataggcgaagctctggcgaccaccgtcgcagtggacattcccacgaggggaggcgatccagcgggggcggtcggtaccggaacaggagtcccagtgattctgacatggaagactattcccctcctccctccctttcagaggtggctcggaagatgaagaaaaaggaaaaacagaagaagcgaaaggcctatgagcccaagctgacgccagaggaaatgatggatagcagcacattcaaaagattcaccgccagtatcgagaatattctcgacaacctagaggacatggacttcacagcatttggcgacgatgatgagatccctcaggaacttttgctgggcaagcaccagttgaatgaactagggtcagaaagcgcaaagatcaaggccatgggcataatggacaagctcagcactgataagaccgtcaaagtgctgaatattctggagaaaaacatacaggatggcagtaaactcagcaccctgctcaatcacaacaatgataccgaagaagaggaacgcctgtggagggacttaattatggaaagagttaccaagtccgcggacgcttgcctgacgactatcaatatcatgacatcgccgaatatgccaaaggcggtgtatatcgaggatgtcatcgaacgcgtgattcaatacacgaaattccatctgcagaacacgctgtacccacagtatgatccagtatacagacttgacccacatgggggggggctgttatctagcaaagcaaagcgggcaaagtgctcgacccacaagcagcgggtcatcgtgatgctgtacaacaaagtctgcgacattgtgtcctcactatccgagctgttggagatacagctgttaactgacacaacaatactccaagtaagctccatgggtatcaccccttttttcgtggaaaacgtgtcggagcttcagctctgtgctatcaaactcgttacagcggtctttagtcgatacgaaaagcatcgccaactcatcctcgaagagatatttacgtccctggcacgattgccaacctccaaacgtagcctcaggaactttaggcttaactcgagcgacatggacggagaacctatgtacatccagatggtaaccgccctcgtcctacagctgattcagtgcgtggttcacttgccatcaagcgaaaaggactccaacgcagaggaggattctaacaaaaagatagaccaagacgtcgtgattacaaactcatatgaaactgctatgcgcaccgctcagaatttcttgtcaatattcctgaaaaaatgtgggagcaagcagggagaggaagactaccggcccctttttgaaaattttgtgcaggacttattgtccaccgttaataagccggagtggcctgcggctgagctcctgttatctctgttaggaagactgctcgttcatcagttttcaaacaagtcaaccgaaatggccctcagagtcgcgagcttggattacctggggacagtagccgcccgactgcggaaagatgcagtgacctccaaaatggatcaggggagcattgaacgaattctgaagcaggtgtccggcggagaagacgaaatccagcaactgcaaaaggcactcctggattacttagatgaaaacacagagaccgacccctccttagtgttttcgagaaagttctatattgcccagtggtttagggacacaacccttgagactgaaaaggcaatgaagtctcagaaggacgaagaaagttccgagggcacccatcatgctaaggagatcgaaaccacggggcagatcatgcacagagctgaaaaccgcaagaaattcctcaggagcattatcaagaccacaccttctcagttttccacactgaagatgaactccgacactgtcgactatgatgacgcctgtctgattgttcgctatcttgccagtatgaggccttttgcccagtcattcgacatttacctgacccaaatcctccgggtgttaggcgaaaacgccatagcagtcagaaccaaggccatgaagtgcctgagcgaggtggtcgccgttgatccctccattctcgcaagattagacatgcagagaggagttcatggccgactgatggacaactcgactagcgtaagggaggccgccgtggaactgctcggacgatttgttttgtgccgccctcaactcgccgagcagtactacgacatgcttatcgagcgaattctggacacagggataagcgtcagaaaacgggtcattaagatactgcgggacatatgtatcgagcaacctacttttcctaagattacggagatgtgcgtaaaaatgataagaagggtcaatgatgaagaaggtatcaaaaagcttgtcaatgagacattccagaagctctggtttactccaacaccacacaacgacaaagaggcgatgacccgaaagatccttaacatcaccgacgtggtcgccgcatgtcgggatacaggatatgattggtttgagcagctgttacagaacctgctgaagtccgaggaagactccagctacaagccagtgaaaaaggcttgtacccagctggtcgataatctggtggagcacatccttaaatatgaggagtcactcgccgattctgacaataagggagtcaattctgggcgtcttgttgcctgtataaccaccctgttcttattcagtaaaatccgcccacagctcatggtaaaacacgccatgacaatgcaaccttatctgaccacaaaatgtagtacccagaatgactttatggtaatttgcaatgtggcgaagatacttgagctggtcgttccactcatggaacacccaagtgagacatttcttgcaactatagaagaggatctgatgaagcttataattaaatatggaatgaccgtggtccaacattgcgtttcttgcttgggtgccgtggtgaacaaggtgacacaaaattttaaattcgtttgggcatgtttcaatagatattacggagccatatcaaaactgaagagccagcatcaagaggatcccaataacaccagcctgctcactaataagcctgcactcttacggtcactgtttaccgtcggggcactctgcagacacttcgatttcgacttggaagattttaagggtaattccaaggttaatataaaagacaaagtcctggagctgcttatgtattttaccaagcatagcgacgaggaggtgcagaccaaggccatcattggcctgggtttcgcattcatccagcatcctagcctgatgttcgagcaagaggtaaaaaatctctacaacaacatcctgtcagacaaaaattcatccgtgaacctcaagatccaggtactgaaaaacctacagacttacctacaggaagaagacaccagaatgcaacaggccgatagggattggaaaaaggtggccaagcaggaggacctcaaggagatgggcgatgtgtcctccggaatgtctagttccatcatgcagttgtatcttaagcaggtgctggaagccttctttcatactcagtcttccgtcagacacttcgccttgaacgttattgccttaacgttaaaccaggggctcattcatcccgttcaatgcgtgccatatctcattgccatgggtactgacccagaacccgctatgaggaacaaggcagatcagcagctagtggaaatcgataagaaatacgctggtttcattcacatgaaggccgttgccggcatgaaaatgtcataccaggtacaacaggctattaacacatgcttgaaggaccctgtgagaggtttccgacaggatgagtccagctccgccctttgctcccacctttacagtatgatacggggaaacaggcaacatcggcgcgccttccttatttctttacttaatctgtttgacgatacagcgaaaacggatgtcaccatgctgctctatattgcagacaacctggcatgcttcccctatcagacccaggaagagcccctcttcataatgcaccacatcgacataaccttgtctgtgagcggatccaatttgttacaaagctttaaagagagcatggtcaaggacaagcggaaagaaagaaaaagctcaccttccaaagaaaatgagtcttctgattctgaggaagaagtgtcacgtccccggaagagtcgaaagagggtcgacagtgatagtgactccgattccgaagatgacattaatagcgtgatgaagtgccttcccgaaaattccgccccactgatagaatttgcaaacgtgagccagggcatacttctcctcttgatgctcaagcagcacctcaagaatctttgcgggttcagtgattccaaaatccagaagtacagcccttccgagtccgccaaggtctatgacaaagccattaatagaaaaaccggagtacacttccacccaaagcaaacgttggattttctgcgaagtgatatggcaaatagtaaaatcacggaggaggtaaaaaggtccatagttaagcaatacctggatttcaaactccttatggagcacttggatcccgatgaagaagaggaggaaggcgaggtgagcgcctccactaatgctcgcaacaaagctataacctccctgttgggaggtggcagccctaagaataataccgcggcggaaactgaggacgacgaatcagatggggaggacaggggcggtggaaccagcggcagccttagacgctcaaagcggaactcggatagcaccgaattggccgctcagatgaacgagtctgtagatgtcatggacgtcatcgctatatgttgccccaagtataaggaccgcccacaaatagccagggttgtgcaaaagactagctctggattcagcgttcagtggatggcaggctcatattccggatcctggactgaagccaagagaagagacgggaggaagttagtcccttgggtcgatacaattaaggagagcgacataatctacaaaaaaatcgccctaacctcagcgaataaactcaccaataaggtcgtacagactctgcgctctctgtatgctgcaaaagatggaaccagctcatag

SEQ ID NO: 126578 - DNA, 8094 bp, synthetic construct
  misc_feature 1..8094: note = Description of Artificial Sequence: Synthetic coding sequence
  source 1..8094: mol_type = other DNA
atgaatggagacatgccccatgtgccaataacgaccctggcagggattgccagcttgaccgatctgctcaaccaactgccactgccttctcccctcccggccacaacaacaaagtctcttctctttaatgcccggattgcggaagaggttaactgcttgctggcatgtcgtgacgataacctcgtcagtcagctggttcactccctgaatcaggttagtaccgaccatatagaactcaaagacaatcttgggtcagatgaccctgagggggatattcctgttctgctgcaggccgtgctggcaaggagccccaatgtctttagagagaagtcaatgcagaatcgctacgtgcagagcgggatgatgatgagccagtacaaactgtcgcagaactccatgcatagctccccagcctcaagtaactatcagcagacaaccattagccattctccctcgagccgtttcgtgccgccgcaaactagttctggtaacaggtttatgcctcaacagaacagtccagtgccttcgccttacgctccccaatctccagccggatatatgccttattcacatcccagcagctacaccactcaccctcagatgcagcaggcctccgtgagcagtcccattgttgccggcggcctgaggaacattcacgacaataaagtcagcggcccgctgagcggcaacagtgccaatcaccacgccgacaatccacgacatggaagctccgaggactatctacacatggtccatagactttcgtccgacgacggtgatagctcgacaatgcggaatgcagcctctttcccacttagaagtccacagccagtgtgttctcccgcagggtctgaagggacacccaagggtagtagacctccactgattcttcagtctcagagtctaccttgtagtagtccccgggacgtcccaccagacatcctactggacagtcctgaacgcaaacaaaaaaaacagaagaagatgaaactgggcaaggacgaaaaagagcaaagcgagaaagccgccatgtatgatatcatctcctccccgagcaaggactctactaaacttacactcaggctctctcgcgtgagatcatctgatatggatcagcaagaggacatgatctccggggtagagaactctaatgtgtccgaaaacgatattccgttcaatgtgcagtatcccggtcagacctcaaagacaccgatcactccccaggacataaatcggccacttaacgcagctcagtgtctgtcacaacaggagcagactgcatttctgccggccaaccaggtgcctgtgctgcaacagaacacttccgtcgcggcgaagcagcctcaaactagtgtggtgcagaaccagcaacagatctcccagcagggaccaatttatgatgaggtggagctcgatgctctggccgagatcgaacggatcgaacgagagtcagccatcgagagagaaaggttctccaaagaggtgcaggataaagataagccactcaagaagaggaagcaagactcatatcctcaggaagctggaggtgccacgggaggaaatcgcccagccagccaagagacaggctccacaggcaacggcagtcggccggccctcatggtgtctattgacctgcatcaggccggccgggtggacagccaggcaagtataactcaggactccgattcgataaagaaacctgaggaaatcaagcaatgtaatgatgcccctgtttctgttctccaggaagacattgtgggatccctgaagtctactcccgaaaatcacccagaaacacctaaaaagaaatctgaccccgagttgtctaaaagcgagatgaagcagtctgaatccagattggccgaatcaaaaccaaatgaaaatcgtctcgtggaaacaaagtcttctgagaacaaactggaaactaaggtggaaactcaaactgaggaattaaaacagaacgaaagcaggactactgaatgcaagcagaatgagtccactatcgttgaaccaaaacagaacgagaacagactgagcgacaccaaacccaatgataataagcagaacaatgggcgaagcgaaacaacaaaaagcaggcccgaaacgccgaagcagaaaggcgagtccaggcccgagacacccaaacagaagtccgatggacaccctgagacccccaagcagaagggcgacggcaggccggaaacccccaagcagaaaggcgagtccagacctgagacacctaagcaaaagaatgagggccggcccgagacaccaaaacatagacacgacaaccggcgtgattccggcaaaccatccaccgagaagaagccggaagtttccaagcataagcaagatactaagagcgactcaccaaggttgaagtctgaacgtgcagaagctctgaagcagaggcctgatgggagaagtgtctctgagagcttacgcagggaccacgataacaaacagaaaagcgatgaccgaggcgaatcagagcgccatcggggggaccagtcccgtgtgcggagacctgagacgctgcgcagcagctcccggaacgagcacggaataaagtctgacagctccaagaccgacaaactggagcgcaaacaccggcacgaaagcggcgacagtcgcgagagaccaagcagtggggaacaaaagtcccggcccgacagcccaagggtgaagcaaggcgacagcaataaaagtagaagtgacaagctgggctttaagagcccgaccagcaaagacgacaagaggacagaggggaataaatccaaggtggacactaacaaagctcatccggacaataaagctgaatttccaagctacctactgggcggcagatctggtgcccttaaaaattttgtgattcccaagatcaaaagggacaaggatggcaatgtgacccaagagacaaaaaagatggagatgaagggggagcccaaagataaggtggagaagatcggactagtcgaggaccttaataagggcgccaaaccagtggtcgttttgcagaaattgagtttagacgatgtgcaaaagctgataaaagatagggaagataaaagccgatcctccctgaagcccatcaaaaacaagcctagcaagtccaataaggggtccatagatcagtcggttctgaaggaactcccgccagagctgctggcggaaatcgagtcgacaatgcccctctgtgaaagggtgaagatgaacaagaggaagcgatcgactgttaacgaaaaacctaagtatgccgagatcagctccgacgaggataacgatagcgatgaggcctttgaaagcagcagaaagaggcacaaaaaggatgatgacaaagcttgggagtatgaggaaagggaccggcgttcaagtggcgaccaccgacgatcagggcatagccacgaaggccggcggagcagcggcggtggtcgataccggaatagatctccatctgatagtgacatggaggattacagtcctccgccttcattgtctgaagttgcccgcaagatgaaaaagaaagagaagcagaagaaacgaaaagcatacgagcccaagttaacacctgaagaaatgatggactctagcacgtttaaaaggttcacagcatctattgagaatattctcgacaacctggaagacatggattttactgccttcggcgatgacgatgagatcccgcaagagctcttactcggtaaacaccagttaaacgaattaggctcagaatctgccaaaatcaaagctatgggaattatggataaactgagtacagacaagaccgttaaagtcctgaacattttggaaaaaaacattcaggacggttctaaacttagcacactgctgaatcataacaatgatactgaggaagaagaacgcctctggcgcgacctgatcatggagcgggtgacgaaatcggcagatgcctgcctgactacaattaatatcatgacctcacccaacatgccaaaggctgtctacattgaggacgtgatagaaagggtaattcagtacaccaagttccacttacagaataccctgtacccacaatatgacccagtctatagattggatcctcacggaggagggctcctatcttctaaggctaagagggccaaatgctccacacacaagcagcgtgtgattgtgatgctgtacaacaaagtgtgcgatatcgtgagctctctatctgagctcctagagatccagcttctgacagacaccaccattctccaggtatcctctatggggatcactcccttctttgtcgagaacgtctcagagttgcaactgtgcgcgatcaaattggttacagccgtgttcagcaggtacgaaaaacatcggcagctgatcctggaggagatttttaccagcctggcacgcctcccgacgtctaagagaagcctgcgcaatttccggttaaactccagcgacatggatggggagccaatgtatatccagatggtgaccgctctggtgctccagcttattcagtgcgtggtgcatttaccaagttctgagaaagatagtaatgcagaagaggatagcaacaagaaaatcgaccaggacgttgtcattactaattcctacgaaaccgcgatgcgcacagcacagaattttctcagtatcttcctaaaaaagtgtggcagcaaacaaggagaagaagactacagacctctgttcgaaaattttgtacaggacctattgtcaactgtgaacaagcctgagtggcccgcagctgaattgctcctcagcctgctcggaaggctgctggtgcaccagtttagtaataaatcaacggagatggccctacgggttgcatcactagattatttaggcacagtggctgctagactgagaaaggatgcagtgaccagtaagatggaccaagggagcatagagagaattctaaaacaggtctctggtggagaggacgagattcagcagctgcagaaagctctcctggactatctggatgaaaataccgaaactgacccctcacttgtgttcagtaggaagttttacatcgcacagtggttccgcgacacgacactggaaacagaaaaagcaatgaaaagtcaaaaggacgaggagagttccgaaggtacccatcatgcaaaggaaattgaaaccaccggccagattatgcacagagctgagaaccgcaaaaaattcttgagatcaataattaagacaactccatcacaattctcaactctcaaaatgaacagcgacacggtggattacgacgatgcttgtctgattgtaagatatttggcatcaatgcgtccatttgcccagtccttcgacatttacctcactcagatactccgggtcctaggagaaaatgctatcgcagtgaggactaaggccatgaaatgtctgtctgaagtggtcgctgtggatcctagcattctagctcgattagatatgcagcgcggcgtccacggcagacttatggataattctactagtgtcagagaggctgcagttgagctcctaggtaggtttgtcctatgccgaccacagctggctgagcaatattacgacatgcttatagagcggatcctggatacaggcatcagcgtgcgtaagcgcgttatcaaaatactgcgggacatttgcattgagcagcccacatttcctaagatcaccgagatgtgcgtgaagatgattcggcgagtgaacgatgaggaaggcattaaaaaactcgtcaacgaaacattccagaagctgtggttcacaccgacccctcacaacgacaaggaagctatgactcgcaaaatcctaaatataaccgatgtcgtggccgcctgtcgggacactggttacgattggtttgaacaactactccaaaatttgctgaaatcagaggaagatagctcgtacaagcccgtcaagaaagcatgtactcagttggtcgacaacctggtcgagcatattctgaagtacgaggagagtctggctgacagtgataacaagggcgtgaactccgggagacttgtagcttgcattacaacccttttcctgttctctaagattcgccctcagctgatggtaaagcatgcaatgaccatgcaaccataccttaccaccaaatgtagcacacagaacgactttatggtgatttgtaatgtagccaaaatcctggagctagtggtccccctaatggaacacccatccgagacatttctggctacaatcgaggaagaccttatgaaattgatcatcaagtatgggatgacggtagtgcagcattgcgtgtcgtgtctcggggctgtggtcaataaggtcacccaaaacttcaagtttgtgtgggcttgttttaatcggtactatggagctataagcaagttgaaatcacagcatcaggaagatcctaacaataccagtttgctgacaaacaagcctgccctgctgcgaagcctgttcacagtcggagctctctgccgtcattttgatttcgatcttgaagacttcaagggaaactccaaagtaaacattaaagacaaagttctggagcttctgatgtatttcacgaaacactcagacgaggaagtgcagactaaagcaatcattggattgggtttcgctttcattcagcacccaagcttgatgtttgaacaggaggtaaagaacctctataacaatatcttgtctgacaagaattcgagcgtcaacctaaaaattcaggtgctgaagaacctgcaaacttacctccaggaagaggatacacggatgcagcaagctgatcgggactggaaaaaagtggcgaagcaggaggacctgaaagaaatgggagacgtgagtagcggcatgagttcatcaataatgcagctgtatctgaaacaggtgctagaggcattttttcacacccaaagctccgtgaggcatttcgccttaaacgtgatcgcgttgacactcaaccaaggcctgatacaccccgtccagtgcgtgccatatctgatcgccatgggtacggatcccgagccagccatgaggaataaggccgaccagcagctggtcgagatcgataagaaatacgctggcttcattcacatgaaggccgtggctggcatgaaaatgtcttatcaggtgcaacaggccatcaacacatgcttaaaggatcctgtaagaggcttccgccaggatgaatcctcttccgccctctgtagccatttatactcaatgatccgaggcaaccggcagcacagacgcgcgtttctcatttctctgctgaacctgttcgatgacactgccaaaacggatgtcactatgctgttatatattgcggacaacctggcctgctttccgtatcagacacaagaagagcccctgttcataatgcatcacatagacatcaccctgagcgtttccgggtctaaccttttgcagtccttcaaggaatcaatggtgaaagacaaaaggaaagagcggaaatcttcccccagcaaagagaacgagtcctcagattctgaggaagaggtctcacgaccaagaaagagcagaaagcgggttgattctgacagtgacagtgacagcgaggacgatattaactcagtgatgaagtgcctgcctgagaactctgcacctttgatagagtttgccaacgtgagtcaagggatcctgctactcctaatgctgaagcagcatctgaagaatctttgtggattctccgactctaaaattcagaagtactcccctagtgagtcggcgaaggtgtacgataaggcaataaatcgcaagacaggcgtacatttccatcctaagcagaccctagattttctccggagcgacatggcaaacagcaagattacagaggaggtgaagcgctcaatcgttaaacagtacctcgacttcaagttgcttatggaacatttggacccagatgaagaggaggaggagggcgaggtatcggcaagcactaatgcaagaaacaaagcgataacttcactgctcggcggcggctccccgaaaaacaacactgcagcagaaacagaagacgatgagtccgatggcgaagaccgggggggggggacttcaggcgtcaggaggcgcaggagccagagaatttcgcagcgtatcacatag

SEQ ID NO: 126579 - DNA, 867 bp, synthetic construct
  misc_feature 1..867: note = Description of Artificial Sequence: Synthetic coding sequence
  source 1..867: mol_type = other DNA
atggagaggccacaaccagacagcatgcctcaggacttgagtgaggctcttaaagaggctacaaaggaagtacacacacaggcagaaaacgcggaattcatgagaaatttccagaaaggacaggtcaccagagacgggtttaagctcgttatggctagcctgtaccacatttacgtggccctcgaagaagaaattgaacgaaataaggaatcacccgtattcgcacccgtgtacttcccggaagagttgcataggaaagcagccctggagcaagacctcgcattttggtacggtcccaggtggcaagaggtgatcccatatacgcctgctatgcagcgctatgtcaagcggcttcacgaggtggggcgtactgagcccgagctgcttgtcgctcatgcttatacacgttacctgggcgatctatctggtgggcaggtgctgaagaaaattgcacagaaggccctcgatctgcctagtagcggcgagggacttgctttcttcacattcccgaacatagcctcagcaacaaaatttaagcagttgtaccggtcaaggatgaactccctcgagatgaccccagcagtccggcagcgcgtcattgaggaagcaaaaacggctttcctcctgaatatccagctgtttgaggagcttcaagagctcttgacccatgatactaaagaccagtctcccagtcgcgcccccggattgcgtcagagggcaagtaataaggtacaggactctgcaccagtcgagacacctagaggcaaaccccccctgaatacccgttcccaggctccgctgttgagatgggttctcacgctttcttttttagtggcaacagttgccgtgggtctttatgccatgtag

SEQ ID NO: 126580 - DNA, 4305 bp, synthetic construct
  misc_feature 1..4305: note = Description of Artificial Sequence: Synthetic coding sequence
  source 1..4305: mol_type = other DNA
atggaggaccacatgttcggcgtccaacaaatacaacccaatgtcatatcagtgcggctgtttaaacgaaaagtgggaggccttggatttctagtcaaagaaagggttagtaagccacccgttattatctccgatctgattagaggaggagcagccgaacaatctggcctgatccaggcgggggacataatcctggctgtgaacggccgccctctcgtggatctgagttatgattcagccctggaggtgctgaggggcattgcctccgagacccacgtcgttctgattctacggggtcccgaggggtttactacccacctggagacaaccttcaccggcgatggaacacccaaaaccatccgcgtgacccagcccctgggcccaccaaccaaggcagtggaccttagccatcaaccccctgcgggaaaagagcaacccctggcagtggatggcgcctcgggtcctggaaacggcccgcagcacgcctacgatgacggacaggaagctgggagcctgcctcacgctaacgggcttgcaccccgcccaccaggacaagacccagccaagaaggcaacacgagtgtccctccaaggaagaggggaaaacaatgaactgctcaaggaaattgagccagtcttgtcactgttgacgagcgggtcccggggagtgaaaggtggggctccagccaaggccgagatgaaagatatgggaattcaagtggatcgagaccttgacgggaaaagccacaaacctttgcctctcggcgtggaaaatgatagggtctttaacgacctgtggggaaagggtaacgttccggttgtgctgaacaatccctacagcgaaaaagagcagcctcccacgagcgggaagcagtcgcccaccaaaaacgggtcccccagtaagtgtccgaggtttttgaaggtgaaaaattgggagacagaagtcgtcttgacagacaccctgcatctgaagtctactctggagacaggttgcaccgagtatatctgcatgggctctatcatgcacccatcacagcatgcccggagacctgaagatgtgcggacaaagggacagttattccctctcgccaaagaatttatcgaccagtactatagctcaatcaagaggtttggcagcaaggctcacatggagcgcctggaagaagtgaataaggagatcgacacaacttcaacataccagcttaaggatacagagctgatttacggggctaaacatgcctggcgaaatgccagtcgatgtgttggccggatccagtggagcaaattacaagttttcgacgcacgggattgtacaaccgcccacggaatgtttaactacatatgcaatcatgtgaagtacgcaacgaacaaggggaatctgcgatccgccattactatatttccacagcggaccgacgggaagcacgacttcagggtgtggaacagccagctgatcaggtacgctgggtacaagcagccggacggatctactttgggggaccccgccaatgtgcagttcacagagatctgtattcagcaagggtggaagccccctaggggacggtttgacgtgctgcccctgctgcttcaggctaatggtaatgaccccgaactgtttcaaattcccccggaattggtgctcgaagtgcccattagacaccctaagttcgagtggtttaaagacttaggcctaaaatggtatggattgcctgcggtgtcgaacatgctcctggaaataggagggctagaattctctgcgtgtccttttagtggctggtatatgggcacagaaattggcgtgcgcgattactgtgataacagcaggtacaatatactggaagaagttgcaaaaaagatgaacctggacatgcggaaaacgtcttcattgtggaaggaccaagccctggtcgaaatcaacattgcggtgctgtactcattccaaagcgataaggtgacaattgtagatcatcatagtgccactgagagcttcatcaagcatatggagaatgagtacaggtgcaggggaggatgtccagccgattgggtctggatcgtgcctcccatgagcggaagtatcaccccagtttttcaccaagaaatgctgaactatagactgacccctagctttgaataccagcctgacccctggaatacccacgtgtggaaaggcaccaatggaacgcctactaaacgccgcgccataggctttaagaagttagctgaggctgtgaaattctccgcaaagctgatgggacaggctatggcgaagagggtcaaggcaaccatcctctacgccaccgagactgggaagtcgcaggcctacgccaagacgctctgtgagatcttcaagcacgcgttcgatgctaaagttatgtctatggaagaatacgacatagtgcatttggaacacgagacccttgttttagtcgtaacttctacatttggcaatggcgatccacctgagaacggagaaaagtttggatgtgctttaatggagatgagacaccctaacagcgtccaagaagagcgaaagtcatacaaagttagattcaattcagtgagcagttattcagactcccagaaatcaagcggagatggaccagatctgagggacaacttcgagagcgcaggtccacttgcaaacgtgaggttcagcgtttttgggctcggaagtcgtgcttacccgcatttttgtgcctttggacacgccgtggacacgctcttggaagagctgggaggggagagaattctgaagatgcgggagggagacgaattgtgtggacaggaagaggcttttcggacttgggctaagaaggtgttcaaagctgcgtgcgacgtcttctgcgtgggggatgacgtaaacatcgagaaagcaaacaacagtctcatttcgaacgacagatcctggaaacgtaacaaattccgcttaacgtttgttgccgaagccccagaactcacacaaggtttatccaatgttcataaaaaacgcgtttctgcagctagactactgagtaggcagaaccttcagtccccaaaatcctctagatccactatctttgtgcgcctccatacgaacggcagccaagagctgcagtatcagcctggagatcatctgggcgtcttcccaggaaatcacgaggacctcgtgaacgccctcatagagaggctggaagacgcccccccggtgaatcaaatggtcaaggtggaactcctggaggaaagaaatacagcactaggcgtgatttcaaactggactgacgaactgcgtttacccccttgcactatattccaggccttcaagtactatcttgatatcaccacccctccaactccattgcaactgcagcagttcgctagcttggctacatctgagaaggagaaacaacgtcttttagtgctctcaaaaggactgcaggagtacgaagagtggaaatggggcaagaacccaactatcgtcgaggtactcgaagagtttccttctatacagatgcccgcaactttactgctaacgcaactatccctgctacagccacgctattacagtatcagcagcagcccagatatgtatccagacgaggtccatctgacggttgctattgtcagctatcgtaccagagatggcgaagggccgattcatcacggcgtttgctcatcgtggctgaaccggatacaggcagatgagcttgtgccatgttttgtgcgtggggctccctcattccacttgcctaggaacccacaggtgccttgtattctggtcgggccaggtaccggcatcgccccattcaggagtttttggcagcagagacagtttgacatacagcacaaggggatgaatccatgccccatggtgctggtgttcggttgcagacagtctaagatcgatcatatctaccgcgaggaaacgttgcaggccaaaaacaagggtgtcttccgcgagctctatactgcatactccagagagcctgacaaaccaaagaaatatgtacaggacatcctccaagagcaactcgccgaatcagtgtaccgagcccttaaggagcagggcggacacatatacgtatgcggagatgttactatggccgctgacgttctgaaggcaattcagcgcattatgactcagcaaggaaagctctcggctgaggacgccggcgtgttcatttccagaatgcgggacgataatcggtaccatgaggatatcttcggggtgacactccgcacctacgaagtcactaatcggctgcggagcgaatctattgcattcattgaagagtcaaagaaggataccgacgaggtattctcaagctag

SEQ ID NO: 126581 - DNA, 4407 bp, synthetic construct
  misc_feature 1..4407: note = Description of Artificial Sequence: Synthetic coding sequence
  source 1..4407: mol_type = other DNA
atggaggaccacatgttcggtgtccagcagattcagccgaacgtcatcagtgtgaggctgttcaagcgcaaggtaggaggcctgggcttcttagtgaaggagcgggtatccaagcctcctgtgatcataagcgaccttattcgcgggggagcagcagaacagtctgggttgattcaagccggagatataattcttgcagtgaacgggagacccctcgtggatctcagttatgacagcgcccttgaagtccttagagggatagcctccgagacccatgtggtcctgattcttcgcgggcctgagggttttaccacacacctggagaccacatttacaggagacggtacccctaagacaatccgggtcacccaacccctagggccacctaccaaggccgtcgacctctctcaccagcctcccgccggcaaggaacagcctctcgccgtcgatggagcaagtgggccgggaaatgggccccaacacgcatacgatgacgggcaggaggcaggttcgttgccacacgccaatggtctggcacctaggcctccagggcaggatccagcaaagaaagccacccgggtaagcctccagggccgcggcgagaataatgagcttctgaaagagattgagcctgtgttgtctttgctcactagcgggtcccggggagtgaagggcggggcccccgctaaggccgagatgaaagatatgggaatccaggttgatagggatttggacggcaaaagccataagcctctcccgctaggtgtggagaacgaccgcgtgtttaacgacctatggggtaagggcaatgttccagtagtacttaataacccctatagtgaaaaagagcagccacctacatctgggaaacagagccccacaaaaaacggatctccaagtaagtgccctcggtttctgaaagtcaagaactgggaaaccgaagttgtgctgaccgacacccttcaccttaagtcgaccctggagacgggttgtaccgaatacatctgcatgggctccattatgcatccttcccagcacgccagacgacccgaggatgttaggaccaaaggtcagctgttcccgctggccaaggagttcatagaccagtattatagctccatcaagaggttcggcagcaaggcacacatggagcggcttgaggaggtcaacaaagagatagacacgacctcaacttaccaacttaaggacacagagttgatctacggcgcgaagcacgcctggaggaatgcttcccgctgtgtcggtcgtatccaatggagcaaactgcaagttttcgatgccagggattgtactactgcgcacggtatgttcaactacatctgcaaccacgtcaagtacgcaaccaacaaaggtaatctgcgaagtgctatcaccatcttcccgcagagaacagacggaaagcatgactttcgggtgtggaactcacagcttatccgctacgccgggtataagcagccagacggcagtacgcttggagatcctgccaatgtgcaatttaccgagatctgcattcagcaagggtggaagccgcctcgcggaagattcgatgtgctgcctctgctcctacaggcgaacggcaacgaccccgaactgttccaaattccgccggagctggtgctcgaggtccccattagacatcccaagtttgaatggtttaaggacctgggcctgaaatggtacggcctgcctgccgtgagcaacatgttgctcgaaattgggggactggaattctctgcctgtcctttctctggttggtacatgggtactgagattggggtccgcgattattgcgacaactcgaggtacaacatactggaagaagtggctaagaagatgaacctggacatgagaaaaacatctagtctctggaaggaccaggccctggtcgaaataaacatagcagtgctgtacagctttcagtccgataaggttacaatagtcgaccatcatagtgctacagagtcttttatcaagcacatggagaatgagtacaggtgccgcggtggctgccccgctgactgggtttggatcgtgcctcctatgagcgggagcatcaccccagtcttccaccaggaaatgctgaattaccggcttactccttcatttgagtatcaaccagatccctggaacacgcatgtttggaaggggactaacggcacacccacaaagagacgcgccatcggcttcaaaaagctggccgaagctgtcaaatttagcgcaaaactgatgggtcaggctatggcaaaacgagtcaaggctacgatactgtatgcaacagaaacaggtaagtctcaggcgtatgcaaagacactctgcgagatatttaaacacgctttcgacgccaaggtcatgagtatggaagagtacgacatcgttcatttggaacatgagacgctggtcctcgtcgttaccagtacctttgggaacggagacccccccgaaaatggggagaagttcggttgcgctctcatggaaatgcggcaccccaatagcgtgcaagaggagaggaagtacccagagcctctgagattctttcccagaaaggggcctcccctccccaacggcgataccgaggtccacgggctagccgccgcgcgtgactcccagcaccggtcgtataaggttcggtttaatagcgtgtcatcatactctgactcccagaagtctagtggcgatggcccagacctccgtgacaattttgaaagcgctggaccccttgctaacgtccgcttttccgtctttggcttggggtcccgggcttatccccatttctgcgcgttcgggcacgccgtggacacgcttctggaggagttgggcggagagcggattctgaaaatgcgcgagggcgatgaactgtgtggccaagaggaggccttcagaacttgggccaagaaggtctttaaggccgcttgcgacgtattttgtgtcggagacgatgtgaacatcgagaaggcaaataatagtctgatatcgaatgaccgctcatggaagaggaataagttccggctgacctttgtcgccgaggcccctgagctaacccaggggttatcgaatgtgcacaaaaagcgggttagcgcagcaagactcttatcccggcaaaacctgcagtctccaaaaagctctagaagtactatctttgtgcggctgcataccaacggttcgcaggagctccagtatcaacctggagatcatctgggtgtatttcctggtaaccatgaggacttagtaaatgctttaatcgagcggctggaggatgctccaccagtgaaccagatggtgaaggtggaactgctggaggaacggaacacagctttgggggttatttcaaattggacggatgagctgagactgccaccttgcaccattttccaggcatttaagtactatctggacattaccacgcctcccacaccattgcagctacagcagttcgcgtccttggctacttcggaaaaagaaaaacagcgattactcgtgctttccaaagggttgcaggaatacgaagaatggaagtgggggaagaacccaacaattgtcgaggtgctggaggaatttcctagcatacagatgccagctaccctgctgctgacacagctctccctgctccagccccgctactactccatttctagctctccagacatgtaccccgacgaggtacatctgacggttgccattgtgagctaccgcaccagagatggagagggtcctatccaccacggggtttgtagctcctggcttaaccgaattcaggctgacgagctggtcccctgtttcgttagaggcgccccatcttttcacttaccgcgtaacccacaggttccatgcatacttgttggaccaggaaccggcattgctccttttagatcattctggcagcaaaggcagttcgacatacagcacaaaggcatgaacccgtgtccaatggtgctggtgtttgggtgccgccaatccaaaatcgatcacatttatcgggaagagacactgcaggctaagaataagggcgtatttcgggaattatacacggcctactcccgggagcccgataaacctaagaagtatgtacaggacattttacaggagcagctcgcagagtcggtttaccgggcgctcaaggagcagggtggccacatttacgtatgcggggatgtgaccatggcagccgacgtcctgaaggctattcagcggatcatgactcagcaggggaaattaagcgccgaagacgcaggagtgttcatcagcagaatgcgggatgacaaccgttatcatgaagacattttcggggtcacactgcggacctacgaggtgaccaaccgtttgagatccgaatcgattgctttcattgaggagagtaaaaaggacaccgatgaagtgttctcttcctag

SEQ ID NO: 126582 - DNA, 1224 bp, synthetic construct
  misc_feature 1..1224: note = Description of Artificial Sequence: Synthetic coding sequence
  source 1..1224: mol_type = other DNA
atggaagaccacatgtttggcgtgcagcagatacagcccaatgtcatttctgtgcgcctcttcaagaggaaagttggtggcctcgggtttctggtgaaggagcgagtcagtaaacccccagtcataatcagcgatttgattagggggggagcagccgaacaaagcggcctgatccaagctggggacattatcctggctgtcaatgggaggccattagtggacctgtcatacgatagcgctttggaggtgctgagagggatcgcgtcggaaacccacgttgtcctcatcctgagaggccccgagggcttcacgactcatttggagaccacctttaccggcgacggaacacccaagacaatacgtgtcacccagcctctgggaccccctacaaaggctgtggacctctcacatcagccacccgcaggaaaggaacaaccactcgcagtggacggggcctccggacccgggaatgggccacagcacgcatatgatgacggccaagaggcaggcagtctgccccatgctaacggactcgccccacgacctcccggccaggatccagccaaaaaggccaccagggtgtccctacaagggcggggggagaataatgaattgctcaaggagatcgagccggttctttccctccttacaagcggcagccggggagttaagggcggcgcaccagcaaaggcagagatgaaggacatgggcatccaggtggacagggacctggatggcaaatctcacaaacccctccccttgggtgtggaaaacgatcgggtttttaacgacctatggggtaaggggaatgtccctgtggttctgaacaacccttacagcgaaaaagaacagatgcgcaagctgaggatcaccgagggttttggcgcccagagaggttctcacaaccatccgccaccacaggagaatagtccgccgcaaaggatggcggctccacccagcgtacatgctagctcaaggagccggacgggcagactgcgttggtttagtttgactccctccaccttgagggcacattggaagcgggacgcactaagtacaagcgcctgggctccctcctgcatcttgctttccatgcagggcggactcaagacaagcgcgcagaaggacagctctagcctctcccctaaatcgttgctcatcaacactatacatcagctgaaagatctggccccgaaaccgacctggaaggggtggaaacgctag

SEQ ID NO: 126583 - DNA, 3993 bp, synthetic construct
  misc_feature 1..3993: note = Description of Artificial Sequence: Synthetic coding sequence
  source 1..3993: mol_type = other DNA
atggaggatcatatgttcggggtgcagcagatccagccgaatgtgatatctgttaggctcttcaaacgcaaagtcggcgggctagggtttctcgtgaaggagcgcgtctcgaaacctccagtgatcatcagtgaccttattaggggaggggccgcagaacaaagcggcttgatacaggccggcgatattatactggctgttaacgggcgcccacttgtggatctttcttacgacagcgctttagaagtgctgcgtggaatagccagcgaaactcatgtcgttctcatcctaaggggacctgagggatttacaacccacctcgaaacaacatttacgggggacggaacgcctaagaccatccgcgtcactcagccgctggggcctccaactaaggccgtagatctgagccaccagccacctgccggtaaagagcagcccctggcagtcgatggcgcttcagggcctggtaacggccctcaacacgcctatgacgatggccaggaggctggatctctcccgcatgccaacgggctcgctccccgcccccccggccaggaccccgccaagaaagcgacccgggtgagtctccaggggcgaggagaaaataatgaactcctgaaggaaatcgagccagtgttgagtctcctgacctcaggctcccgcggcgtgaaggggggcgccccagcaaaagctgagatgaaggacatggggatccaggtggaccgtgatcttgatggcaagagtcacaaacccttgccattgggggttgagaacgatcgcgtatttaacgatctctggggaaagggcaacgtccccgtggtcctgaacaacccctattccgaaaaggagcagcccccgacctccggcaagcagagtccaaccaaaaacggatccccttcgaagtgcccacggttcctgaaggtgaagaattgggagacggaagttgtgcttacagatacactgcacctgaaaagcaccctcgagactggttgtaccgaatacatctgcatgggatcaatcatgcacccatcacagcacgcgcgccgccccgaggacgtgcggaccaagggacagctctttcctctcgcaaaagaattcatcgatcagtactatagcagcatcaagaggtttgggagcaaagcacacatggaacgcctcgaagaagtgaataaagagattgacactacaagtacataccagctcaaagatacagaactcatctatggggctaagcatgcatggcggaatgcttctcgatgcgtaggtagaattcagtggtcaaagcttcaagtgtttgatgcaagggattgtactaccgcacacggaatgttcaattatatatgtaaccacgtcaaatacgccacgaataagggtaacctgcgttcggctatcaccatattccctcaacggacagacggcaagcatgactttcgggtctggaactcccaattgatacgctatgcaggctataaacagcctgacggcagtaccctgggggacccagccaacgtgcagtttaccgaggaagtggctaagaagatgaacctagatatgaggaaaacctctagcttatggaaagaccaggccctggtcgagataaatattgccgtactctattctttccagtccgacaaggtcactattgtggatcaccactcagctaccgagagttttatcaaacatatggagaatgagtatcggtgccgcgggggctgtcccgctgactgggtgtggattgttccacctatgagcggctcgatcacacctgtcttccaccaggaaatgctcaactatagactgactccatcctttgaatatcagccagatccatggaatacccacgtgtggaaaggcaccaacgggactcctaccaagcgcagagctatcgggtttaagaagctggccgaagcagttaagtttagtgccaaactgatggggcaggcaatggccaaacgcgtcaaggctacaatcctttatgcaacagagacaggcaagagccaggcctatgcaaagaccctgtgcgaaatttttaaacatgcatttgatgcgaaggtgatgtccatggaggagtacgatatcgtgcatttggaacacgaaaccttggtgctggttgtaacatctacgtttggcaatggcgaccctcctgaaaacggcgaaaaatttggctgcgcattaatggagatgcgacacccaaattctgtccaggaagaaaggaagtcttataaggtgaggttcaactccgttagcagctacagcgactcccaaaagagctcaggcgatggtcccgatttgagggacaacttcgaatcagctggaccactggccaacgtcaggtttagcgtttttgggcttggcagccgggcctacccacatttttgcgcttttgggcacgctgtggatactctgctggaggagctgggcggcgagagaatcctaaagatgcgcgaaggggacgagttgtgcggacaggaggaggcattcagaacctgggctaagaaggtgttcaaagctgcatgcgacgttttttgtgtgggggacgacgtcaacatcgagaaagcaaacaatagtctgatttctaacgaccgctcttggaaacgcaacaagttccgactcactttcgtagctgaggcgcccgagctcacgcagggactgtcgaacgttcacaaaaagagggtctccgctgctcgactcctgtctagacaaaatctccagagtccaaaatcttcgcgcagtaccatcttcgtccgtctgcatacaaatgggtcacaggagctccagtaccagcctggagaccatctcggcgttttcccaggaaatcacgaagatttagtgaacgcgctaatcgaacgactcgaggatgccccacctgttaatcagatggtgaaagtggagctgttagaggagaggaataccgcgctgggagtgatctccaattggactgacgagctgcgactcccgccatgtacaatcttccaggcttttaaatactacctggatattaccactccaccaactcccctgcaactacagcagttcgcatcactcgctacatccgaaaaggaaaagcaacgcttgcttgtcctatccaaaggactgcaggaatatgaggaatggaaatgggggaagaacccaacaatcgttgaagtgctcgaagaatttcccagcatccagatgccagctacactgttactgactcagctgtctcttctgcagccccgctactattcgatttcaagttctcctgacatgtatccagacgaggtgcacctgactgtggccatcgtaagctataggacccgggacggagaaggacccatacatcatggagtttgcagtagttggctgaatagaatccaggctgatgagctggtaccttgtttcgtgcgaggagccccaagttttcacctccctcgtaacccccaggtgccttgcattctcgtcgggcctggaacagggatcgcccccttccgatctttttggcagcaaagacaatttgacattcagcataagggcatgaacccttgtcctatggtactcgttttcggttgccgccagagtaagattgatcatatttacagggaggagaccttgcaagctaaaaacaagggcgtgtttcgggaactttacacagcctacagccgggaacctgataaaccgaagaagtatgtgcaagacattctgcaggaacagcttgctgagagcgtgtacagagccctgaaggagcagggcggtcacatctatgtgtgcggtgacgtcactatggctgctgacgtgctaaaggccatccagagaattatgacgcagcagggcaagctgagtgccgaagacgctggcgtcttcatctcaagaatgcgcgacgacaacaggtatcatgaggatatctttggtgtcactctccggacctacgaagtaacgaaccggctaaggtccgaatcaattgcattcatcgaggaaagtaagaaagacacagatgaccaagtgtttaaaacctag

SEQ ID NO: 126584 - DNA, 3621 bp, synthetic construct
  misc_feature 1..3621: note = Description of Artificial Sequence: Synthetic coding sequence
  source 1..3621: mol_type = other DNA
atggaagaccacatgttcggagtccagcagattcagccaaatgtaattagtgtcagactattcaagcggaaagtcgggggcctgggctttctcgtgaaggagcgggtctcaaaaccacctgtcatcatctctgacctcatcaggggaggagctgccgaacagagtggcctaatccaggccggtgacattatcctagcagtgaatggtcgtcccctcgttgatctatcttacgactcagccctggaggtacttagaggtatcgcgtcagaaactcacgtagtcctgatcctgaggggtcctgaggggtttaccacccacctcgaaactaccttcactggtgacggaacacccaaaacgatccgagttacccagccgctgggtcctccgacgaaggccgtggacttgagtcaccaacctcctgccgggaaggagcagcccctcgctgttgacggagcgagcggtcccggcaacggcccccagcatgcctatgacgatggtcaggaggcgggttctctccctcatgctaacggcctcgcccctcgcccacctggtcaagacccagccaaaaaggctacaagagtgtcgttgcagggccggggggagaataatgagttgttgaaggagatcgaacctgtgctgtcacttctcaccagcggtagccgcggagtcaaaggcggcgccccggcaaaggctgagatgaaggacatgggcatccaagtggaccgagatttagacggaaagtcacataaacctctacctctgggggttgaaaatgaccgagtctttaacgacctttggggcaagggcaatgtgccagtcgtactcaataatccctatagtgagaaggagcagcctccaacttctggaaaacagtcccctacaaaaaacggttcccccagcaagtgccccagattcctcaaagttaagaactgggagacggaggtggtactcacagacacattgcatttaaagtccaccctagagacagggtgtacggagtacatctgcatgggctccatcatgcacccctcccaacatgctcggaggcctgaagacgtgcgaacaaagggccaattgtttcctctggccaaagagttcatcgatcaatattatagtagcataaaacgtttcggctctaaggcccacatggaacgacttgaggaggtgaacaaagagattgataccaccagtacgtaccagctaaaagacacggagcttatttacggggccaaacatgcatggcgcaatgcctcaagatgcgtcggaagaatccagtggtctaagttacaggtttttgatgcaagggactgcacaactgcccacggtatgtttaattacatctgcaaccatgtgaaatatgccaccaataagggcaatctgcgctccgcaattactatctttccccagaggacggacgggaagcacgactttagagtttggaacagccagcttattcgctatgcgggctataaacagcccgacggctcaactttgggtgaccctgccaacgttcagtttaccgaaatatgtatccagcaaggctggaaaccgcctagagggagatttgacgtgttgccccttcttctccaagctaacggcaatgatcctgagctgtttcaaatccctcctgaactggtactggaagtgcctatccgccacccaaaattcgaatggtttaaagatctggggctgaagtggtacggactcccggctgtgagcaatatgcttctggaaattgggggactcgagttcagcgcgtgtcctttttccggatggtacatgggtaccgaaatcggcgtgcgagattactgtgataactcgaggtacaacatcttggaggaagtcgctaaaaagatgaacttggatatgcgaaaaacctccagtttgtggaaggaccaagccctggtggagatcaatatcgccgtcctgtatagctttcagtctgacaaagttaccattgtcgatcaccactctgccaccgagtcatttatcaagcacatggagaacgagtataggtgccgcgggggatgccccgccgactgggtgtggattgtcccccccatgagcggttccattactccagtgtttcatcaggaaatgctaaactatcggctgaccccctcgtttgaataccagcctgatccttggaatactcacgtgtggaaaggcaccaatggtacgcccacaaaacggcgcgccattgggttcaagaagctggctgaagcagtcaagttttcagccaagttgatgggccaggcgatggctaagcgtgtgaaagcgacaatcctgtatgccactgagactggaaagagccaggcctatgcaaagaccctatgcgaaatatttaaacacgctttcgatgcgaaggtcatgtctatggaagaatatgatatcgtgcacctcgagcatgagaccctcgtgctggtggttacaagcacattcggcaatggtgatccccccgaaaacggagaaaagtttggatgcgccctgatggagatgcggcacccgaattccgtgcaggaagaacgcaagtcatataaagtgcgctttaattctgtctcaagctactcagattcccagaaaagttcaggggacggccccgacttacgagacaatttcgaaagcgctgggcccctggcaaacgtgagattcagtgtgtttggacttggctctagggcttatccccatttttgcgcattcggtcatgctgtcgacacacttttggaggaactgggtggggaacgaatcctgaagatgcgggagggggacgaactgtgcggccaggaagaagcatttcgcacatgggccaaaaaagtctttaaagccgcttgtgatgtattctgcgtgggcgatgatgtgaacatcgagaaggccaataattcacttatctcaaacgacaggtcctggaaacgaaacaagtttcgactgacatttgtcgccgaggcccctgagctgacccagggcctcagcaatgtccacaagaagcgggtcagcgccgccagattactgagcaggcagaacctgcagtcgccaaaatcctcccgcagtaccatttttgtgaggctgcacaccaacggcagtcaagagctccaatatcagcctggcgatcatttgggagtttttcccgggaatcacgaagatttagttaatgcactgattgagcgccttgaggacgccccacctgtgaaccaaatggtgaaagttgaactgcttgaggaacgcaacacagcccttggcgtgattagcaactggacagatgaacttagactcccaccttgtaccatctttcaagcttttaagtactacctcgatatcactacccctccaacgcccctgcagttacagcagttcgcatctcttgccacatctgagaaggaaaaacagcggcttttggtattatctaaggggcttcaagaatacgaagaatggaagtgggggaagaaccctaccatcgtggaagtgctggaggaattcccctcgatacaaatgcccgctactttgctccttacccagctgtcactactgcaacctcgatattattcgatcagtagctcacctcatacacacacgttgagcgaaaccaggccatccccgttgcccctttcatcacaatgctgttag

SEQ ID NO: 126585 - DNA, 204 bp, synthetic construct
  misc_feature 1..204: note = Description of Artificial Sequence: Synthetic coding sequence
  source 1..204: mol_type = other DNA
cacccaaatagtgtgcaggaggaaaggaagtaccccgaaccgctgcgtttctttccccgtaagggccccccgctgcccaatggtgatacagaagtgcacggattggctgccgctcgggattcccagcataggtcctataaggtgaggttcaatagtgtcagcagctactccgatagtcagaagtcatctggcgatggcccctag

SEQ ID NO: 126586 - DNA, 1521 bp, synthetic construct
  misc_feature 1..1521: note = Description of Artificial Sequence: Synthetic coding sequence
  source 1..1521: mol_type = other DNA
atgccgagcaagactaagtataacctggtagatgacggacatgatttgaggatccccctgcacaatgaggatgctttccagcacggcatttgtttcgaggctaaatatgtgggatccctagacgtgccccgcccgaactctcgggtagagatagttgcagccatgcgacgtatcagatacgaattcaaagcaaaaaacatcaagaaaaagaaagtcagtataatggtgtcagtcgacggagtcaaagttattttgaaaaagaagaagaagctgctgctgctgcagaagaaggagtggacttgggacgaatcaaagatgctcgtgatgcaggatccaatttaccgtatattttacgtctctcatgacagtcaggatctcaagatatttagttatatagcccgggacggggcctccaacatcttcagatgtaatgtattcaaatcaaaaaagaaatcccaggcaatgcggattgtccggacggtgggccaggcgtttgaagtgtgtcacaagttaagcctgcagcacacgcagcagaacgcagacgggcaagaggacggcgaaagcgagcgcaactctaactctagcggcgaccccggcagacaattgaccggcgccgaaagagcttctacggctaccgcagaagaaacagacatcgacgcagtcgaggtacctctgcccggaaacgacgttctagagttctctcggggtgtcactgatctggacgccgttggaaaggaaggaggttcccacaccggctcgaaggtgtcacatccccaggaacctatgctcaccgcctcccctcggatgctgctgccttcttcttcgtcgaagcctcccggtcttgggacagagacgcccctgagcactcaccaccaaatgcagctgctgcagcagctattgcagcagcagcaacagcagacacaggtggccgtggctcaggtgcatctgctcaaagatcaattagcagcagaagctgccgcgcgcctcgaagctcaggcacgggttcatcagcttctgctacagaataaggacatgctgcagcacatcagcctcttagtcaaacaggtgcaggaactggaactgaagttgtccggacagaatgccatggggtcacaggacagtctgctggagatcaccttccgctcaggcgccctaccagtcctgtgcgatcctaccaccccgaagcccgaggatctgcatagccccccactaggagccggactcgcagactttgctcaccctgctggaagtcccctgggacggcgggattgtctcgtcaagttggaatgctttcggtttctccccccagaggataccccaccacccgctcagggtgaagcattgctgggcggcttagaactgatcaagttccgagaatccggcattgccagtgagtacgaaagtaacaccgacgaaagcgaagagagagactcttggagtcaagaagaactacccaggctgttaaatgttttgcagagacaggaacttggcgatggactggacgatgaaatcgcagtatag

SEQ ID NO: 126587 - DNA, 636 bp, synthetic construct
  misc_feature 1..636: note = Description of Artificial Sequence: Synthetic coding sequence
  source 1..636: mol_type = other DNA
atgagcctcagcagtctctgtcccgtattttccgccgcggcatcttctctgcaggttcacctgttaaaagaccaattggcagccgaggccgcggcacgactcgaggctcaggcaagggtccaccagcttctactgcagaacaaagatatgttgcagcacatcagtctgctcgtgaagcaggtccaagagctagagctcaagctgtcaggccaaaatgccatgggctcccaggattccctactggaaattacctttagatcaggagctctccctgtcttatgcgacccaacgacccctaagcctgaggacctccattcaccccccctcggggctggcctcgcggacttcgctcatcctgcaggctcacccctgggacgccgggattgcttggtgaagctggaatgttttaggttcttaccccctgaggacacccctccacccgctcaaggagaggctctgctggggggcctggagctgatcaagttcagagaaagcgggatcgcgagtgagtacgaatctaacaccgatgagtccgaggagcgggattcctggtcccaagaggagctccctagactattaaacgtgcttcagcgacaagagctgggtgacggactggacgacgaaatcgcagtgtag

SEQ ID NO: 126588 - DNA, 1506 bp, synthetic construct
  misc_feature 1..1506: note = Description of Artificial Sequence: Synthetic coding sequence
  source 1..1506: mol_type = other DNA
atgccatccaagacgaagtataacctggtggacgacggacatgatctgcggatcccactgcacaatgaggacgcctttcagcacggtatttgttttgaggcaaagtatgtgggatctttggacgtgcctcgtcctaattctagggtggagattgtggcagcgatgaggcggattaggtatgagttcaaggcaaagaatattaagaagaaaaaggtctccatcatggtctccgtagatggggtcaaggtgattctaaaaaaaaaaaaaaagaagaaggaatggacctgggacgaaagcaagatgctagtgatgcaggatcccatttacaggatattctatgtttcacatgattcccaggatttgaagatcttctcttacatcgccagagatggtgctagtaacattttcagatgcaatgtgtttaaaagcaaaaaaaagagtcaagcaatgagaatagtgcggacagtagggcaggcctttgaagtatgtcacaagttgagcttgcagcacacacagcagaacgcggacggacaggaagatggagagtccgagcgaaactcaaattctagtggggatcccggcaggcagttaacaggcgcagaacgggcctccactgcaactgcagaagagactgacatcgacgcagttgaagtccctttgcccggaaatgatgtcctggagttcagcaggggcgtgacggatctcgatgctgtgggtaaagaaggaggaagccacaccgggtccaaggttagccacccccaagagcccatgctcacagccagccctaggatgttgttgccctcctcttcatccaaaccccccggactaggaaccgaaacgccactgtctacccaccatcaaatgcagctcctgcaacagcttctgcagcagcagcagcaacagacacaagtggcagtggctcaggtccacctgctgaaggatcagctcgctgccgaggcggctgcccgcctcgaggcccaagctcgggtgcaccagctgctcctccagaacaaagacatgctgcagcacatcagtttacttgtcaaacaggtgcaggaactggagctcaagctgtccggacagaatgcgatgggcagccaggacagtcttctggagatcaccttcaggtctggagccctgcccgttctttgcgatccaaccactccaaaaccagaggacttgcactccccaccccttggagctggtctggctgattttgctcaccctgcaggctccccactgggaagacgagactgtctggttaaactggaatgttttcgatttctgcctcccgaagacacccctcctccagcccaaggagaagccctcttaggcgggcttgagcttattaagtttcgtgagtccggcattgcttcagagtatgagtccaacaccgatgagtcagaggaaagggactcctggagccaggaggagctgccgcgtctactgaacgtgttacagcgccaagagctaggggacggtctggacgacgaaatcgccgtgtag

SEQ ID NO: 126589 - DNA, 2190 bp, synthetic construct
  misc_feature 1..2190: note = Description of Artificial Sequence: Synthetic coding sequence
  source 1..2190: mol_type = other DNA
atggcctgcccttggaaattcctattcaagaccaagttccatcagtatgccatgaacggtgagaaggacatcaacaacaacgttgagaaagcgccttgtgccacatcctcccctgtcacccaggacgaccttcagtaccataacctctcgaaacagcagaacgaatccccccagcctctggtcgagactgggaagaaatctccggaatcattagtaaaactggacgccacccccctgtcctccccaagacatgtgagaatcaaaaattggggcagcggcatgacatttcaggacacgcttcaccacaaagcaaaaggcatcctgacatgcaggtcaaaaagctgtctgggatctattatgaccccaaagagtctcacacggggtccacgcgataagccaacccctcctgacgagctgctgccacaggcgatagagttcgtcaaccagtattatggctccttcaaagaggcaaaaatcgaggaacacttggcccgcgtggaggccgtgaccaaagaaatcgagaccacaggcacgtaccagctcacaggagatgagctcattttcgctaccaagcaggcctggcgtaatgcccccaggtgtatcggtagaatccagtggagcaacctgcaggtattcgacgcccgttcatgctcaactgccagagagatgttcgaacatatctgccgacacgtgagatactccacgaacaatggaaatatccgctctgcaatcacggtgtttccacagaggtccgacgggaagcatgattttagagtctggaatgctcagttgatccgttacgccggatatcagatgccggacgggtctatccggggggatccagcaaatgtcgagtttactcagctgtgtatcgatctggggtggaagcccaaatatggcaggttcgacgtggtgccactcgtattgcaggcaaacgggcgcgaccctgaactctttgagatcccaccggacttggtgctcgaggtggcaatggaacaccctaagtatgaatggtttcgagagcttgaactcaaatggtacgcgctccccgcagtcgccaacatgctgttggaggtgggaggtcttgaattccctggctgcccttttaatggttggtacatgggaactgaaataggtgttcgcgacttctgcgatgtgcaaaggtacaacatcctggaagaggtgggcagacggatggggcttgaaacccacaagctcgctagtctatggaaagaccaggccgtggttgagatcaacatcgcggtgcttcacagcttccagaagcagaacgttaccattatggatcaccattcagccgctgaaagcttcatgaagtatatgcagaatgaataccgcagcagaggcggttgcccagccgattggatctggctggtcccacctatgtccggttctatcactcccgtattccatcaagagatgctcaactatgtgctgtcccccttttactactatcaggtcgaagcatggaaaacccacgtctggcaggatgaaaagaggcgtccaaagcgtagggagattcccctgaaagttctggtgaaggctgtgctattcgcttgtatgttgatgcggaaaaccatggcctctcgagtgcgagtcactatactctttgcaaccgaaaccgggaagtccgaggccctggcatgggatcttggcgcattgttcagttgtgccttcaatccaaagaaactgaaaaagtcactgttcatgttaaaggagcttaataataagttcagatatgccgtctttggtttaggcagcagtatgtacccacgattctgtgcgtttgctcacgacatcgaccagaaactgagtcaccttggagcgtctcagctaacccccatgggagaaggagacgagttgagcggccaggaggacgcttttaggtcctgggccgttcagacattcaaagctgcctgtgaaacattcgacgtgcgaggcaagcaacacatacagatcccaaagttatacacatcaaacgtcacatgggatccccatcactacagactggtccaggacagccagcccctgcccgctgcgtctacctcccccagaattccacctattctagcgagcagttcgggtctcgcccaggcctctagaccaagcgcagttagcgggtctaatggatccatgactccttctacgcgcgaatgcggcgaagccgcctag

SEQ ID NO: 126590 - DNA, 3462 bp, synthetic construct
  misc_feature 1..3462: note = Description of Artificial Sequence: Synthetic coding sequence
  source 1..3462: mol_type = other DNA
atggcatgtccctggaagtttctgtttaagaccaagttccatcagtacgcgatgaatggcgaaaaagatatcaacaataacgtagagaaggcaccatgtgccaccagctcacccgtcacccaggacgacctgcaatatcacaatctatctaaacaacagaatgagagccctcagcctctcgttgaaaccgggaagaagagccctgaaagcctggtgaaactggatgcaaccccactgtcatcccctaggcacgtccggattaagaactgggggtctggtatgacctttcaagatacactgcatcacaaggcaaagggcatcctaacctgtaggtctaagtcctgtcttggctcaatcatgactcctaaatcattgacccggggcccccgcgataaaccaacccctcccgatgagttgttgcctcaggctattgagttcgttaaccagtattacggatcattcaaagaggccaagattgaggaacatctggcccgagtggaggccgtcacaaaggagattgagaccacagggacttaccagctcacgggggacgagctgattttcgccactaagcaggcctggaggaatgcccctaggtgcatcggcaggatccagtggtccaatctgcaggtgttcgatgccaggtcgtgcagtacagctcgagagatgttcgagcacatctgtcgtcacgtcagatattccacaaataacggaaacatccggtcagccattaccgtattccctcagaggtccgacggaaaacatgactttagagtctggaacgcgcaactcatccgatatgctggctaccaaatgccagacggcagtattcgtggtgacccagccaatgtggagtttacacagctgtgcatcgatctgggctggaagccaaagtacggacgctttgacgtggtcccactagtcttgcaagcgaatggacgcgacccggagctattcgaaatcccacccgatctggtccttgaggttgccatggagcatcccaagtacgaatggtttcgggagctcgagctaaaatggtacgccctcccggccgtggccaatatgctgcttgaggtcggcgggctggagttccccgggtgtcccttcaacggctggtacatggggacagagatcggcgtacgagatttttgcgatgttcaacgctataatatcctggaagaggtggggcgtagaatgggcctggaaacgcacaagctggcctctctttggaaagaccaagcagtcgtggaaatcaacatcgccgtgttacatagcttccagaagcagaatgtgacgataatggaccatcactcagctgcagaatctttcatgaaatatatgcagaacgaatatcgttcaaggggaggttgcccagctgactggatctggctggtgccacccatgtccgggtctatcactcctgtgttccatcaggagatgctgaactacgtactgtcgcccttttattactatcaagtagaggcttggaagacccatgtgtggcaagacgagaaaaggcgacccaagcggcgtgaaatccccctgaaggtgctcgtgaaggctgtcctttttgcctgtatgctgatgcgtaagaccatggcctcacgggttagggtgaccatcctgttcgcgactgaaacagggaagtcggaggccctcgcctgggacttaggggctttattcagctgcgctttcaatcctaaggtggtgtgtatggacaaatatagactttcttgcctcgaggaggagcgtctccttcttgtggtaacaagcacctttgggaacggagactgccctgggaatggcgagaagcttaaaaagtccctatttatgctgaaagagctgaacaacaaattcaggtacgctgtgttcgggttaggttctagcatgtaccctcgcttctgtgcatttgctcatgacattgatcaaaagctgtcacacctaggggccagtcagcttactcccatgggcgaaggggacgagctctctggccaggaagacgcatttcggtcatgggcggtgcaaacgtttaaggcagcttgtgaaactttcgacgtgcggggaaaacaacatatccaaattcccaagctgtacacaagtaatgttacctgggacccccatcactaccggctcgtccaagacagccaaccactagatttaagcaaagccctgagctctatgcacgccaagaatgtttttactatgcggctcaaatctagacagaatctgcagtcccccacttcttcccgcgcaactattctagtcgaattatcatgcgaggacgggcaggggctgaattatctgcctggtgagcatctaggagtatgtcccggtaaccaacccgccctcgtacagggcatcctggaacgggtggtcgacggcccaactccacatcaaaccgtacggttagaagcgctggacgagtccgggagttactgggtctcagataagaggctgcccccatgttcgttgtcccaggccctcacctattttctagacattactacacccccaactcaactcctactgcagaagctcgcacaggtcgccactgaggaacctgagcgacagcgtctagaggccctctgccaaccaagcgaatatagcaaatggaagttcaccaatagccccacttttctcgaagtcttagaagaattcccttctctccgtgtgagtgcaggctttctgttgagccaactacccatcctgaagccacgcttttacagcataagttcaagcagggatcatacacccacggaaatccatctgactgttgcagttgtgacctaccatacaagggacggtcaaggtcccctccaccacggagtttgcagtacttggctgaactccctcaagccccaggaccccgtcccctgcttcgtccggaacgcctcaggatttcatttaccggaggatccaagtcatccttgcatcctcatcggaccggggacaggaatcgcacccttcaggagcttttggcagcaacgcctgcatgattcacagcacaagggggtgcgtggcgggcgaatgacgttggtctttggatgtcgacgccctgatgaggatcacatctatcaggaggaaatgctagagatggcccagaagggcgtgcttcacgcggtccacaccgcgtacagccggctccccgggaagccaaaggtctacgtgcaggacattctgaggcagcagctggcctctgaagtactcagggtgctccacaaagaacctgggcacttgtacgtttgtggagacgttcggatggccagagatgtagcacacaccttgaagcagctcgttgccgctaagctgaagctaaacgaagaacaggttgaagattatttcttccagttgaaaagtcaaaagcggtatcatgaggacatttttggggctgttttcccttatgaggctaaaaaagacagggttgcggtgcagccatccagccttgaaatgagcgcactgtag

SEQ ID NO: 126591 - DNA, 3345 bp, synthetic construct
  misc_feature 1..3345: note = Description of Artificial Sequence: Synthetic coding sequence
  source 1..3345: mol_type = other DNA
atggcttgtccttggaagttcctctttaaaactaaatttcatcagtacgcgatgaatggcgagaaggacatcaacaacaacgtggagaaagctccttgcgccactagtagccctgtgacacaggacgatctccagtaccacaacctgagtaaacagcagaatgagtctccccagccgctagtcgagacaggaaaaaagagcccggaatctctcgtcaaattggacgccacgcctctgtctagcccaaggcatgtccgcataaagaactgggggagtggtatgacgtttcaggatacattacaccataaagccaagggaatcctgacgtgtcgtagcaaatcttgtctaggttccataatgacacctaaatctctgacacgaggtccccgcgacaagccgacccctccggatgaactccttccccaagccatcgaattcgtcaatcagtactacggcagcttcaaagaggccaaaatcgaagagcacttggcacgtgtggaggctgtaactaaagagatcgagaccaccggcacatatcagttaacaggggatgagcttatcttcgccactaagcaggcctggcgcaatgcgccacgatgcatcggaaggatacagtggtctaacctgcaggtgttcgatgcccgatcatgctccacagccagagagatgttcgaacatatctgccgacatgttcgctattccaccaataacgggaacattagatccgccataacagtcttcccacaaaggtccgacggaaagcacgacttcagggtgtggaacgcccagttatgcatcgacctggggtggaagcctaacggccgggaccccgagttattcgaaatacccccagacctagtcctggaagtagccatggagcaccctaagtacgagtggtttagggaattggagctcaagtggtacgccctccctgccgtcgccaacatgcttctggaggtgggcggactggaatttccaggatgcccgttcaatggatggtacatgggtactgagattggcgtccgggatttctgtgacgtacagcggtacaatatcctggaagaggtgggaaggagaatgggcctggaaacgcataaattggcttccctgtggaaagaccaagccgtggttgaaatcaatatcgcagtgttacactctttccagaaacagaacgtaaccatcatggaccaccacagcgcagcagagtcttttatgaagtacatgcagaacgagtatcgcagccggggtggatgtccggctgattggatttggctagtccccccaatgtcagggtcaatcactcccgtcttccaccaggagatgctcaactacgtgttaagtcctttctattattaccaagtcgaagcatggaaaacgcatgtgtggcaggacgaaaagcggagaccgaagcgccgtgagataccattaaaggtgttagtaaaggcagtgctctttgcgtgtatgctgatgcggaaaactatggcatccagggtgagggtgactattctctttgccacagaaaccggaaagagtgaagctttggcctgggatttgggagccttattttcttgtgccttcaatcctaaggtggtttgcatggacaagtaccgcctgtcctgtctcgaggaagaacgcctcctgcttgtcgtcaccagcacattcggcaatggcgactgtcctgggaacggggagaagctgaaaaaatctctttttatgcttaaagagctgaataacaagttcagatatgccgttttcggcctgggctcctctatgtatcctcgcttctgcgccttcgcacatgacatcgaccagaagcttagtcatctcggggcaagtcagctgacgcccatgggggaaggggacgaactgagcggccaggaagacgctttcagaagttgggccgtccaaacatttaaagcagcttgcgaaacatttgatgtaaggggaaagcaacatattcagatacctaaactctacaccagcaatgtgacatgggacccgcatcactatcgactggtgcaggattcccagcccttggaccttagtaaggctttgagcagcatgcacgccaagaacgtctttaccatgcggttgaaatccaggcagaacttgcagagccccacatccagtcgtgcaacaatcctcgttgagctttcttgcgaagacggtcagggactaaattacttaccaggcgaacatttgggcgtctgcccaggcaatcaacccgcgctggttcaggggatccttgagagggtggtggacggccctacaccccaccagaccgtgcgcctggaggccctcgacgagtcgggctcatattgggtgtcagacaaacgtttaccaccatgctcactgtcacaggcactcacgtacttcctggacatcaccacaccccccactcaactcttgttacagaaattagcacaagtggctacagaggaaccggagcgacagaggctagaggcgctctgccaaccttccgagtatagcaagtggaaattcactaactcccccacatttttagaagtgttggaggaattccccagcttacgcgtctctgctggatttttactctcccagctgcccatactaaaacccagattttacagtatatctagctctcgagaccatacaccgactgaaattcatctaactgtcgctgtggtgacctatcatacaagagacggccagggccccctccaccacggagtctgctcaacctggttaaattccctgaagccacaggacccggttccctgtttcgtgcggaatgctagcggattccacctccccgaggatccctctcacccatgcattctcatcggccctggcacgggtattgcaccttttcgctctttttggcagcaacggttgcacgactcccagcataaaggcgtgcgcggaggaaggatgacactggtgttcggctgccgacggcccgacgaagaccatatctaccaggaggagatgctggagatggctcaaaaaggagtcctgcacgctgtgcacactgcttatagcaggctgcctggcaagcccaaggtctacgtgcaggacattctcagacagcagttagcttccgaagtcctcagagtcttgcacaaggagcctggacacctctacgtgtgcggcgacgtacgtatggcacgtgatgtagcccacacattgaaacagttggtggcggccaagttgaaacttaacgaggagcaggtcgaggactacttttttcaactgaagtcacagaagcggtatcatgaagacatcttcggggccgttttcccatacgaagccaaaaaagatcgagttgcagtccagccttcttccttggagatgtcagcattatag

SEQ ID NO: 126592 - DNA, 3612 bp, synthetic construct
  misc_feature 1..3612: note = Description of Artificial Sequence: Synthetic coding sequence
  source 1..3612: mol_type = other DNA
atggggaatcttaaaagtgtggcgcaggaaccgggacctccgtgtggcttgggcctgggcttaggcttaggcctgtgtgggaagcaggggcccgcaaccccggcacccgaacccagcagagcacctgcttcgctcttacccccagcccctgagcactccccaccttcctcacctctgacacagccacctgaggggccgaaatttccccgggtgaagaactgggaagtgggcagcatcacatacgacacactgtccgcacaggcacagcaggatgggccatgcaccccaaggcgatgcctgggaagtttagtgtttcctcgcaagcttcagggacgcccatccccagggcctcctgcacccgagcagctgctttcccaggcccgggattttataaaccagtattatagttctatcaagagaagcggcagccaggcccacgaacagcgcttgcaggaggtggaggcggaagtcgccgctactggcacctaccaactgcgtgaaagcgagctggtcttcggcgcaaaacaggcgtggaggaatgctccacgatgcgtgggcagaatccaatgggggaagttgcaagtgtttgatgcacgggattgtaggtctgctcaggaaatgtttacctacatctgcaaccacattaagtacgccacaaataggggaaacttgaggagcgctattacggtcttccctcaacggtgtcccggtcgcggagacttccgaatctggaactcccaattggtgcggtacgcgggttaccgccagcaggatggatctgtgagaggcgaccctgccaacgtcgagatcacagaactttgcatccagcatgggtggaccccaggaaatggccggttcgacgtgttgccactgctcttgcaggctcccgatgatcctccggagctgtttctactgccccctgaactggttctggaagtgccactagaacaccccacgttggagtggttcgcagccttagggttgagatggtatgccctacccgctgttagcaacatgctgctcgagatcggagggctggaattccccgctgccccgttctcaggctggtatatgagcaccgagattggcacaagaaatctttgtgatccccatcgctataatatcctcgaggatgtcgctgtgtgtatggaccttgatactcgcactaccagttcgctttggaaagacaaagcggcagtagagattaatgtggctgttctgcactcttaccagctggctaaagttactatagtggatcaccacgcagcaacagcttcgttcatgaagcaccttgaaaacgagcaaaaggctagaggtggatgtcctgccgactgggcatggatcgtgccacctatttccggcagcctgactccagtttttcatcaagagatggtcaactatttcttatccccagcttttaggtaccagccggacccttggaagggatccgctgccaaaggtacaggtattacacggaaaaagactttcaaagaagtggccaacgccgttaagatctctgcgtccttaatgggtacggtaatggccaagcgggtcaaggccaccatcctgtacggctctgagacagggcgagctcaatcatatgcccagcagcttgggcgactgttcagaaaagctttcgatcctcgggtgctgtgtatggatgaatacgatgtagttagccttgagcacgaaaccttggtcctcgtcgtcacatcaacttttgggaatggcgatccccctgagaacggcgagagcttcgccgccgccctgatggaaatgagcggaccctacaattcctccccaagacctgagcagcataaaagctacaagattaggttcaactccatctcttgctccgacccattggtgtccagctggcggagaaagagaaaagaatcgtcaaataccgattccgctggtgctctcggcacactgcggttctgcgttttcggacttggatccagggcgtatccccatttttgtgcctttgctcgcgccgttgacactcggctggaagagctggggggcgagaggctgctccagctggggcaaggcgacgaattgtgtggacaggaggaagcctttagaggatgggcccaggccgcatttcaggcggcttgtgaaaccttttgcgttggcgaagatgccaaggcagccgcacgggacatcttctcccctaaaagatcatggaagaggcagcgctaccgattatccgctcaggcggagggtctgcaactcctgcccggtctgatccacgttcacagaagaaaaatgtttcaggcaaccatccggtccgtggaaaatctgcagagctccaagagcacacgggctactatcctcgttagactcgataccggggggcaggagggtttacaatatcagcctggagatcatattggggtttgtccaccgaacagacctgggctggtcgaagcgttactcagtagggtcgaagaccctcctgcccccacggaaccagtggccgtcgagcagctggagaaaggatctcccggcggcccccctcctgggtgggttcgggatcctcgcctaccaccatgcaccctcaggcaggccctgacatttttccttgatattactagtccaccatccccgcagctgctgagactcctgagtaccttagctgaggagcctagagaacagcaagagttggaggccctgagccaggacccacggaggtatgaggagtggaagtggttccgctgcccaacactgctggaagtgcttgagcagttcccctctgtggcactcccagctcctctgttacttacgcagctgccgctcctgcagccaagatactacagcgtatcctccgccccaagtacgcatcctggagagatccacctcaccgtagcagtgcttgcttatcggacacaagatgggctcggacccttacactatggggtgtgctctacttggttgtcacagcttaaacctggggacccggtgccctgcttcatccggggcgccccctcgttcaggctgccacccgacccatcactgccgtgtatcctcgtaggccccggcacgggaatcgctccttttcgaggcttctggcaggaaagactccacgatattgagtcaaagggcctccagcctactcctatgacactggtgtttgggtgtcgatgtagccagctcgaccacctctatcgtgacgaggtacagaatgcacaacagagaggggtgtttggccgcgtgcttacggcatttagcagagagcctgataaccccaagacatacgtccaggacattctccgcacagagctggcagccgaggttcatagagtcctttgcctggaacgcggccacatgttcgtgtgtggggatgtaactatggccacaaacgtactgcagaccgtgcagaggatactcgccacagagggagatatggaactggatgaagcgggggacgtaattggcgtgctccgggatcagcagagataccacgaagatatctttggactcaccctgaggacccaagaggtgacttctaggattcgcacccaaagcttcagtttacaagagagacaactgcggggtgccgtgccctgggccttcgacccaccgggctcagacaccaactcgccctag

SEQ ID NO: 126593 - DNA, 2994 bp, synthetic construct
  misc_feature 1..2994: note = Description of Artificial Sequence: Synthetic coding sequence
  source 1..2994: mol_type = other DNA
atgttcacctacatctgcaatcacattaagtacgctaccaacagagggaatctcagatccgccattactgtattcccacaacggtgcccaggtcggggcgatttccgaatatggaactcccagctggtccgctatgccgggtatagacaacaggatggatccgttagaggcgaccctgcaaatgtcgaaatcaccgaactgtgtatccagcacggctggactcccggcaacggccgattcgacgtgctgccactgcttcttcaggcaccagatgaccctccagagctgttcctgcttcctccagagctggtgctggaggtcccactggagcatcccaccttggagtggtttgctgcacttggactacgctggtacgcccttcctgccgtcagcaatatgctgctcgaaatcggcgggctggagttccctgcagctcctttctccgggtggtacatgtccaccgagattgggactcggaacctgtgtgatccccataggtataacatcttggaggacgtagccgtgtgtatggatctcgatactcggacaacaagcagtctctggaaggacaaggctgccgtagagattaacgtggcagtgctgcatagctaccaactcgcaaaagtcacaatcgtcgaccatcacgcagctactgcttccttcatgaagcacctcgaaaatgagcagaaggcaagaggtggttgtccagcagattgggcatggattgtgcccccaatatcaggctccctgactccagtgtttcaccaggaaatggtcaactattttttgagtcccgcatttagatatcagcctgacccctggaaaggctccgccgctaagggcaccggtatcacaaggaaaaagacttttaaggaagtagcaaatgccgtaaaaatttcggcatcattgatggggaccgttatggcaaagcgtgttaaggccactattttgtacgggagcgagactgggcgcgcccagtcttacgctcagcaactgggtcggctgttccgaaaagccttcgacccgcgggtgctctgcatggatgaatacgatgtggtgagccttgagcacgagaccctggttctggtagtaacttcaacatttggtaatggtgatccgcccgagaacggagaatcatttgcagccgcgctcatggagatgtccggaccctataattctagccctcgaccagaacagcataagtcttacaagatccggttcaactcaatctcttgttccgatcctttagttagctcctggagaagaaaacggaaagagtcctccaacaccgactccgccggggcccttggaactttacggttttgtgttttcggtcttggatctcgagcctacccccacttttgcgccttcgcgagggccgttgatacacggctcgaggagcttggtggggagcgcctcctccaacttggacagggtgacgaactgtgtggtcaggaggaggccttcagggggtgggctcaggccgcctttcaggccgcctgcgagaccttttgtgtgggggaagacgccaaggccgccgcccgcgacatttttagcccaaagcgtagctggaagcgccaacgctacaggctctctgctcaggccgaaggcctgcaattgctgcccggcctgattcacgtccataggagaaaaatgtttcaggccacgattagatcagtggaaaacctacagtcgagcaagtcgacccgtgctactattctggtcaggctagatactgggggacaagagggcctacaatatcagcccggggatcacatcggcgtctgccctccaaatagaccgggccttgtcgaggccctccttagtcgtgttgaggacccccccgctccaacagagccagtcgcggtggagcaacttgaaaaaggtagtcccggcggtcccccacctggctgggtgagggacccaagacttccaccatgcaccctgcggcaggccctcacattctttctggacattacgagtcctcccagtccacagctccttcgcctcctcagtaccctggccgaggagcctagggaacagcaggagctggaagcgctatctcaggaccctcgccggtacgaagagtggaagtggtttcgctgccccacactgcttgaggtgctggagcagttcccgtcagtggcccttcctgcaccgctgctcctgacccagctgccattgctacaaccaagatactacagcgtgagttcggctccctccactcatcctggcgagatacatcttactgtagcagtcctcgcctatcgcactcaggacgggctgggccctctgcactatggagtttgctccacttggctgtctcaactcaaacctggggacccagtcccttgctttatccgaggtgccccttcttttagacttccccctgatcccagtttaccgtgcatcctggtggggccagggaccggcattgcaccttttcggggcttttggcaagaacggttacatgacatcgagtccaagggccttcaacctacccctatgactctagtctttggttgcagatgcagccagcttgatcacctgtacagagatgaggtgcaaaacgcacagcagcgcggcgtctttgggcgcgtgttaacagccttctcacgggaacccgacaaccccaagacttacgtccaagatattctacgcactgagttagccgccgaagtacaccgggtgctttgccttgaacggggccatatgttcgtgtgtggagatgtgacaatggctactaacgtgctgcaaacagtacagcgcatactcgcaactgagggggatatggagttggatgaggcaggcgacgtcatcggcgtattaagggatcagcagcgctatcacgaagatatcttcgggctcacacttaggacacaggaggtgacatcacggattcgtacccagagcttctctctacaggaacgccaactgagaggcgctgtgccttgggcctttgatccaccgggcagcgacactaacagcccctag

SEQ ID NO: 126594 - DNA, 1521 bp, synthetic construct
  misc_feature 1..1521: note = Description of Artificial Sequence: Synthetic coding sequence
  source 1..1521: mol_type = other DNA
atgcgtgacccgcttactgactgtccctataataaagtgtacaagaatctgaaagagttctctcagaatggtgaaaacttctgtaaacaggtgacaagcgtgctgcaacaacgcgccaacctggaaatctcatatgccaaaggtctgcagaaattagcttccaagttatccaaggcactgcagaacacacgtaagtcttgcgtgtccagtgcatgggcctgggccagtgagggtatgaagagcactgctgatttgcaccagaagctcgggaaggccatagaactcgaagctatcaagcctacataccaagtgctcaacgtgcaagaaaagaagcgaaaatctctggataacgaggtggagaaaaccgctaacctcgtcatctcaaattggaaccaacagattaaggctaagaagaaactcatggtcagcaccaaaaagcacgaagcgcttttccagctggtggaatccagcaagcagagcatgactgaaaaggaaaagaggaagctgctgaacaagctgacaaagtctaccgagaagctggagaaggaagacgagaattactatcagaagaacatggcaggctactccactagactgaagtgggagaacacccttgagaattgctatcagagtattctggagctggagaaagagaggatacagctgctttgcaataaccttaatcagtactctcaacacatatcattattcggacagactctgactacctgtcacacacaaattcactgcgcaatcagtaagatcgacattgagaaggatattcaggccgtgatggaggagacagccatcctttccaccgagaacaagagcgagttcctcctgacagattattttgaagaagaccccaactccgctatggacaaggagcggcggaagtcgctgctgaagccgaagttgcttcgtcttcagcgagatatcgaaaaggcaagtaaggataaagaggggctggaacggatgcttaaaacctattcctctacgagttctttctctgacgccaaatcacagaaggacaccgccgctttaatggacgaaaacaacctgaagttagacctcttagaagctaatagctacaagctgtcctccatgcttgctgagttggaacagaggccccagcccagccatccttgtagcaattcgatttttcgctggagggaaaaggagcacacacatagttatgttaaaataagtcgcccttttctgatgaagagactggagaacatcgtttcaaaagcatcctccggcgggcagtcaaaccctgggagctcaacaccagcacctggcgctgcacaactctcttccaggttgtgcaaggcactgtattcattccaggcccgccaggatgacgaattgaatctggaaaagggagatattgtaattattcatgagaaaaaggaaggagggtggtggttcggctcactgaatggtaagaaaggccacttcccggctgcgtatgtggaagaactcccatctaacgctggcaacacagcaaccaaggcatag

SEQ ID NO: 126595 - DNA, 1287 bp, synthetic construct
  misc_feature 1..1287: note = Description of Artificial Sequence: Synthetic coding sequence
  source 1..1287: mol_type = other DNA
atgaagtctacagcagatctccatcaaaaacttgggaaggctattgagctcgaagccatcaaacctacttatcaggttctgaacgtgcaggagaaaaagaggaaatcactggataatgaagtggagaagaccgccaatctggtgatatcgaattggaatcaacaaattaaggccaaaaagaagctcatggtgagcactaaaaaacatgaagcattgtttcagttagtggagtcctccaagcagtccatgacagaaaaggagaaacggaagctcttgaacaaactgactaagtctaccgaaaagctagagaaagaggatgaaaactactatcagaagaacatggcagggtacagcactaggttgaagtgggagaataccctggagaattgttatcagtcaattctggagctggaaaaggaacggatccagctactgtgtaacaatctgaaccagtattctcagcacatcagcctgtttggccagactctgacgacatgccatacccagattcattgtgcaatctctaagattgacatcgaaaaagacatccaggctgttatggaagaaaccgcaatactgagcactgagaataaaagtgagttcttgctcaccgattactttgaagaagaccccaattcggctatggacaaggagcgccgaaaatcgctgttaaagcccaagctgttaaggttgcagcgtgatatcgaaaaggcttctaaagataaggagggccttgaacgaatgctgaaaacttattcatcaacaagttcattctcagatgcaaaatcgcagaaggacactgccgctcttatggatgaaaacaacctgaaactggatttgctggaagctaactcatataagctgagtagcatgctcgccgaactcgaacagcgccctcagccatcacatccttgctccaattcaatctttcgctggagggagaaggaacacacccacagctacgtgaagatatcgcgcccatttctgatgaagaggctagaaaatatcgtgtctaaggcttcttccgggggacagtccaaccctggctcctcaacaccagcacccggcgccgcacagctgtcaagtcggctctgtaaagcgctgtactcattccaagcacgccaagacgacgaactgaatctggagaaaggtgatatagtgatcatccacgaaaagaaagagggtggttggtggtttggaagccttaacgggaagaagggtcacttccctgctgcctatgttgaagaactgccaagtaatgcagggaacactgctactaaggcttag

SEQ ID NO: 126596 - DNA, 1692 bp, synthetic construct
  misc_feature 1..1692: note = Description of Artificial Sequence: Synthetic coding sequence
  source 1..1692: mol_type = other DNA
atgagagaccccctgacagattgcccttataataaggtctacaagaatctgaaggaattcagccagaacggagagaatttttgcaaacaggtaacatcagtgctgcagcaaagagctaatctggaaatctcctacgctaagggtctgcaaaagctggcttccaagctgtccaaggcactgcagaatacacgtaagtcatgcgtgagcagcgcgtgggcgtgggcctcagagggtatgaagtctacagcggatcttcaccagaaacttggaaaagccattgagctcgaagctatcaagcctacttatcaggttctcaatgttcaggagaaaaagcggaagtctctcgacaacgaggttgagaaaacagctaatctggttatttcgaattggaaccagcagattaaggctaagaagaaactaatggtgtccactaaaaagcacgaggctctgttccaacttgtcgaaagtagcaagcagtctatgactgaaaaggagaagcggaagttgcttaataagttaacgaagagtaccgagaagctcgagaaagaggatgagaactactatcagaagaatatggcgggatactccactcggttgaagtgggaaaacacccttgaaaactgttatcaagtaactcacagcatctgtctgtacgccttctgggtaaagcgtgcttggggaaaatgtgtcagtgacttgaggtaccaagataccttcctgcctgggaatttgccacccctctggtttggctacgacatcgtgaaaagattaatcatgcgcctgtgcagcgtttgtctccagtccatactagagttagagaaggagcgcatacaactcctgtgcaacaacttgaatcagtattcccagcatatcagtctgttcggccaaacacttaccacatgccacactcagatccattgcgctatcagtaaaattgatatcgagaaggacattcaggctgtgatggaggagaccgccatcctgagcacggagaacaaatcagaattcttgttaaccgactattttgaagaggatccgaattcggccatggacaaggaaagaaggaagtcactcctcaagccaaagctattacgtctgcagcgggatattgagaaagccagcaaagataaagaaggcctcgaaagaatgttaaagacttacagttcaactagttcattttcggacgctaagtcccagaaagacactgctgccttgatggatgaaaataatctcaaactggatctgctggaagctaactcttataagctgagcagcatgctggctgaactggaacagaggccacagccatcccatccatgctcaaacagcattttccggtggagagaaaaagaacatacacattcatatgtcaagatatctagaccctttctaatgaaacgactggagaatattgtctctaaggcaagttcaggaggccagagtaatcccgggtcatcaaccccagcacccggagccgctcagctgagttcgcggttgtgcaaagcgctgtactcattccaagcacgccaagacgacgagctcaatctcgaaaagggggatatcgtaattatccatgagaagaaggaaggagggtggtggttcgggtccttaaacggaaagaagggccatttccccgcagcatacgtagaagagcttccttccaatgccggtaacacagcaactaaagcatag

SEQ ID NO: 126597 - DNA, 1692 bp, synthetic construct
  misc_feature 1..1692: note = Description of Artificial Sequence: Synthetic coding sequence
  source 1..1692: mol_type = other DNA
atgcgtgatccactgaccgattgtccgtataacaaggtgtacaaaaatctcaaggagttctcccagaacggcgagaacttttgcaaacaggtaacatccgtgctccagcagcgagcaaacctggagattagctatgcaaagggactgcaaaagctggctagcaaactgagcaaggcgctccagaacaccaggaagagttgcgtgtccagtgcttgggcctgggcctcggagggcatgaagagtacagccgatttgcaccagaaactgggaaaggccattgagctggaagccattaaaccaacctatcaggttttgaatgtgcaggagaagaagcgaaagagcttggataacgaagtggaaaagactgcaaacctggtgattagcaattggaatcaacagatcaaagccaagaagaaacttatggtgagcactaagaagcatgaggcgctattccagttagtggaaagtagcaagcagagcatgactgagaaagaaaaacggaaacttctgaacaagctcacaaaaagcactgaaaaacttgaaaaagaggatgagaactattaccaaaagaacatggccggatactcgacaaggctaaaatgggagaacaccctcgagaattgctatcaggttacccacagtatttgcctgtacgccttttgggttaaaagggcttgggggaaatgcgtgtccgatctgaggtatcaggacactttcctgcctggcaatctgccccctctatggtttggctatgatattgtgaagcggctcataatgaggctatgcagtgtctgcctgcagtcaatccttgagctcgagaaagagaggattcaactcctgtgcaacaacctgaaccagtactctcagcacatttcactgtttggtcagacattgaccacctgccacactcagattcattgtgccatatctaaaatagatatagaaaaggacattcaggcagtgatggaagagaccgccatactgagtactgaaaataagtctgagttcttgctgaccgattatttcgaggaggaccccaacagtgccatggacaaagagcgaaggaagtctcttctaaagcccaaattactgcggttgcagagggacatcgaaaaggcctccaaggacaaggaagggctcgagcgaatgctaaagacctactccagcacgtcatccttttccgacgcaaaatcgcagaaagatactgccgcccttatggatgaaaataacctcaagcttgatctcctggaagcaaactcttataaactcagcagcatgttggccgagctagaacagcggcctcaacctagtcacccttgttctaatagcattttccgatggcgagaaaaggagcatacgcattcgtacgtgaaaatatctcgtccatttctaatgaagcgcctggagaacatagtgtcaaaggcgtcctccggcggacagtctaatcctggatcatccacccccgcacccggcgcagctcagctatcgtctagactgtgcaaggccttatactcatttcaagccagacaggacgacgagttgaatctggagaaaggggatattgtcataatacacgagaagaaggaaggtggctggtggtttggatcccttaatggaaagaaaggccatttcccagcagcctacgttgaggagcttccgagcaatgccggaaacactgccactaaagcatag

SEQ ID NO: 126598 - DNA, 939 bp, synthetic construct
  misc_feature 1..939: note = Description of Artificial Sequence: Synthetic coding sequence
  source 1..939: mol_type = other DNA
atgacctttgggctgcgcaagcggttgtctgaagagagaggattttctctcatgcctcgagctatggctatcagttcctcaagctgtgagctccctttggttgcagtgtgtcaggtgactagtacaccagacaaacagcagaacttcaagacctgtgcagagctcgtgcgcgaagccgcacgcttgggtgcctgtttggccttcctccctgaagcgttcgacttcatcgcccgcgatcccgctgaaacccttcacctatctgaacctctggggggaaagctgttggaggagtacacccagctggcacgagagtgcggactctggctgagtctcggtggtttccatgaacggggacaggactgggagcaaactcagaagatttacaattgccatgtcctcctgaatagcaagggggccgtcgttgccacctatcgtaaaacacatctgtgcgacgtggagatccctggacaaggacccatgtgcgagtccaactccacaatgccagggccttctctcgaaagcccagtatcgacaccggcagggaaaatcggactagccgtgtgttacgacatgagattcccggagttgtccctcgcacttgctcaggccggcgccgaaattctcacttacccatccgcttttggcagtatcaccggacctgcccactgggaggtcctgctgagagcaagagctattgagactcagtgttacgttgtagccgccgcccagtgcggacggcatcatgaaaagagagcgtcatatggccatagtatggttgtggatccttggggcacagtggttgctcggtgctcagaaggccccggcctttgcctcgctcgaatagacttaaattacctccgccagctgcgccggcacctacctgtatttcaacataggcgaccagatttgtacgggaacctcggccacccccttagctag

SEQ ID NO: 126599 - DNA, 732 bp, synthetic construct
  misc_feature 1..732: note = Description of Artificial Sequence: Synthetic coding sequence
  source 1..732: mol_type = other DNA
atgttgggatttattactaggcccccacaccggtttctgtctttgctttgtcccggcctccgcatcccacagctgagcgtcctatgcgcgcaacctcgtccaagggcaatggctatttcctcatcttcgtgcgaactacccctcgtcgctgtttgccaagtaacatcgacccctgacaagcagcagaattttaaaacctgtgccgagctggtccgggaagccgctcgtctgggtgcatgcttggccttcctgccggaggcgttcgactttattgcacgcgatccagccgagaccttgcatctgagcgagccactggggggaaagctgctggaggagtacacccagcttgcccgcgaatgcggcttatggctttctttgggcggattccatgagcggggtcaagactgggagcagacgcagaaaatttacaactgccacgtgcttctgaacagcaagggtgctgtggtggccacctatagaaagacccatctgtgcgatgtggagatccccggccagggtcccatgtgtgaaagcaacagcactatgcccggcccctccttagaaagtccggtaagtacacctgctggtaaaattggattggcggtatgttatgacatgcgttttccagagctctccctggctctggcccaagcaggggcggaaatccttacatatccaagcgccttcgggtcaattaccggaccggcacactgggaacctgtgtcatcatag

SEQ ID NO: 126600 - DNA, 984 bp, synthetic construct
  misc_feature 1..984: note = Description of Artificial Sequence: Synthetic coding sequence
  source 1..984: mol_type = other DNA
atgttgggatttattacaaggcctccgcataggttcctaagcctgttatgtccaggtctgcgaatccctcagctctctgtgttatgcgctcaacctcgaccaagggccatggcgatctcgtcatcctcttgcgaactcccgcttgttgccgtgtgtcaggtgaccagcactcccgacaagcaacagaacttcaaaacgtgcgccgagctggtgcgcgaggcggcacgccttggtgcatgtctggcctttcttccagaagcgttcgacttcattgccagggatccagcagaaacactccacttaagcgaacccctgggaggtaaattactggaggaatacacgcaactggcacgcgagtgcggcctgtggcttagtctgggtggttttcacgagcggggccaagactgggagcagactcagaaaatttacaattgccacgtcctgctcaattcaaagggcgctgttgtcgctacatacaggaaaacacacctctgcgacgtggagatccccggccagggacccatgtgtgagagcaattctaccatgcccggcccaagccttgaatcccccgtctccacccctgcgggtaagatcggactcgccgtgtgctacgacatgcggtttcctgagctctccctcgccctggcccaggccggtgccgagatcctgacctacccaagcgcatttgggagtattaccggacctgctcattgggaagttctcctgagggccagggctatcgagactcagtgctacgtagtggctgcagcacagtgcgggcgtcaccatgagaaacgagcctcatacggacatagcatggtggtggacccttgggggacagttgtggcccggtgctctgagggccctggtctgtgccttgcaagaatcgatctgaactatctgcggcaactccgccggcatctccctgtgtttcagcatcggagaccagacctctacggtaacctcggacatccactgtcttag

SEQ ID NO: 126601 - DNA, 876 bp, synthetic construct
  misc_feature 1..876: note = Description of Artificial Sequence: Synthetic coding sequence
  source 1..876: mol_type = other DNA
atggcaatttcctcctcaagctgcgaactaccacttgtcgctgtgtgtcaggtgaccagtacgccagacaaacagcagaattttaagacctgcgccgagctggtgcgcgaagccgctcgactgggcgcctgtttggcattcctccctgaagcattcgattttattgcgagagatcctgccgagacattgcacttgagcgagcccctgggtggaaagctgctggaagagtatactcagctcgcgcgggagtgtggcctctggttatctctgggaggattccatgaaaggggtcaggactgggaacagacccagaagatctacaattgtcatgtgcttttaaactctaagggggccgtggtagccacctaccggaagactcacctgtgcgatgtggaaatcccagggcagggacccatgtgtgagtccaattccacaatgcccggccctagcctcgagagtcccgtgtcaacaccagcaggaaaaatcggcctggcggtctgttacgatatgagattccccgagctctctctcgcactcgcccaggccggcgctgaaattctgacatacccatcggccttcggcagcatcaccggtcctgctcactgggaggtgttacttcgggccagagcgatcgagacccagtgttacgtggtagctgcagcccaatgtggacgccatcatgagaaacgggcctcttacggccatagtatggtggtggacccctgggggacggtcgtggcgaggtgctccgaagggcccggcctgtgtcttgcacgcattgacctcaactatctacggcagttgcggcgacacctccccgtgtttcaacacaggcgccctgacctttatggcaacctgggccatcccctgtcttag

SEQ ID NO: 126602 - DNA, 822 bp, synthetic construct
  misc_feature 1..822: note = Description of Artificial Sequence: Synthetic coding sequence
  source 1..822: mol_type = other DNA
atgagcctaactaacactaagacaggtttttcggtgaaggatatcttggatctacccgacacaaacgatgaagaagggtcggtggccgaggggccagaggaagaaaacgaagggcccgagccggctaagcgagccggacctctgggccaaggcgcgctcgacgctgtacaaagtctgcccctaaagaacccattctacgacagttcagataatccatacacaaggtggctggcgtctactgaggggcttcaatattcactccatggtctggccgctggtgcgcctcctcaggactcaagcagtaagagcccagaaccgtcggctgacgagtccccagataatgataaggaaactcccggcggcggtggtgacgcaggaaaaaagaggaagcggagagtgctgttttccaaggcccaaacatacgagctggaacgccgctttagacagcagcgttatctgtccgctccggaaagagagcacctggccagtctcataagactgacacctacacaggtgaaaatttggttccaaaaccaccgatataagatgaaacgggcacgcgctgaaaaaggaatggaggtgactcctctaccatccccaaggcgcgtagccgtgccagttctagtcagggatggtaagccctgccacgctcttaaagcacaggaccttgccgctgccaccttccaggcaggcattcccttttctgcatattcggcgcagagtctacagcacatgcaatataatgcacaatattcttctgccagtacacctcagtaccccacagcccacccactggtacaggcacagcagtggacatggtag

SEQ ID NO: 126603 - DNA, 1065 bp, synthetic construct
  misc_feature 1..1065: note = Description of Artificial Sequence: Synthetic coding sequence
  source 1..1065: mol_type = other DNA
atgagcctctctccaaagcacaccacgccattctccgtttcagatattttgagtcctatcgaggagacctataaaaagttttctggtgctatggacggcgcaccacccgggctcggcgcccccctgggggccgccgcagcctatagagcaccacccccaggaccgtcctcccaggctgctactgttgcgggaatgcaaccgtcccacgcgatggccggtcacaacgcggccgcggctgccgcggcggccgcagccgctgctgccgcagccgccacttatcacatgcctccaggtgtgtctcagtttccgcacggcgcaatgggatcctattgcaacggtggcctgggtaatatgggcgagctgcctgcctacaccgacggtatgcgagggggagctgccaccggatggtatggtgcaaatcccgatcctcggtattcatctatcagtcgtttcatggggcccagcgcgggtgtgaatgttgccggtatgggaagtctgaccggaattgccgatgctgccaagtctctggggccactccacgccgccgctgctgcagctgcaccaaggcggaaacggcgcgtgctgttctcacaggcacaagtgtacgagttggagagaaggtttaaacagcagaagtacctgtccgctcctgagcgggaacatctggccagcatgattcatcttacacctactcaggttaagatttggttccagaatcaccgctacaaaatgaaacggcaagccaaagacaaagccgcccaacagctccagcaggagggaggcctgggaccaccccccccgcccccaccttctccacgtcgggttgccgtaccagtcttggttaaagatggtaagccgtgtcagaatggcgcgtcaacacccaccccaggtcaggccggccctcagcctccagcaccaactcccgcaccagagctggaagaactcagccccagcccaccagctctacatgggcctggggggggcctggctgcgctggatgcagctgccggtgaatattctggcggggtgttgggcgccaacctcctgtacggtcggacttggtag

SEQ ID NO: 126604 - DNA, 975 bp, synthetic construct
  misc_feature 1..975: note = Description of Artificial Sequence: Synthetic coding sequence
  source 1..975: mol_type = other DNA
atgttcccttcacctgcacttacgccaacaccattttccgttaaagacatcctgaatctcgagcagcaacagaggtcactggcagctgccggagagctgagtgcacgtctcgaggctaccctcgccccctcttcctgtatgctggcagccttcaaaccagaggcctacgccggtccagaggcggctgctccaggactgccagagctgcgagccgagctaggcagagcacctagcccagccaagtgtgctagcgccttccctgctgctcccgcattctacccccgagcatacagcgatccggatcctgccaaagatcctcgtgcggagaagaaagaactatgtgcactgcagaaggccgtagagctcgaaaaaaccgaagccgataacgccgaacgccctagagctaggcggcgtaggaaacctcgggtgctctttagccaagctcaagtgtatgagctcgagcgccgattcaaacagcagcggtatttaagcgcacctgagagggatcagctcgcaagcgtgctgaaacttacctccacccaggtaaagatctggtttcagaatcggcgttataagtgtaaaagacagaggcaggatcaaacattggaattggtaggcctgcctccaccccccccaccacccgccagaaggatagccgtgcctgtcctcgtgcgggacggtaagccatgtctgggggattctgctccatacgcgccagcatacggagttgggttgaacccttatggttacaacgcttatccagcttaccctggatacggcggcgccgcctgttctcctggatactcttgtactgccgcctaccccgcaggaccgtcccctgctcaaccggccacagcggcagctaataataatttcgtgaatttcggcgtaggggatctgaatgccgtgcagtcccccggaatcccgcagtccaacagtggagtgtccacattgcatggtatcagagcctggtag

SEQ ID NO: 126605 - DNA, 339 bp, synthetic construct
  misc_feature 1..339: note = Description of Artificial Sequence: Synthetic coding sequence
  source 1..339: mol_type = other DNA
atgtttcctagccctgccctgacacccacacccttcagtgttaaggacatattgaacctggaacagcagcagcgctccttagcagcagcgggcgaactgtctgcgcgattagaggcaaccctggccccatcctcctgcatgctggcagcgtttaaacccgaggcttatgcgggacctgaggccgctgcccccggcctcccagagcttagggctgaacttggtcgcgcccccagcccagctaaatgtgcttcagccttccccgctgcaccagcattttatccaagagcctactccgatcccgaccctgccaaggatccacgcgccgagaagaaggcctag

SEQ ID NO: 126606 - DNA, 456 bp, synthetic construct
  misc_feature 1..456: note = Description of Artificial Sequence: Synthetic coding sequence
  source 1..456: mol_type = other DNA
atgtttccctcccccgctctcacacctaccccatttagtgtgaaagatatactcaaccttgagcaacagcagaggagtctagctgcagcgggggagctgtccgctagactcgaggcgacactcgcccctagcagttgcatgctcgctgcttttaaacccgaggcatacgcaggtccagaggctgctgctcctggcctgccggaactgagggcggagcttgggagagccccatcccctgcaaagtgtgcttccgcctttcccgcagcccctgccttctacccacgcgcctatagcgatccagatccagcaaaggatccaagggccgagaagaaaggctgcgagctgccacgcggccagaggccaccagttcttttttcttccgcactttcccaaccagactttcttcagatgctgtcggaaacttgccgttggttgcccgtgcacctggcggaatag

SEQ ID NO: 126607 - DNA, 906 bp, synthetic construct
  misc_feature 1..906: note = Description of Artificial Sequence: Synthetic coding sequence
  source 1..906: mol_type = other DNA
atgctcctgtccccagtgacctcaacaccctttagcgttaaggatatacttcggctggagcgcgaacggtcctgccccgccgcaagccctcaccctcgggtgcgcaaaagcccagaaaatttccagtacctcagaatggacgctgagccccgaggatccgaggtgcataacgcaggcgggggcggtggcgaccggaagctcgacggatctgaaccgcccggtggcccatgtgaggccgtgctggagatggacgccgaaagaatgggagaaccccagcctgggctaaatgccgcatccccactaggaggtgggactcgggtcccagaaaggggtgtgggcaactccggagactccgtgcgcggggggcgaagcgaacagccaaaggctagacaaaggaggaaacctagagtattgtttagtcaagctcaagtcctcgcactggagcgacggttcaaacagcagaggtacctttcagctcccgagagggaacacttggcttccgccttgcaactcacctctacacaggtgaagatatggtttcagaacagaaggtacaagtgcaagcgccagaggcaggacaaatcactggaactcgccggccacccccttacccccaggagagtggctgtgccggtgcttgttagagacggtaaaccttgtttaggccctggccccggcgctccagcctttccaagcccatactcagcagccgtttccccatattcttgttacggaggctactctggagcgccatacggggcagggtacggcacctgctacgccggcgccccatctgggccagcaccacacaccccactcgcctctgctggcttcggccacggggggcagaatgccactccccagggacacctggcagcaactttgcagggcgtccgggcctggtag

SEQ ID NO: 126608 - DNA, 660 bp, synthetic construct
  misc_feature 1..660: note = Description of Artificial Sequence: Synthetic coding sequence
  source 1..660: mol_type = other DNA
atggacgccgaaaggatgggggagccccaaccaggactgaacgccgccagcccacttgggggggggactagagtccctgaacggggcgtgggcaactcgggcgactccgtaagaggtgggagatcggaacaacctaaggcccgccaacgtcgcaagcccagggtcttgttttcccaggcccaggtcttggcgcttgaacgcaggtttaaacagcagagatatttatctgcccctgagagggagcatctggcttcagcattacagctgacttccacccaggtgaaaatctggttccaaaacagaaggtacaaatgtaaacggcagcggcaagacaaatctcttgaattagccggtcatcccctcaccccaaggagagtggctgtgcccgtcctcgtacgcgatgggaagccctgtctgggtcctggccctggggcacccgccttcccctccccttattccgcggctgtctctccatactcttgctatggcggctactctggcgcaccttatggcgccggctatggtacctgttacgccggagctccaagcggtcccgctcctcacacgcctcttgcttctgctggcttcggtcacggcggacaaaatgctacccctcagggacatctggccgccacactccagggggttagagcatggtag

SEQ ID NO: 126609 - DNA, 720 bp, synthetic construct
  misc_feature 1..720: note = Description of Artificial Sequence: Synthetic coding sequence
  source 1..720: mol_type = other DNA
atggcgacaagcggtcggctgtcattcactgtgagatcactccttgacctgccggaacaagacgcacagcatcttccaagacgcgagccagagcccagagccccgcagcccgatccttgcgcagcctggctcgattcagaacgtggacattatccatcttctgacgaatcaagcttggagacttccccacctgactcttcccagcgcccttccgcacggcccgcgtcgcccgggagtgatgctgagaagagaaagaaacgccgagtgctgtttagtaaagctcagacccttgagctagaacgcagatttaggcagcaacggtacctttctgctccggaaagggagcaactggcttctcttcttaggttgacaccgacacaagtgaaaatttggttccaaaaccatcgatacaagttaaaacgggctagggcccctggcgcagctgaatcccccgacctggccgccagtgccgaacttcacgcggcaccaggactcctaagacgcgtcgtggttccagtgctcgtgagggacggccagccctgcggcggaggtgggggaggcgaggtaggaactgccgctgctcaggaaaagtgcggcgctccacctgcagctgcctgcccgctgcccggttacccggccttcgggcctggatcggcactcggcttgtttccagcctatcaacacttggcgagtcccgctctagtgtcctggaactggtag

SEQ ID NO: 126610 - DNA, 1002 bp, synthetic construct
  misc_feature 1..1002: note = Description of Artificial Sequence: Synthetic coding sequence
  source 1..1002: mol_type = other DNA
atggccgtgcgcggagccaacacactcacgagcttttccatccaggccatactaaataagaaagaagaaagggggggcctcgccgcccccgagggacgccctgctcctggaggtaccgctgcaagcgtcgccgccgctccagccgtgtgttgctggcggctgtttggagagcgcgacgcaggagcccttggaggtgccgaggactccctcttggcctcacccgccgggactcgtacggctgctggacgaaccgctgaaagcccagaggggtgggactcagattctgcattgagcgaggagaatgagagtcggcgtagatgtgccgatgcccgtggagcctcaggagcagggttggcgggcggcagcttgagtcttggccagcctgtgtgtgagctggcagccagtaaagacctagaggaggaagccgctggccgctccgactccgagatgtccgcaagcgttagcggagacaggagcccgagaaccgaggacgatggcgttggacctcgcggcgcccacgtgagtgctctctgtagcggcgcagggggtggcgggggatcaggcccagctggcgtcgccgaggaagaggaggaaccagccgctcctaaaccgcgcaagaagcgatccagagctgccttcagccacgcacaggtctttgagttggagcggcgcttcaaccatcagaggtacttaagcggccctgagagagctgacctggctgcttccctgaaacttactgagacgcaggtcaagatttggttccagaatcggaggtataagacgaagcggcggcagatggcagcagatctgcttgccagtgctcctgccgccaaaaaggtcgccgtaaaagtcctcgtgagagacgaccagcgccagtacctccctggcgaggtactcaggcccccttccctcctgcccctgcaacctagttactactacccctattactgcctgcccggctgggccctgtcgacctgcgccgcggccgcaggcacgcagtag

SEQ ID NO: 126611 - DNA, 798 bp, synthetic construct
  misc_feature 1..798: note = Description of Artificial Sequence: Synthetic coding sequence
  source 1..798: mol_type = other DNA
atggagtccaatctgcagggaacatttctgctgaacaacacgccactcgctcaattcccagagatgaaagctcctgtctgccaatacagtgttcagaacagcttttataagctcagtcctccaggactcggtccccagctcgcagccggaactccccatgggatcaccgacatcctttctcgaccagtggctgcacccaacaacagcctcctttccgggtaccctcacgtagcaggctttggcggcttaagttcccaaggagtttattattctccccaggtcggcaatttttccaaggctggcaacgaataccctacacgcacacggaattgctgggctgacaccggccaagactggagaggcgggaggcagtgtagcaacacgcctgatcctttaagcgattctatccacaaaaaaaagcatacaagaccgaccttcaccgggcaccagatctttgcattggagaagacctttgaacagaccaaatacctggccggtcccgaacgggccagattggcatactccttaggaatgacagagagtcaggttaaggtgtggttccaaaaccgccgaacaaagtggcgtaagaagtctgccctggagcccagttccagcacgcctcgggcccccgggggcgccggagccggtgccggaggggatagagcaccgtccgagaatgaggatgatgaatataataaacccttagatccagatagcgacgatgagaaaattcggctgctgcttcgcaaacatagagcagcgttttcagtgctgtcccttggcgcccacagtgtatag

SEQ ID NO: 126612 - DNA, 408 bp, synthetic construct
  misc_feature 1..408: note = Description of Artificial Sequence: Synthetic coding sequence
  source 1..408: mol_type = other DNA
atgcagcaggggcagttagcacccgggtcaaggctgtgtagcggaccttggggattacccgaattgcagcctgccgcgccatcttcgtctgcagcccagctgccttggggggagagctggggcgaagaggctgatacccccgcctgccttagcgcgtcaggcgtctggttccagaatcggaggactaaatggcggaagaagtccgcactggagccatccagttcaaccccgcgtgccccggggggagctggggcaggggctggaggagatcgggctccaagtgaaaacgaggacgacgagtataataagcctctcgaccccgatagtgatgacgaaaagattcggctgctgttgagaaagcatagagcagctttctccgtgctgagcctcggagcccacagcgtttag

SEQ ID NO: 126613 - DNA, 2928 bp, synthetic construct
  misc_feature 1..2928: note = Description of Artificial Sequence: Synthetic coding sequence
  source 1..2928: mol_type = other DNA
atgcgttggggacatcacctgccacgggcaagttgggggtctggttttagaagggctcttcagagacctgacgatcggattccattcctgattcattggtcctggcctctgcaaggtgaaagaccattcggtcctccacgcgcatttatcaggcatcatggaagtagcgttgatagtgctcccccgccagggcgccatggtcggctcttcccttccgcttctgctactgaggctattcagcgacaccggagaaacctggctgagtggttctctaggctgcctagagaggagcggcaatttggaccgacatttgcactggacaccgtgcacgtagaccctgtgattcgtgaatcaacacctgacgagttactcagaccccccgcagagctggcactagagcatcagccccctcaggccgggctgccaccactagcactcagccagctctttaaccccgatgcttgtggacgacgggtccagacggtcgtgctgtacggcaccgttgggacggggaagtcgactcttgtgagaaagatggtgctggactggtgctatgggaggctacctgcctttgagctactgattcccttttcttgcgaggatctttctagtctggggccagccccagcctccctgtgtcagctagtggcccagcggtacaccccactgaaagaggtgcttccactcatggcagctgcgggctctcacctcctgttcgtcttacatgggctggagcacctgaacctcgacttccggctcgcagggacgggcctgtgttccgatcctgaagagccacaagagccagctgccatcattgtgaatctgctgcggaagtacatgttgccccaggctagtatactcgtgaccacccgcccttccgccattggcaggatcccctctaaatacgtcggcaggtacggtgagatttgtggtttctctgacactaacctgcaaaagctctattttcagctgagactgaatcagccctattgtgggtatgccgtggggggctctggggtctccgccacacctgcgcagcgcgaccatctggtgcaaatgctatctcgaaacctggaagggcaccaccagattgctgcagcatgctttctgccatcgtattgctggctcgtctgcgccactctgcattttctccacgcgcctacccccgccgggcagacactgacatcaatctacacgtcctttctaagattaaacttctccggggaaacgctcgactcgactgatccctctaacctcagtcttatggcttacgccgccagaacaatgggaaagttggcatatgaaggcgtaagttctagaaaaacttatttttcagaggaggacgtttgcgggtgtctcgaagctggcatcagaacagaagaggaatttcagctgctgcacatttttagaagagacgccttgcggttcttcctggccccctgtgtggaaccaggtagggcaggaacttttgtgttcactgtgcctgcgatgcaagaatatctcgccgcattatacatcgtcctgggacttaggaagactacactgcagaaggtaggaaaggaagtcgctgagctcgtcggacgagtgggtgaagacgtctcactagtgctcggaataatggctaaacttcttcctcttcgtgccctcccactgctgttcaacctcatcaaagtggtgccgagggtgttcggccgaatggtgggcaaatcaagggaagctgtagctcaggccatggtgttggaaatgtttagagaggaggactactataatgacgatgtactggatcagatgggagcctccatcctgggagtggaagggccgcggcgtcaccccgacgaacccccggaagacgaagtgtttgagcttttccctatgttcatgggtggactcttgagcgcccataatcgtgccgtgctggcgcagctgggttgtccgatcaagaacctggatgccctggaaaatgctcaggccatcaagaaaaaactgggaaagctggggagacaagtgctcccgccctccgaactgctggaccaccttttcttccactatgagtttcagaaccagcgctttagcgccgaagtgttgtcctcacttcgccaacttaacttggccggagtgagaatgactcccgtgaaatgcaccgtggtcgcagccgtgcttgggtccgggcggcacgccctggacgaggtgaatctggctagttgtcagctcgatccggcggggctgagaactctcctcccagtgtttctcagggcgcggaaattggggttacagcttaatagcctaggtccggaggcgtgcaaggacctgcgggatctgctgttacacgatcagtgtcagatcactacgctgagattgagtaataaccccctcactgctgctggggtcgccgtcctgatggagggactcgccggaaatacatcagtgacgcacctgtccctgctgcatactggactcggggatgagggcctggagctcctcgctgcgcagcttgatcggaataggcagcttcaagagctcaacgtcgcttacaacggagcaggggatacagcagccctggcactggcccgcgccgcccgtgagcacccgtctttggaactgttacacctctattttaatgaattgtccagtgagggaagacaggtgctgagagatctgggaggtgctgccgagggcggcgcccgagtggttgtctccctgaccgaaggaacggcagtgtccgaatactggtctgtcattctctccgaagtgcagcgaaatctgaattcttgggacagagcccgcgtgcagaggcatctggaactgctgttacgggatctggaggatagccgtggtgccacgctgaatccctggcggaaggcccagttactgcgagtggaaggtgaggtgagagcattgctggagcagcttggatcctctgggtcatag

SEQ ID NO: 126614 - DNA, 345 bp, synthetic construct
  misc_feature 1..345: note = Description of Artificial Sequence: Synthetic coding sequence
  source 1..345: mol_type = other DNA
ggcatctccaagctcaaaatggtgaatcaatgttttggactgggcgacgggacgtgccttctcagcatacaactggagggcccaaaacacgtcgcgttcgggtggccagagtgccctgaggctcccctacctacgctccctccaccccccttgaaagaacccttaacagtatccccacgagggtcccacttgatgagtgcaatgccaggcgtctcaccttcgcggtgcgtgggaagcttccccagttgtctcatgcttacttgcggccacagggggtgtccccacataggagccttctcaagcagcagctgtcctctttgccataatggcatgatggcctggtag

SEQ ID NO: 126615 - DNA, 2928 bp, synthetic construct
  misc_feature 1..2928: note = Description of Artificial Sequence: Synthetic coding sequence
  source 1..2928: mol_type = other DNA
atgcggtggggccaccacctgcctcgagcgagctggggctcagggtttagaagagccctgcaaaggccagatgatagaatcccttttctgattcactggtcctggcccctacagggtgaacggccattcggacccccacgggcattcatccggcatcacggaagctctgtggatagtgcacctccaccaggtagacacggccgtttgttccccagtgcatccgctaccgaggccatccagcggcatagacgtaatctggccgaatggtttagcagactcccaagagaggaaagacaatttgggcctacgttcgcgctagatacagtgcacgtcgatcccgtcatcagagaatctacgccggatgaactcctgcgaccccctgccgagcttgctcttgaacaccaacccccccaggcgggtttgcccccactggccctgtcccaattgtttaaccccgatgcttgtggacgacgtgtacaaacagtagtactgtatggtaccgtcggcaccggaaaatctacactggtgcgcaagatggtcctggactggtgttacggccgattacctgcctttgaactactgattcccttcagctgcgaggacctgtcgagtttggggcctgcaccagcatctctgtgtcaattggtggcccagcgatacacgcctctcaaggaggtgctgccccttatggcggctgccggaagtcaccttcttttcgttttacatggtcttgagcatttgaacctagattttagactcgcagggaccggtctctgcagcgatcccgaagaacctcaggaacccgccgctataatcgtgaacctgttgaggaaatacatgcttcctcaggcaagcatacttgtgaccacacgtcccagcgcgatcggacggatacccagcaaatatgtcggtcggtatggtgaaatttgtgggttctccgacacgaatctgcaaaagctttactttcagctaaggctcaatcaaccctattgcggatatgctgttggggggtccggtgtttccgccactcccgcccagcgggaccatcttgtgcagatgctgtctagaaacctcgaaggtcaccatcagattgctgccgcatgttttctaccctcttactgttggctggtctgcgcaacattgcattttctccatgcccccactcccgccggtcagacgctaaccagcatttacaccagcttcttgcgcttgaacttctctggtgaaactctcgattccaccgatccaagtaatttatcactgatggcttacgccgcccgaaccatgggcaaacttgcttacgaaggtgtctcaagcagaaaaacttacttcagcgaagaagatgtgtgcggatgccttgaggcaggcattcggacagaggaagaattccagctgctgcacatattccggcgcgatgcattaagattttttctggccccatgcgtcgaacccggacgagccggtactttcgtctttaccgtgccggccatgcaggaatacctcgccgcactatatatcgtgctggggttgaggaagaccactctccaaaaagtgggaaaagaggtggcggagctggtgggcagggtaggcgaagacgtctccctggttctgggcatcatggccaaacttctacccctgagagcattgcccttgctcttcaacctgattaaggtcgttcctagggtctttggacggatggtgggcaagagtagggaggccgtggctcaggcaatggtcctggaaatgttcagggaggaggactactacaacgatgacgttctcgatcagatgggagcctcaatcctaggggttgaaggccccaggcggcatcctgatgagcccccagaggacgaagtgtttgagctgttccccatgtttatggggggccttctgtccgcacacaatagagccgtactggcccagctgggctgccctatcaaaaacctggacgcactggagaatgctcaagcaattaaaaagaaactgggcaagctgggccggcaggtcctgccaccctccgaactgctggaccatctgtttttccattatgaatttcagaaccagagattcagtgccgaagtgttaagctccctgaggcagcttaatctggcaggcgtcagaatgacacctgtgaagtgcaccgttgtggcggccgtcctggggagcggccggcacgcgctcgatgaggtgaacctggcttcctgtcaattggaccccgcgggcctgcgcacgctccttccggttttcctgagagcacggaaacttggcctccagctgaattcgcttggcccagaggcctgcaaggacctgcgcgatctcctgctgcacgaccagtgccaaatcaccacactccggctgagcaacaaccccctcacagccgccggggttgcggttctgatggaggggctggctggtaataccagtgtgactcaccttagcctgcttcacacaggcctgggagacgaagggcttgaattactcgctgctcagcttgaccgcaatcggcagctccaggagctgaacgtggcttacaatggggccggggacactgctgccctggcactcgctcgcgccgcacgagaacatccctcgttagaacttctgcatttatactttaatgagttgtcttcagaggggaggcaggtactcagggatttaggaggtgccgccgaaggcggcgcaagagtggtggtgagcctgaccgagggaactgccgtctcggagtattggtctgtgattctatcagaggtgcagaggaacctgaatagctgggatagggcccgggtgcagcggcacctggagctgctcctgagggacctggaagactcaagaggcgcgactttgaacccgtggaggaaggcccagttactgagggtcgagggagaggtgcgggcactgctggaacagctcggatcctccggttcctag

SEQ ID NO: 126616 - DNA, 2766 bp, synthetic construct
  misc_feature 1..2766: note = Description of Artificial Sequence: Synthetic coding sequence
  source 1..2766: mol_type = other DNA
atgcgctggggacatcatctgcccagggcaagctggggcagcggattccgtagggcgctccaacgccccgatgaccgcatccctttcctcatccactggagttggccactccaaggagagcgaccttttggcccaccacgggcttttattcggcatcacggtagctcagtcgactctgctcctccccccggtcggcacggtcggcttttcccctcggcttccgccacagaagctatccaacgccacagacgtaatctggccgaatggttcagtcggttgcctagggaggaacggcaattcggacccacttttgctttggataccgtacatgtggatcccgtgatcagggagagtacccccgacgagcttctgcgccctccagccgaactggcactggagcaccagcctccacaggcgggactgcctcccctggctctatcacagttatttaaccccgacgcctgcggcagaagagtacagaccgttgtgctgtacggaacagtggggaccggtaaatctactctagtgaggaagatggtactggactggtgttatggtagattaccagctttcgagctcctcatccccttcagctgtgaagatctgagttccctggggcctgcccctgcgtcattgtgtcagttagtggcgcagcggtatacccccctgaaagaagtcttgcctctcatggctgccgcgggctcccatctgctcttcgtactgcacggactagagcacctgaatctggacttcaggctggccggaactggtctgtgcagtgatcccgaagagcctcaggagccagctgctattatagtaaatctgttaagaaaatatatgttgccacaggcctccatcttagttacgacccgaccatcagcgattgggcgaattcctagtaagtatgtcgggcgctatggggaaatatgcggatttagtgacacaaacctgcagaagctgtactttcaactccggctcaaccagccttattgcggctacgccgttggcggttcaggggtttccgccacccctgcccagcgagaccacctggtacagatgcttagcagaaatttggagggccatcatcaaattgccgccgcatgttttctcccctcttactgctggctagtctgcgctacacttcatttcctgcacgcacctacgcccgctggccagacattaacttccatctacacctccttcctccggctgaatttctctggagaaacactcgattcaacagacccttcaaatcttagcctgatggcatatgctgcacggaccatgggtaagctggcctatgaaggagtcagctcccgcaaaacctacttctcagaagaagatgtgtgcggatgtctggaagctggcattcgaactgaggaggaattccagcttctgcacatctttcgtcgggatgcgctaagattttttctcgccccatgcgtggaaccaggtcgtgccgggacttttgtgttcaccgtcccagcaatgcaggaataccttgctgcgttatacatagtcctgggtttacgcaaaaccaccctccaaaaagtagggaaagaagtggcagaactagtgggcagggttggagaggacgtgtctctggtgctgggaattatggcgaaacttctacccctgcgggccttgccgctgttgttcaatctgattaaggtcgttcctagagtgtttggccggatggtcggcaagtctagggaggctgtggcccaggccatggtactagagatgtttcgcgaggaggactactataatgacgatgtcctggatcagatgggagcttccatcctcggcgtagagggtccccggaggcatcctgacgaaccaccagaggatgaagtgtttgagctgttccctatgtttatggggggtctactgagtgcccataatcgggcagtccttgctcaactgggctgtccaataaagaatttagatgctctggaaaatgctcaggcaataaaaaagaaattagggaagcttggtcgccaggtcctccctccatctgagctcctcgaccacctatttttccattacgaatttcagaaccagcgcttctcagctgaggtcctgagctctcttagacagctgaatctcgccggggtgcgtatgacacccgtgaaatgtaccgtggtcgccgcagtgttggggagcgggcgccacgccctggatgaagtgaaccttgcctcctgccagctggaccccgcaggactgaggactcttctcccagtgttcctaagagcaaggaagctggggcttcagcttaactcactgggtccagaagcgtgtaaggacctacgggatcttcttcttcatgatcagtgtcagattaccaccctgaggctgtcaaacaaccccctcacagccgccggcgtcgctgtgctgatggaaggattggcagggaatacatccgtgacccacctctctttactgcataccggcttgggagatgagggactggagcttctggctgctcagctggaccgaaaccgccagcttcaggagctgaacgtagcatataacggagctggcgacactgctgcactagccttggctcgagctgctcgcgagcacccttcacttgagctgctccagggggtggccatccaaatgtgctggaaactcccgctgctcccctatgcccacttgtggactcctaggatgccttctcattggtgtttccttttaatcctgatgccccctctgccccagtggtatgacggcctggtggctcctcgaggtcgttgcacctag

SEQ ID NO: 126617 - DNA, 2928 bp, synthetic construct
  misc_feature 1..2928: note = Description of Artificial Sequence: Synthetic coding sequence
  source 1..2928: mol_type = other DNA
atgcgttggggtcaccatctgccacgagctagctgggggtcaggctttagacgcgctttgcagaggccagatgaccggattcccttcctgatccattggagctggccactgcaaggcgagcgcccatttggcccacccagggcatttatccggcatcacggtagctccgtcgatagcgcaccccccccaggccgccacggaagactctttccttccgccagcgccaccgaggcgatccaacgtcatagaagaaatctggccgagtggttttctcggctaccccgcgaggaacgtcaattcggtcccacgttcgccttggataccgtgcatgtcgatccggttattcgggagtcgacccccgacgaactgcttcggcccccggccgagttagcactagaacaccagccaccccaagccgggctgccaccactcgcactgtcacagctttttaaccccgatgcctgcggtagacgagtacagacagtggtcctgtacggaacagtgggaacagggaaatccacactcgtgcgcaaaatggttctggactggtgctacggccggctgccagcttttgaactactcattcccttttcatgtgaggacctctcatctcttggacccgcacctgctagcctgtgtcaactagtcgcccagcgctacaccccgctcaaagaggtactcccattaatggccgctgccggctctcatcttttgttcgtgcttcacggcctggagcacttaaatttagatttccgtttggccggcaccggactgtgcagcgaccctgaagaaccccaggagccggctgctattattgtcaacttgctgcggaaatacatgttgcctcaggccagtatcctagttacaactcgaccctccgctattgggcgtattccaagtaagtatgtcggcaggtacggcgagatatgcggcttcagtgatactaatctccaaaaattgtactttcagcttcgattgaaccaaccctactgtggctacgcagtcgggggtagcggggtgtccgcaacgcctgcacagagagatcacctcgtccagatgctgagtcgaaatctcgagggccatcatcagattgctgcagcctgttttctgccttcctattgttggctcgtctgtgccacgttacactttctccatgcgcccacacctgctgggcaaacactgacatccatctacactagttttctgcggttaaatttctcaggcgaaactctggactccactgacccctccaacttaagtttaatggcttacgcagctagaaccatgggcaaactggcctacgagggagtgtcgtcacggaagacttacttcagcgaggaagacgtgtgcggatgtctcgaggcaggaatcaggaccgaagaggagtttcagctactgcacatatttcgcagggatgccctgcggttttttctggcaccctgtgtggagcccggacgagcagggacatttgtctttacagtgcctgccatgcaggagtaccttgctgctctttacattgtgttaggattaagaaaaacgaccctgcagaaagtgggcaaagaagtggcagagctcgtggggcgggtgggcgaagacgtgtctttggtcttaggcatcatggctaagctgctgccactgagagctctaccgcttttgttcaatctaatcaaggtggtgcccagagtttttggacgcatggtgggaaagagccgagaggccgtcgcacaggctatggtgctggagatgttcagggaggaagactactataacgacgatgtgttggaccagatgggagcttctatcttaggagtggaaggacccagacgccacccggacgagccacccgaggacgaggttttcgaattatttccaatgtttatgggcggcctcctttccgctcacaaccgcgcagtcttggcccagctggggtgtccaatcaagaatctggacgccttagaaaacgcacaggctatcaagaaaaagcttggaaagctgggaagacaggtgctgccacctagtgaactgcttgatcacctgttctttcactacgagttccagaaccagcgcttctcagccgaggtactgtcatccctgaggcagttgaatctggctggcgtcagaatgactcccgtgaagtgcaccgtggtagccgcagttctggggtcaggtaggcatgcactagatgaggtgaatctggccagctgccagctagaccctgccggcctccgcacgctgttgcccgtgttcctgcgtgctaggaagcttggactgcagctcaactcactcggaccggaggcctgtaaagatctccgcgatttactgctgcatgaccagtgtcagatcacaaccctgaggcttagcaataaccctctaacagctgctggtgtggcagtgttaatggaagggctcgccggaaacaccagcgtgacgcacctgagcttgctgcacacagggctgggcgacgaaggattagagctgctcgcagctcaattagatcggaacaggcagctccaagagttaaacgtggcctataacggggccggagatacagccgccctggctctcgcccgggccgctagggagcacccgagcctcgaattactgcacctgtatttcaacgaactatccagtgagggcagacaagttctgcgggatctgggcggcgctgcagaaggaggcgcaagggtcgttgtaagtttaaccgaggggaccgccgtgagcgagtactggtcagtcatactgtcagaggtgcagcgtaacttaaatagctgggatagggctcgcgtgcagagacacctggagctgcttttacgtgatctggaagacagccgcggagcaaccctgaatccatggcggaaggcccagctgctgcgtgtcgaaggagaggtgagggcccttcttgagcagctcggctcaagcggatcttag

SEQ ID NO: 126618 - DNA, 2766 bp, synthetic construct
  misc_feature 1..2766: note = Description of Artificial Sequence: Synthetic coding sequence
  source 1..2766: mol_type = other DNA
atgagatgggggcaccatctgccgcgagcgtcttgggggtccggattcaggagagcattacagaggcccgatgatcggataccatttttaatccattggtcctggcctctgcaaggagaacggccgtttgggccacccagggcctttattcggcaccatgggagctctgtagattctgcccctccccctggcaggcacgggaggctgtttcccagcgctagtgcgaccgaagcgatccagaggcatagacggaacctcgctgaatggttctccagacttcctcgtgaagaacgacagttcggcccaaccttcgcactggacaccgtccatgtcgaccctgtaatccgagaaagcacgcctgacgagctgctcagacctccagcggaattagctctcgagcaccagcctccccaagccgggcttccgcctctagcattgtcccagttattcaatcctgacgcctgcggtcgcagagtccagaccgtggttctttatggtaccgtgggaactggtaaatccaccctcgtacggaagatggtgttagactggtgctatgggcggctcccagcctttgaactccttatccctttcagctgcgaggatttgagcagtttgggtcctgcccccgcttcactgtgtcagctggtagcccagagatatacgcccttaaaagaggttttaccgctgatggctgccgccggttcacatctgctgttcgtcctgcatggccttgagcacctcaaccttgatttccgcctggcagggacgggcctttgttccgacccggaagaacctcaggagccagctgcaatcattgtcaacttattgagaaaatacatgcttccccaggcttcaatcctagtgacaactcggccaagcgccatcggccgcattccgtcaaaatatgttggaagatatggagaaatttgcggcttctcagacacaaacctgcaaaaactatacttccagctgcgcctgaaccagccctactgcggttatgccgttgggggcagcggcgtaagtgcaacgcctgcccaaagagatcacctggtacagatgctctcacgcaatcttgaaggacatcaccaaattgctgctgcgtgttttctccctagctactgctggctggtgtgtgctaccctgcattttcttcacgcacctacgcccgccggtcagactctgaccagcatatatacttcatttctgagactgaacttcagtggagaaacactagattcgactgatccatccaatctgagcctgatggcgtatgctgcacggaccatgggcaaattggcttatgaaggcgtctcaagtcggaagacttacttttcggaagaagatgtgtgtgggtgcctggaagctgggatcaggaccgaggaagagtttcagctattacatatttttcggcgggatgctcttcgcttttttctcgcaccatgtgtggagcctggtcgcgccggaactttcgtgttcaccgtgccagccatgcaggagtacctcgccgctctgtatatcgttctggggctccggaagaccacacttcagaaagtaggaaaggaagttgccgagttggtcggtagggtgggggaggacgtttccctcgtgttgggaattatggccaaactgctgcccttaagagcccttccgctactgttcaatttgattaaggtagtgccccgggtatttggacggatggttggcaaaagtcgggaggcagtagcccaggccatggtattggaaatgttcagggaggaggattattataacgatgacgtgctggatcagatgggggccagcatcctgggagtggaaggcccacggagacatcccgatgagcctcccgaagacgaggttttcgagctttttccaatgtttatgggaggcctcctctcagcccataaccgcgctgtattggcacagctgggatgtccaatcaagaacttggatgccctggagaacgcacaggcgattaagaaaaaactgggtaagctcggacggcaggtcctgcctccttcggaactgctggaccacctgttcttccactatgagtttcagaaccagcggttttcagctgaggtcctgtcttctctccgccagcttaacctggccggtgtgcgcatgacccctgtgaagtgtaccgttgtggccgcagtgctgggctcgggccggcatgccctcgatgaagtcaatctcgcatcctgccaactggaccctgcaggcttgaggactctcctacccgttttcctgagggcaaggaagcttgggttgcaactgaatagtctcggtcccgaggcctgcaaagacctccgcgacttgcttctccacgatcaatgtcagatcacaaccctccggctgtccaataaccccctcaccgccgctggagtggccgtccttatggaggggttagcaggtaatactagcgttacccacctcagtctgctccacacaggcttgggggacgaaggactggagctcctggcggcacagctcgaccggaaccgccagctacaagagctgaatgtggcatataatggcgctggtgatacagcagctctggcacttgctcgcgcggcacgcgagcacccaagcctggaattgctgcagggggtggccatccagatgtgttggaaattgccgctgctaccatatgcccacctgtggacgcccaggatgccttcccactggtgtttcctgctcattctgatgcctcccctgcctcagtggtatgatggcctggtggctcctagaggcaggtgtacctag

SEQ ID NO: 126619 - DNA, 3111 bp, synthetic construct
  misc_feature 1..3111: note = Description of Artificial Sequence: Synthetic coding sequence
  source 1..3111: mol_type = other DNA
atgaagatggcaagcacacgatgcaagctagccaggtatcttgaagatttagaggatgtcgatcttaagaaatttaaaatgcacttagaggattatccaccgcaaaaggggtgtatccctctgccaagaggccagactgagaaggcagaccacgtggacctggctacacttatgattgactttaacggggaggagaaggcatgggccatggccgtgtggatcttcgctgcaatcaaccgcagagacctgtatgagaaggcaaaaagagatgagccaaagtgggggagcgacaacgcgagagtgagcaatccaaccgtgatatgccaagaggactctattgaagaggagtggatgggccttctagagtacctcagtaggattagcatctgtaagatgaagaaagattataggaagaaataccgcaagtacgtgcgaagccgtttccagtgtattgaggaccgtaatgcgcgccttggagagtctgtgagtctgaacaagaggtatactagactgcggctcattaaggagcaccgctcacagcaggaaagagagcaggagctgctggcaataggtaaaactaagacatgcgagagtcctgtatcaccaattaaaatggagcttctattcgaccccgacgacgagcactctgagcctgtccacactgtcgtgtttcaaggggctgcagggatcggtaagacgatcctggccagaaagatgatgctcgactgggcatccggaaccctgtatcaggatcgcttcgactatctgttctacatacactgtcgcgaggtctcattagtaactcagcgatctttgggagacctcattatgtcatgttgccccgaccctaacccacctatccacaaaattgtgcgaaagccaagccgaatactcttcctcatggatggttttgacgagttacaaggcgccttcgacgagcacattggcccactctgcacagattggcagaaagccgaacgcggagatatacttttatctagtctcataaggaagaaactgttgcctgaagcttctctattgatcacaacccggccagtcgccctggagaagttacaacatctattggatcatcccaggcatgtagaaatactcggtttctcagaggcaaaacgtaaagaatacttcttcaagtacttctccgacgaagctcaagccagagccgcattttctctgatccaggagaacgaagtgctatttacaatgtgctttataccattggtttgctggatcgtttgtacaggtttgaaacagcagatggaaagcggcaagagcctcgcccagacctccaagactacgacggccgtgtacgtttttttcctgtctagtctcctgcagccccgagggggcagccaagaacacggcctgtgcgcccacctctggggcttgtgcagcctggccgccgacgggatctggaatcaaaagatactgttcgaggaatccgatcttcggaaccacgggctccagaaggcagatgtgtcagctttcctgagaatgaacttattccagaaggaagtggactgtgagaagttttattcatttattcatatgactttccaagagttctttgctgcaatgtactatctgctcgaggaggagaaggagggacgcaccaatgtgcctgggtcacggctgaagcttccttccagggacgttacggtgctcctcgaaaactatggaaagttcgagaagggatacctgatattcgtggttcgttttctgtttggtctggtaaaccaagaacggacaagctatttggagaagaaactgtcatgtaagataagccagcaaattcggctggagctgttgaagtggatcgaagtaaaggccaaggcaaagaaactgcaaattcagccctctcaactggaattgttttactgtctgtacgagatgcaggaagaagattttgtccagagagcaatggattacttccccaagattgaaatcaacttgtctacgcgcatggaccatatggtgagtagcttctgtatagagaactgccacagagtcgagtctctaagcctggggtttctgcacaatatgcccaaagaggaagaggaagaggaaaaggagggcagacatctagatatggttcaatgcgttttaccctcttccagccacgcagcatgttctcatggactggtcaattcacatctgacgagttcattttgtcgaggattgttctctgtgctcagcaccagccagagtttgaccgagttggacttgagtgacaattctctgggcgatccaggcatgagagttctttgcgaaacattgcaacacccaggatgtaatatcaggcgcctatggctggggcgttgtggcctctctcacgagtgctgctttgacattagcttggtgctgagctccaaccagaagttggtagaactggacctgagtgacaacgccctgggcgattttgggattagactgttgtgtgtgggcctgaagcatctgctgtgcaaccttaaaaaactctggctggtgtcatgttgtctcacatcagcgtgttgtcaggacctggcctcagtactgagcacctcacactctctaacccgcttgtatgtcggcgagaatgcattgggagattcaggagtggcaatcctctgcgaaaaagccaagaatccacagtgtaatcttcaaaaactcggcctggtcaacagcggcctaacttctgtttgctgcagcgcactgtcatctgttctgtcaaccaatcagaacctcacccacctttatcttagaggcaatacgctgggggataaaggcattaaactactgtgtgaaggcctgctgcaccccgattgcaaactgcaggtcctcgagttggataattgtaacctgactagccattgttgctgggacctctcgacgctgctcaccagcagccaaagtttacggaagttatcactggggaacaatgatctgggcgatctaggtgtcatgatgttctgcgaggtgttgaagcagcagagctgtctgctccaaaatctcggcctctcagaaatgtacttcaactacgagaccaaatccgctctcgaaactctgcaggaagagaagcccgaactgacggtggtgtttgaaccctcatggtag

SEQ ID NO: 126620 - DNA, 2769 bp, synthetic construct
  misc_feature 1..2769: note = Description of Artificial Sequence: Synthetic coding sequence
  source 1..2769: mol_type = other DNA
atgaaaatggcaagtacgagatgcaagttagccagatacctcgaggatcttgaggacgttgatctaaagaagttcaagatgcacctggaggattacccgcctcagaaagggtgtatccctcttcccagaggccagaccgaaaaggcggaccacgtggatttagcaactctcatgatcgattttaatggagaggagaaggcgtgggcaatggcggtttggatctttgctgctattaacagaagagacctgtacgagaaagctaaaagagatgagcccaagtggggttctgataatgcccgcgtgagcaatcctacagttatatgccaggaagactcgattgaggaggaatggatgggcctgctggaatacctgagtcgcataagtatctgtaagatgaaaaaagactacaggaagaaatatcggaagtatgtgcgctctaggttccaatgcatcgaagatcgtaacgctcggctgggcgagtctgtctctcttaataaacgctatactagattacggcttataaaagagcataggtcacagcaggagagggagcaggagctactggccatcggaaagactaagacatgtgagagcccggtgtcccctatcaagatggagcttcttttcgaccccgatgacgagcattccgaacccgtccacactgtggtcttccagggcgccgccgggattgggaagacaattctggccagaaagatgatgctggactgggcttctggtacattgtaccaagacagattcgactacctgttctatattcactgccgtgaggtttcactggtgacacaacgaagtctgggtgatttaatcatgagctgctgtcctgaccccaacccccccattcataagattgtgaggaagccatccagaattctattcctaatggatgggtttgatgaactgcaaggagccttcgatgaacacatcgggccactttgtaccgattggcaaaaagccgagcgaggagacatactcctgagcagccttattagaaaaaagctactacctgaggcaagcttgttaatcaccacacggcccgtggctctagaaaaactgcaacatctactggatcatcccaggcacgtggaaatccttggattctcagaagccaagcgtaaggaatacttttttaagtatttttcggacgaggcccaggcccgggcagcattttccctcatccaggaaaacgaagtgctgtttaccatgtgctttatccccctcgtctgctggatcgtgtgtaccgggttgaagcagcagatggagagtggaaagtccctcgcccagacgagcaaaactacgacagcagtatatgtgttcttcctctcatctctcctgcaaccgcgcggtgggtctcaggaacacggcctgtgtgctcatctgtggggactgtgtagcctggcagcagacggtatttggaatcagaagatcctcttcgaggaaagtgaccttcggaatcatggcctgcagaaggctgacgtgtcagcgttcttgcgaatgaatctgttccagaaggaagtagattgtgagaagttctacagtttcatacatatgacattccaagaattcttcgccgctatgtattatctgctggaggaagagaaagagggccggactaacgtaccaggttccaggctcaagctaccgtccagagacgttaccgtgctgctggagaattatggaaagttcgagaaagggtacctgatttttgtggtgcggttcttgtttgggctggtcaaccaggagcgcacaagctacctggagaagaaactgagctgcaaaattagccagcagatccgccttgagttgctcaaatggatagaggtcaaagctaaggctaaaaagctgcagatccaaccatcccagctagaactgttttattgtctgtacgagatgcaggaagaggattttgtccagcgggccatggattacttccccaagatagaaatcaatctgagcacacgcatggatcatatggtctcctcattttgcattgagaactgtcatcgggttgagtctctttcactcggcttcctgcacaacatgcctaaggaggaagaggaggaagagaaagaagggcgacacctggacatggtccagtgcgtgctgccgtcatcatctcatgctgcgtgctcccacggtctggggaggtgcggcctatcgcacgagtgttgcttcgacatatctctggtgctgtcttccaatcagaaattagtggagttggacctctcagataatgccctcggcgattttggaattcggctgttgtgcgtgggactgaaacatctcctctgcaacctgaaaaagctttggctggtcaattctggattgacttctgtgtgctgctcggccttatcctctgtgcttagtactaatcagaacctgactcacttgtacctccgaggaaacacactcggagacaaaggaattaagttgctctgcgaaggattgctgcacccggattgtaagctgcaggttctggaacttgataactgcaatctgactagccactgctgttgggatctcagtacactgttgacatccagccagtccctgcgcaagctttcactgggaaataacgatttgggagatctcggcgtgatgatgttctgcgaggtgctgaagcagcagtcctgtttgctgcagaacttgggattatctgagatgtattttaactatgaaacaaaaagcgctttggagaccttgcaggaagagaagccggagttgacagtggtgttcgagccatcctggtag

SEQ ID NO: 126621 - DNA, 2940 bp, synthetic construct
  misc_feature 1..2940: note = Description of Artificial Sequence: Synthetic coding sequence
  source 1..2940: mol_type = other DNA
atgaaaatggccagcacaagatgtaaactagcaaggtaccttgaggatctggaagacgtcgatttgaagaaatttaagatgcatctggaagattacccccctcagaaagggtgcatccctcttcctagggggcagactgagaaggccgaccatgtggacttagccaccttgatgatagactttaatggcgaagaaaaagcttgggcaatggcagtgtggatattcgctgccattaatcggagagacctctacgaaaaagcgaagagagatgagcctaagtggggaagcgataacgctcgggtgagcaacccaaccgtaatatgtcaggaggacagcatagaggaggagtggatgggactcctcgagtatttgtctcgtatctccatctgcaagatgaaaaaagactatcgcaagaaataccgcaaatacgtgcgatcacgctttcagtgtatcgaggatagaaatgcgagactgggcgaaagtgttagtcttaacaaacgatacactagactcagactgattaaggaacaccggtcccaacaagagcgggagcaggagctgctggccatagggaagaccaagacgtgcgagtctcccgtgagcccgatcaagatggagttgctgtttgaccctgatgacgagcattctgagcctgtacataccgtcgtgtttcaaggggccgcgggaatcggtaaaactattttggcacgtaaaatgatgcttgattgggcaagcggcactctgtaccaggacagatttgattatcttttctatatacactgtcgggaggtttcgcttgttacacagagatccctgggcgacttgattatgtcatgctgtcccgatccgaatccaccaatacacaagatcgtccgcaaaccctctcgtatcctctttctcatggacggatttgatgagttgcaaggcgcctttgatgagcatattggacctctgtgtaccgactggcagaaagcggaaaggggagacatcctattgagctccttaatccgcaaaaagctgcttccagaggcaagcctactgatcacaactcgccctgtggccctcgaaaagctgcagcaccttctcgatcacccccgccacgtagaaattttgggcttcagtgaagcaaagagaaaagaatatttctttaagtacttctctgacgaggctcaggcacgggccgccttctcactcattcaggagaatgaagtcctgtttactatgtgtttcataccactggtgtgttggattgtgtgtaccggcctgaagcagcaaatggaaagcggcaaaagcttggcccagacgagtaagactacaaccgccgtgtacgtgtttttcttatcatctctcctgcagccaaggggaggcagtcaggagcacggcctgtgcgcacacctctgggggctatgttctctggccgctgacggcatctggaaccagaagattctgttcgaggagtctgatctgcgtaaccacgggctgcaaaaggccgacgtcagcgctttcttacgaatgaacttgttccagaaagaggttgattgcgagaagttctactcctttattcacatgacattccaggaattcttcgctgccatgtactacctcctggaagaagagaaagaaggcaggactaacgttccaggtagcaggcttaaactgccttctcgtgacgtgaccgtgctgctggaaaattacggaaagttcgaaaaaggttatttgattttcgtggtccgattccttttcgggttggtcaaccaggaacgcacctcctatctggagaagaagttgagctgcaaaattagccagcagatacggcttgaattacttaaatggatcgaggtgaaagccaaggctaagaaactgcagatccagccttcccagcttgagttgttctactgcctgtatgaaatgcaggaggaagattttgtgcagagggcgatggactattttccaaagattgaaattaacttgtccacccgtatggaccacatggtgagcagcttttgtatcgaaaactgccaccgtgtagagtctttatcactcggcttcctgcataatatgccaaaagaagaagaggaagaagagaaggagggaagacacctggacatggtgcagtgtgtcttaccttcttcctctcatgcagcctgtagccatggtctggtgaacagccatcttaccagctccttctgccggggcctctttagcgtcctctccacttctcagagtttaaccgagctggacctgtccgataattccctaggggaccctggcatgagagtgctgtgtgaaaccttacagcaccccggttgtaatattaggagactgtggttaggacgttgcggcctcagccacgaatgctgcttcgacatctccctggtgctctcctcaaatcaaaagcttgtcgagctagatctttccgacaacgccctcggcgatttcgggatcagactcctatgtgtgggccttaagcacctcttatgtaacctcaaaaaactatggctggtcaacagtggtctcacttcagtgtgctgcagcgcgctttcaagtgtgctgtcaacaaatcagaacctgacgcatctgtatctccgggggaacactctgggcgacaagggaataaaactgctgtgcgagggactgcttcatcccgattgcaagctccaggttctggaactagacaactgtaacttaacatcacattgttgttgggatctgagcacgctgcttactagcagccagtccctacgcaaactcagcctcggtaataatgacttgggtgacctgggcgttatgatgttttgcgaggtgttaaagcaacagtcttgccttctgcagaatctgggactcagcgagatgtatttcaattatgagacaaagtcagcgctggaaacacttcaggaagagaagccggagctgacggtggtcttcgagccttcgtggtag

SEQ ID NO: 126622 - DNA, 2940 bp, synthetic construct
  misc_feature 1..2940: note = Description of Artificial Sequence: Synthetic coding sequence
  source 1..2940: mol_type = other DNA
atgaaaatggcctccaccagatgtaagctggcccgctatctggaggatctggaagacgtagatttgaagaaattcaagatgcatctggaggattaccctccccagaagggctgtattcccctcccaagggggcagacagagaaagccgaccatgtggatctggccacacttatgatagatttcaacggcgaggaaaaggcttgggcaatggccgtctggatattcgcagcaattaaccggagggacctgtacgaaaaagcgaaacgagacgagcctaaatggggttctgacaacgcacgggtgagcaacccgacagttatctgccaggaagattctatagaggaggaatggatgggtttgctggaatacctcagcaggattagtatatgtaaaatgaagaaggactatagaaagaaataccggaagtatgtgagaagcaggttccagtgtatcgaggatagaaatgccaggctgggagagagtgttagcctgaacaagcggtatactagactccggctcatcaaagagcacaggtcacagcaggagcgcgagcaggagcttttggccattgggaagacaaaaacctgcgagtccccggtctcccctataaaaatggagctactttttgaccctgacgatgagcacagcgaacctgtgcacaccgtcgtttttcagggagctgctggaattggcaaaactattctcgcaagaaaaatgatgttagattgggcttcaggtacgttgtaccaagacagattcgactacctgttttatatccattgcagagaggtgtcgctcgttacccagagatctctgggggatctaatcatgtcgtgttgcccagacccaaatccaccaatccacaaaatagtgcggaaaccatcccggatcctgtttcttatggatgggttcgatgagcttcagggtgcatttgacgagcacataggcccactgtgtactgattggcagaaagctgaacgtggggatattctgctgagctctctgattcggaaaaaattgctgccagaagcttcgctgcttataaccactaggccagtggcgctcgagaaactacagcacttgctcgatcatccccggcatgtcgaaatcctgggattttctgaggctaaacggaaagaatatttctttaaatatttttcagatgaagcacaggctagagcggccttctctctaattcaggagaatgaggtgctgttcacaatgtgcttcatccccctcgtgtgctggattgtgtgcaccggcctcaaacaacagatggaatccggaaagtcgctcgcacagacatctaaaaccaccactgctgtttatgtgttcttcctgtccagtttacttcagccacgcggcggatcccaggaacatgggctctgtgctcacctttggggattgtgtagtttagccgctgacgggatatggaaccagaaaatcctctttgaggaatctgacttgaggaatcacggtttgcagaaggcggatgtatccgctttccttagaatgaacctcttccagaaggaggttgactgcgaaaagttctattcttttattcacatgacatttcaagaattcttcgccgccatgtattacttgctggaagaggagaaggaggggcggaccaacgtgcccggctcgcgtctgaaactcccctctagggacgtgacagtgttgctcgagaattacggcaagtttgagaagggatacctgatcttcgttgtcaggttcctatttggtcttgtgaatcaggagaggacaagctatcttgagaagaagctgtcatgtaagattagccagcaaattagactagaactgctcaagtggatagaagtgaaagccaaagccaaaaaacttcagatacagcccagccagctggagttattctattgtctgtacgagatgcaggaggaggactttgtacagcgcgcgatggactattttccaaagattgagatcaacctgagtacacgtatggatcatatggtgtcatcattttgcatagaaaactgtcatagagtagaatcattaagcttaggctttttacacaatatgcctaaagaggaggaggaagaggaaaaagaggggcggcacctggatatggtgcagtgcgtgctgccttcaagttcccacgctgcttgctcccacggccttgtgaatagccacctgacctcctcattttgtagggggcttttcagtgtgctgagcacttcacaaagcctcactgagcttgatctctctgataactctttgggcgacccagggatgcgtgtgctgtgtgagacgctgcaacacccaggatgtaacatccgacggctttggctggggcgttgcgggctgagtcacgagtgctgcttcgacataagtcttgtcctctcatcaaatcagaagctggttgagctagatttgagtgacaacgccctcggagactttggtatcaggcttctctgtgtgggcctgaaacatctgttgtgtaaccttaaaaagctgtggttagttaactcaggactgacatcagtgtgctgctcggcgctgtcgtccgtcctttcaaccaaccagaacctgacccatctttacctcaggggaaatacactcggcgacaaaggcatcaaattactgtgtgagggcctgcttcaccccgactgtaagctgcaagtcctcgaactggacaactgcaatctaacgtctcattgttgctgggatctcagtactctgctgacatccagccagagcctcagaaagctgtcccttggtaataatgatctcggcgatctcggtgtgatgatgttctgcgaagtactgaaacagcagtcttgtttgctccagaacctcgggctgtcggagatgtactttaattacgagacgaagagcgccttagagacactccaggaagagaagcccgagctaactgtggtgtttgaacctagctggtag

SEQ ID NO: 126623 - DNA, 2940 bp, synthetic construct
  misc_feature 1..2940: note = Description of Artificial Sequence: Synthetic coding sequence
  source 1..2940: mol_type = other DNA
atgaagatggcgagcacaaggtgcaagctggctcgttaccttgaggacctggaggacgtggacctgaagaagttcaaaatgcatctcgaggattatccaccccagaaaggttgcatccctcttcctagaggacagacagagaaggctgaccatgtcgaccttgctactctaatgatagattttaatggagaggagaaggcttgggcaatggctgtgtggatcttcgcagcaattaacaggcgggatctttatgaaaaagccaaacgcgacgaacctaagtgggggtctgacaatgctagggtgtctaatccaactgtgatctgtcaggaggactcaatcgaggaagaatggatgggactcctggagtatctatccagaataagcatctgcaagatgaagaaggactaccgaaaaaaatacagaaaatatgtgcgatcccgcttccagtgcatcgaggatagaaatgccagactaggggaatccgtcagtctcaacaagaggtataccaggttgcgcctgataaaagaacatagatcccagcaggagcgcgaacaggaactgctcgctattgggaaaactaagacttgcgagtcaccagtgagtccaattaagatggaactgttattcgacccggacgacgagcactcagagcctgttcacacagtggtatttcagggggctgctggcatcggcaaaactatattagcgcggaagatgatgctggactgggcgtccggaactctatatcaggataggtttgattatctgttttacatccactgtcgagaagtgtccctggtcacgcaacggtcattgggtgaccttatcatgtcctgttgtccggaccctaacccacccatccataaaattgtgagaaaacccagtcgcatattgtttcttatggatggctttgatgagctgcagggtgccttcgatgagcatataggccctttgtgtaccgactggcagaaggccgagagaggcgacattctgctcagctcacttatcaggaaaaaattattgcccgaggccagtctgttaattacaactcggccagttgccctcgagaaactgcagcacctgctcgatcacccacgacacgttgagattttgggtttttcagaggccaaacggaaggagtacttcttcaaatacttctctgacgaggctcaagcgcgcgccgcgttctctctgattcaagaaaatgaggtgttattcactatgtgcttcatccctctggtctgctggattgtttgtacagggcttaagcagcagatggagagcggcaaaagccttgcacaaacatctaaaactaccactgccgtctacgtgttcttcttatctagtctcctgcaacccaggggcgggagtcaggagcatggactttgtgcacacctgtggggactgtgttctcttgcggccgacggcatttggaaccagaagattttatttgaagaaagtgaccttagaaaccacggtttacagaaggccgatgtgtccgctttcctgcgaatgaacctgttccagaaagaggtggactgtgagaaattctactcttttatccacatgacattccaggagtttttcgcggcaatgtattacctactggaggaagaaaaagaaggccggacaaatgttcccgggagcagactcaagctaccctcacgcgatgtgacagttctattggagaattatggtaaatttgaaaagggttacctaattttcgtggtgcgctttctgttcggactggtgaatcaggagcgtacctcttatctggagaaaaagctaagctgcaaaatcagccagcagatcagacttgagctcctcaaatggattgaggttaaggctaaagctaagaaactgcagatccagccctcccagcttgaactgttttactgtctgtacgagatgcaggaagaagacttcgtgcaacgggccatggactactttcccaagattgagattaatttgtcgacacgtatggaccacatggtaagtagtttttgtattgagaactgccaccgggtggagtccctgagtttaggcttcctgcacaacatgcccaaggaagaggaggaggaagagaaggaagggaggcatctagacatggtgcagtgcgtattaccatcatcttcgcacgctgcctgttcccacgggctgggccgttgcggtttatctcatgagtgctgctttgatatctcacttgtgctctccagtaaccagaagttggtcgaattggacctgtctgacaacgcactcggagactttggaataaggctcctttgcgtgggactgaagcatctcttgtgtaatctcaagaagctttggctggtctcatgttgcctgaccagcgcctgctgtcaggacctggcaagcgtgcttagcacctcccatagtctgactcgattgtatgtgggcgaaaatgcgttgggggattcaggggtcgcgattctgtgtgaaaaggctaagaacccacagtgtaatctccagaaactgggcctggtgaattctggcctgacttccgtgtgttgctcagcacttagtagcgtactgtctacaaatcaaaacctgacacacctgtacctgcggggcaatactttgggcgataagggtataaagctactttgcgaaggcctcctgcaccctgactgtaaactacaagtccttgagctggacaactgtaatctgacctcgcattgctgctgggacctgtctactttactgacctctagtcaatctctaagaaaactttcccttgggaacaatgatctcggcgatctgggagtcatgatgttttgcgaggtgttgaaacagcaaagttgtctgctccagaacttagggctgtcagagatgtacttcaactatgaaactaagagcgcgctggaaaccctgcaggaggagaagccagaactcacagtcgtgtttgagccctcttggtag

SEQ ID NO: 126624 - DNA, 3111 bp, synthetic construct
  misc_feature 1..3111: note = Description of Artificial Sequence: Synthetic coding sequence
  source 1..3111: mol_type = other DNA
atgaaaatggcctcaaccagatgcaagctcgctcgttatctagaagatttggaggatgtggacctcaagaaattcaaaatgcatcttgaagattatccaccccagaaagggtgcattcctctgccccggggccagactgaaaaagccgaccacgtggatcttgcgaccctgatgatcgacttcaacggtgaagaaaaagcatgggccatggcggtctggattttcgccgcgatcaataggcgggatttgtatgaaaaagcaaagcgcgacgaacccaagtggggcagtgataacgcacgggtgtcgaatccaacagtcatctgtcaggaagactcaatcgaagaggaatggatgggcctcctggagtacctctcccgcatctcaatttgcaaaatgaaaaaagactaccgcaagaaataccgtaagtatgtcagaagcaggttccagtgtattgaggaccggaatgcacgattgggagagtcagtttccctgaataagcgctataccagactcaggctgatcaaagagcatcgctcacagcaggaaagggaacaggagctgctagccatcggtaagacaaaaacatgtgagtccccggtaagccctatcaaaatggaactgctgtttgaccccgatgatgaacattccgagcctgtgcacaccgtggtgtttcagggtgccgccggtattggcaagacgattctcgcgcgaaagatgatgctcgattgggcatccggcaccttgtatcaagatcgctttgattatctgttttatatccactgccgagaagttagcctggttactcagcgatccctcggagatctcatcatgagctgctgccctgaccccaaccctcctattcataaaatcgtaagaaaaccttcgcggatcctttttctgatggatggatttgacgaactccagggagcctttgatgaacacattggccctctgtgcaccgattggcagaaggccgagaggggcgatatcttactgtcttcattgatcaggaagaagctcctgcctgaagcgtctctactcatcaccactaggccagtcgctctggaaaaactgcaacacctgttagaccacccaaggcacgtggagattttgggcttcagcgaagcgaagaggaaagagtattttttcaaatatttctctgacgaagcccaagctcgcgctgcgttctctctgatacaagaaaatgaagtactcttcacgatgtgttttatcccattggtgtgttggattgtgtgcacaggcctgaagcagcaaatggaaagcgggaaatcgctggcacagacaagcaaaaccaccactgctgtgtatgtcttcttcttgagttctctcctccagccgcggggtgggagccaggaacacggactatgtgctcacctttgggggttatgttcactcgcagcggacggaatttggaatcagaaaatcctcttcgaggaaagcgacctcagaaatcacggcctccagaaggcggacgttagcgcgtttcttagaatgaatttatttcagaaggaagttgattgtgaaaagttttactctttcattcatatgacttttcaggaattctttgctgctatgtattacctgctcgaggaagaaaaggagggtaggaccaacgtgcccggcagccggctgaagctgccctcaagggatgtcaccgtgttactggagaattacgggaagtttgagaagggttacctcatttttgtggtacgattcctcttcggacttgtcaaccaagagagaaccagctatctcgagaaaaagctgagttgtaaaatctcacaacagatcaggctggaactgctcaagtggatagaggtgaaagccaaagctaaaaaactgcaaatacaaccttcacaattggagttattctactgtctgtacgagatgcaggaggaggacttcgttcaaagggctatggattatttccccaaaatcgagattaacctttctactaggatggaccatatggtttcatccttttgcattgagaattgccaccgagtggaaagcctctctctgggctttcttcacaacatgccaaaagaggaggaggaggaagaaaaggaaggcagacacctggacatggtacagtgtgtccttccatccagctcacatgccgcttgcagtcatggcctggttaacagtcacctgacttctagcttctgccgaggactgtttagtgtactgtctacaagccagagccttaccgagttagacttgtcagataattcattaggtgaccccggcatgagggtactgtgcgaaactcttcagcaccccggttgcaacattcgccgcctgtggctgggacggtgtgggttatcacatgagtgttgctttgatattagcctggtcctttcatctaatcagaagttggtcgaactggacttgtcagacaacgcattaggcgactttggtatccgccttctttgcgttggcctgaaacatctcctttgcaacctcaaaaagctttggctcgtgtcatgttgtctgacctccgcttgttgtcaggatcttgcctccgtgctatcaactagccactccctgacaagactttacgtgggagaaaatgcccttggcgactccggagtggccatcttatgtgaaaaggccaaaaacccccagtgcaatctccagaaattggggttagtgaactccggcctcacctccgtatgctgcagtgctcttagctccgtcctctccaccaaccagaatttgacccatctgtacctacgagggaatactctgggagacaaaggcatcaaattgctatgtgagggactgctacacccggattgtaagttgcaagttctcgaactggataactgtaatctcacctcgcactgctgctgggatctctccacactgctcacatcgagtcaatccctgcggaaactttcgctcgggaataacgacctcggggacctgggtgtgatgatgttttgtgaggtacttaagcaacaatcctgtctccttcaaaatttgggcctgagtgaaatgtatttcaactacgagaccaaatctgccctcgaaacgctgcaggaggagaagccagagcttacagtggtgtttgaaccctcctggtag

SEQ ID NO: 126625 - DNA, 1512 bp, synthetic construct
  misc_feature 1..1512: note = Description of Artificial Sequence: Synthetic coding sequence
  source 1..1512: mol_type = other DNA
atggagtacatggcagagagtactgacagatctcctggccacatcctgtgctgcgagtgcggggtgccaattagccccaatcctgccaatatctgcgtcgcctgtctgcgctccaaggtggatatcagccagggtattcctaaacaggtgagtatctcgttctgcaagcagtgtcagcgctatttccagccccctgggacttggatccagtgtgcactggagtcaagggaactcctggctctctgcctcaagaaaattaaagctcctctttctaaagttaggttggtggatgctgggttcgtttggacggagccacatagcaagaggctgaaagtgaagctcaccatacagaaagaagtgatgaacggtgcgatcctccagcaagtattcgtagtggactacgttgtccagagtcagatgtgcggtgactgccaccgagtagaagccaaggacttttggaaagctgtgatacaggtgcgacaaaaaacacttcacaagaagacattctactatcttgagcagctcattctgaaatatgggatgcaccagaatacgttgagaattaaagagattcacgacggactggacttctattactcctctaaacaacacgcccagaaaatggtagaatttctacagtgcacagtcccttgccgctacaaggcaagtcagcggctcatatcccaggacatacattcaaatacctataactacaaatctacattcagcgtggagatagtgccaatatgcaaggataacgtggtttgtctgagcccaaagctggcccagtctttgggtaatatgaatcaaatttgtgtatgcattagagtcacttcagctatccatcttatcgatcccaacaccttgcaggtagccgatattgatgggtccaccttttggagccacccgttcaacagcctgtgccatccgaaacagctggaggagttcatcgtcatggaatgtagcatcgtccaggatatcaaacgggcggccggcgccggaatgatctccaaaaagcatacactgggggaggtttgggtccagaaaacctccgaaatgaataccgataagcaatacttctgtcgcactcacctgggccaccttctaaatcccggagacctggtacttggcttcgacctcgctaattgtaacctcaatgatgagcatgtcaataagatgaactcagatcgcgttcccgacgttgtcctcatcaagaagtcctatgaccggacgaaaaggcagcgaagaagaaactggaagttgaaggagctagccagagagcgcgaaaacatggatactgacgacgaaagacaataccaggacttcttagaggatctggaagaggacgaggcaatcaggaaaaatgtcaatatatacagagacagcgcaatccccgtggagtcagataccgatgatgaaggagctccccggattagccttgcagagatgctggaagatttgcatattagccaggatgccacaggcgaggaaggcgcttccatgctgacatag

SEQ ID NO: 126626 - DNA, 1512 bp, synthetic construct
  misc_feature 1..1512: note = Description of Artificial Sequence: Synthetic coding sequence
  source 1..1512: mol_type = other DNA
atggaatatatggcagagtcaaccgaccggtctcccggtcatatcctgtgttgtgagtgtggtgtaccgatttcacccaatcctgccaacatctgcgttgcctgtttacgctcaaaggtcgatatcagccaaggcatacccaagcaggtgtcaattagcttttgtaaacagtgccagcgctattttcagccacctggaacttggatccagtgtgccttggaaagtcgcgagctattggcattgtgcctgaaaaaaataaaagcacctctcagcaaagtgagactggtagatgcggggtttgtatggacagaaccgcactcaaaacgcctaaaggtgaagctgaccattcagaaagaagtcatgaacggcgcaatccttcagcaggtgttcgttgttgactacgtagtccagtctcagatgtgcggcgactgccaccgagtagaggccaaggatttttggaaagcagttattcaagtgcggcagaaaacactacacaagaagacattctattatctagagcaacttatcctcaagtatggcatgcaccaaaacaccctaagaattaaggaaatccatgacggcttggacttttattacagctctaaacagcacgctcagaaaatggtggagttcctccaatgcaccgtgccctgtcggtacaaggcttcacaacggctgattagtcaagacatacattcgaatacttataattacaagagcacattttcagttgagatcgttcccatatgcaaggacaatgttgtgtgcctgagccctaaacttgcccagtctttgggaaacatgaaccagatttgcgtctgcatacgagtgaccagtgcaatccacctgatcgatccgaacacactgcaagtggccgatatcgacggaagcacgttttggagtcatccgttcaacagcctttgccatcctaagcaactggaagagttcatagtgatggagtgctcaatcgtgcaagacataaaacgcgctgcaggagcaggtatgatctcaaaaaaacacactcttggtgaggtgtgggtacaaaagacttcagagatgaacacagacaagcagtatttctgtcgcacacacctcggtcatctgctgaatcctggggatttggtgctaggattcgatctggccaactgtaacctgaacgacgagcacgtaaataagatgaactccgaccgcgtccccgatgtcgtgttgattaaaaaatcctacgacaggacaaaaaggcagagaaggcggaactggaaactgaaggagctggccagggaacgtgagaatatggacactgacgacgaaaggcagtatcaggactttttggaagacctggaggaagacgaagcgattcgtaaaaatgtaaatatttaccgcgattctgctattcccgtagaaagcgacaccgatgacgagggggctccccggatttccctggccgagatgctagaggacctgcacatttctcaggatgctacgggcgaagagggggcatctatgctgacgtag

SEQ ID NO: 126627 - DNA, 471 bp, synthetic construct
  misc_feature 1..471: note = Description of Artificial Sequence: Synthetic coding sequence
  source 1..471: mol_type = other DNA
atggagtatatggctgagagtactgacaggtcacccggccatattctttgttgcgagtgtggagtaccaatctctcccaaccctgctaacatttgtgtcgcttgtctgcgaagcaaagtggacatatctcaagggattccgaagcaggtgagtatctccttttgcaaacagtgccagcgttacttccagccccccgggacttggattcaatgcgccctggaaagcagagagctgctggccctatgcctgaagaaaataaaggctcctctgtccaaagtgagattggtggatgcaggctttgtctggacagagccacactcaaaacgactgaaggtgaaactgactatccagaaggaagttatgaatggggctattctgcagcaggtcttcgtggtagattacgtcgttcagtcacagatgtgcggtgactgtcatcgcgttgaagcaaaagacttttggaaggccgtatag

SEQ ID NO: 126628 - DNA, 657 bp, synthetic construct
  misc_feature 1..657: note = Description of Artificial Sequence: Synthetic coding sequence
  source 1..657: mol_type = other DNA
atggaatacatggccgaaagtaccgaccgtagtcctggacacatattatgctgcgagtgtggggttcccatttccccgaaccccgccaatatctgtgtggcctgtctccgtagtaaagtcgacatatcacaggggatcccaaaacaagtctccatctccttctgcaagcagtgtcagcggtactttcagccacccggaacctggatccagtgtgctttggaatcgcgggagctgctagcgctgtgtctgaagaagataaaggcaccactcagtaaagtcaggctcgttgacgccgggttcgtctggactgaaccacactcaaaaaggctgaaagtcaagcttaccatccagaaggaggtcatgaacggcgctattctgcagcaggtcttcgttgtcgactatgtggtacagtctcagatgtgcggagattgtcaccgcgtggaagcaaaagacttttggaaggccgttatccaggtgcggcagaaaacgctgcataagaagaccttctactatctggaacaacttatcttgaagtacggaatgcaccaaaacactctgagaataaaggaaattcatgacggccttgacttctattattcaagtaagcagcatgcccagaaaatggtcgagtttctccagtgcactgtgccctgctag

SEQ ID NO: 126629 - DNA, 297 bp, synthetic construct
  misc_feature 1..297: note = Description of Artificial Sequence: Synthetic coding sequence
  source 1..297: mol_type = other DNA
atggagtatatggccgaatccacagatcggagtcctgggcacattctctgttgcgaatgcggagtgcccatttctcctaatccggccaatatttgcgttgcatgtctgcgctccaaagtcgatataagccagggaatcccgaagcaggttagtataagcttctgtaaacagtgtcagcgttactttcagccacccggcacatggattcagtgtgccctggagtctcgcgaactgttggctctgtgtcttaagaagattaaagcaccactgtccaaagttcgtctggtggacgcctag

SEQ ID NO: 126630 - DNA, 489 bp, synthetic construct
  misc_feature 1..489: note = Description of Artificial Sequence: Synthetic coding sequence
  source 1..489: mol_type = other DNA
atggaatacatggcagagagcacagaccggtctccaggccatatactatgttgtgagtgtggcgtgccgatttccccaaacccagctaacatttgcgttgcctgcttacgctccaaggtggacatcagtcagggcatccctaaacaggtcagtatctccttttgtaaacaatgccagcgctacttccagccccccggcacatggattcagtgcgcactggaaagtcgtgagctcctcgccttgtgcctgaagaagattaaagcccccttatctaaagtacgactcgtcgatgcaggattcgtgtggactgaaccgcactctaagaggctgaaggtgaaacttacgatacagaaggaggtaatgaacggtgcgatcctccagcaggtgttcgtggttgattatgtcgtccagtctcagatgtgtggcgactgccacagggtcgaggcaaaagatttttggaaagcggtgatccaggtacgccagaaatag

SEQ ID NO: 126631 - DNA, 657 bp, synthetic construct
  misc_feature 1..657: note = Description of Artificial Sequence: Synthetic coding sequence
  source 1..657: mol_type = other DNA
atggagtacatggctgaaagcacagatcgtagccctgggcatatactttgttgtgaatgcggagtcccgatctccccgaacccagcaaacatttgcgttgcttgtctacgttccaaggtggatatttctcagggaataccaaaacaagtcagcatcagcttctgtaaacagtgtcagcgctacttccagcctcccggcacgtggattcagtgcgctcttgaatcccgcgagttgttggccctgtgccttaaaaagataaaagcaccactctctaaagttcggctggtcgatgcaggattcgtttggaccgaaccgcattctaaacggctcaaagttaagctgactatacaaaaggaagttatgaacggggccatcctgcagcaagtttttgtggtcgactacgtggtgcagtcccagatgtgtggggactgtcatagagtggaggccaaggacttctggaaagcagtcatacaagtgcggcaaaaaactctacataaaaaaaccttttactacctggaacagctaattctgaaatatgggatgcaccaaaatactttaagaattaaagaaatccacgatggactggatttttactactcctccaagcagcacgctcaaaaaatggtggagtttctccaatgcaccgtgccatgttag

SEQ ID NO: 126632 - DNA, 1152 bp, synthetic construct
  misc_feature 1..1152: note = Description of Artificial Sequence: Synthetic coding sequence
  source 1..1152: mol_type = other DNA
atgaacggcgcaatattgcagcaagtctttgtcgtggactatgtggttcaaagtcaaatgtgcggcgactgtcaccgcgtcgaggcaaaggacttctggaaagcagtgatacaagtccgccagaagaccctgcataaaaagacgttttactacctagagcagctcattctgaagtacggcatgcaccaaaacactcttaggataaaggagattcatgacggcctggacttctactacagctcaaagcagcatgcccagaagatggtcgaattcctccaatgcactgtaccatgcaggtataaggcatcccagcgcttgattagtcaggatatacacagcaatacatacaattacaaatcaaccttcagcgtggaaatcgttccaatttgtaaggacaatgtggtgtgcctgtctcccaagttagcacagagcttgggcaacatgaatcaaatctgcgtttgtatcagggtgacttctgctatccatctaatcgatccgaacactctgcaagttgccgacatcgatggatcaactttctggagtcacccgttcaatagtttgtgccacccaaaacagttagaggagttcatcgtgatggagtgcagcatagtgcaagacattaaacgtgccgccggcgccgggatgatctcaaagaagcacaccttaggcgaggtgtgggtccagaaaacgagtgagatgaatacagacaagcagtacttctgcaggactcacctgggccacctcctaaaccctggcgacctcgtgttagggttcgacctggcaaattgcaacctgaacgatgagcatgtcaacaaaatgaattccgaccgggtacctgacgtcgtgctgatcaagaagtcatacgatcgtactaagagacagcggaggagaaattggaaactgaaagaactcgccagagagcgcgagaatatggacactgatgatgagaggcagtaccaggattttctggaggacctggaagaggacgaggcgattcggaagaatgtgaatatttatcgagacagtgccataccagtcgaatcagacacggatgacgaaggggcaccgcgtatctcactagcggagatgctagaagacttacacatctcacaagatgccacaggggaagagggcgcaagtatgttaacgtag

SEQ ID NO: 126633 - DNA, 2949 bp, synthetic construct
  misc_feature 1..2949: note = Description of Artificial Sequence: Synthetic coding sequence
  source 1..2949: mol_type = other DNA
atgtccagtaagatggtgatcagcgaacctggtctcaattgggacatctctcctaaaaacggcctgaaaacctttttttctagagaaaattacaaggaccatagtatggcgcctagcctgaaggaactgcgcgtgttatctaatcggagaatcggcgagaacctaaatgccagtgctagctcagttgagaatgaaccggctgtatcaagtgcgacccaggcgaaggagaaggtgaagacaacaattggtatggttctgctgcctaagccccgagtcccctacccgagattcagccgcttctcccagagggagcagcggagttatgtcgatctcttggttaagtatgccaaaatacccgcaaattccaaggcagttggaatcaataaaaatgactacctgcagtatcttgatatgaaaaaacacgtgaatgaagaagtgaccgaattcctgaaatttctccagaatagcgctaagaagtgtgcacaagattataatatgctctcagatgacgcccgcctgttcactgaaaagattctgcgtgcttgcattgaacaggtcaagaagtactcagaattctataccttgcacgaggtgactagtctgatgggcttctttccattccgggtggagatgggattgaagctcgaaaagactttgttggcattaggctctgttaagtatgtcaagactgtattcccatctatgcctatcaaattacaactgtcaaaggacgatattgccactatagagacttctgagcagactgcggaggctatgcattacgacatatcaaaggaccctaacgcggaaaaactggtttcccggtaccatccacaaatcgccttgacctcccagtcgcttttcactttgttgaacaaccatggaccaacatataaagagcagtgggagatccccgtgtgcatccaggtcatcccagtggcggggtctaagcctgttaaagtgatatatataaattcgccactgccccagaagaagatgacaatgagagagcgcaaccaaatctttcacgaggtgccgctgaaattcatgatgtctaagaacactagcgtacccgtgtccgccgtctttatggacaaaccagaggagttcatttccgaaatggatatgagttgcgaagtgaacgagtgccgcaagatcgaatccctggagaacctatatcttgacttcgatgatgacgtgactgagttggagacttttggggtcactaccacgaaggtatccaaatccccatcacctgcatcaacatccacagttcctaatatgaccgatgcaccgacggccccaaaggccgggacaactacagtcgccccttctgctcccgacattagtgcaaatagccgcagcttgagccagattctcatggagcagcttcaaaaggaaaaacaattggtcaccgggatggatggtggacccgaagaatgcaagaacaaggacgaccagggatttgagagttgtgaaaaggtgtcaaatagcgacaagccgctgatccaagactcagacctcaaaacttcagatgccctgcagctggagaactctcaggagatcgaaactagtaataaaaatgatatgactattgatatcctccatgctgacggtgagcgcccgaacgtattagagaatttagataattctaaagaaaaaactgtcggcagtgaagctgccaagaccgaggacactgtactgtgttccagcgataccgacgaagagtgcctcatcatcgatactgagtgcaagaacaattccgacgggaaaactgccgtggtaggtagtaatctatccagcagaccagcctctccaaactctagttctggccaggccagcgtggggaatcagactaacactgcttgctctcctgaggagtcttgcgtgcttaagaaacctattaaaagagtgtacaaaaagttcgatccagtgggagaaatccttaaaatgcaggatgagctgctgaaacctatttcacgaaaagtgcccgagctccctctgatgaacctggaaaactccaagcagccaagcgtgtccgaacagctgtccggcccaagcgattcctcctcctggcccaagtcaggctggccatccgccttccagaaacctaagggccggcttccctacgagctgcaggattacgttgaggacacaagcgagtacctggcgccgcaagaagggaatttcgtttacaagctgttctctctgcaggaccttttactcctggtccggtgcagtgtccagagaattgagacccggccccgttctaaaaagagaaagaagatcaggcgacagttccctgtttatgtactgccaaaggtagaataccaggcatgttacggggtggaggccctgaccgaatccgaactttgcagattgtggaccgagagcctgctgcacagtaattccagcttttatgtcgggcacattgacgcctttaccagtaagctgttcctcctggaggaaatcacgagcgaagaattgaaggagaaattaagcgccctgaaaatttcaaatctcttcaacattctgcagcacatcttgaagaagttgtcttccctgcaggaaggctcttatctgttgtctcacgcggcagaggactccagcttactgatctacaaagcttccgatggcaaagtaacccgtacagcatacaacctctacaagactcactgcggactccctggtgtcccttcctcgctctccgtaccatgggtgccactcgatcccagcctgcttctgccataccacatccatcacggcaggatcccatgtacttttccacccaagtcccttgacacaacgacgcagcagaagataggggggacacggatgcccaccagaagccatcgtaatcccgttagtatggaaacaaaaagcagctgcctccctgctcagcaagtggagacagagggagtggctccccacaagagaaagattacctag

SEQ ID NO: 126634 - DNA, 2538 bp, synthetic construct
  misc_feature 1..2538: note = Description of Artificial Sequence: Synthetic coding sequence
  source 1..2538: mol_type = other DNA
atgaaaaaacacgtgaacgaggaggtgacagagtttctgaagttcctgcagaattccgccaaaaaatgcgcccaggattataatatgctgtctgacgacgctaggctattcaccgaaaagatcctccgcgcatgcattgaacaggtgaaaaagtacagtgagttttacacgctgcatgaagtaacgagcttgatgggcttctttccctttcgtgttgaaatgggcttaaaacttgaaaaaacgcttctggctttgggctctgtgaaatacgtaaaaaccgtgttccccagtatgccgattaaactgcaactgagtaaggatgatatcgctactattgaaacttctgagcaaaccgctgaggccatgcactatgacatctctaaggaccctaatgcagagaaattggtgagccggtaccatccgcagattgcgctgacatcacagtctctgtttaccctgctgaacaatcatggcccaacctacaaggaacaatgggaaatcccagtttgtattcaggttatcccagtggcgggatcgaagcccgtgaaggttatttacatcaattcaccactacctcaaaaaaagatgaccatgagagaaaggaaccaaatcttccacgaagtgcctctgaagttcatgatgtccaaaaacacatccgtgccagtgtctgccgtgtttatggacaaacccgaggaatttatctccgaaatggatatgtcatgtgaagttaacgaatgccgcaagattgaatcactggaaaatctgtaccttgatttcgatgacgatgtgactgagctggaaaccttcggagtgaccaccacaaaggtctccaaatcaccatcaccggccagcacttccacggtccccaacatgacagatgcgcccacagcccccaaggccggtacaactactgttgcaccatctgcgcctgacatttctgcaaactcacggagtctgtcacagatcttaatggagcagctgcaaaaagagaaacagctggtcacagggatggacggcgggccagaggaatgcaaaaacaaggatgaccaggggtttgagtcatgtgaaaaggtgtccaactcagataaacctttaatacaagacagtgacctgaagacgtctgatgcactgcagctggaaaatagtcaggaaattgaaacctccaataaaaacgacatgacaatcgatattctacacgccgacggcgaaaggcccaatgtcttagagaacctcgacaactccaaggagaaaactgtgggcagcgaggccgctaaaaccgaagacacagttctttgtagttcagatactgatgaagagtgtcttatcatagacactgagtgtaagaataattctgacggcaagacggctgtcgtgggttctaacctctcctcacgacccgccagtcctaatagctcaagcggacaggcttccgtaggaaatcagactaacacagcttgtagccccgaagagtcatgcgtgctgaagaagccaatcaagcgtgtctacaaaaaatttgatcccgttggggagatcctgaaaatgcaagatgaactcctgaagcccatcagccgcaaagtgcctgagctgcctctgatgaacctcgagaactccaaacagccgagcgtatcagaacagctcagcgggccatccgattcgtcttcttggcccaaatccggctggccatcagcttttcagaagccaaagggacgcttaccttatgagcttcaggactacgttgaagataccagcgaatacctggccccacaggaaggcaatttcgtgtacaagctcttttccctccaagacctgctcctcttggtccgatgtagcgtgcagcgaatagagaccagaccgaggtccaagaagaggaagaagataaggcgacagtttcccgtctatgtcctgccaaaagtggagtaccaagcttgttacggggtcgaggcgctgactgaatccgagttgtgtcgactgtggactgaaagccttttgcacagcaattcaagcttctacgtcggacacatcgacgctttcacttcaaagctgttcttacttgaggagatcacttcagaagaacttaaggaaaaactgagcgcattaaagatttccaatctttttaacatcctccagcatatcttgaagaaactgtcttcactccaagaggggagctacctgctgtcacacgcagcagaggatagctctctgctgatctataaagcctctgatggcaaggtcacccgtacagcctataatctgtacaagacgcactgcgggctgccaggagttcctagcagtctgtccgtcccatgggtccccctggatccttctctgctattaccataccacatccaccatggcagaatcccctgtaccttcccaccaaaaagccttgacacgaccacccaacagaagatcgggggaacacgtatgccaacacgctcgcaccgcaatcctgtgtctatggaaacaaaatcaagctgtttgcctgcccagcaggttgaaaccgagggagtcgcaccacataaacggaagatcacctag

SEQ ID NO: 126635 - DNA, 1017 bp, synthetic construct
  misc_feature 1..1017: note = Description of Artificial Sequence: Synthetic coding sequence
  source 1..1017: mol_type = other DNA
atgtcaagtaaaatggtcatctcagagccaggcttaaactgggacatctcccctaagaacggacttaagactttcttctcccgcgagaactataaggaccacagcatggccccctcactcaaagagcttagagttttaagtaaccgcagaatcggggaaaatctgaatgcatcagcatccagcgttgagaatgaaccagcagtgagcagcgcaactcaagccaaagaaaaagtaaaaacaaccatcggcatggtgcttttacccaagccccgggtgccttaccctagatttagtcgttttagccaacgcgaacagcgctcttacgttgacctgctcgtgaaatacgccaaaatccctgcgaactctaaagctgttggaatcaacaagaatgactacttgcagtacctcgatatgaagaagcacgtcaatgaagaggttacagagttcttgaaattcttgcaaaattccgccaaaaaatgtgcccaagattacaatatgctatccgatgatgcccggctgttcaccgaaaagatactccgtgcctgtatagagcaggttaaaaagtattctgagttttacaccctccacgaagtgacgtccctgatgggtttctttccattcagggttgaaatgggattgaagctggagaagacacttctggcactgggctccgtcaagtatgtcaagactgtgttcccatccatgccgattaaactgcagctttccaaggacgacatcgccaccatagagacctccgaacagaccgcagaagccatgcactacgacattagtaaggaccccaatgccgagaaactggtgagtaggtatcatcctcaaatcgcccttactagtcagtctctttttaccctgctgaacaatcacggccccacgtataaggagcagtgggagataccagtttgtatccaggtgatccctgtcgccggctccaaacccgtgaaggtgatttacattaattcaccattaccacagaaaaaaatgactatgagggagagatag

SEQ ID NO: 126636 - DNA, 438 bp, synthetic construct
  misc_feature 1..438: note = Description of Artificial Sequence: Synthetic coding sequence
  source 1..438: mol_type = other DNA
atgtcatcaaagatggtgatctcagagcccggtctcaattgggacattagccccaaaaacggactcaagacttttttctccagagagaattataaagatcattctatggcaccttctctgaaggaactgagagtactcagcaacagacggatcggagaaaacttgaatgccagtgcatcctccgtggagaatgagccagctgtctctagcgccacacaggcaaaggaaaaggtcaaaactaccatcgggatggttttgctgccgaaaccccgagtcccttacccaaggttctctcgattctcgcagagggagcagcgtagttacgtcgacctcctggtcaagtacgctaaaatcccagccaactccaaagccgtcggcatcaacaagaatgactacctgcaatacctggatatgaagaaacacgtcaacgaagagtag

SEQ ID NO: 126637 - DNA, 300 bp, synthetic construct
  misc_feature 1..300: note = Description of Artificial Sequence: Synthetic coding sequence
  source 1..300: mol_type = other DNA
atgagctctaaaatggttatctccgagcccggactcaactgggacatctcaccaaagaacggacttaagacattctttagccgcgagaattacaaagaccacagcatggctccatctctgaaggagctacgagtgctttctaatagacggatcggcgaaaacctaaatgccagcgccagttccgtggagaatgagccagcagtttcatcagcaacccaggcgaaagagaaagtgaaaacaaccattggtatggtcctgctcccaaagccaagagttccctatccgaggttttcacgatag

SEQ ID NO: 126638 - DNA, 285 bp, synthetic construct
  misc_feature 1..285: note = Description of Artificial Sequence: Synthetic coding sequence
  source 1..285: mol_type = other DNA
atgtccagcaagatggtgatcagtgagcccgggctgaattgggacatctctcctaagaatggcctgaagaccttttttagccgggaaaattacaaggatcattccatggccccatctctaaaagagctgcgagtgctatcgaaccgaaggatcggggagaatcttaatgccagcgccagctcagtggagaacgaacctgcggtgtcatccgccacgcaggcgaaggaaaaggtcaaaactaccattggcatggtgctattgcctaaaccccgcgtcccctactag

SEQ ID NO: 126639 - DNA, 846 bp, synthetic construct
  misc_feature 1..846: note = Description of Artificial Sequence: Synthetic coding sequence
  source 1..846: mol_type = other DNA
atgggacagaagaaacagaggcctgcgcgggccggtcagccacactcctcatctgatgccgcccaagctcctgcagaacagccgcacagctcaagcgatgctgcccaagccccatgcccacgagagagatgtctgggacccccaacgacgccgggaccttatcgctcaatctatttctcttctcccaagggccatcttacacggttaggccttgagttctttgaccagccagccgtccccttggccagggcattcctgggccaggtgctcgtgagacggttacccaacggcactgaactgagagggaggatcgtggagaccgaagcctacctgggtcctgaagacgaagccgcacattcaagggggggccgccaaactcctcgcaacaggggaatgttcatgaagcccgggacattatacgtgtacattatttatggcatgtacttctgtatgaacatcagttctcagggcgacggtgcctgcgttctccttcgcgctctagaacccctggaagggctcgaaacaatgaggcagctacgctctactctcaggaaaggcaccgcgtctcgtgtcctaaaggatcgcgaactctgttccgggcccagtaagttatgtcaggcccttgctatcaacaagtccttcgaccagagagatcttgcacaggatgaagctgtgtggctcgagcgaggtcctctggagccttcagaaccagcggtggttgccgctgccagggtcggtgtgggccacgcaggagagtgggctagaaagcctttgaggttctacgtcagaggtagcccatgggtgtccgtcgtggatcgggttgccgagcaagacacacaggcctag

SEQ ID NO: 126640 - DNA, 924 bp, synthetic construct
  misc_feature 1..924: note = Description of Artificial Sequence: Synthetic coding sequence
  source 1..924: mol_type = other DNA
atggaggctgacaaggacgacactcaacagatactgaaggagcactctcccgatgaatttatcaaggatgagcagaacaaaggactgattgatgagatcacgaaaaagaatattcagctgaaaaaggaaattcagaagctagaaacggaactgcaggaggctaccaaggaatttcagatcaaggaggatatccctgagacgaagatgaaatttctgtctgttgagacgcccgaaaacgactcgcagctttctaatatctcttgcagcttccaggtcagtagcaaggtcccgtatgaaattcagaaaggccaggccctaattacatttgaaaaggaagaagtcgcgcagaatgtcgtaagcatgtctaagcaccacgttcagattaaggacgtcaatttggaggtgactgctaagcctgtgcctctgaattccggtgtgcgcttccaggtgtacgtggaggtgagcaaaatgaagatcaacgtcactgagattccagacaccttacgagaagaccagatgcgcgacaagctcgaactcagtttcagcaagagcagaaacggggggggggaagtcgaccgagttgactatgatcgccagtccggaagcgccgtcatcaccttcgttgagattggtgtggctgataaaattctcaagaagaaggagtaccctttgtacatcaatcagacttgccaccgggttaccgtgagcccatacactgaaattcacctgaaaaagtatcagatcttttcggggacttccaagcgcactgttctcctcactggcatggaaggaatccagatggacgaggagatcgtggaagaccttattaacatccactttcagagagcaaaaaacggaggcggtgaagtggatgtggttaagtgttcactggggcagccccacattgcttatttcgaagagtag

SEQ ID NO: 126641 - DNA, 90 bp, synthetic construct
  misc_feature 1..90: note = Description of Artificial Sequence: Synthetic coding sequence
  source 1..90: mol_type = other DNA
atggaggccgataaggacgatacccagcagattttgaaagagcattcccccgatgagttcatcaaagacgaacagaataaagggctgtag

SEQ ID NO: 126642 - DNA, 1185 bp, synthetic construct
  misc_feature 1..1185: note = Description of Artificial Sequence: Synthetic coding sequence
  source 1..1185: mol_type = other DNA
atgagcagggaaatgcaggatgtagaccttgcggaggtcaagccactggtggagaagggcgagaccataacgggtctgctgcaggagtttgatgttcaggagcaagatatcgagacactacatggatccgtgcacgtcactctgtgcggaacacccaaaggcaaccgacccgtgattttaacttatcatgacattgggatgaaccataagacgtgctataacccgctgtttaattacgaagacatgcaagagattacccagcactttgccgtctgtcatgtggacgcaccagggcagcaggatggcgccgcgtcctttcctgccgggtacatgtatccctccatggaccagttagctgaaatgttgcccggggtgttgcagcagtttggcttaaagtccattattgggatgggtaccggagccggcgcttacatcctcactcgatttgcgcttaataaccctgagatggtcgagggcctggtgctaattaatgtgaacccttgtgccgagggttggatggactgggctgcatctaagatttccggctggacacaggctctgcccgacatggtcgtgtcgcacctgttcggtaaggaggaaatgcagagtaacgttgaggtggtgcatacctacagacagcatattgttaacgatatgaatcctggcaacctccatttgtttattaacgcctacaacagcaggcgcgatctcgagatagaacggcccatgcccggaactcataccgtaacgcttcagtgccctgctctgttggtcgtgggagactcctcacctgccgttgatgccgttgtcgagtgtaattcaaagctggatcccacaaagaccactcttctcaagatggcagattgtggcggacttccccagatctcgcagcccgcaaaactggccgaggcttttaagtatttcgtgcaggggatgggctatatgccgagtgccagcatgacccgattaatgcgctccaggactgcaagcgggtcgtctgtcacctccctcgacgggactcggtcaagatcccatacgagcgaaggcacccggtctcgctcacatactagtgagggaaccagaagcaggtcccatactagtgagggtgcgcatctggatatcacacctaatagtggcgccgccggaaactcagctggacctaagtctatggaagtgtcctgttag

SEQ ID NO: 126643 - DNA, 975 bp, synthetic construct
  misc_feature 1..975: note = Description of Artificial Sequence: Synthetic coding sequence
  source 1..975: mol_type = other DNA
atgtctcgtgaaatgcaggacgttgacctggcagaagtgaaaccccttgtcgagaaaggggaaaccattaccggattgctgcaggagttcgacgtccaggaacaagacatagaaacactacacggttctgtccacgtgaccctgtgtggaaccccaaaaggcaacagaccggtaatcctcacgtatcatgatattggtatgaaccataagacatgcgcttacatcttgactagatttgccctgaataaccctgagatggtggagggattggtcctgatcaacgtgaatccctgtgccgagggttggatggattgggctgcttctaagatctcggggtggacccaggcactgccagatatggtcgtgagtcacctgtttggcaaagaagagatgcagtccaacgttgaagtcgttcacacatatagacaacacattgtgaacgatatgaatccgggaaatttgcacctctttataaacgcttataattctagacgagatttagaaatcgaacgtccaatgccgggaacacacaccgtaacccttcagtgcccagccctcctcgtggttggagattcttccccggcagtggatgcagtcgtggaatgcaattccaagttggatcctacaaaaacaaccctgctcaaaatggcagattgcggtgggctccctcagatatcacagcccgcaaaacttgctgaggccttcaaatattttgtccaaggcatgggatatatgcccagcgctagtatgacaaggctgatgaggtctcgcacagcctctggctctagtgtgacctccctagacggcacgcgttcccgctctcacacgtctgaagggactaggtctcggtcgcacacctcagaggggactcggagccgtagccacacctcagaaggggctcacctggatattactcctaattccggcgccgccggtaattctgcaggccccaaatctatggaagtaagctgttag

SEQ ID NO: 126644 - DNA, 1185 bp, synthetic construct
  misc_feature 1..1185: note = Description of Artificial Sequence: Synthetic coding sequence
  source 1..1185: mol_type = other DNA
atgtcacgcgaaatgcaagatgtcgatctggccgaagtcaagcccctggtggagaaaggggagacaatcacggggttactgcaagagtttgacgtccaggagcaggacatcgagacactccacggaagtgtacatgtcacgttatgcggaacccccaagggaaaccggccagtgatcctgacctaccacgacattgggatgaatcataagacttgttacaaccccctatttaactatgaagatatgcaggagattactcaacatttcgcggtttgtcatgtggacgctcccggacagcaggacggggctgcatctttccccgcaggttatatgtaccccagcatggaccaattggctgagatgttgcctggtgtgcttcagcagtttggactaaaatcaattattggcatgggaacaggtgcaggagcgtatattctgacgcgctttgcattgaataatccagagatggtggaggggcttgtactcatcaatgttaacccatgtgctgaaggctggatggattgggccgcctctaaaataagcggttggactcaggctctgccagacatggttgtgagccatttgtttggtaaagaggagatgcagagcaacgtggaagtggtccatacttacaggcaacacatcgtgaatgacatgaaccctggaaacctacatctattcattaacgcctataacagtagacgagacctggagattgagcgccccatgcccgggactcacacggttaccctgcagtgtcccgccctcttggtggtcggggactcatctcctgctgtggatgccgtcgtggagtgtaattcaaagcttgatcctacgaagacgactcttcttaaaatggctgattgcggaggactgccacaaatttctcaacccgccaagcttgcagaggcatttaaatactttgtccaagggatgggctacatgccctccgcgtcaatgacaagactcatgaggtcgcgcactgctagcggcagttctgtgacgtctttggacggtaccaggtcccgcagtcacacttctgaaggcaccaggtcgcggagccatacatccgaaggtactaggagcaggagtcacacttctgaaggggcccacctggacataacccccaattcaggggctgcagggaacagcgctggaccaaaatctatggaagtctcctgttag

SEQ ID NO: 126645 - DNA, 498 bp, synthetic construct
  misc_feature 1..498: note = Description of Artificial Sequence: Synthetic coding sequence
  source 1..498: mol_type = other DNA
atgtctcgggagatgcaagacgtcgatctcgctgaagtcaaacctcttgttgagaagggcgagactattaccgggctgctccaagagttcgacgtccaggaacaggatattgaaaccctgcacgggtccgtccacgtgacattgtgcggcacacctaaagggaaccgacctgtcattctcacataccacgatatcggtatgaaccacaagacttgttataatccactgtttaattatgaagacatgcaggagatcacccaacattttgcggtgtgccacgtggatgcgcctggccagcaagatggggcggccagtttccccgcggggtacatgtacccatcaatggaccagcttgctgagatgttacccggggtcctccagcaatttggcttgaagtcaatcatcggcatggggacaggggccggagcctacattctcaccagattcgccctgaataatccggagatggtcgaggggctggtgctgatcaatgtgtag

SEQ ID NO: 126646 - DNA, 477 bp, synthetic construct
  misc_feature 1..477: note = Description of Artificial Sequence: Synthetic coding sequence
  source 1..477: mol_type = other DNA
atgagtcgtgagatgcaggatgtagacctggctgaggtgaaacctcttgtcgaaaagggcgagactatcaccgggttattgcaggaatttgatgttcaagagcaagacattgagaccttacacggcagtgttcatgtgaccctgtgtggcacgccaaagggcaacagacccgtgatactcacctaccacgacatcggcatgaatcacaagacctgctacaacccgctgttcaattatgaagacatgcaggaaatcacacagcatttcgctgtgtgccacgttgacgccccaggtcagcaggatggtgctgcgagttttccagccggttacatgtacccttcaatggaccaattagcagaaatgctgccaggggtgctccagcagttcgggctcaaaagtatcattggtatgggcaccggggctggagcctacatccttacccggttcgccctgaacaaccccgaaatggtcgagtag

SEQ ID NO: 126647 - DNA, 402 bp, synthetic construct
  misc_feature 1..402: note = Description of Artificial Sequence: Synthetic coding sequence
  source 1..402: mol_type = other DNA
atgagtagggagatgcaggacgtggatctggcagaggtgaagcccctggtggagaaaggtgagacaatcacagggctcctgcaggaatttgacgttcaggagcaggatattgagaccctacatgggagcgttcacgttactctctgcggcacacccaaggggaatcgaccagtgatcctcacctaccacgatatcgggatgaaccacaagacatgctataacccacttttcaactacgaagacatgcaggagattacacagcactttgcagtttgccacgtggacgcccctggccagcaggatggcgcagcttcatttccggctggatacatgtatcccagcatggatcagctcgccgagatgctgcctggtgtacttcagcagtttggcctcaaatcgtag

SEQ ID NO: 126648 - DNA, 477 bp, synthetic construct
  misc_feature 1..477: note = Description of Artificial Sequence: Synthetic coding sequence
  source 1..477: mol_type = other DNA
atgtcccgggagatgcaagacgtggacctcgccgaggtgaaacctttagtggaaaagggcgagacaattacgggcctcctgcaagaatttgacgttcaggagcaggacatcgagacacttcatggctccgttcatgttacgctttgcggtactccaaaaggcaataggcccgtcatcttgacctatcacgacattggaatgaaccacaagacctgctataatcccttgttcaactatgaagacatgcaggagattacacagcacttcgcagtttgccacgttgacgcaccgggacagcaggacggcgccgcttcctttccagccggttatatgtatccttcaatggaccagctggctgagatgctccccggagtgctgcaacagttcggcctcaagtctattattggcatgggtaccggggctggcgcctacattctgactaggttcgcccttaacaatcccgaaatggtagagtag

SEQ ID NO: 126649 - DNA, 669 bp, synthetic construct
  misc_feature 1..669: note = Description of Artificial Sequence: Synthetic coding sequence
  source 1..669: mol_type = other DNA
atggactgggccgccagcaagataagcggatggacgcaggccctgcctgatatggtggtctctcatctgttcggcaaggaggagatgcagagcaatgtcgaagtagtacacacctaccgacaacatatcgttaatgacatgaatcccggcaatctgcatcttttcatcaatgcatataactcacggcgggatctcgaaatcgagagacccatgccaggaacgcacacagtaactctgcaatgtccggctctcctggtggttggagactcatctcccgcagtcgatgcagtcgtcgaatgcaactccaagttggaccctacaaaaacaactttactaaaaatggccgactgtgggggtctcccccagatctctcagccggcgaaactggcagaggccttcaaatattttgttcagggaatgggctacatgccaagtgcctccatgactcggctcatgagatcccggacagcttctggctccagtgtgacatcactcgatggtactaggtccagatcccacacctccgaagggaccaggagccggagtcacacttccgaaggcacccgatcccggagtcacacctctgaaggcgctcatttggatatcactcccaactcaggagccgctggcaatagcgcagggcctaaaagtatggaggtgtcctgttag

SEQ ID NO: 126650 - DNA, 450 bp, synthetic construct
  misc_feature 1..450: note = Description of Artificial Sequence: Synthetic coding sequence
  source 1..450: mol_type = other DNA
atgtcccgggaaatgcaggacgttgatttggctgaagtgaagccccttgtggagaaaggtgagaccatcaccggtctgctgcaggagttcgatgtccaagaacaggatattgaaacgctccacggatctgtgcatgtgactttatgtggcacaccccctgccaaactggcggaggcattcaaatacttcgttcaaggcatggggtatatgccttctgcgtctatgacccgactcatgcgtagcagaaccgccagcgggtctagcgtcacatcattagatggcactagaagtcgatcccacacaagtgaaggtaccaggtccaggtctcatactagcgaagggactcggtccaggtcgcacacttccgaaggtgcccaccttgatattaccccaaacagtggcgcagccggtaattcggccggaccaaagagcatggaagtgagctgctag

SEQ ID NO: 126651 - DNA, 942 bp, synthetic construct
  misc_feature 1..942: note = Description of Artificial Sequence: Synthetic coding sequence
  source 1..942: mol_type = other DNA
atgcaggagataacacagcattttgcagtgtgtcatgtcgacgcacctggtcaacaggatggcgccgcctcttttcctgcaggttatatgtacccaagtatggatcagttagccgagatgcttcctggtgtgctgcagcagttcggcctgaaatcaattatcggtatgggcaccggagccggcgcctatatactcactcgttttgctctaaataacccggagatggttgaaggtttggtgctcatcaatgtaaatccctgtgccgaaggctggatggactgggccgctagcaaaatcagtggctggacacaggccctccctgatatggtggtatcacacctttttggaaaagaagaaatgcagtccaacgttgaagtcgtccacacgtacagacagcatattgtaaatgatatgaaccccggcaatctccatctcttcataaatgcctacaattctcggcgagacctcgaaatagagaggcctatgccaggcacccacacagttacacttcagtgcccagccctgttggttgtgggagacagcagtcccgcagtggatgccgtggtggagtgcaactccaagctggatcccacaaaaactactctgcttaagatggctgactgcgggggccttccgcagatctcacagcctgccaaacttgccgaggcctttaagtacttcgtgcagggtatgggttacatgccctccgcatccatgacccgtctcatgcgtagtcgtactgcatccgggtcctctgtcacaagtcttgacgggactagaagccggtctcatacgagcgagggcacaagaagccgaagccataccagcgaaggcacaaggagcaggtcccatacatccgagggtgcccatctggatatcacaccaaatagcggggccgccggtaattcggcgggacctaaaagcatggaagttagttgttag

SEQ ID NO: 126652 - DNA, 288 bp, synthetic construct
  misc_feature 1..288: note = Description of Artificial Sequence: Synthetic coding sequence
  source 1..288: mol_type = other DNA
atgagcagggaaatgcaggacgtggatctcgcagaggtgaagccactcgtggagaaaggagagacgatcaccggcctcttgcaggagttcgatgtgcaaactaagcccgcaaccaccccttcatcgacaacccgcacctgccgaagatctccatcaacactaccaagtgccacttggacaccactggcatctaggacagcgcaacccccctccccacagggcacatgcacacctccctggatctcgtggctgaagtgtttcctggagagctttaatagtttagggtag

SEQ ID NO: 126653 - DNA, 1491 bp, synthetic construct
  misc_feature 1..1491: note = Description of Artificial Sequence: Synthetic coding sequence
  source 1..1491: mol_type = other DNA
atggcagacgagtcagagaccgccgtgaaaccccccgcccctcctttgccacagatgatggagggtaacgggaacggacacgagcattgctccgattgtgaaaatgaggaggacaacagctacaatagaggaggcctcagccccgccaatgatacgggcgccaagaaaaagaagaagaaacagaagaagaagaaagagaagggatccgaaaccgacagcgcccaggatcaaccagtcaaaatgaatagtctcccggcagaacgcatccaggagattcagaaagccatagaactgttttctgtgggccagggtcccgcaaagacgatggaggaagccagcaagagatcctaccaattttgggacacccagcccgtgccgaaattaggagaagtcgtgaacacccacggaccggtcgaaccggacaaagataatataagacaggaaccatatacactcccccagggctttacatgggacgcactagacctgggggaccggggagtactcaaagaactctacaccttgctgaatgagaattacgtcgaggatgacgataacatgttcaggtttgactatagccccgagttcctgctctgggccctaagaccacccgggtggctgccgcagtggcactgcggcgttcgtgtggtttcaagccggaagctggtgggcttcatctccgctattccggccaacattcatatatatgatactgaaaagaagatggtggaaatcaactttttgtgcgttcataaaaaattaagatctaaaagggtggcccccgttctcatccgagaaattacaagacgagttcacctcgaagggattttccaggcagtctataccgcaggagtagtcctcccgaaacccgtgggcacatgtcggtattggcaccgctcccttaacccccggaagcttatagaagtgaagtttagtcacttatcccggaacatgaccatgcaacggaccatgaaactgtatcgcttgcccgagacaccaaaaacagccggcctgagacccatggagactaaggacattccagtggtgcaccagctcctgactcggtacctaaagcagtttcaccttaccccagtaatgtcgcaggaggaggtggaacattggttttaccctcaggaaaatatcatagatacattcgttgtggaaaatgcgaatggagaggtaactgacttcctgtccttctataccctcccctcaactatcatgaatcatcctactcacaagtctctgaaggcagcttactcattttataacgtgcacacacagacccccctacttgacctcatgtcagacgccctggtactcgccaaaatgaaaggctttgacgtatttaatgctctggatctgatggagaacaagacgttcctggagaagctgaagttcggtatcggtgatggaaatttgcagtactacctatataactggaagtgcccttctatgggtgccgagaaagtcggcttggtcctccagtag

SEQ ID NO: 126654 - DNA, 414 bp, synthetic construct
  misc_feature 1..414: note = Description of Artificial Sequence: Synthetic coding sequence
  source 1..414: mol_type = other DNA
atggccgatgagtcggaaacagccgtgaagccaccagcccctccactccctcagatgatggaaggcaatgggaacggacatgagcattgcagcgactgcgaaaacgaagaagacaattcttataacaggggcgggctgagccctgcaaacgacactggcgcaaaaaaaaagaagaaaaagcagaagaagaagaaggaaaaagggagtgagaccgattccgcacaggaccagcctgtgaaaatgaacagcctgcccgctgagcggatccaggagatccagaaggccatcgagctgttctccgtgggacaggggccagcaaagacaatggaggaggcctccaagagatcgtatcagttttgggacactcagcccgtccccaaacttgccaagaggaccgtgcaccctcccgaatag

SEQ ID NO: 126655 - DNA, 1491 bp, synthetic construct
  misc_feature 1..1491: note = Description of Artificial Sequence: Synthetic coding sequence
  source 1..1491: mol_type = other DNA
atggcggacgagtccgagaccgctgtgaagccccccgccccgccattgcctcagatgatggaggggaatggcaatggacacgagcactgctccgattgcgaaaacgaggaagacaattcctataacaggggagggctctcccccgctaatgacactggggccaaaaaaaagaagaaaaagcagaaaaaaaagaaggagaaagggagcgagactgatagtgcgcaggaccagccagtgaagatgaattccctgcctgcagagcgaatccaggaaatccagaaagccatcgaacttttctcagtggggcagggccccgctaaaaccatggaggaggctagcaagcggtcatatcaattctgggatacgcagccggtgccgaagctcggggaagtggttaacacacacggccctgtggagccggacaaggacaatataagacaagaaccttacactctgcctcagggctttacatgggacgccctcgacctgggggaccggggcgtgcttaaagagctgtatactttattaaacgaaaattacgtggaggatgacgacaacatgttccggtttgactactcccccgagttcctgctgtgggctctcaggccccctggatggctcccgcaatggcactgtggggttcgcgtcgtgtcttcccggaaactggtgggatttatctcagccatcccagcgaatatccacatctatgatactgagaaaaaaatggtagaaatcaactttctctgtgttcataagaagctgcgctctaagagggtcgcgccagtgctgatccgggagattactcgaagggtgcatctagaggggatctttcaggcagtgtatactgccggagtcgtgctgcctaagccagtcggcacctgcagatattggcaccgatcacttaatcctagaaagctcatcgaggtgaagttctcgcacctgtcccggaatatgacgatgcaacggacaatgaaactctaccgcctgcctgaaaccccaaagactgcgggccttcggcctatggagactaaggatatccctgtcgtccaccaactgctaacacgatacctcaaacagtttcatctgactcctgttatgtctcaggaagaagttgagcactggttttaccctcaagagaatattatcgacacatttgtggtggaaaacgctaacggcgaggtgaccgatttcttgtccttttacacgttgcctagcaccattatgaaccacccaactcataagtccctgaaagccgcatattctttctacaacgtccatacacaaactcccctgctggacttaatgagtgacgcactggtactggctaaaatgaaaggattcgacgtcttcaatgctttggatcttatggagaataagacattcctagaaaaactgaagttcggtatcggcgacggaaacttacagtactatctgtacaattggaagtgtccatctatgggcgcagaaaaagttgggctcgtgttacagtag

SEQ ID NO: 126656 - DNA, 1590 bp, synthetic construct
  misc_feature 1..1590: note = Description of Artificial Sequence: Synthetic coding sequence
  source 1..1590: mol_type = other DNA
atggctgaggattcggaaagcgccgcttcacaacaatctctggaactggacgatcaggacacctgcggcatagacggcgacaatgaggaggaaacagaacacgctaaaggttccccaggcggctacctgggggccaagaagaagaagaaaaaacaaaagaggaagaaagagaagccaaactccggggggaccaagtccgattcagcctccgactctcaggagataaagattcagcaaccaagcaaacataataccatctggcagcagattagcgcaggggcggcaatggggtcagcaactatggagggagaatggaccgggatgaggaacgatcataaaaacccctcagtgcccatgcagaagcttcaggacatccagagagccatggagttactttctgcatgccaggggccagcacgaaatatcgacgaagccgccaagcaccggtaccaattttgggatactcagcctgttcctaagctcgatgaagtaataacatcacacggggcaatagaaccagataaagacaacgtcagacaggagccctactccctgcctcaaggtttcatgtgggatacactggacctttccgatgcggaagtcctgaaggaactttacactttgttgaacgaaaactacgttgaagatgacgacaacatgttccggtttgactactccccagagttcttactctgggctctgaggcctccgggctggttgctgcagtggcattgtggagttcgggtgtcctccaataaaaagctcgttggatttattagtgctatccccgccaacatcagaatctacgactctgttaaaaaaatggtggagataaatttcttgtgtgtacataaaaaactgcggtctaaaagagtggctccagtgctgataagagagattacaaggcgggtgaacctggagggtatttttcaggctgtatatacggctggagtggtgctgcctaagcctattgcaacatgtcgctactggcatagatccctgaaccctagaaaattggtcgaagtgaagttctcccacctgagccgaaacatgactctgcagagaactatgaaactctaccgtctgcctgatgtcacgaaaacctcaggactccggcctatggaacccaaagatatcaaaagtgtcagagagttgataaacacctatctgaagcaatttcatctggcccccgtgatggacgaggaggaagttgcacactggtttcttccacgggaacacatcatagacactttcgttgtggagtcaccgaatggtaaactgactgatttcctatctttttatactctcccctccaccgttatgcatcatcctgcccacaagtccctcaaagctgcatattctttctataacatacacaccgaaacccccttgttggatctaatgagcgatgctttaatcctcgcaaagagcaaggggtttgatgtgtttaatgcactggacctgatggagaataagacctttcttgagaagctgaagttcgggatcggcgatgggaacctacaatattatctttacaactggcggtgccctggaacggattccgagaaggtgggcctggtcctccaatag

SEQ ID NO: 126657 - DNA, 1458 bp, synthetic construct
  misc_feature 1..1458: note = Description of Artificial Sequence: Synthetic coding sequence
  source 1..1458: mol_type = other DNA
atgagacgcagacgtagcacaccaaaggaggtgctggaaggaatctgggaacctaagagaaagagaaggaatcgtagagaaaaacggaggaatcagatccctgaggcccccagccagacccgacatcttatcccgcgtcgtctaaaattcagcagtctgcggaatactacgccgagcggcagcaggttccagcgcgaacagccgtggaatccttctgtgccaatgcaaaaactacaggatatccagcgggccatggagctattgtctgcttgccagggtcctgctaggaatatcgatgaggccgccaagcatcgataccagttctgggacactcagcccgttcctaagctcgatgaggttatcacttcccacggcgccatcgaaccagataaggataacgtcaggcaggagccatactccctgccccagggattcatgtgggacacactcgacttatcagatgcagaggtgctcaaggagctgtacactctgctaaacgaaaattatgtggaggacgacgacaatatgtttaggttcgactacagccctgagtttttgctgtgggcacttcggccaccagggtggctgctacagtggcactgcggagtgcgggtgagttctaacaaaaagctcgtcggtttcatttccgctattccagcaaacattcggatctacgactcagttaaaaaaatggtagaaatcaattttctgtgcgtccataaaaagcttagatctaagagggtagcaccggtgctgatccgggaaattactagacgcgttaatttagaaggaatcttccaagccgtgtatactgccggtgtagtccttcccaaacctattgctacttgccgttactggcaccggagcttaaaccctcggaaactcgtggaggtaaagttttctcacttatcacggaacatgacactacagcgcaccatgaaactctatagactgcctgatgttaccaaaacgtccggcctgcggcctatggaacccaaagacattaagagcgtgcgagaactaattaacacatatcttaaacagttccacctcgccccagtgatggacgaagaagaggttgcacattggttcctcccccgggagcatatcatcgataccttcgtggtggagtccccaaacggcaagttaacagacttcctgtctttctataccttaccctccacagttatgcaccatcccgcacacaaaagcctgaaggccgcctattctttttacaatatccatactgagaccccactcctggacctcatgtctgatgccctgattctggcaaagagtaaaggcttcgacgtcttcaacgccttggatcttatggaaaacaaaactttcttggaaaaactgaagttcgggatcggggatggcaatctgcaatactacttatataactggagatgtccaggaacagactctgaaaaggtaggcttagtattgcagtag

SEQ ID NO: 126658 - DNA, 1497 bp, synthetic construct
  misc_feature 1..1497: note = Description of Artificial Sequence: Synthetic coding sequence
  source 1..1497: mol_type = other DNA
atggctgaagacagtgaatcggccgccagtcagcagtccctagagttggacgatcaagacacatgtggcatcgacggtgacaacgaagaagagacggaacacgctaagggaagcccgggtggctatctgggagccaagaaaaagaagaaaaagcaaaaacgtaagaaggagaaaccaaactccggtgggactaagagtgatagcgcctctgacagccaggagattaagatccaacagccgtcgaagaacccaagcgtaccgatgcagaagctacaggatatccagagagctatggagctgctgtccgcctgccagggcccggcgcggaacattgatgaggccgctaaacacagataccagttttgggacacccagccagtgcctaaactcgatgaggtcattaccagccacggagcaatcgaaccggataaagataatgtcagacaggaaccctatagcttacctcaggggttcatgtgggatacgcttgatctgtctgacgcagaagtgcttaaagaactgtacaccctactgaatgaaaattacgtagaggacgacgataacatgtttagatttgactactctccggagttcttactttgggctctgcggccaccagggtggctgcttcagtggcactgcggggtgcgggtgagttcaaacaaaaagttggtgggattcatcagtgcgattcctgcgaacatacgtatttacgattccgttaaaaaaatggtggagatcaacttcctgtgtgttcacaaaaagttgaggtctaagagggtggcaccggtgctgatcagagaaatcacaagaagggtaaacctcgaaggcatttttcaggctgtgtacacagccggcgtcgtgctgccaaagccaatcgccacgtgccggtattggcacaggtccctcaatcccaggaaactggtagaggtgaaattttcccacttgtcgaggaatatgaccctacaaaggacgatgaaactgtatcgtcttccggacgtgacaaagacctcaggactgcgcccgatggaaccgaaagacatcaaatccgtgcgggagctaattaacacgtacctgaagcagttccacctggcaccagtaatggatgaggaggaggtggcccactggttcctcccacgtgagcatataatcgacacgtttgttgttgagagtcccaacggcaagttgactgacttcttgtctttttacaccctaccttccacagttatgcaccaccctgcccataagtcgttgaaggctgcatactctttttacaatattcatacagaaaccccactattagacctcatgtcagacgccctgatcttggctaaaagcaagggctttgacgtgttcaacgctctcgacctgatggaaaataagacctttctcgagaagcttaagtttggcatcggggacggcaacttacagtactacctttacaattggcgatgtcccggcactgattctgagaaggttggactcgtccttcaatag

SEQ ID NO: 126659 - DNA, 234 bp, synthetic construct
  misc_feature 1..234: note = Description of Artificial Sequence: Synthetic coding sequence
  source 1..234: mol_type = other DNA
atgtccgacgccctgatcctggccaaatcgaagggatttgatgtgttcaacgcccttgatcttatggagaataaaaccttcctcgagaaactgaagtttggaattggcgacggaaatttacagtattatctctataactggaggtgtcctggtactgatagtgagaagggcagcggaaattttgtgaatgctaatggtaaattattgcctgacgtttgccgcagacctccctag

SEQ ID NO: 126660 - DNA, 1458 bp, synthetic construct
  misc_feature 1..1458: note = Description of Artificial Sequence: Synthetic coding sequence
  source 1..1458: mol_type = other DNA
atggcttccccgtggcgaggcgcccatgaggtcttggagggaatctgggagccaaaaagaaagcgcaggaaccgtcgtgagaaacgcaggaaccaaattcctgaggcacccagccagacccggcatctcatccctaggcggctgaaattttcttccctccgtaacaccacaccctccggcagtcgtttccagcgtgagcaaccttggaatccctctgtcccaatgcagaagctccaggacattcagcgcgcaatggagctgctgagcgcctgccagggtcccgcaagaaatatcgacgaagccgcaaagcatcgttaccagttctgggacacacaaccagtaccaaaactcgacgaagtgatcaccagccatggggctattgaacccgataaagacaatgtccggcaggaaccctacagcttgcctcagggtttcatgtgggataccttggatctgagtgatgcagaggtcctaaaagagttatacacacttctgaatgaaaactacgttgaggatgatgataacatgtttaggtttgactacagtcccgagtttctgctgtgggccctgcgcccccccggctggctgcttcagtggcactgtggggttagagtgagctccaataaaaaactagtggggtttattagcgccatcccggctaatatcagaatctatgactccgtcaagaagatggttgaaatcaatttcttgtgtgtccataagaaattgcggagcaagagagtagcccctgtcctgatacgagagataacccgaagagtgaacctggaaggaatattccaagcagtgtatacggcgggcgtggttttgcctaaaccaattgctacttgcaggtactggcaccgctctctgaatcctcgcaaactcgtggaggtaaaattttcccatctgagccgcaacatgaccctgcagaggactatgaagctgtatcgtctgcccgacgttaccaaaacctccgggctgcgaccaatggaaccaaaagacattaagagtgtgcgcgagctcattaacacatatcttaagcagtttcatctggctccagtgatggacgaagaagaagtcgcacactggtttttgcccagggagcacatcatcgatacctttgttgtggagtcacctaacggtaaactcactgacttcctgtcgttttacacccttcccagtacggtcatgcaccaccccgcccacaagtcactgaaggccgcttattcgttctataacattcacacggagacacccttgctggatttaatgtcagatgctctgatcttggctaagtctaagggttttgacgtgtttaacgccttggatctcatggagaacaaaacctttctggaaaaacttaagttcgggatcggggatggcaatctgcagtactacctctacaactggcgctgtcccggtacagattccgaaaaggtggggttggtcctgcagtag

SEQ ID NO: 126661 - DNA, 933 bp, synthetic construct
  misc_feature 1..933: note = Description of Artificial Sequence: Synthetic coding sequence
  source 1..933: mol_type = other DNA
atgttccggttcgattatagccccgagtttttgctatgggctctgaggccacctggttggttattgcagtggcactgcggggtgagggtgagcagtaataagaagttagtagggtttatcagcgccatccctgccaacatccgcatttacgatagcgtgaagaagatggtggagattaattttctttgtgtgcacaagaagctaaggtccaaaagagtagcccccgttctgattcgcgagatcacgaggcgagtgaacctggagggcatctttcaggctgtgtacaccgcgggagtggtactgcctaaacccatcgccacttgcagatattggcaccgttcacttaacccacgtaaacttgttgaagtaaaattcagtcacctctcacgaaatatgaccttacagagaacgatgaaactgtacaggcttccagacgtcacaaagacgagtggtttacgacctatggaaccaaaagatattaagagcgtccgtgagctgattaatacttatttgaagcaattccacctcgcccccgtcatggatgaggaggaggtcgcacattggttcctgcctcgggagcacatcatcgatacctttgtcgttgagagccccaatgggaaactgacagatttcctgagcttctacacactgccctccaccgtgatgcaccaccccgcccacaagagcttgaaggcagcatactcgttctacaacattcatacagaaacccccctcctggatttaatgtccgacgccctcattctggctaagtccaaaggatttgacgtgtttaatgctctggacctcatggagaacaaaacatttctcgagaagctcaagtttggtattggagacggcaacctccagtattatttatataattggcgttgccctggaactgattccgagaaagttggattggttctacagtag

SEQ ID NO: 126662 - DNA, 459 bp, synthetic construct
  misc_feature 1..459: note = Description of Artificial Sequence: Synthetic coding sequence
  source 1..459: mol_type = other DNA
atggaagccgttctgaacgagcttgtgtccgtggaagacttgctaaaatttgaaaaaaagttccaatctgaaaaagccgccggcagcgtgagtaagtctactcagtttgaatatgcatggtgtttggtgcgcagcaagtataacgatgacataaggaagggcattgtgcttttggaagaacttctccctaaggggtcgaaggaagagcagcgggactatgtgttctatctggcagtgggcaactatcgattaaaagaatatgaaaaagccctgaaatacgtccgcggactgctgcagacggagccacagaacaatcaggccaaggagttggagcggctgatagataaggccatgaagaaagatgggctggtcggtatggctatcgtcggaggcatggccttgggggtcgccggtcttgctggtctaataggtctcgctgtgagcaaaagtaagtcctag

SEQ ID NO: 126663 - DNA, 2076 bp, synthetic construct
  misc_feature 1..2076: note = Description of Artificial Sequence: Synthetic coding sequence
  source 1..2076: mol_type = other DNA
atggcgcttctgttaaccctcacctcccctgatcttgaaggcacgtgggatacacgagacaaagacggctttaaagcacaggagggccctcctctcgccgtgcctgagttccctgtctgcgggttgtatcggatttacggtgtctgcggctccttctcaagtttcttcatcatcaggtgttccctttgtgcccttgaaactctaaaatctcctcagcacgatccgctggagattcctgagcagtcactgaagctgattcccctggtgagtggtaaaagggaactcaccagagggcagaaggctggcgaaaaaccactggcggccggaccaggggaggaggagttgctgaggggatctgccccccacgcccaggacacacagtctgaagaactcccaccatcatgcaccatcagcggcgagaagaagccccctgccgttagtggcgaggccaccggagcagacgccgggcgtttgtgcccacctcctaggagcagggccccgcacaaagacaggactttggccaggtctaggcctcagacacaaggtgaggactgctcactgcctgtgggagaagttaaaatcgggaagcgtagttactcaccggcccccggtaagcagaagaagccgaatgccatgggcctggcacccacctcctctcccggagccccgaatagtgcgagggcgacacacaatcctgtaccttgcggctcagggcggggaccttgccacctagcaaacctcctctccacattggcacagagcaaccagaacagggaccataagcaaggacctccagaagtcacgtgtcaaatcagaaagaagactcgcacactgtaccgcagtgaccagctggaggagctagaaaaaatttttcaggaagaccattatccagactcagataagcgacgagagatcgcacaaaccgtcggcgtgacacctcagagaattatggttaagggcgcaggaagcctggtcgctggatggtctggcggaggaccaactattgagaccttggagctacagagcgagagatccgccgtggcttgggtctggttccagaacaggagggcaaagtggcgaaaaatggagaaattaaatggtaaggagtctaaggacaaccccgcagcaccaggccccgcttctagtcagtgctcctccgccgccgaaatattaccagcagtgcctatggagcctaaaccagacccctttcctcaggagtctccactcgatactttccccgagcctcctatgctgcttacgtccgaccaaactctggccccaacacaaccaagtgagggcgcccagcgtgtcgtgactccacctttgtttagtcctccgcccgtccgacgagcagacttacccttcccactgggacccgtgcacactccccagttgatgccgttgcttatggacgtcgccggaagcgactcatcgcacaaggatggcccatgtggcagctggggtacatctataaccctcccacccccttgcagctacctcgaggagcttgagccccaggactatcagcaaagcaaccagcccggtccattccaattctcacaagctcctcagccacccctgtttcagagtccccagcccaagctgccttatctcccgacgttccctttctcaatgccctcaagtttgactcttccccctccggaagatagtttgtttatgttcccttgcggccctagcgggggcacttctcaagggtattgtcccggcgcaagctcaggccagattctcatgcagccaccagccggtaacattggaaccgcttcctggagcgacccttgtttgcctgagctgccattcccggggcctttctgtccccaggccctgggtcacccaccgggcggtgacggttactttcccgacctttttccaaccccctgccctcaggctttgggaaggcaacccagctccgccctttcatggatgcccgagggggcaaggccaggcacgggcccgctgctgagcaaagccaaagaggagccccccgcggcatctttggaccagcctagcgctcttgaggaggctcggggtgacgataaaaacagccacgttccatag

SEQ ID NO: 126664 - DNA, 699 bp, synthetic construct
  misc_feature 1..699: note = Description of Artificial Sequence: Synthetic coding sequence
  source 1..699: mol_type = other DNA
atggaacgttgcccttcccttggcgtaactttatacgcccttgtggttgtccttggactgcgcgctacgcctgccgggggccagcactatttacatattaggcccgcccccagcgacaacctgcctctggtcgatctgatcgaacaccctgaccccatattcgaccctaaagagaaggacctaaacgagactctactccgcagtctgctgggcggacactacgaccccgggttcatggccacgtcacctcctgaggatcgtcctggggggggcggcggtgcggctggcggtgcagaagacctggccgagttagaccagttgctgagacagcgccctagcggagctatgccctccgagatcaaggggttagagttctccgaggggctcgctcaaggaaaaaagcaacggctctcaaaaaagttgcgcagaaagctccaaatgtggctgtggtctcagacgttttgccctgtgttgtacgcttggaatgatctgggctcccgcttctggccacgctatgttaaggtcggctcctgtttcagtaagagatcctgtagcgtcccagaaggaatggtttgcaagcccagtaagagtgtccatcttacagtgttgcgttggcgctgccagcgtcgggggggacagaggtgtgggtggatccccattcagtacccgatcatctccgagtgtaaatgttcatgttag

SEQ ID NO: 126665 - DNA, 990 bp, synthetic construct
  misc_feature 1..990: note = Description of Artificial Sequence: Synthetic coding sequence
  source 1..990: mol_type = other DNA
atggggacagcggccgccgccgcggccgccgccgcagctgccgccgccggcgagggagcccgctcgccttcccccgcggcagtgagcctcggtcttggagtggctgtggtctccagcttggtgaatggatcgacatttgttctgcaaaaaaaggggatcgtgagggccaaacgaagaggtacctcttacctcaccgatatcgtgtggtgggctggcacaattgccatggccgtcggccagattgggaacttcctggcttacacagcagtgcctacagtgctagtcacgccactaggagctctgggggtgccttttggttctatattggccagttacctcctgaaggaaaagctaaatattctcgggaaactcggatgcctgctcagctgtgcaggctctgtcgtattgatcatccattcccccaaatccgaaagtgtgaccacacaggctgagcttgaagaaaaactgaccaaccccgtttttgtcgggtatttgtgcatcgtactcttgatgctgctgttgctcatcttctggatcgcaccagctcatggtcctacgaacattatggtgtatattagcatctgctccctattggggagttttacagtcccaagtacaaaggggatcggcctggccgcccaggatattcttcacaataatccatctagccagagggcactctgtctgtgtctcgttctactggccgtgttgggatgctccattatcgttcagttccgatatattaacaaggccttagaatgtttcgacagcagcgtatttggtgccatttattatgtcgtgtttaccactctggtcttactggctagcgcgattctcttcagggagtggagtaatgtaggcctggtcgattttctggggatggcatgtggttttaccacagtttcagtgggaatcgttctcattcaagtatttaaagagttcaatttcaatctcggagaaatgaacaaatccaatatgaagactgattag

SEQ ID NO: 126666 - DNA, 765 bp, synthetic construct
  misc_feature 1..765: note = Description of Artificial Sequence: Synthetic coding sequence
  source 1..765: mol_type = other DNA
atggccgtgggccagatcggcaacttcttggcctacactgccgtcccaacagtcctggtgacaccccttggcgcgctaggagtcccctttggctccatcctcgcttcctatctcctgaaagagaaactgaacatactcggaaaactcgggtgcctgttgtcatgtgctggatccgtagtgttaatcatccacagcccaaagtcagagtcagtgaccactcaggcagagttggaggagaaacttaccaacccagtgttcgtcgggtacctttgtattgtcctcctcatgttgctgctattaatattctggatcgccccagcccacgggccgaccaatattatggtgtacattagcatctgcagcctcttgggctcatttacagttccctcaaccaagggcatcggcttagctgcccaggatatactgcacaacaatccttcaagtcagcgggccctatgtctgtgtcttgtgttgcttgctgtgctgggctgctctataatcgtccagtttcggtacatcaacaaggcacttgaatgcttcgactctagcgtcttcggcgcaatatactacgtcgttttcacaactctcgtactcctggccagcgctattttgtttcgcgagtggagcaatgtcggcctggttgacttcctcggaatggcctgtggatttaccacagtgtccgtgggaatagtcttgatccaggtctttaaggagttcaatttcaacctcggcgagatgaataaatcaaacatgaaaacagactag

SEQ ID NO: 126667 - DNA, 480 bp, synthetic construct
  misc_feature 1..480: note = Description of Artificial Sequence: Synthetic coding sequence
  source 1..480: mol_type = other DNA
atgctgttactgttgattttttggattgccccagcgcatggccccaccaacattatggtgtacattagcatttgctctctgctcggtagtttcaccgtcccttcaacaaaggggatagggctcgccgcacaagatatcttgcataataacccctcttcccaaagagccctttgcctctgtctcgtgctgctggccgtgctggggtgttccataatcgtccagttccgatatatcaataaggcattggagtgttttgactcatccgtcttcggcgccatttactacgtcgtgttcaccacgttagtgctccttgcttctgctatcctttttcgggagtggtccaacgtcggcttagtcgacttcctaggcatggcttgtggctttacgacagtcagcgtcggcatcgtgctcattcaagtgtttaaagagtttaatttcaacctcggggaaatgaacaagagcaacatgaaaaccgattag

SEQ ID NO: 126668 - DNA, 765 bp, synthetic construct
  misc_feature 1..765: note = Description of Artificial Sequence: Synthetic coding sequence
  source 1..765: mol_type = other DNA
atggccgtcggtcaaatcggcaattttctggcatataccgcagtccctactgtccttgtaaccccgctgggcgctcttggcgtgccattcggctccatattggctagctatcttctgaaagaaaagctgaacatccttgggaagctgggctgtctgttatcatgcgctgggagtgttgttctgattatccatagccctaaatcggaatccgtgaccacacaggcagagcttgaagagaagctaactaacccggtgtttgttggctacctgtgcattgttttgctgatgctactactgctgatcttctggatcgcccccgcccacggtccaacaaacattatggtttatatttcaatctgctccctgctgggatcattcacggtgccctctaccaaaggaattggcctagctgctcaggatatcctacacaacaatcccagttcacagcgggccttgtgcctatgcctggtactgctcgctgtactggggtgctccattattgtacagtttcggtatataaataaagcccttgagtgtttcgactctagtgtgtttggtgcaatctactatgttgtgttcaccacgctggtcttgctagccagcgcaatcctctttcgcgagtggtcaaacgtggggctggtcgattttttgggcatggcctgtggctttactaccgtgagtgtcggcatcgttttaatccaggtcttcaaagagttcaacttcaacctgggcgagatgaacaaaagcaacatgaagactgactag

SEQ ID NO: 126669 - DNA, 1083 bp, synthetic construct
  misc_feature 1..1083: note = Description of Artificial Sequence: Synthetic coding sequence
  source 1..1083: mol_type = other DNA
atgtcccagggtcgtgggaaatacgatttttacatcggtctgggtctggcgatgagctccagcatatttattggggggagtttcatcctgaaaaagaaagggctcctaaggttagctcgtaaagggtcaatgagggcgggtcaaggcggccatgcttatcttaaagaatggttatggtgggctgggctgttatccatgggagccggagaggtggcgaacttcgccgcatacgcgtttgcgcccgccacattggttactcctttgggagccctttcagtgctggtgtctgccatactgtcatcttatttcctgaatgaacgcctaaacttacatggcaaaatcggctgcctgcttagcattcttggatccactgttatggtgatccacgcccccaaagaggaagaaattgagaccctcaacgaaatgtcccacaagctgggcgatcccggattcgtggtattcgcgaccttagtagtaattgtagcccttatcttaatttttgtggtggggccccgtcatggccaaactaatatcctagtgtacatcactatttgtagtgtcattggtgcattttccgtgtcctgtgtgaaaggactgggaattgccatcaaggagctttttgctggaaagccagtgctgcgtcatccactggcctggattctgctgctttctcttatcgtgtgcgtgagtactcaaattaactatctgaaccgggccctcgacatcttcaatacaagtatagtcacaccaatatactatgtgttcttcacaacctcagtgctaacatgctccgctatcttatttaaagagtggcaggatatgcccgtggacgacgtgattggcactttgagcgggttttttactatcatcgttggaatcttccttctccacgcctttaaagacgtgagcttctcactcgctagtttgccagttagcttccgtaaagacgagaaggccatgaatggaaacttatccaacatgtatgaggtgttgaacaataatgaggagtcacttacctgcggaatagagcagcatactggggaaaatgtctcacgcaggaatggaaacttaacagccttttag

SEQ ID NO: 126670 - DNA, 1026 bp, synthetic construct
  misc_feature 1..1026: note = Description of Artificial Sequence: Synthetic coding sequence
  source 1..1026: mol_type = other DNA
atgagtcagggacgaggcaagtatgacttctatatcggacttggccttgctatgtcgtccagcattttcattggcggcagcttcatcctcaaaaagaaaggccttttacgccttgcccgaaaagggtctatgcgcgccgtcggggctggtgaggttgctaattttgccgcctacgcctttgcccctgcaactctcgtaacacctctgggtgcgctgtcagtactcgtctctgccattctgtccagctacttcctcaacgaaagacttaacctgcatgggaaaataggttgccttctttccatactcggaagcaccgtgatggttatccatgccccgaaggaggaggaaatcgaaacacttaacgagatgagccacaagctgggtgatcccgggttcgtggtctttgcaacactcgtggtgattgtcgcactgatcctgatattcgttgtgggccctaggcacggacagacgaatatccttgtgtacatcaccatctgctcagtaattggtgcattctccgtgtcttgtgtaaaagggcttgggattgcgattaaagagctgttcgccggaaaacctgtgctccggcacccactcgcttggatcctgctgctgtctctaattgtctgtgtctctactcagatcaattacttgaaccgcgcgttggatatctttaacacgagtattgtgacccctatatattacgtcttctttaccacatctgttttgacatgctcagccatactctttaaggaatggcaggatatgccggtggacgacgtgatcgggaccttatcaggcttctttactattatcgttggtatattcctcctgcacgccttcaaggacgtgtccttttccctggcctccttgcctgtcagttttcggaaagatgagaaggccatgaacggcaacctctccaacatgtacgaggtcctgaataataacgaggagtcactcacatgtgggatcgaacagcataccggagagaatgtctcccgcaggaacgggaacttaacagccttttag

SEQ ID NO: 126671 - DNA, 1083 bp, synthetic construct
  misc_feature 1..1083: note = Description of Artificial Sequence: Synthetic coding sequence
  source 1..1083: mol_type = other DNA
atgtcccaggggcggggaaaatacgatttctacatcggcctcggtctggctatgtcatctagtatctttatcgggggctctttcatattgaaaaagaaaggcctgctgagactcgctcggaagggcagcatgagggcaggccagggaggacatgcctacttgaaggagtggctatggtgggcagggctgttgtctatgggagctggcgaggtcgctaatttcgccgcctatgcgtttgccccagcaacattagtcacaccactgggcgcgctcagcgtcttagtgtccgctatcctcagcagttacttcctcaacgaaagactgaatctgcacggtaagattggctgccttttatctatcctcggctctacagtgatggtgatccatgcccccaaagaagaggagattgaaaccttaaatgagatgtcccacaaattaggtgacccaggtttcgtcgttttcgcaaccctggtcgttatcgttgccctgatcctcatattcgtcgtgggccctcgacatggacagacaaatattctagtatacatcacaatctgctccgtgattggcgcctttagtgtgtcttgcgttaaggggcttggaatcgcgattaaagaactgttcgccggcaaaccagtcctcagacaccctttagcctggatccttctcctgtcacttattgtgtgcgtcagcacccagatcaactatctgaacagagccctcgacatatttaacacctcaatcgtgacacctatctactatgtttttttcacaacaagcgtgctcacatgttccgctatccttttcaaagaatggcaggacatgccagtggatgatgtgatcggcacactctctggattcttcacaattatcgttggcatttttctgctgcatgcattcaaagacgtgtcattttccttagcatcgctccccgtctcctttagaaaagatgagaaagcaatgaacggcaatttatctaatatgtatgaagtgttgaacaataatgaggagtctttgacctgcggaatcgagcaacacaccggggaaaatgtgagccgtcgcaatgggaatctgacagcattttag

SEQ ID NO: 126672 - DNA, 1083 bp, synthetic construct
  misc_feature 1..1083: note = Description of Artificial Sequence: Synthetic coding sequence
  source 1..1083: mol_type = other DNA
atgagtcaggggagagggaaatacgatttctacattgggttggggctagctatgtcctcttcgatatttatcggtggatccttcatcttgaaaaaaaaaggattactcagacttgccagaaaaggcagcatgagagccggccagggcggccacgcctatctgaaagagtggctttggtgggccggactactgtcaatgggtgcaggagaggttgccaatttcgccgcctatgctttcgcaccggccaccttagtcaccccccttggtgcgcttagtgtgctagtctccgctatcctgtcaagttacttcctcaacgagcgcctgaacctgcacgggaagattggctgcctcctgtcgattctaggatccacagtgatggtgatacacgcccccaaggaggaggagattgaaactcttaatgagatgtctcataaactgggagatccaggtttcgtggtcttcgcaactctggtcgtgatcgttgctttaattttgattttcgtagtgggtccacggcatggacaaacaaacatccttgtctacattaccatttgcagtgtcattggggcattttccgtgagttgtgtgaagggattggggatagcaataaaggaactttttgcgggcaagccagtgctgcgacatcccctggcatggatcctcctcctaagtctaattgtttgcgtcagtacacaaatcaattacctgaaccgggccttggatattttcaacaccagcattgtgacaccaatctattatgtcttcttcacaacaagcgtgttgacttgctccgctatactgttcaaggagtggcaggatatgccagtggatgacgtgatcggaacgctgtccggatttttcactataatcgtggggattttcctgcttcatgccttcaaagacgtatccttctccctggcatccttgcctgtgagcttccggaaagacgaaaaagccatgaatggaaacttgtctaacatgtacgaagtgctgaataataacgaagagagtctcacttgcggcatcgagcaacacactggagagaacgtctccaggagaaatggaaacctgacagctttttag

SEQ ID NO: 126673 - DNA, 1026 bp, synthetic construct
  misc_feature 1..1026: note = Description of Artificial Sequence: Synthetic coding sequence
  source 1..1026: mol_type = other DNA
atgagccaggggcggggaaaatatgacttctacatcggtctcggccttgccatgtcgtcttccatcttcattggcgggtcattcatcctaaagaaaaaaggactgttacggctggccagaaaaggctcgatgcgggcagttggcgccggagaggttgctaactttgctgcctatgccttcgcaccagcaacgcttgtgacccctttgggggcactgtccgtgctggtgagcgcgatcctgtcatcttacttccttaacgagagacttaatctccacggtaaaatcggttgcctgctgagtattctcgggagcacagtcatggtcattcacgcccctaaagaagaagaaattgaaactctaaatgagatgtcacacaagctcggtgacccgggttttgtggttttcgccacgttagtagtgatcgtagcgctgattctgatctttgtggtgggtcccagacacggacagaccaatattctggtgtatattaccatatgttccgtaatcggagccttctcagtgtcatgtgtgaaagggctgggcatcgccatcaaggaactcttcgctggaaaacccgtgctgcgccaccctctagcctggatcctgttgttgagcctcattgtgtgtgtatctacacagatcaattacctgaatcgagccctagacatattcaatacatcaatcgtaactcccatctattatgtgttcttcaccacttcagtgttgacatgtagtgctatcttgttcaaggagtggcaagacatgcccgtggacgacgtaatcggcacactgagcgggtttttcactatcattgtcggcatcttcctgctccatgccttcaaagacgtgtccttctcactggcatccctgccagtatctttccgcaaagatgaaaaagccatgaatggaaacctcagcaacatgtatgaggttctcaataataacgaagagagtctgacatgcggtatcgaacagcacacgggtgagaacgtgagccgccgcaatggcaaccttacagcattttag

SEQ ID NO: 126674 - DNA, 180 bp, synthetic construct
  misc_feature 1..180: note = Description of Artificial Sequence: Synthetic coding sequence
  source 1..180: mol_type = other DNA
atgtcccagggtcgggggaagtatgacttctacattggcctgggactcgctatgtcatcttctatcttcatcgggggatccttcattcttaagaagaaaggtcttctgcgccttgcgagaaagggctcgatgcgggccggccaagggggtcatgcttacctgaaggaatggctgtggtag

SEQ ID NO: 126675 - DNA, 900 bp, synthetic construct
  misc_feature 1..900: note = Description of Artificial Sequence: Synthetic coding sequence
  source 1..900: mol_type = other DNA
atggaagagctggaacagggactgttaatgcagccctgggcatggcttcaactggctgagaacagtctcctcgcaaaggtattcattacaaagcaaggctacgcactcctggtatcagacctgcaacaggtttggcacgaacaggtggacaccagcgtggtgtcgcagcgcgccaaagagctgaataaaagactgaccgccccacctgccgccttcctgtgtcaccttgataacttgctcaggcctctcttgaaagacgccgctcacccttcagaggcaacgttttcgtgtgattgtgtcgccgacgcattgattctgcgggtccgatccgagttatccgggctcccattttactggaacttccactgtatgctggcaagcccgtctctggtctcccagcatctgataaggcccttgatgggaatgtctctggccctgcaatgccaggtaagagagctagccacgctccttcatatgaaagacctagaaatacaggattatcaggagtcgggtgccacattaatccgggaccgcctgaaaacagagccttttgaagaaaacagttttcttgagcaattcatgattgagaagcttccagaagcttgctctatcggtgatggaaagccgttcgttatgaatctgcaggatttatatatggctgtgactacccaggaggttcaagttggtcagaaacaccaaggcgcaggcgatccacatactagcaattccgctagcctgcagggcatcgactcacagtgcgttaaccagcccgagcaactggtgtcatcggctcctactctcagcgccccagagaaggagtccacgggaacatcgggaccccttcagcggcctcaactgtcaaaagtgaaaaggaagaaaccaagagggcttttttcttag

SEQ ID NO: 126676 - DNA, 951 bp, synthetic construct
  misc_feature 1..951: note = Description of Artificial Sequence: Synthetic coding sequence
  source 1..951: mol_type = other DNA
atggaggagctggaacaggggcttcttatgcagccatgggcatggctacagcttgccgagaatagtcttctcgcgaaagtgttcatcacaaaacaggggtacgcactactggtgtcggatctacagcaagtctggcacgaacaagttgacacaagcgtggtgtcacagagagccaaggagctgaataaaagactgaccgccccacctgcggccttcttatgtcacctcgataatctcctccgaccacttttaaaagacgcagcacatcccagcgaggctacttttagctgtgactgtgtggctgacgccttgattctacgagtgcgttcagagctgtccggcttacctttctattggaacttccattgcatgctggcaagtccgtctttggtgtcccagcatttgatacggccactgatgggcatgtcactagccttacaatgccaagtgcgtgagttagccacactgctgcacatgaaggacctggagatccaggattaccaggagagcggggccacccttattagagatagactgaaaactgaaccgttcgaggagaactctttcctcgagcagtttatgatagaaaagctgcccgaagcctgttccatcggagatggcaaaccatttgtgatgaacttacaggacctgtatatggcagtcacaacccaagaggtccaggttggccagaagcatcagggggctggggacccgcatacctctaatagcgccagcctgcaaggcatcgattctcaatgcgtgaaccaacctgaacagctagtctcctcagcccctacactcagtgcaccagagaaggaatccactgccctgtgcagggacctaagctgtcagcgctcccgcgggcggagtcagggagtctcaagcgtcaatcttctctggcctcagcttctgagaatggatttggagaattctttccaggctagtccctag

SEQ ID NO: 126677 - DNA, 690 bp, synthetic construct
  misc_feature 1..690: note = Description of Artificial Sequence: Synthetic coding sequence
  source 1..690: mol_type = other DNA
atggaagaactggaacaggggctccttatgcagccctgggcatggttgcagctggccgaaaacagtttgctcgctaaggttttcattactaagcagggatacgccctactggtgagtgaccttcagcaggtgtggcatgagcaggttgacacttctgtggtgagtcagcgcgccaaagaattaaacaagagactcacagctcccccagctgcctttttatgtcatctggataacctcttaagacctctgcttaaagacgccgcccacccgtccgaagcaacattcagttgcgattgcgtggctgatgccctcattctcagagtgcgctcagagctcagtggcttgcccttctattggaatttccattgcatgctggcatccccctcgctcgtaagccaacatctgatacgccccctgatggggatgtcactggcgctacagtgtcaagtcagagagctggccaccttgctccacatgaaagatctggaaatccaggattatcaggaatccggcgcgaccctgattcgggacagactcaaaaccgagccgtttgaggagaactcatttctggaacagtttatgatcgagaagttgccagaagcctgctcaatcggggacggaaagccttttgtgatgaatctgcaagacctgtacatggccgtaaccactcaggaggtgcaggtcggttag

SEQ ID NO: 126678 - DNA, 804 bp, synthetic construct
  misc_feature 1..804: note = Description of Artificial Sequence: Synthetic coding sequence
  source 1..804: mol_type = other DNA
atggctaattgtgagaggaccttcatcgcgatcaaaccagacggcgttcaacggggccttgttggagaaattatcaaaaggtttgaacagaagggtttcaggttggtgggcctcaagttcatgcaggcttctgaggatctgctgaaagagcattatgtggatttaaaggaccgaccattctttgccgggcttgtgaaatacatgcacagtggcccagtggtggctatggtgtgggagggcctaaatgtggtgaaaactggacgtgtgatgctaggagaaactaacccagccgattccaagcccggtaccattcggggcgacttttgcattcaggtggggagaaccatggccaacttagaacgcacatttattgccatcaagcccgacggagttcagcggggacttgtgggtgagatcattaagaggtttgaacagaaagggttccgcttagtggctatgaagtttctgcgcgcgagtgaggaacatcttaagcaacattacattgatttaaaagatcgcccatttttccctggcttggtgaaatacatgaatagtggtccagtggtagccatggtttgggagggccttaacgttgtcaagaccgggagggtgatgctgggggagacaaaccccgctgactccaaacctggaaccatcagaggcgacttttgtatccaggttgggcgcaacattatccacggatccgacagcgttaagtcagcagagaaggagatcagcctttggttcaagccagaagaactggtggactacaagtcctgcgcgcacgactgggtgtatgagtag

SEQ ID NO: 126679 - DNA, 234 bp, synthetic construct
  misc_feature 1..234: note = Description of Artificial Sequence: Synthetic coding sequence
  source 1..234: mol_type = other DNA
atggtatgggaagggttaaatgtagtgaaaaccggccgggtgatgctgggagaaaccaatccggcggactctaagcccggaacaatccggggcgatttctgtattcaggttgggcggaatattatacacggcagtgattcagtcaagtccgccgagaaagagatttcgttgtggttcaaacccgaggagctggtcgactataaatcttgcgctcatgactgggtgtacgagtag

SEQ ID NO: 126680 - DNA, 234 bp, synthetic construct
  misc_feature 1..234: note = Description of Artificial Sequence: Synthetic coding sequence
  source 1..234: mol_type = other DNA
atggtttgggaaggactgaacgtagtcaaaactggacgcgttatgctgggcgaaaccaatccagcggactctaagcccgggaccattaggggcgacttctgtatccaggtgggacgaaatattatccacgggagtgatagcgtgaagtcagccgagaaggaaatctcactgtggtttaagccagaagaattggtcgactataagtcctgtgcgcatgattgggtctacgagtag

SEQ ID NO: 126681 - DNA, 459 bp, synthetic construct
  misc_feature 1..459: note = Description of Artificial Sequence: Synthetic coding sequence
  source 1..459: mol_type = other DNA
atggccaatctcgagcgaacattcatcgccattaagccagacggggttcaacgcggactcgtgggagaaatcatcaagcggtttgagcagaaggggttccgactcgttgccatgaaattcctgcgggccagtgaagagcaccttaagcagcattacatcgatctgaaagaccggcccttttttcccgggttggtgaaatacatgaattccggcccagtggtagctatggtttgggagggcttaaacgtcgttaaaactggaagggtgatgctgggagagactaacccggccgacagcaagccaggaacaatcagaggggatttctgtatacaggtcgggaggaacattatccatggctctgacagcgtaaagtctgccgaaaaagagattagcttgtggtttaaacccgaggagttggtagactacaagtcctgcgctcacgactgggtatacgaatag

SEQ ID NO: 126682 - DNA, 459 bp, synthetic construct
  misc_feature 1..459: note = Description of Artificial Sequence: Synthetic coding sequence
  source 1..459: mol_type = other DNA
atggcaaacttggagcgcacattcatcgcgatcaagccggacggcgtgcaacgaggcttggtgggagaaattatcaagagattcgagcagaaggggtttcgcctggtggccatgaaattcctgcgcgcttctgaagagcacctcaagcaacactacattgacctcaaggacagacctttctttcccggcttagtgaagtatatgaactcaggaccagttgtggccatggtgtgggagggtctgaatgtcgtgaagaccgggcgggttatgctgggtgagacgaacccagctgacagcaagcccggtacgatacggggcgacttctgcattcaggtcggacgaaacattatccacggctccgattctgtgaaatccgctgagaaggaaatcagtctatggtttaagcccgaagagcttgtggattacaagtcatgcgcccatgactgggtttacgaatag

SEQ ID NO: 126683 - DNA, 459 bp, synthetic construct
  misc_feature 1..459: note = Description of Artificial Sequence: Synthetic coding sequence
  source 1..459: mol_type = other DNA
atggcaaacttggagcgcaccttcatcgctattaagcccgatggcgtgcagcggggattagtgggcgagattataaaaagattcgagcagaaaggctttagattggttgccatgaaattcctgagggcctctgaagagcatctgaagcagcattatatcgacctgaaagatcgccccttctttcctggactggtcaaatatatgaattcaggtcccgtggtcgccatggtgtgggagggcctcaacgtggtcaagaccggcagggtgatgctcggagagactaatccagccgattcaaagcccggtacgatacggggtgatttctgcatacaagttggccgcaacataattcatggctctgactctgtgaaatccgctgagaaagagattagtctgtggttcaaaccggaggagctcgtagattataagtcttgtgcccatgactgggtgtacgagtag

SEQ ID NO: 126684 - DNA, 459 bp, synthetic construct
  misc_feature 1..459: note = Description of Artificial Sequence: Synthetic coding sequence
  source 1..459: mol_type = other DNA
atggcaaacctagaacggacctttattgcaattaaaccggatggcgtgcaaagaggattggtaggggagataattaagagattcgagcagaagggctttaggctagtggccatgaaatttcttcgtgcctcggaggagcatcttaaacagcattatattgacttgaaggatcggcccttctttccagggctggtaaaatatatgaactctggcccagttgttgctatggtatgggagggcctgaacgtggtgaagacaggacgagttatgctgggagaaactaacccagccgattcaaaacctgggaccatccggggcgacttttgcatccaggtcgggaggaatatcatccatgggagcgactccgtcaagtctgctgagaaagagatctccctctggttcaagccagaagagctcgtcgattacaaatcttgcgcccacgactgggtatatgagtag

SEQ ID NO: 126685 - DNA, 459 bp, synthetic construct
  misc_feature 1..459: note = Description of Artificial Sequence: Synthetic coding sequence
  source 1..459: mol_type = other DNA
atggcaaatttggaacggacattcatagctatcaaacctgatggggtccagcgcggactagtgggcgagataattaagagatttgagcagaaaggcttccgcctggtggcaatgaagttcctgcgcgcgtctgaggagcatcttaaacagcactacatcgatctgaaggaccgtccgtttttccccggtctggtgaagtacatgaattctggccccgtggtggccatggtctgggagggactgaacgtggtgaagacagggagggttatgctgggggaaaccaatcccgccgactccaaacctggcaccatacgaggcgatttttgcattcaggtggggcgaaatatcatccatggtagcgactctgtgaaatctgcggaaaaagaaatatccttatggttcaaacccgaagagctggtggactataagtcctgcgcccacgactgggtgtatgagtag

SEQ ID NO: 126686 - DNA, 879 bp, synthetic construct
  misc_feature 1..879: note = Description of Artificial Sequence: Synthetic coding sequence
  source 1..879: mol_type = other DNA
atggtgttgctctcgaccttaggtatcgtgttccagggcgagggccctcctataagctcttgtgacaccgggacaatggccaactgcgagagaacctttatcgccattaaacccgatggggtgcagcgggggctggtgggtgagattatcaaaaggttcgaacagaagggctttcgactggttggtctgaagttcatgcaagcctctgaggacctcctgaaagaacattatgtcgaccttaaggatagacccttttttgcaggactggtgaagtacatgcacagcggcccagtagtggcaatggtgtgggagggactcaacgtggtcaagaccggcagagttatgctaggggagactaaccctgcagatagtaaacctggaactattcgcggcgacttttgtatacaagtggggcggaccatggccaacctcgagcgcacattcattgctatcaagcctgatggtgtgcagaggggactggtcggagaaatcatcaaaaggtttgaacaaaaggggtttcgcttagtggccatgaagttcttaagagcctccgaggagcacttgaaacagcattacattgacctgaaagaccgcccctttttccccggattggtgaagtatatgaattctggccctgtggtggcaatggtatgggaagggctgaacgttgtgaagacaggccgggtcatgctaggcgaaacgaatcctgctgatagtaagcccggaacaattaggggcgatttctgtatccaggttggaagaaatatcatccatggctccgactctgtgaagagtgccgaaaaggaaatatctttatggttcaaacccgaagaacttgttgactataagtcttgtgcacacgactgggtatacgagtag

SEQ ID NO: 126687 - DNA, 1188 bp, synthetic construct
  misc_feature 1..1188: note = Description of Artificial Sequence: Synthetic coding sequence
  source 1..1188: mol_type = other DNA
atggtgagtgcagccggtctgtctggtgacgggaagatgaggggagtgttgcttgtactcctcggcttgttatattcttctaccagctgtggagtccaaaaagcctctgtgttttatggccctgacccaaaggaaggcctggtcagctcaatggagttcccttgggtcgtatcactccaggatagccagtacacccatctggccttcgggtgcatcctcagtgaattttgggtcctgtcaattgcgagcgccattcagaaccggaaggatattgtggtgatcgtgggtatctctaatatggacccatctaaaatcgcgcataccgagtaccccgtcaatacaatcattatccatgaggatttcgataataactcgatgagcaacaacatcgccctcctgaagaccgacaccgccatgcactttggtaatcttgtccagagcatctgtttcctgggaaggatgcttcacacacctccggttctccaaaactgttgggtttcggggtggaatccaacttccgccaccggaaaccacatgaccatgtcagtgctgagaaaaatctttgtgaaggatctggacatgtgtcccctgtacaaactgcagaagactgaatgcggctcgcacaccaaagaagagaccaagaccgcctgccttggtgaccctggctcgcccatgatgtgccagctgcagcagttcgatctctgggtcctgcgcggtgtgctaaacttcggaggcgagacctgtcccggtctgtttctctatacaaaagttgaggattattcaaagtggatcaccagcaaggcagagcgtgccggcccccccctgagtagtttgcaccactgggagaaattgatcagtttttcccaccatggaccaaatgcaaccatgacccagaaaacgtactctgattccgaactcgggcacgtgggatcctacctgcagggtcagcgcaggaccatcacccactcacggctcggcaacagttcccgcgactcactggatgttcgtgaaaaagatgtaaaggagtccggcaggtctccggaggcgagcgtgcaacccctgtactacgactactacgggggggaggttggtgaggggcggatttttgccggacagaatcgcctctaccagcccgaggaaattatcttggtctctttcgtgctcgtgtttttctgcagtagcatttag

SEQ ID NO: 126688 - DNA, 639 bp, synthetic construct
  misc_feature 1..639: note = Description of Artificial Sequence: Synthetic coding sequence
  source 1..639: mol_type = other DNA
atggaaattagtatgccacccccccagatctatgtcgagaagacactcgcaatcataaaaccagacattgtggacaaggaggaagaaatacaagacataattctacggagcggattcaccatcgtgcaacgtagaaagctgaggctttcccccgaacagtgcagcaacttctacgttgagaaatatggcaaaatgttttttcctaaccttaccgcgtacatgagttctgggccactggttgcaatgattttagcccgtcacaaggccatctcctactggctcgaactgctcggcccaaacaacagtttggtagctaaagaaacacacccagactccctgcgagcgatttacggtactgatgatctcaggaacgcactccacggttcgaatgattttgctgccgcagaaagagaaatccgatttatgttccctgaagtcattgttgagccaattcctatcgggcaagccgccaaggactatctcaaccttcatattatgcccactctcctggaaggtctaaccgaattgtgcaagcaaaagcccgccgatccactgatctggctggccgactggctcctcaagaacaatcctaataaacctaagctgtgtcaccatcctatcgtggaggagccatactag

SEQ ID NO: 126689 - DNA, 561 bp, synthetic construct
  misc_feature 1..561: note = Description of Artificial Sequence: Synthetic coding sequence
  source 1..561: mol_type = other DNA
atggcctccatattgcgaagcccccaggcccttcagctcaccttggcccttatcaaacctgacgccgttgcgcaccccttgatacttgaggctgtacaccagcagatactcagcaacaagtttttaattgttcgcatgagagagctgctctggaggaaggaggactgccagcgcttttaccgggagcacgaaggacgcttcttctaccagaggcttgtggagttcatggcgtcagggccgattcgagcctacatcctggcacacaaagatgcaatccaactctggagaacgttaatgggaccgacccgggttttccgggcaagacatgtggccccagactccatacgaggcagcttcggcctcacagacacccggaacactacccacggctcagactcagtcgtgagcgctagccgcgagattgccgccttttttccggatttttcagagcagaggtggtacgaggaggaagaaccacagttgaggtgcgggccagtgtgctattcacccgaaggaggcgtccactatgttgctggcacaggaggccttgggccggcttag

SEQ ID NO: 126690 - DNA, 585 bp, synthetic construct
  misc_feature 1..585: note = Description of Artificial Sequence: Synthetic coding sequence
  source 1..585: mol_type = other DNA
atgacccagaatctcggaagcgagatggcctcaatattgagatctccccaggcactgcagctgacgttggctttgatcaaacccgacgcagtggctcatccgctaattctcgaagccgttcatcaacagatcctgagtaataaattcctcatagtcagaatgagagaactgttgtggaggaaagaagattgccagagattctacagggagcacgagggaaggttcttttaccaacgcctggtcgaattcatggcaagtggtccaatacgcgcttacatcttggcccataaggatgccatccagctctggcggacactcatgggtcccacccgtgttttccgggctagacatgttgcccctgattcaattaggggatcctttggcctaaccgacactcggaacaccacacatgggagcgatagtgtcgtatccgctagccgagagatcgccgccttcttcccagacttctcagagcagaggtggtacgaagaagaggaaccgcaactgcggtgcgggccggtctgctacagcccagagggaggcgtgcattacgtggctggaacaggtgggctcggccctgcctag

SEQ ID NO: 126691 - DNA, 561 bp, synthetic construct
  misc_feature 1..561: note = Description of Artificial Sequence: Synthetic coding sequence
  source 1..561: mol_type = other DNA
atggcaagtattctccgcagcccacaggccctccagctgaccttagcccttatcaaacctgacgccgttgcccaccccttgattttagaagcagttcatcagcaaatcctgagtaacaaattcctgattgtgcgcatgcgcgagttgctgtggagaaaggaggactgccagcggttttaccgcgagcacgaaggacggtttttctatcagcggctcgtggagttcatggctagcggtcctatccgcgcatatatccttgcacacaaagacgccatccagttgtggcgtacactcatggggcctacgagagtctttagggcccgacatgtagctcctgacagtattaggggctccttcggactaacagatactcggaatacgactcacggctccgactctgtggtgtcagcttctcgcgagatcgcggctttttttcctgattttagtgagcaacgatggtatgaagaggaggaacctcagctcagatgcggcccggtgtgctattctccagaggggggagtgcactacgtagcggggaccggcggcctgggtccagcctag

SEQ ID NO: 126692 - DNA, 360 bp, synthetic construct
  misc_feature 1..360: note = Description of Artificial Sequence: Synthetic coding sequence
  source 1..360: mol_type = other DNA
atggcctcaatactgcgcagcccgcaagcactgcagctgactctggccctcatcaaacctgatgcagtggcccatcccctgatcctagaagccgtgcaccaacagatcttgtcaaacaaatttctgatagtgcgcatgagggaacttctctggcggaaggaggactgccagaggttttatcgggaacacgaagactcggtagtttccgcttccagagaaattgccgctttcttccctgactttagcgagcagagatggtacgaggaagaggagccacagttgcgatgcgggcctgtctgctactctccggagggcggcgtgcactatgttgcgggtaccggtggactcgggcctgcctag

SEQ ID NO: 126693 - DNA, 561 bp, synthetic construct
  misc_feature 1..561: note = Description of Artificial Sequence: Synthetic coding sequence
  source 1..561: mol_type = other DNA
atggccagcatcctgcgctctccacaggcactacagctgaccctcgccctcattaagccagacgccgtggcacatccattaattctggaagccgtgcaccagcagattctatccaataaattcctgattgtcagaatgcgggagctcctgtggcgcaaagaggattgccagcggttctacagggagcacgaaggtcgatttttttaccaacgtctggtggaatttatggcaagcggacctattcgtgcatatattctcgctcacaaggacgcaatccagctgtggcggactctaatgggacccacccgggtgtttagagcacgtcacgtggcacccgatagcatcaggggaagtttcggacttaccgacacccgcaataccactcacggcagcgattctgtcgtgagcgcatcacgagagattgccgccttctttcctgattttagcgagcagaggtggtacgaggaggaagagccccagttacgctgtggtccagtctgctactcaccagaaggtggcgtgcattatgtggcagggaccggtggactcggaccagcttag

SEQ ID NO: 126694 - DNA, 492 bp, synthetic construct
  misc_feature 1..492: note = Description of Artificial Sequence: Synthetic coding sequence
  source 1..492: mol_type = other DNA
atggctagtatcctgcgaagcccccaggccctccagttgaccctcgctctgatcaagcccgacgcagtcgcacacccgctcattctcgaggctgtccatcagcaaatcctgtccaataagtttctcatagtaaggatgcgcgagcttctgtggcggaaggaggattgtcaaagattctatagagagcacgaagccggacagtcagagccaacttcactgccaacccgcatgcccagcagttccggggggcgtagctgggatcccccagaatgttccgagcatgcgatgtggccacaaatcctgtctgtgggcgtgagtgcttcattgactcctgccactcccccaatggttcggacactatggtttcagccagctgagcgcttgcagccaagcagccttaccagtgttaactcagccggaatgcggaggaagagtccgtcctgcgctgtcgcactgtgtgccattgctcagcgggaagtgtccaccatgtag

SEQ ID NO: 126695 - DNA, 561 bp, synthetic construct
  misc_feature 1..561: note = Description of Artificial Sequence: Synthetic coding sequence
  source 1..561: mol_type = other DNA
atggctagcatattgagaagtccccaggccctgcagctcaccctagcactgattaagccagatgctgtggctcatcctctgatcctagaggctgttcatcagcagatcttatctaacaagtttttaattgtccggatgcgcgaactcctatggcgcaaagaggactgtcagaggttttaccgagagcatgaagggcgcttcttctatcagagactggtggagttcatggcttcgggccctattcgcgcctatatcctggcccataaagacgcgatccagctttggcggacactgatggggcccaccagagttttcagggccaggcacgtcgcacccgactcaattaggggtagttttggcttgactgacaccaggaataccacccacggaagcgattcagtcgtgtctgctagccgggagatcgccgccttcttcccggatttttccgagcagcggtggtatgaagaagaagaaccccagcttaggtgtggtcccgtgtgctattctcctgagggaggcgtccactatgtggccggaacaggcgggctcgggccggcatag

SEQ ID NO: 126696 - DNA, 1131 bp, synthetic construct
  misc_feature 1..1131: note = Description of Artificial Sequence: Synthetic coding sequence
  source 1..1131: mol_type = other DNA
atgaatcactccgagcgcttcgtgtttatagctgagtggtatgacccgaatgcaagtctgctgcgtagatacgaattactgttttaccccggagacggatcagtggagatgcatgacgtcaagaaccatcggactttcctgaagaggaccaagtatgacaatctccacttggaagatctgtttattggcaataaggtgaatgtgttttcacgacagcttgtactgatcgattatggcgaccagtacactgcgcgccaactgggctccagaaaagaaaaaaccctcgcacttattaaacctgatgcgatcagtaaagcaggagagatcatcgaaattatcaacaaggccggtttcacaattacaaagctcaaaatgatgatgttgtccagaaaagaggcactggatttccacgtagatcatcaatctcgcccctttttcaatgaactgatacagttcatcaccacaggtcctatcattgcaatggaaatcctgcgtgatgatgccatttgcgagtggaagcgtctgctgggacctgcgaatagtggtgtagcgcggactgacgcctccgagtctattcgtgcactgtttgggactgatggtatccgcaatgcggcccacggacccgatagcttcgcgtcagccgcccgagaaatggagctctttttcccaagctctggcggatgcggccctgccaataccgccaagtttacaaattgtacctgctgtattgtaaagccccacgccgtttcagagggcctgctcgggaagattcttatggccattagagacgcaggttttgaaatttccgctatgcagatgttcaatatggaccgggtgaatgtcgaggagttttatgaagtatacaaaggggtggtgacagagtaccatgatatggtgactgagatgtactcaggaccctgcgtcgcaatggagatccaacagaataatgctactaagactttccgcgaattctgcggccccgctgatcccgagatcgccagacatctgcgccccgggaccctgcgcgccatcttcggtaagactaagatacagaacgctgtccactgtaccgacctgcccgaggatggactgctcgaggtacagtatttctttaagatcctcgacaattag

SEQ ID NO: 126697 - DNA, 1023 bp, synthetic construct
  misc_feature 1..1023: note = Description of Artificial Sequence: Synthetic coding sequence
  source 1..1023: mol_type = other DNA
atgcatgacgtgaagaaccaccgcacttttctgaaaaggacaaagtatgacaacctgcaccttgaagatctgttcattgggaacaaggtgaatgtattcagcaggcagctggtgttgatagattacggagatcagtacactgctaggcagctgggttccagaaaagagaaaacccttgcacttattaagccggacgcaatcagcaaggccggggaaatcattgagattatcaacaaagcaggctttaccatcactaagctcaagatgatgatgctgagtaggaaggaggcacttgactttcacgtggaccaccaatctcggcctttttttaacgaactgattcaatttattacaaccgggccgatcatcgctatggagatcctgagagatgacgccatctgcgaatggaagaggctgctggggcctgccaactcaggtgtggctcggactgacgcttccgagtcaattcgggcgctatttgggacagacggtattagaaacgccgcccatggtcccgatagttttgcctcagctgcccgcgaaatggaactcttctttccatcctctggggggtgcggaccagctaacaccgccaagttcacgaattgcacatgttgcattgtaaagcctcacgccgtgagcgaaggactcctcggtaaaatactgatggccatcagggatgcaggttttgagattagtgcgatgcagatgttcaacatggatcgagttaacgtggaggaattctacgaagtatataagggcgtggtgacagaatatcacgatatggttaccgagatgtattcggggccatgtgtcgcgatggaaatccagcagaacaacgccactaagacattccgagaattttgtggacctgctgatcccgaaatcgctcggcacttaagacctggcacattgcgggctatttttggcaagacgaagatccagaacgcagttcactgcacagacctgcctgaggatgggcttctcgaagtgcaatacttctttaaaatcctcgacaactag

SEQ ID NO: 126698 - DNA, 1416 bp, synthetic construct
  misc_feature 1..1416: note = Description of Artificial Sequence: Synthetic coding sequence
  source 1..1416: mol_type = other DNA
atgcagagcaataagacattcaatcttgaaaaacaaaaccatactccgcggaaacaccaccaacaccatcatcagcaacagcaccatcagcaacagcagcagcaacctccacctccacctattccagccaatggccaacaagcctcctcccaaaacgagggtcttaccatagatctgaaaaacttccgcaagcctggagagaagaccttcacacagcgcagcaggctgttcgtcggaaatcttccccccgacatcacggaggaggagatgcgcaagctgttcgagaaatatgggaaggccggggaggtgttcatccataaggacaaggggttcggattcatccggcttgaaaccagaactctggccgagatcgctaaagttgaattggacaacatgcctctgcgaggtaagcagttacgggttcggttcgcctgtcactcagccagtctgaccgtccgtaatcttccccagtacgtcagcaatgagcttctggaggaagcgttctcagtgtttggccaagtggagagggccgtggtgatagttgatgaccgaggccgccccagcgggaagggtatcgtggagttctctgggaagcccgcggcgcggaaagcactggatcggtgtagtgagggctcctttcttctaacaacttttcctagaccagtcaccgtggagccaatggatcagttggacgatgaagagggactacctgaaaagctggttattaagaatcagcagtttcacaaggagcgggagcagccgccccgatttgcccagcccggcagcttcgagtatgagtatgctatgagatggaaggccctgatcgagatggagaagcagcagcaggaccaggtggaccggaacatcaaggaggcccgggaaaagctggagatggagatggaggctgctcggcacgagcaccaggtgatgctgatgcgtcaggacctcatgcggagacaggaagagctgagacgaatggaagagctgcacaatcaagaggtgcagaagcgtaagcagctggaactgcggcaagaagaagagcggcgtcgcagggaggaagaaatgaggagacagcaggaagagatgatgaggcggcagcaagagggcttcaagggcacattccccgatgctcgggagcaggaaatcagaatgggccagatggcaatgggaggtgcgatgggcattaacaatcgaggtgccatgccacccgccccggtgcctgcaggaacccctgcacccccaggaccggccacaatgatgccagacggcacactggggctaactccgcccaccacagagagatttgggcaagcagcaacaatggaaggcatcggggccataggaggaacacctcctgccttcaaccgggcagcacctggggcagaattcgcgccgaataagcgaaggcgatactag

SEQ ID NO: 126699 - DNA, 1416 bp, synthetic construct
  misc_feature 1..1416: note = Description of Artificial Sequence: Synthetic coding sequence
  source 1..1416: mol_type = other DNA
atgcagtctaataaaaccttcaacctcgaaaaacagaatcataccccccgtaaacaccatcagcaccaccaccaacagcagcatcaccagcaacagcaacagcagccaccaccccccccaatccccgcgaacggacaacaggcatcctcgcagaatgaaggcttgacaatcgacctcaaaaattttaggaagcccggagagaaaaccttcacacaacgatctagactctttgtgggcaacctgccacccgacataactgaagaagagatgcgcaaactgttcgaaaaatatggcaaggcaggtgaggtgttcatacataaggacaagggatttggattcattcgtctggagacacggactctcgcagagattgccaaagtggagctggacaatatgccgctgagaggtaaacagcttagggtgaggtttgcttgtcattcggcctctcttaccgttaggaatcttccacagtacgtgtctaatgagctgcttgaagaagccttctccgttttcgggcaggtagagcgcgcagtcgtaattgtggacgatcgcgggaggcctagtggcaagggaatagtggagttcagcggaaagccagcggcaaggaaggcgcttgatagatgctccgaagggtcattcctgctgaccacctttccacggccagtcacagtcgagccgatggaccagttggacgacgaggaagggcttcccgagaaactggttatcaaaaatcaacagtttcacaaggagagagaacagcccccccgttttgcccagcccgggtcattcgagtatgaatatgccatgagatggaaggcccttatagagatggagaaacagcaacaggatcaagtggataggaacatcaaagaagcccgggaaaaactggagatggaaatggaggccgcccgtcatgagcaccaggttatgcttatgagacaggacctgatgcggagacaagaggaactgcggagaatggaagagttgcataatcaagaagttcagaaaagaaaacagcttgagctccggcaggaagaggaaaggaggcggcgcgaagaagagatgagaaggcagcaagaggaaatgatgagacgtcagcaggagggcttcaaaggtacttttccagacgcgagggaacaggagatccggatggggcaaatggcaatgggaggcgccatgggaatcaacaaccgtggcgctatgccacccgctcctgtgcccgcaggaacccctgcgcccccaggccccgcaacaatgatgccggatggtaccctggggttgacccccccaactactgaaaggtttggccaggcagccactatggagggcatcggagctattggaggaacccctccggcctttaatcgggcagccccgggagccgagttcgcccccaacaaacgccgcagatattag

SEQ ID NO: 126700 - DNA, 1416 bp, synthetic construct
  misc_feature 1..1416: note = Description of Artificial Sequence: Synthetic coding sequence
  source 1..1416: mol_type = other DNA
atgcagtctaacaagaccttcaacctcgaaaagcagaatcatacgcctaggaaacaccatcaacaccaccatcaacagcaacatcatcagcagcagcaacagcaaccaccaccgcctcccatcccagcaaacggccagcaagcatcctcccagaatgaggggctcacaattgatttgaaaaactttagaaaaccgggagaaaaaacattcactcagagaagtcggctgttcgttggcaacctacccccagacataaccgaagaagaaatgagaaagctgtttgagaaatacgggaaagctggcgaggtatttattcataaagataagggatttggatttattcggcttgagacccggactttggcagaaatcgctaaggtggaactcgataacatgccactccggggcaagcagctgcgggtccgcttcgcctgtcacagtgcttccctgactgttcgaaacttgccacagtatgtgtcgaacgaattgctcgaagaggccttcagcgtgttcggccaggtggaaagggccgtggtgatagtcgacgaccgtgggcgcccatccggaaagggcattgtagagtttagtggaaagcctgctgctaggaaagcactggataggtgctccgagggttctttcctgctcacaacattcccaagaccagtaacagtggaacctatggatcagctcgatgacgaggaaggactgcccgagaagctggtcatcaagaatcagcagttccacaaggagcgcgagcagcccccacgatttgcccagccaggtagcttcgaatatgagtatgctatgaggtggaaggcactcatcgaaatggagaagcagcaacaggatcaggtggataggaacatcaaggaggccagagagaaactggagatggaaatggaggccgcacggcacgaacaccaggtgatgctgatgcggcaggatcttatgcggcgacaggaagaattgcggagaatggaggaattgcacaatcaggaagtccagaagcgtaaacagctagaactgcggcaggaggaagagcgacggagaagggaagaggagatgaggcgacagcaggaggagatgatgcgtagacagcaggagggctttaagggcacgttccctgatgcccgcgagcaggagatccgcatgggccagatggcgatgggtggggctatgggtatcaataaccgcggcgcaatgccccctgctccagtgcctgcgggaacccccgcacctcccggacccgccacaatgatgccagacgggaccctgggcctcacccctccaacaacagagcgattcggacaggccgctaccatggagggtatcggagcgataggcggcactccgccggcctttaatcgcgccgctccgggtgccgagtttgcccctaacaagagacgacgctattag

SEQ ID NO: 126701 - DNA, 747 bp, synthetic construct
  misc_feature 1..747: note = Description of Artificial Sequence: Synthetic coding sequence
  source 1..747: mol_type = other DNA
atgcaaagcaataagacattcaacttggaaaaacagaaccacactcctcggaaacatcaccagcatcatcatcagcagcagcaccatcaacagcagcaacaacagccgcctccaccacctatcccggcaaacggccagcaggctagttctcaaaacgagggactcactatcgatttgaaaaactttcgcaagcccggcgagaaaacatttacacaacgttctcgcttatttgttggcaacctgccacctgacatcacagaggaggaaatgagaaagctatttgaaaaatatgggaaagcgggggaagtattcatccataaagataagggtttcgggttcatacgcctagagaccaggaccttagcagaaatcgctaaagtggagctggacaatatgcccctgcggggcaaacagcttcgggtacgattcgcatgtcactccgccagccttacagtaagaaacctccctcaggaaagggagcaacccccccgtttcgcccaaccgggttcgtttgaatatgagtacgccatgagatggaaggccctgattgagatggagaagcagcagcaagaccaggtggaccgcaacataaaggaggctcgagagaaactcgagatggagatggaagcagctaggcacgaacatcaagtgatgctgatgcgccaggatcttatgagacgccaggaggagctccgtaggatggaggaactgcacaatcaggaagtgcaaaaaaggaagcagttgtag

SEQ ID NO: 126702 - DNA, 708 bp, synthetic construct
  misc_feature 1..708: note = Description of Artificial Sequence: Synthetic coding sequence
  source 1..708: mol_type = other DNA
tagcctgacatcactgaagaagaaatgagaaagcttttcgaaaagtacggtaaagccggtgaggtatttatccacaaagacaaggggttcggttttattaggcttgtcgagcgcgccgtggtgatcgttgacgaccgcggtaggccaagtggaaagggaatagtggaatttagtggcaaaccagccgcaagaaaagcactggaccggtgttccgagggctcattcctgttgaccacctttcctcgacctgtgacggtcgagccaatggatcagctggacgatgaagagggtctgcctgaaaagctggtgattaagaatcagcagttccacaaggaacgggaacagccccctcggttcgcgcagcccggcagtttcgagtatgagtacgcgatgagatggaaggcactcattgagatggagaaacagcagcaggaccaggtggatcgcaatataaaagaggcacgtgagaaactagaaatggagatggaggccgcccggcacgaacatcaagtcatgctcatgagacaggacctaatgcgcagacaagaggagctgcgtcggatggaggaactccacaaccaggaggtgcagaaaagaaagcagcttgaattgcgccaggaggaagaacgccgtcgacgggaggaggagatgcgccgccagcaagaggagatgatgagaaggcagcaggaggggttcaaagggacctag

SEQ ID NO: 126703 - DNA, 375 bp, synthetic construct
  misc_feature 1..375: note = Description of Artificial Sequence: Synthetic coding sequence
  source 1..375: mol_type = other DNA
atgcaatccaacaaaaccttcaatttggagaaacagaatcacaccccaaggaaacatcaccagcaccaccaccagcagcaacatcaccaacagcagcagcagcagcctccccctcctccaattccagcaaacggtcagcaggcttcctcgcagaacgaagggttgaccattgacctcaaaaactttcggaagccaggagagaaaacctttacgcaacggagtagactattcgtggggaacctccctccagacatcaccgaagaggagatgcgcaagctctttgaaaagtacgggaaggagacacggactctggccgagatagccaaggtggaacttgacaacatgcccctaaggggcaagcagctgcgagtttag

SEQ ID NO: 126704 - DNA, 201 bp, synthetic construct
  misc_feature 1..201: note = Description of Artificial Sequence: Synthetic coding sequence
  source 1..201: mol_type = other DNA
atgcaaagtaataagacgttcaacctcgaaaagcagaatcataccccacgaaaacatcaccaacatcaccatcagcagcagcaccaccagcagcagcaacagcagccacctccaccccccattcccgccaatgggcaacaggcttcctctcagaacgaagggctcactatcgacctgaagaatttcagaaaaccaggctag

SEQ ID NO: 126705 - DNA, 624 bp, synthetic construct
  misc_feature 1..624: note = Description of Artificial Sequence: Synthetic coding sequence
  source 1..624: mol_type = other DNA
atgcaatcaaacaagacctttaacctggagaaacagaaccacacccccagaaagcatcatcaacatcaccatcagcagcaacatcaccagcaacaacaacagcaaccaccccctccccccatcccagcaaacggccagcaggcttccagccagaatgagggactgaccatcgacttaaagaactttcggaaacccggtgagaagacgtttacacagcgctccagattatttgtgggaaatctcccacctgacatcaccgaagaggagatgcgcaaactctttgagaaatatgggaaggctggagaagtgtttatccacaaagataaggggttcggctttattaggcttgaaactcggacattggccgaaatcgccaaagtcgagcttgataacatgccccttcgtggtaagcaactgagagttagatttgcctgtcacagcgcctcactcacagtccggaatctgcctcagtacgtgagtaacgaactcctagaagaggcgttcagcgttttcggtcaggtcgagagagctgtggtgattgtggacgacagggggcggccctccggcaaagggatcgtggagttttctggtaagcccgccgcccgaaaagcacttgacaggtag

SEQ ID NO: 126706 - DNA, 1149 bp, synthetic construct
  misc_feature 1..1149: note = Description of Artificial Sequence: Synthetic coding sequence
  source 1..1149: mol_type = other DNA
atgcgcaagctctttgaaaaatatgggaaggctggtgaggtgttcatccacaaggacaagggctttggcttcattcgactggagactcgcacactcgcagagatcgcaaaggtcgagctcgacaacatgcctttacggggcaaacagcttcgagtcaggttcgcatgtcactcagcatctctgactgttcgtaatctcccacagtatgtgtcaaatgagctcctcgaggaggcattctcagttttcgggcaggtcgaacgggcggtggtaatcgtggacgacaggggacgacccagtggcaaggggatcgtcgaattcagtggtaagccagcggcccggaaagccctggacagatgctcggagggatccttcctcctcactacatttccccgccccgtgaccgtagagcccatggaccaactagacgacgaggaggggctcccggaaaaactagtgattaaaaatcagcagtttcataaggaacgtgagcagcctcctagatttgctcagccagggtcattcgagtatgagtacgccatgagatggaaggccctcattgaaatggagaagcaacagcaagatcaagtggatcggaatattaaagaggctagggaaaaacttgaaatggagatggaggccgcaagacacgagcatcaggttatgctcatgcgccaggatctgatgcgcagacaggaggaactacgtaggatggaggagctacacaatcaggaagtccaaaagaggaagcaactcgaactgagacaggaggaggagcgcaggagacgggaagaggagatgcgccggcagcaggaggagatgatgaggcggcaacaagaaggtttcaaagggacatttcccgacgctcgagagcaggagatcaggatgggacaaatggcaatgggtggcgctatgggcatcaacaatcggggcgccatgcccccggccccagtgccggccggcacccctgctccgcctggccctgcaacaatgatgccagacgggactctagggctgacccccccaacgacagagcgttttggacaggctgccacaatggagggcattggtgcaataggcggaactcctcctgccttcaacagagctgctccaggtgccgagttcgcaccaaataagaggcgccgatactag

SEQ ID NO: 126707 - DNA, 3048 bp, synthetic construct
  misc_feature 1..3048: note = Description of Artificial Sequence: Synthetic coding sequence
  source 1..3048: mol_type = other DNA
atgggagcggagaggcggctgctaagtattaaagaagcttttaggctggcccaacagccacatcaaaaccaggctaaattagtcgtggcacttagccggacatacagaactatggatgataagacagtgtttcacgaagagttcattcactatctgaaatacgttatggtggtgtataagagagagccggccgtggaacgggtgatcgaatttgcagctaaattcgtcacaagcttccatcagagtgacatggaagacgatgaagaggaggaggacggggggctcctgaattatctgtttacattcctgctgaaatcccacgaagccaatagcaacgccgttcggttcagagtgtgcctcctcattaacaagctgctaggctccatgccagaaaatgcccagattgacgacgatgtgttcgataaaattaataaagccatgcttattcgcctcaaggataagatccctaacgtcaggatccaagccgtccttgcgttatccagactgcaggaccccaaagatgatgaatgcccagtggtgaatgcctatgcaacattaatcgagaacgattccaaccctgaggttagacgtgccgtgctctcctgtatcgctcctagtgctaagacactcccgaagatagtgggcaggaccaaggatgtcaaagaagccgtgcgtaaactcgcataccaagttctggctgaaaaagttcacatgcgggccatgtctattgcccagagggtcatgctactgcaacagggcctgaatgaccggagtgatgcggtcaaacaggcgatgcaaaagcacctgctgcagggctggctgaggtttagcgaaggcaacatcttggagctgctgcacagactggatgtcgaaaacagttccgaagtggcagtgtctgtgttaaatgcactgttttccattactcctttaagtgaattagtgggattgtgtaagaacaacgatggccgtaagcttattccagtggagaccctgactcccgaaatcgccctctactggtgtgcactttgcgagtatcttaagtctaaaggcgatgaaggggaagagtttctggagcagattctgcctgagcccgtggtctacgccgattacctcctgtcttacatccagtcaatccccgtggtcaatgaggaacaccggggcgacttctcttatattgggaatttgatgaccaaagagttcataggacagcagttgatcctcatcataaagagccttgacacttccgaagagggggggagaaaaaaactgctggccgtgcttcaagaaattctgatcttgcctaccatccccattagcctggtgtctttcctggtagagcgtcttctgcatatcattattgacgataataagcgcacccaaattgttaccgagatcatctccgaaatacgggcccccatagtaacagtgggggtcaataatgatcctgcagacgtaagaaagaaagaattgaaaatggcagaaattaaagtgaagctgatcgaagccaaggaggctttggaaaactgcataaccctgcaggacttcaatagggctagcgaacttaaagaagagatcaaagccctggaagacgccagaataaatctgctaaaagaaaccgagcaattggagataaaagaggtccatatcgagaaaaacgatgcagagactctgcagaaatgcttaatactgtgttacgagctattgaagcagatgtccatctcaacaggcttgagcgccactatgaacggcattatagagagtctgattttaccagggattattagcatccatccggtagtgcgcaaccttgccgtcttgtgcctcggatgctgtggtctgcagaaccaggacttcgctcggaaacatttcgtccttttacttcaagttctgcagattgatgacgtgaccataaaaattagcgctttgaaagctatcttcgaccaactcatgactttcgggattgagcccttcaagaccaaaaagatcaagactcttcattgtgagggaaccgaaattaacagcgacgacgagcaggagtctaaggaggtagaggagacagcgaccgcaaaaaacgttttgaaactgctcagcgacttcttggacagtgaggtgtccgaactccgaaccggcgccgcagaagggctggccaagctgatgttctccggcctgctggtcagcagtagaatcctgagccgcctgattctgctgtggtacaatccagtgacagaggaagacgtgcagctgagacactgcctaggagtgtttttcccggtgtttgcttacgccagccgaacaaaccaagagtgctttgaggaggcattcttacctacactacagacattagctaatgcacccgccagttcccctctagcggagatcgatataaccaatgtcgcagagctgctcgtggaccttactaggccctcgggactcaatcctcaggcaaaaacctctcaggattatcaggccctaaccgtgcacgacaatctggccatgaaaatttgcaatgaaattcttacgagcccttgtagtcctgagattagggtgtacactaaggccctctcatccctggaattgtcttcccatctggcaaaagatctcctggttctgcttaacgagatcctggagcaggttaaggatcgcacatgcctccgggccctggagaagattaagattcagctggaaaagggaaataaggagttcggagaccaggccgaggccgcccaagatgcaactctgaccaccaccaccttccaaaacgaggatgagaagaataaagaggtttacatgacgccccttcggggagtgaaggctacccaagcttcaaagtccacccagctgaaaaccaacagaggtcagcgaaaggtgacggtttcggccagaacaaaccgacggtgtcagacagctgaggccgactctgaaagcgaccatgaggtgccagagccagagtccgagatgaaaatgaggctcccccggcgggctaaaaccgcagcattggagaaatccaagttaaacttagcccagttcttgaacgaggacctgagctag

SEQ ID NO: 126708 - DNA, 951 bp, synthetic construct
  misc_feature 1..951: note = Description of Artificial Sequence: Synthetic coding sequence
  source 1..951: mol_type = other DNA
atgtccggcgatagcagcggtcgcggacccgagggccgtggcaggggccgtgatccacaccgcgataggaccagatcgagaagtcggtctcgatctccactgagcccaaggagcaggaggggcagcgcgcgtgaaagacgcgaggcgccagagcgcccatcattagaggacacagagccttccgactccggcgacgagatgatggatccggcctcattggaggccgaagcagaccagggcctatgtcggcagattcgccaccagtatcgcgcgctgattaattcagtgcagcagaatagagaagatattctcaacgctggagataagctcacggaagtgctggaagaagccaacaccctcttcaatgaagtgagtcgcgccagagaagccgtgctggacgcacactttctggtcctcgcctcagacctcgggaaagagaaggccaagcagctgaggagcgatttgtcaagcttcgacatgcttagatacgttgaaacgctgttgacacatatgggggtcaacccattggaagcagaggagttaatccgggatgaagattctccagattttgaatttatagtatacgactcttggaaaatcaccgggcgaactgcagaaaacacattcaacaagacacacacatttcattttctgttgggcagtatctacggcgagtgtcccgtacccaagccccgggtagacaggcccagaaaggtgcctgtgatccaggaggaaagggccatgccagcacagttacgcaggatggaggaatctcaccaggaagccaccgaaaaagaggttgaacgcattctgggactgctgcagacttatttccgggaagaccgagattcccttactctctcaccgcggctcgaatgcagtgggacgatctccacacactgcaacctgcatttactcgacagcagtaactcccccgcttcagcttcatag

SEQ ID NO: 126709 - DNA, 1158 bp, synthetic construct
  misc_feature 1..1158: note = Description of Artificial Sequence: Synthetic coding sequence
  source 1..1158: mol_type = other DNA
atgtcaggggacagcagtgggcggggtcccgaaggaagaggacggggcagggatccacatagggatcggacccgcagtcgctcccggtccaggtcacctctaagccctcgctcccgtaggggatccgcacgagagagacgtgaggcgcctgagcgcccgagcctcgaggatactgaaccctcagattccggtgatgagatgatggaccccgcctcattagaggcagaggcagaccaggggttgtgtagacagattcggcaccagtacagggctctcattaattcagtgcagcaaaatcgtgaagatatactgaatgcgggcgacaagcttactgaagtcctcgaggaggccaatacgctgtttaacgaagtctcccgtgcgcgggaggctgttctagacgcacacttccttgtgctcgctagtgatctggggaaagagaaggccaaacagctcagaagcgacctgtcttctttcgatatgcttcggtatgttgaaacacttctcacccacatgggggttaatccattggaggcggaggaattgattcgggacgaagattcccctgacttcgagttcatcgtctatgatagctggaagatcacgggccgaacagctgagaatacatttaataagactcacaccttccacttcctgcttggttccatctatggggaatgtccggtgccaaaacccagggtggaccggcctagaaaagttcccgtgatccaggaggagcgcgctatgcctgcccagctcagacgtatggaggagagccaccaggaggcgactgagaaggaggtggagaggatcctggggcttctccagacctattttcgtgaagatccagacacgcctatgagtttttttgacttcgtggtggacccccacagtttcccacgcacagttgagaatatttttcatgtgagcttcatcattcgcgacggtttcgccaggatcaggctggatcaagaccggctaccggtaatcgaaccggtctccatcaacgaagagaacgagggattcgagcataatactcaggtgagaaaccagggtatcatagccctgagctatcgggactgggaggagatagtcaaaacatttgaaatcagcgagccggtgattaccccgagccagagacagcagaaacccagcgcttag

SEQ ID NO: 126710 - DNA, 519 bp, synthetic construct
  misc_feature 1..519: note = Description of Artificial Sequence: Synthetic coding sequence
  source 1..519: mol_type = other DNA
atgttacggtatgtcgaaacgcttttgactcacatgggagtcaatccactggaagccgaggagctaatccgagatgaggattcccccgatttcgagtttattgtttacgacagctggaagattactggccgcaccgccgagaacacctttaacaagacacatacgtttcactttctgctgggctctatttacggtgagtgtcccgtacccaaaccgcgagtggacaggccaaggaaagtccctgttatccaagaggagcgagccatgccagcccaattgaggaggatggaagagagtcaccaagaagccaccgagaaggaggtggagcgtatactgggcctgctgcagacctacttccgcgaggatccagatacccccatgtcatttttcgattttgttgttgacccacactcctttccccgcactgttgaaaatatttttcacgtctctttcatcatccgggacggctttgcgcggatccgcctggaccaggacagactccctgtcatcgggaagtag

SEQ ID NO: 126711 - DNA, 2574 bp, synthetic construct
  misc_feature 1..2574: note = Description of Artificial Sequence: Synthetic coding sequence
  source 1..2574: mol_type = other DNA
atggcgaaagccaagaaggtgggggctaggaggaaagccagcggcgcccccgccggagccagggggggtcctgccaaagccaacagcaatccattcgaggttaaggtgaatcgtcagaaattccagattctgggacgcaagacccgtcacgacgtggggcttcctggggtgtcccgggcgcgtgccctgcgcaaacggacccaaacacttctgaaggagtacaaggagagagacaaatccaacgtatttcgggataagcggttcggagaatacaacagtaacatgtccccagaagagaagatgatgaaaaggtttgctctggagcagcagcgccatcatgagaaaaaatccatttacaacctgaatgaagacgaggaactgactcactatggtcagtccctggcagatattgagaaacataatgatatcgtggactctgattccgacgcagaagatagaggtaccctgtccgcagagcttactgctgcacacttcggcggaggcggagggctgctgcacaaaaagacccagcaggagggagaggagcgggagaagcccaaatcccggaaagaactgattgaggaactaatagccaagtccaagcaggagaagcgggaaaggcaagcccagagggaagatgccctcgagctcacggagaagctggaccaagactggaaggaaatccagaccttgctgtctcataagacgcccaagtcagagaatcgggataagaaggagaagccaaagcccgatgcttacgacatgatggtgcgcgagctcggctttgaaatgaaggcacaacctagcaatagaatgaagaccgaagctgaactagccaaggaagaacaggagcacttgaggaagctggaggctgaacggctaaggcggatgctggggaaggacgaagatgaaaatgttaaaaaacccaagcatatgtcggcagatgacttgaacgatggtttcgtgctggacaaggacgatcgcagactgctgtcttataaggacggcaaaatgaatgtcgaggaggatgtgcaagaggaacaaagcaaggaagcttctgatccggaatcgaatgaagaagaaggtgatagttctgggggagaggataccgaagaatcagactctccggatagccacctggatcttgagtctaatgttgaatccgaggaagaaaacgagaagccagcaaaggagcagagacagacccccggtaaaggtcttatatctggcaaagaacgggcaggcaaagccaccagggatgagctgccgtacaccttcgccgcccccgagagttacgaggaacttcgcagccttctccttggaagaagcatggaggaacagctgcttgtcgtggagcgcatccagaagtgtaaccacccgtctctggccgaggggaacaaggccaagctggagaaattgttcggatttctacttgaatatgttggcgacctcgctacagatgaccctcccgatcttacggtgattgataaactagtcgtccatctgtatcatctctgccagatgtttccggaatctgcctcagacgctatcaagttcgtattgagggatgccatgcatgagatggaggaaatgattgagacaaagggacgggccgctctcccaggacttgacgtcctgatttatcttaagatcaccggactcctgttccctacatccgatttttggcacccagttgtgacaccagctctagtgtgtttgtcacagctcctaacaaagtgccctatcttgtcactgcaagacgtggtgaaagggctgttcgtgtgctgcctgtttctggaatacgtcgcactcagtcagcggttcatccccgagttaatcaatttcctgctcgggatcctgtacatcgcgaccccaaacaaagcctcccaaggatccacgctagtgcacccttttcgggcgctcggcaaaaattctgagcttctcgttgtgtctgcacgagaagacgtagccacgtggcagcaaagcagtctcagcttgagatgggcgagtaggctgagagcccccacctccacagaagcaaatcatattcggctgagttgtctagctgttggtctggcgctactcaagcgttgcgtgcttatgtatggaagcctgcctagcttccatgcgattatgggtccgctccaagcattgctgacggatcatctcgccgattgtagccatcctcaagagctgcaagagctgtgccagagcaccttaacagagatggaaagccagaaacaactgtgtcgccctctcacctgtgaaaagagcaaacccgtcccgctcaagctgttcacgcccagactggtgaaggtgctggagttcggtaggaagcagggcagcagcaaggaagagcaggaaagaaaaaggttgatccacaaacacaagcgcgagtttaagggggccgtccgagagattcgcaaagacaaccagtttctggccagaatgcaactgagcgagatcatggagcgggacgccgagaggaaacgcaaagtaaaacagctgtttaacagcttggcgacccaggagggcgagtggaaggctctcaagcgcaagaagttcaaaaagtag

SEQ ID NO: 126712 - DNA, 2421 bp, synthetic construct
  misc_feature 1..2421: note = Description of Artificial Sequence: Synthetic coding sequence
  source 1..2421: mol_type = other DNA
atggccaaggccaagaaagtcggggcaagacgcaaggcaagtggcgctcctgctggggcacgcggcggcccagcaaaagctaattccaaccccttcgaagtgaaagtcaaccgacagaagttccagatcttgggaaggaaaactagacacgacgtggggctgccaggggtctcaagggccagagctctgaggaaaagaacgcaaacgctactgaaggagtacaaggagagggacaaaagcaatgttttcagagacaagcgctttggtgagtataattctaatatgtctccggaggaaaaaatgatgaaacgctttgctctcgaacagcaacgccaccacgagaaaaaaagcatctacaatctgaacgaagatgaggagctcacccactatgggcagtcactagccgatattgagaagcacaacgatatcgtggactctgacagcgatgctgaggataggggcaccctgtccgccgagctgaccgctgctcacttcggaggaggggggggactcctccataaaaagacacagcaggaaggagaagaacgcgagaagccaaagtcccgcaaggaactgatcgaagaactgatagcaaaatcaaagcaggagaaaagggaacggcaggcccagcgagaggacgcgctggaactgaccgagaaactcgatcaggattggaaggaaatccagacgcttctcagccacaaaaccccaaagtcagagaatagggacaaaaaagagaaacccaaacctgacgcgtatgacatgatggttcgggaactgggatttgagatgaaggcacagccgtccaatcgcatgaagactgaggctgaacttgccaaagaggaacaagaacatctgagaaaactggaggctgagcgcttgcggcgaatgcttggaaaagatgaggatgaaaatgttaaaaagccaaaacatatgtccgccgacgaccttaacgacggcttcgtgctggacaaagacgataggaggctactcagctacaaggatggcaagatgaatgtcgaggaagacgtgcaagaagagcaatccaaagaagcctccgaccctgaaagcaatgaggaagaaggagactcatctggcggcgaggacaccgaggaatcagattcccccgactcccacttagatctcgagtccaatgttgaaagcgaggaggaaaatgaaaagccggccaaggagcagcgccaaacccctgggaagggcctgatctctggaaaagagcgtgctggaaaagcaacccgggatgagctaccctacacattcgccgcacccgaaagttatgaggagttgcgctctctgctcctgggtaggtctatggaggaacagctgctcgtggtggagaggatccagaagtgtaatcatccctcccttgctgaggggaataaagccaaactagagaagctctttggcttcctgcttgaatatgtaggggaccttgctacggatgacccgccagatctgaccgtgattgacaaattagtagtgcatctttaccacttgtgtcagatgtttcccgaatcagcgtctgacgccattaagttcgtgctgcgcgatgccatgcacgaaatggaggagatgatcgaaacaaagggaagagccgcactgcctggtctagacgtgctaatctatctgaaaattacagggctgctatttccaacctccgacttttggcatcccgtagtcacacccgcactcgtgtgtctgtcccagctcctaacgaaatgccccatcctgtcgcttcaggacgttgttaaaggtctatttgtgtgctgcttgtttctggaatacgtggcccttagccagaggttcattccagaactgattaactttttgttaggaatcctgtatatcgcgacaccgaacaaggcttcccaaggcagcactttggtgcacccgttcagggcactgggaaagaactccgagcttcttgttgtcagcgctagagaagacgtggccacctggcaacagtcctcattgagtcttcgctgggcttccaggctgcgggccccgacgtctacagaagctaaccatattaggctctcatgccttgcggtgggcctggcactgttaaaacggtgcgtactgatgtatggcagtctgccaagcttccatgccattatgggacccttgcaggcactcctgaccgaccacctcgccgactgcagccacccacaggagctgcaggaactgtgccaatctactctgactgagatggaatcccagaagcagctttgcaggccgcttacttgcgagaagagtaaacctgtgcccctgaagttatttacccctagactagtctcaaacagtcgcccccaagttatccatcttccatggcctcccaactatcggtgtgaacctcagcacccagccaaaaaggtgattttcttcagagtaatcatgctgtag

SEQ ID NO: 126713 - DNA, 2574 bp, synthetic construct
  misc_feature 1..2574: note = Description of Artificial Sequence: Synthetic coding sequence
  source 1..2574: mol_type = other DNA
atggcaaaggcgaaaaaggtgggggctcggcgtaaagcaagtggggcccccgctggcgcacgaggtggccctgctaaggcaaactctaacccattcgaagtcaaggtaaaccggcagaaatttcagattttgggaaggaagacccgccacgacgtgggcctgccgggcgtttccagggcccgcgccttgcggaagcggacacaaacactgttgaaggaatacaaagaaagggataagagtaacgtattccgcgataagcggttcggcgagtataactcgaatatgtctcctgaggaaaaaatgatgaaacgctttgccctcgagcagcagcggcatcatgagaagaagagcatctacaacctgaatgaggacgaagaattgacccactatggccagtccctggcagatatcgaaaaacacaacgacattgttgattcagactccgacgccgaggaccggggcacactgagcgccgaacttacggccgcacacttcggtggcggaggggggttgttgcacaagaaaacccagcaggagggtgaggaacgggagaagccgaagtctagaaaggaattaatcgaggaactgattgctaagagcaaacaggaaaagcgtgagcgacaggcccagcgcgaagatgccctggagctcaccgagaagctggaccaggactggaaggagattcagacacttctgtctcacaagactccaaaatccgagaatcgagacaaaaaggagaaacccaaacctgacgcttacgatatgatggtgagggagcttggctttgaaatgaaggctcaacctagcaacaggatgaaaacggaggcggagttagccaaagaggaacaggaacacctcaggaaacttgaggcagaaagattaaggagaatgttagggaaggatgaggacgagaacgtcaagaagccaaagcacatgtctgcagacgacttgaatgacggatttgttctggataaggatgaccgccgcctactgagctataaggatgggaagatgaacgtagaagaggacgttcaggaggaacagtcaaaagaggcgtctgacccggaaagtaatgaagaagaaggcgacagtagcggcggagaagataccgaagagtccgactcaccagacagccacctggatctcgagagcaacgtcgagagcgaagaagagaacgaaaagcctgcgaaagaacagagacagacgcctggaaagggtttaatctccgggaaagagagagcggggaaggccactagggatgagctcccttacacatttgcggctcctgaaagctatgaggaattgaggtcactgctgctcggaagaagcatggaggaacaacttctggtggttgagaggatacaaaaatgcaatcacccaagcctggcggaaggtaacaaagccaaactagagaagctctttgggttcctgctcgagtacgtgggtgatctggccaccgatgatcctcccgatctaacagtgatagacaagctggtcgtccacctctaccacctatgtcagatgttccctgagagcgctagtgacgccataaaattcgtactgagagatgccatgcacgaaatggaggagatgattgaaaccaaggggagagcggcgctgccaggactggacgtgttgatatatctcaagatcacaggactgttattccccacttccgatttctggcaccctgtagtgactcctgccctggtctgcctgtctcagctcttaaccaaatgccctattttgtccctgcaggacgtagtgaagggtctctttgtctgctgcttgttccttgagtacgtggcactgtcccagagattcatcccagagcttatcaacttcctgctggggatactctatatagctacccccaacaaggcatctcaaggctctacattagttcacccctttagggcgctcggcaaaaactcggagttgctggttgtatcagcccgcgaagacgtcgccacctggcaacagtctagcctttcactacgctgggcctcaaggctgcgagcacctacaagtacggaggccaaccacatccgactgagttgcctggctgtagggttagccctgctgaaacgctgcgtgttaatgtacggatctctgccttcttttcacgccattatggggccactgcaagcattgttgaccgaccacctggcggattgtagtcacccacaagagctccaggagctctgccagtccacactgactgaaatggagtcccagaaacagctgtgtagacccctgacatgtgaaaaatctaagcctgtcccactgaaactgttcacacctcgcctcgtgaaggtgcttgagttcggccgaaaacagggatcatcgaaagaagagcaagaacgcaagcgccttatacataaacataagcgggaatttaaaggggccgtccgcgagatcagaaaagataatcagtttttagcccgtatgcagctctccgagattatggagagggacgccgagcggaaacggaaggtcaaacagttgttcaatagtctcgccacgcaagaaggcgagtggaaggctttgaagaggaagaagttcaagaaatag

SEQ ID NO: 126714 - DNA, 1728 bp, synthetic construct
  misc_feature 1..1728: note = Description of Artificial Sequence: Synthetic coding sequence
  source 1..1728: mol_type = other DNA
atgaagagattcgccttggagcagcaacgccaccatgagaaaaagagtatttacaacttaaacgaagatgaagaactcactcactacggtcagagccttgctgatattgagaagcataatgatattgtggatagtgactcagatgctgaagacagaggcaccctgtctgctgagctaaccgctgcccacttcggcggcgggggcgggctactgcacaagaaaacccagcaagagggcgaagagcgagagaagccgaaaagtcgaaaggagttaattgaggagttaattgcaaagtctaaacaggaaaagcgcgaaagacaggctcagcgggaggatgcccttgagcttacagagaagttagatcaggattggaaagagattcaaaccctgctttcacataaaacgccaaagagcgaaaacagggacaagaaagaaaaacccaaacctgacgcctacgacatgatggttcgggagttgggcttcgagatgaaggcacagccctccaatcgtatgaagactgaggctgagctggcgaaggaagagcaggagcatctgcgcaagctcgaagcagagagacttcgtcgtatgttaggcaaggatgaagacgagaatgtgaagaaacctaagcatatgtcagctgacgatctaaacgatggcttcgtgctcgataaagatgaccgccggctcctgtcttacaaagatggcaaaatgaacgtggaagaggacgtgcaggaggagcagtcaaaggaagcatcagaccctgagtccaatgaggaggagggcgatagctcaggaggggaggacaccgaggagagtgacagccccgatagccatctggacctggagagcaacgtcgagtctgaggaggagaacgagaaacccgcaaaagagcagaggcaaacacctgggaaaggcctgatcagcggcaaagagcgcgctggcaaggccacaagagacgagctgccatataccttcgcggccccagaaagctatgaagaactgcggtcgctgttgttggggcggagcatggaggaacagttgttagtggtagaaagaatccagaagtgtaaccatccatccctggccgaaggaaacaaggctaagttggagaagcttttcggattcctgctggaatacgtaggggacctcgccaccgacgacccacctgatctgacggtcatagataagctggtcgtacacctgtatcatctctgtcagatgtttccagagagcgcctccgacgcgatcaaatttgtcctcagggatgcaatgcatgaaatggaagaaatgattgagactaaaggaagagccgccctcccgggattggacgtactgatttatctcaaaattacagggctactgttcccgactagtgacttctggcacccggttgtcaccccagccctcgtctgcctctcccagcttcttaccaagtgccctattttgtccctgcaagacgttgtaaaaggtctgttcgtgtgctgtctcttcttggagtacgtggccctttcacaacgatttattcctgaattgattaattttctgttgggcatcctatatattgcaacaccaaataaagcttcacaagggtcaactctcgtccacccctttagggctctcggaaagaactctgaactgctggtggtgtccgcacgggaagacgttgccacctggcagcagtcttccctgtccctgcggtggtggagtcgcatccctgatctgaggtag

SEQ ID NO: 126715 - DNA, 2304 bp, synthetic construct
  misc_feature 1..2304: note = Description of Artificial Sequence: Synthetic coding sequence
  source 1..2304: mol_type = other DNA
atgggacggcgtagccgtgggaggcgcctgcaacagcagcagagacctgaggacgcggaagacggtgccgaaggcggcggaaagaggggggaggcaggctgggagggtgggtacccagagatcgtaaaggagaacaaactatttgaacattattatcaggagctgaagattgtccccgaaggcgagtgggggcagtttatggacgcccttcgcgagccactacctgcaacccttcgcattacgggatacaagagtcacgccaaagaaatccttcactgtctgaagaataagtatttcaaggagctcgaggacctggaggtggatgggcagaaggtcgaggtgccacagcctctctcttggtacccggaagagctggcctggcatacaaatctctcgcggaaaatcttgcgcaaatccccccacctcgagaagttccaccagttcctggtcagtgaaacggagtctggaaatatttcccggcaggaggccgtttccatgattcctcctcttttgctcaatgtaagaccacaccataagatcctagacatgtgcgccgctccagggagtaaaaccacgcaattaatcgaaatgttgcacgcagacatgaatgtcccatttcctgaaggtttcgtaatcgccaacgacgtggacaacaaaaggtgttacctcctggtccatcaagccaagcgcctcagttctccctgcatcatggtggtgaatcacgacgcctcctccattcccagacttcagattgatgtggatggccgcaaagagatcctgttctatgatcgcatcctgtgcgacgtcccatgtagcggcgatggcactatgcgtaaaaacatcgacgtgtggaagaagtggactacactgaacagcctgcagttacacgggcttcagctgaggattgccactcggggggcagagcagcttgcggaaggcggaagaatggtctattctacctgctctctcaatccaatcgaggacgaggccgtgattgcctccctgctagagaagtcagaaggtgcgctcgaactagctgacgtgagtaacgagctaccaggactcaaatggatgccaggcattacacaatggaaggtgatgaccaaagacggccagtggttcaccgattgggacgctgtgcctcactcccgccacacccagatacggccgacaatgttccctcctaaggatcccgaaaagctccaggctatgcacttggagcgttgcctgaggatcctgccacaccatcagaacaccggtggcttcttcgtcgctgttctggtgaagaagagctcaatgccctggaataagaggcaaccaaaactgcaaggtaaatccgcggagactcgcgagagtactcagctgtcgccagctgatctgaccgagggaaaacctacagatccctcaaagctggaatcaccctcctttactggaacgggcgataccgaaattgcacatgcaaccgaggacctagaaaacaacggttccaaaaaagacggcgtatgcggtccccccccttcaaaaaagatgaagctttttggctttaaagaagatccgttcgtctttatccccgaagatgaccccctttttccacccattgagaagttttatgccctcgacccatcattccctcggatgaacttgttgactagaaccactgaggggaaaaagagacaactgtatatggtgtcaaaagaattaaggaacgttctcctcaataatagcgagaaaatgaaggttatcaacacagggattaaggtctggtgtcgtaacaacagcggcgaagaatttgactgcgcttttagactggcccaggagggaatatatactttatacccgtttatcaactcacgtattatcaccgtgtcaatggaagacgtgaagatcttgctgacccaggagaaccctttctttagaaaattgagctcagagacttattcgcaggcaaaagatctggccaaagggagcattgttcttaagtacgagcctgactccgctaaccccgatgcgctgcaatgccccattgttctgtgtgggtggcgaggcaaggcttccatccggacctttgtgccaaaaaatgaacggcttcattatttgagaatgatgggcctcgaggtgcttggcgagaaaaagaaggaaggagttattctgactaatgaatcagccgccagtaccggccaacctgacaatgatgtcaccgaaggtcagcgcgccggcgagccaaatagcccagacgctgaagaggctaacagcccagacgtgaccgccggctgcgatccagccggagttcacccccccaggtag

SEQ ID NO: 126716 - DNA, 1596 bp, synthetic construct
  misc_feature 1..1596: note = Description of Artificial Sequence: Synthetic coding sequence
  source 1..1596: mol_type = other DNA
atggtggttaaccacgatgcctcttctatccctagactgcagattgacgttgatggaagaaaggagatccttttttacgatagaatactctgtgatgtaccctgctccggcgatgggacgatgcgcaaaaatatcgatgtgtggaagaaatggaccaccctgaattccctgcagttgcacggattacagcttcgtatcgcgacaaggggggcggaacagcttgccgagggtgggcgcatggtgtatagcacctgctctcttaaccctatcgaagacgaggcagtgattgcgtcacttctcgagaaaagcgagggagccctggagctggctgacgttagcaacgagctgccaggcctcaagtggatgccgggaatcacacaatggaaagtaatgactaaagatggacaatggttcactgactgggacgcagtcccgcatagcagacacacgcagattcggcctacgatgtttcctcctaaagacccagagaaacttcaggctatgcacctcgagaggtgcctgcgcatactgccgcaccatcaaaacactgggggcttctttgtcgccgtgctggtaaagaaatctagcatgccatggaataaacgccagccaaaacttcagggtaagagcgctgaaaccagagaatcgacccagctctctcccgcagacctgacagagggcaagcccacagatccctccaaactggagtctccttcttttacgggcacgggagacacggaaatcgctcacgcaactgaggacttggaaaacaacggctctaaaaaagatggagtgtgcggcccccctccaagcaagaagatgaagctgtttggattcaaagaagacccatttgtgttcatcccggaggatgacccattatttccacccattgaaaagttctacgccctagatccttctttcccaaggatgaatctcctaacaagaaccacagaggggaagaagcgacaactctacatggtttctaaggaactcagaaacgtactccttaacaacagtgaaaaaatgaaggtgatcaatacagggattaaggtgtggtgtagaaacaatagcggcgaagagtttgactgcgccttcaggctggctcaggaagggatttacaccttgtatccgtttattaactcccgaatcattacagtgtcgatggaagacgtgaaaatcttgttaacccaggaaaatcctttcttcaggaagctttcaagcgagacttactcccaggcgaaagacctggcaaagggctcgattgtgctgaagtacgaacccgacagtgcaaatccagacgctcttcagtgtccaatcgttctctgtggttggcgtggaaaagcctcaattaggacctttgtcccaaagaacgaacgtctccactacctccgtatgatgggcctcgaggtgttaggcgaaaaaaaaaaggagggagtgattctaacaaacgagagtgccgcttccacaggccaacctgataacgatgtgaccgagggtcagcgagcgggcgaaccaaactcccctgatgcagaagaggccaactcaccagacgtcaccgctggttgcgaccccgctggcgtgcatcctcctagatag

SEQ ID NO: 126717 - DNA, 2199 bp, synthetic construct
  misc_feature 1..2199: note = Description of Artificial Sequence: Synthetic coding sequence
  source 1..2199: mol_type = other DNA
atggggcgccgttcccgtggccgccggctccaacagcagcagaggcccgaggatgccgaggacggtgctgaaggaggggggaagagaggtgaggcaggctgggagggcggctacccagaaatcgtcaaagagaacaaacttttcgaacattattaccaggaattaaaaattgtgcctgaaggagaatggggacagttcatggatgctctccgtgagcctcttccagctaccctacgcatcacaggctataaacggtaccctgaggagctcgcctggcataccaatctttcccgcaagatcctcagaaaatctccacatctggagaagttccaccagtttcttgtctctgagactgagtcaggcaacatttctcgccaggaagccgtgagtatgatccctcctctactcctgaatgtacggccccatcacaagatccttgatatgtgtgccgcgccaggcagtaaaaccacccagttgattgaaatgctccacgcagatatgaatgtgccattcccggaggggtttgtgatcgcaaacgacgtggataataagcgctgctatctgctagtgcatcaggctaagcggctgtcctctccttgcataatggtggtgaatcacgacgctagcagcattccacggctgcaaatcgacgtcgacggaaggaaagagattctattttatgatcgcattttatgtgatgtaccatgttctggcgacggtacaatgaggaagaacattgacgtttggaaaaagtggaccaccctgaacagcctgcaactgcacggactacagctcaggattgccactcgcggggccgagcaacttgccgagggcgggcggatggtatattctacctgtagtctgaaccctatcgaggatgaagcagtgattgccagcctcctggaaaagtccgaaggcgcgcttgaactggccgatgtcagcaacgaactccctggcctgaaatggatgcccggaattacacagtggaaggttatgacaaaagatggtcaatggtttacagactgggacgcagtcccccactctcggcatacacaaatacgccctaccatgtttcctcctaaggaccccgagaagcttcaggcaatgcacctggaaaggtgtttgaggatcctgccccatcatcagaacactggcggcttcttcgtagcggtgcttgtgaaaaaatccagcatgccatggaacaaacgccagccaaagttgcagggcaagtctgccgaaacaagagagagcactcagcttagtccggccgatctcactgaaggtaaaccaactgacccctcaaagctggagtctccttcattcaccggcacgggagatactgagatcgcacacgcaacggaagacctggaaaataatggttccaagaaggatggtgtgtgtggacctccaccatccaagaagatgaaactgttcggattcaaagaggatccgttcgtcttcataccagaagacgatccactgttccccccaattgagaaattctatgcgctcgatccatcattcccccggatgaacctgttaacccggactactgaggggaaaaagaggcagctgtacatggtttctaaggagctcaggaacgtgctgcttaataactccgagaagatgaaggtaataaatactggcataaaagtttggtgccgcaataactcgggcgaagagtttgactgcgctttccggctcgctcaggagggaatatacaccttgtatccgtttatcaacagccgtattatcacggtctctatggaggacgtgaaaattctccttactcaggagaatccattttttcgaaaactgagcagtgaaacttacagtcaggccaaagatttggctaaaggaagtattgttctaaaatacgagccggattccgccaatccagatgccttacaatgtccgatcgtgttgtgcggatggcgtggcaaagcaagtattcgcactttcgtgcctaagaacgagcgcttgcattatctccggatgatggggcttgaagtcctgggcgagaagaagaaggaaggcgtgattctgacaaatgagagcgccgctagcacaggacaaccagataatgacgttactgagggccagagggccggagaacccaattccccagatgccgaggaagctaactcccctgacgtgaccgccggatgcgatccggccggagtccatccccctagatag
